United States Patent Application Publication US 2014/0057251 A1 - sequence listing, part 113

SEQ ID NO: 208602 - DNA, 609 bp, Cannabis indica
ggacctattttcattctctttggcaatggtgcaatcaccttagccagacacccccacacttttaagtatttgtatgaaggttgtctacctttccatactcatatggtgtcttttgatctttcttttagggaatcttatttaaaagatagctgacaaaatagcttcaccccacatgttcagcagtaatccagaacttaataacatggcattcatcatctcttttaaagtgcaattttttcgttctgtcactccattggatttaggagaatacggtggtgttacctcgtgaatgattccattttgtgcacaaagttcactaaatggttctacatattcaccaccacgatcacttcttatcttaattttcttattaagttgattttcaacctcttgcttatagagagtaaatttctctacagcctcatcttttttagcagtacacatacaatactttgtactatcatcaatgaaagtaataaagtattaccacctcttgtttgaacaacttttaaatcacaaatatcactgtgaattaaatcaaagggtttagtgtctctttcaactgctttgaacgatgacctggttttttgcttttacacaagtttcaca

SEQ ID NO: 208603 - DNA, 585 bp, Cannabis indica
aaaatcttaattagccttattttaacactatcattagtattgaaaggatggagacatgttatagttgtacataaaatgaggcgaatgtggattcaacctttttaagactaattaataaaaatgaaatgattttgatgtgtggaatattaaattaggaaacacatgtggatcccatcataggactcactccaatagattattataacttgtcacatatatattattaaattatatatatttgacactgtttaagtgcatctcctctccaatagacaaatattttaattctatgcattcagcgcaaaatatcattctccaagttatttttattcaaattttttcataattaataattgacttctaaagaacaagaaaacaataataattgactgatcaacatataattcaaaaaggaaagaaaaaaaagacttccatatacatgcaaagttgtcattataaaaaaaaaaatgtattaagaatttaatagtaacaaaatataaataatattggagaatttttaaaacactttttttaatattttatttacaatcttatgacttaaaattttatttgtaaaaatacatt

SEQ ID NO: 208604 - DNA, 1022 bp, Cannabis indica
aaaaagacttacttactttttaagaaaataaaaagaaaaatgacaaagaaagaaaataatagaaaaagaaaagaaaggactcaaagaaattacattttcttggttttttttattatcctttttggaggtggaggaatacaggacaaaatagacaaaaaaaaaaaaaaaatacataagttactattttttgtaaaatatttacatttttatgttcaaagaatgtttttttacatttttacgattttttaaaaaataacacgaaaacaatataaaaatcaacaagaaaacaaaataaaaataacatacaaataacaaaaaattgacaacaaatgaacaaaattttaacataaaaagaccgtattttatgtaaataaaattaaaaaaatcgtaaaaatatttaaaattccgtaaaactatatttttgttgtttttgtgcatttgtgaaattaacccaaaaaaaagtatgttgttttctcgtaatagcatcaacgttaaaataataattttttgaaaaataacaaaaaaaaaaatatctcagtatttttgtaaaagaaaaaacattaaatacttaaaaatgtaaaaaatttactatttttgtatatctatgaaataattctaaagaaatatatattctttctattttattttttttttcattcctatttcctttctctcctattttccttccttataccaaatatagggtaagagaaagaaaaactatagtaaagcaataagccacagtcgtgcaccaaataaaacaaattttaatttaatatatgcattatacacaacacaatacaatgagcattgctattagacactagtggtgcctaatacattctcgatatgttgcgttgcaattaactaacaatactctctacaaattattatattaaactatataagatccaatacttaattgaaccaatagtgatcctaatacataaaaaagtactaaaaacaagtaccctgtaacatttctcccatacaatacatacaataatacaagatatattgac

SEQ ID NO: 208605 - DNA, 674 bp, Cannabis indica
acaatacaacctaatacggcctaacaaccaagctcttaatgggttatttatagttactctatgaaaatcgggtgcaagattggtcattttacagacataaaagagatcagatttagaacgaacagaatataacaacaataatagtaataaataatataaaaaaaaaaaaaaacaagcaaagcaaataacagagagagaaaagagataatgatcagagaccttacaaccagatttgcccaaagcaagagcaattgccctaccgatccctctcgaagccccagtgacaacaaccacaggtccctccaaattcttagctacagaagcagcattcgattgctctacggctgcaacctgagccctgatacctgagaaagaaaacaaaaactcattgaatcgtgtaaaatccaatttagattgaaaagaagtaactcagattaaaagaatgtaggattttaccagaggatgaaaatgataatgaaggtgtgcgttggaaagaaagaccaggatgaagctgagtcgacgatctaaggccaccgaggagaggagaagagcagcgaaatgaggctgaaagtttagccggagctccgacaacgttgaaggcaatagttgcggccattgagaatctgcgagagaaatgtgaaagcacagtcgccagaagagagagagagagagag

SEQ ID NO: 208606 - DNA, 566 bp, Cannabis indica
tatatcattgaatgaaaaaatattactttttgtgtacttgttttatattttagattctgtgattttgtcaaaaatattaaaatagtatattggagatttaatttcaatcaaaataattttaaatataaaattaatttttacggtttgtggtaatagaataagttaagtaaaaacagagaaattgatggaggacaattaaaattattttttgaccaaaataaaatagagagagactattattttgatatgttttgtaaaattccaaaaaactaaaataataaaatatagaatccggaccaataattgaacaaattacacgaattaatcaaaaacaatatttttcataataagaattggtaacaagtactaagatgccaaatcataaatactattgtagaaagaaataataaagatagggaatagatagttgcattattattggataaataggaagttgaaatgagagaaggaaggtataataaggaagagggatagggagagaggagggatcgagtgggaccaatggttggtgaccaaacggattcgaaaattacagaagtggacat

SEQ ID NO: 208607 - DNA, 1791 bp, Cannabis indica
aaaataactaattgatatattatttacctcaaaagcaaccaaaaggttgttttttttaaaatttgcaaaacactgaaatttctggaagcgagatttttttattttttttcaattttcggtaattattttatatttcggtatttatgctgacgtggcaatcggtatttgtgcaaataattttcttaaaggtatttttataaataaaatcaattttaggtataatattgaaaagacccctatatattatacatgtagcaattttatataatttataattcttattctacttactcttacttttttttatggtaatttattcaatttttgtttgtatccatccaaagtattttgaatatatagattcaattaataaaaacatgatatatgaacttatggagtataagaaaatatatcttatttgtttagatatttattatatttactcatatatttattaatcaattcttcttctttttctttatttttttaaaggtttttttaaaataaaaaaaattagctcaatttcattactatattcaaccgagaaattaaatttaagacttataagagaagatgtagttgcttagtaaagcctaaaactatctatgcttaatgttacatatttataaatgataaacaagaataatgataacaatagagatttcaaaaattgagaaataagtctcatacttttcatgagtataaaaaaaatattttttaaaaaatgataaagatacaaaacactttaaggataatgaaggtaaaatcacaatatatatatattttaaaacaaaagaaaaaattataacaaacacaaccctactcaacaacacatattaataccatacaatgatagaggtgaaaactctctttattttactactatgtaaaacgacagaaatgccaaaaaatcaattaggttaatacaataggaagtatatatagggcaagagaagaggaagcccgtgaagcaaatgggctgaaagtaatgggccagctaattctaataccccctctcaagatgaaatatatatgttttttaagttcatcttggttacaatagtgtgaaaatagcttgggaaaagaggcttggtaaggatgtcagcaatgttatttttggtggtgacatggattagctttagtgtgtcctcttggatcttctctcaaacaacatggcagtcaatctcgatgtgctttgtgcgttcatggaatacggggtttttggagatgtggatggcggcagtgttgtcacaataaaggatagtaggatctttgtgatggatgtcaaagtctcgaaggagtgccaacaaccaggtgatctcacaagtggcatgagccatagcccggtattatgcttcaacgaaagaacgagaaatggtaggctgctttttcgatttccaagagataggtgatctgccaaggaagacacagtaatctaaaatggaccttctagtgtcactgcaagaagcccaatcagcatctgaaaaaattttgagatcaaagtctatgtttgacatatcagtttcagcataagcagataagttagtggaagatggtgagtaaaaaaatagcccttggccagaggtacccttaagatattgtagtattctatgagcagcagtgaggtggggaaccctcggattggatagaaattaacttagtttgtttacagcaaaagagatatcaggtcgtgtaatggtcaagtaaaggagtttaccaatgaggcgacgatagatttttggattttctaatggtttcccaacatcgaatgagagccgaatgttggattcc

SEQ ID NO: 208608 - DNA, 900 bp, Cannabis indica
gtaagaagagagagaaagagagagaaagagcggtggtgaagaacccgtatgtttttatagtttttatttttattattttccaaaattattttgaggaaaaatagcctttttcatttttttctctttttagaaattttgcatgtggacaacaaaacacaaaaaataaaaaaatatatattattaaataaaatgtatgatatttgattggttagatgtgtgatctgaattcctttttggggttggagaaacaatttgtaaattatatttttaacaatttgtcatccattctaagtgcactaagtattaatttatgtacaacttaatggtcgagcgacaaacatgaattgaagatatcttgaaaaaattagacaataaattaaaaatgttatctattaaagaacccagctcattacaaaaaataaaatttctcgaaaagctaaagtcaatactaagcatttaaattcgagcgaactaaaaagtaactcaagagtaagaggttagtccaacgcaaccattaaacttacaataacagcaaaagtcccatcaactctccatgaagttgtaacttcaattccttgagttctacgagagccattatacaaagttccttagaaactggctccaatccaagtgttaaatcaattacaaaatatatttctcgttgtgatgataactttgcatgttcttctaggaatacatctaaaaactcttgtactactttgatatcttcaggtagaattgactcgtgccaagtggtatctaacaccactgctagaaaccatgtgcatccctcctggaacaggtctctagccttcaacactgatatgtacatttactgaggaagacctctaactcatggcttctgtagcttattcaatctcttacctacaccacaaagca

SEQ ID NO: 208609 - DNA, 442 bp, Cannabis indica
aataagcataatccaaccaaaaacaatagttaaaactccctggatacaaattcaccattaaagacataagtttgagcttgaaatctcaaactttggtcttcctcaacaacaacaaaatcagcttaaaaaaagcttaaacaactcataagcaaccttagaatcaaaccacaacatagcttaaaacttacagcattaaaaattcaaacttgcatgcaaacctattcttaaacttgaaaattcaaagataaaatgaagaacaagtttatcttgagctataatcttctaaatcctatgaatttcctagccaaaactcctttgaatcgctaagaaaaggatgaagaaaaatttggttcttttgtcctagggtgatggagagagagagagagagagagagagagaagagagagagagagagagagagagagagagagagagagagaga

SEQ ID NO: 208610 - DNA, 628 bp, Cannabis indica
agtatttttattactttattctctttctctcttttcactaataattcactgaactctcttacttttccaagtacctaaattctagtacgttctattttagctgaccaaaatgagatgaacaatcgagttcttctgtccatggtggtttccatgtaggccaatatcaataaatttgtgaaagtgatgtatatgataaaaaataatgtgtaactgggaacttcctagaaaaaaaaaaaactaattggacattgaaaattgttcattttatttattaaatcacggagcactacaaaagctaagtattgtattatctgttttaggtttcttgtcttaatttggggaaaattatcatttttctatagctaaatttggcataatattggtcaatgcagaatttacatcaccataactattatctatatttctggatggacaacacgttacattttcaaaatataattagtctgcataagtttaggcccaagccttcccacattaaaaagcctagtctagatcgaagatgggcccgagcccatctaaactccaaaagcctcacgtccgaggacgaggcccctccactttcaaaagaccgtccaacattccaggagacgaaacaaacgaagccttt

SEQ ID NO: 208611 - DNA, 800 bp, Cannabis indica
tcaaatttaatactaaactcatctttcaaatttttaatactcaataaaatcttcttctggtcctcttgtatacaaaccaaagtcgactcccaacttagaaaactgaaaacaaacaaacaaaaaaacataacaaaaatttgaaaaacatataaaaaaccaataaactaaaaagaacaaaacaaaaaacaaaaagaaaagaaaagaaaacataccttcccatcgaaacctggaggtttctttagaagataaactggttcgaacttgaggttttgcattacagatttcttcagctcacaagcaacaggatagaaatccttcacagtggcttgaaaaaatgggaagagataaaacatgttaaaaaaaccagttataaataaacaatgaaaaaaaggaaaccacttataaaaaaataaaagtacctcgggattgttaaaaacctcagattcaagttccgaataacctccaatttttttcttgtatgtactctcccagtttagcaatcgaggatatgtattcacaatcctcttgtagtacttaggagaaaggcttggaagtatctcaaaaaaccaaataaggaaagcaaatggaaaaccttgaaatttaaatgaataagacttatccttttcatctttggccttctcgatcttataaaagatattgtcgccatccttaaaagctaaattcatgtaatgaaaagttctgtcccacaataatttcccaaatgctatattcctcaagtcttacagctccccatcgacgaacccaaacaattcattgtcaactttcttcccattctcata

SEQ ID NO: 208612 - DNA, 852 bp, Cannabis indica
cacagtatttttgaaaaaattctgtgtgacagtattttgtaaaaattaatctaaatttcagtaattttttgtaaatttttctctaaatataggtgagactaaaatatttttcattttattaatgttaaggtcattgtcattgtagagtatacttcagtttttttttttttttgaaatgggtggaatatacatcattatattgaagaaaaaaacaatttaaaggagtgaaaacaatatttaaaattttatataaggtatttttagaactccaaaactaaggatgtggtttttttttcttttctttttgctggataactagggatttgtttgaacaacccaaactggctacttgctagggatttggtcctaattaatgaacccaattatctggccacatgaccatagagtctaatgtacgaaatttgacccttaaaattgtattagctttgattatttcagttcatatttagaacaattttaaaattgtattagattcgctattagacacagtaatatttagcacctctagacatgtcgtcttggctagcgatatttcttataaattattatattaattataagagacccgatacttaattagactaataacaatatttacatataggagaatactaggcatcattagtatcttttagcatttatcatataataaatataagtttttgaaataatataaacattgattaaattaatgtagttgaatttgtatcttttgttttcaacctcgaagcaaagaaaaacaaaaaaaaaaatattttctttatttttttcctactagattaaaaaaaaagaaaaaaaattaggattgatcaaataaatcatgctgcctat

SEQ ID NO: 208613 - DNA, 1845 bp, Cannabis indica
gtcgaaatttgctcgacaacaccatttgcttttcttatttggttgtttgagatactgccaagccatagtcctaagtactgcaagagtattgctaataaatatcctcgattgctgaactgggagagtacaaaaaagaagaaaactggagattattctaaacttgtgtcggaggttttaaaccatcctgaggtactttcaaattttataactcgtttcctttttttccttattttaactgattttttaacttgtttttttttctattttgtcaggccactgtgaagaatttctatcctgttggttgtgagcttaagaaatctgcaatgcaaaaccttaagttcgaactattttatctatcaaagaaacctccatgtttcaatgggaaggtatattttttggtgtttgatgttttttaattttgttatattttttggtatgttggttttcagtttgctaacgtagagtctgctttggtttgtatccaagaagaccagaagaagattatgttgagtattaaaagtttgagtgatgagtttggtattaagtttgatgaagttattgggcttttgaagagtaagagtgggtcgtctatgcccaaagatgtggatgataaggctgaagattcttattttgtgaatcttgatgtcggtggaaatgatgttgacttaccgatttcattgtccctggaggtattttttcttcattttgttgttgtttcaattttttataactggttattttactttccatttttatttttgattttttttgatttattttatgttgtataacaggttattttttttataagttcttttgattttttaagtatttttctttttttgaaaccggctatgattatatttttcttttttttaggtatttttgaaatctaatcttcctgattatgatgatgactctagaagactgcaattttcgattgtacgagaagataaggtggtttgtttgttcgttgttattagtgatgtcattattataactggttatttttagcttttatgtttttttatttgtgtttatttataggttcattctggttttgttgaagggaatgatgagggttttctgtttacttatgatcgtgttgatgtcgaccaatccattttggatttggttgacaacctcactcgggcatatgcgtcttgtataagttaaaaaatgatcaatgtgagttggtttcaattcctgaatctgcatcccctcctgttgatgatgttgaagtactggatgtagtacccttgcattctagggttgctgtcaacagacaagcaaaacctggagtgcattgtaaatctctgtttgtgaatgagtttggttcttctgaaccaaaagatcagaagaagaaggacacggagccatttggtgaagaagaagtcgatcataaggagatgtttccttttgtacgacagattgggatgaacatattgttttttttttttaaattataacccgtttttttatgtttccttaattggccaaggttctttgaatatttgacaaaatgtcttttatatatactaagtggcttctttgaatcttttattgattttcatgcttgttgaagctagtatgatataattatttatattttgtaagagattaacatttttttttttatctatttcattctattggtttagaattttacccaagtttaacttttcatttttattttatataaccggtttcattttagttaattttttttaattaaccggtttcatttcaattaatattttctttttctaatgttgtttttttattttgaaccggttaatatttaagtggtcttttatgtattttgtttaagtttattaacttgtt

SEQ ID NO: 208614 - DNA, 509 bp, Cannabis indica
gggttgtttgccaggggcaatcaccttatttgggtttgggaatagtgaattatgtgttgatagattgaattacgacgctatttcattcaatacaagactaaactcaacttcccaaagcttaagaaacagattatctggcttgaatttagttgtctttgacatataccaaccactctacacccttgtaacaaatccaatgaaaatggttagtatttataatacatgcatgtaaaaaatatatatatttatatttatataattaattattattgttgcaggattttttgagacaagaaaaggttgctgtggaagtggattgttggagacttcattgttgtgcaatgaattatcgattgggacatgttcgaatgcttctgattatgtcttttgggatgcttttcatccctcccaaactgcaaatagttttcttgcccaaaatatgatccaagctggcatttcccttctttaccccagctctagctagcaagaaaattaataattacttagaa

SEQ ID NO: 208615 - DNA, 624 bp, Cannabis indica
aaatctatatcttggtaaaataatccccatcaattagtatcagagccatggtaataatttactttcatgaaatatggatttaaaacgatgtttgtgttgatttggatgtgtttatgttggtttatgtgcatatttgatgattgtatgcaaattacaatttacaatgttaaatatttttagttacattatgaaattatttttcctgaaaagtagataataaattaataaatttaggctaatatagaacttaatttagattttttatgaattagttatgatttgaaaacaaaatatctaagggtgcatgcctacgtgcgcgcatggaggggacacgattgtgtcatgtgcagctcgctcagacaaaatcccttcaaacaagggcatgtctgaggcatcccccctacctgaccgagatcccttgcccatggaggttgcatgcagccttgtgtctcggccatatgcccactttcgcgcgtgtaggggtatgcaatgcatacccctgtgcccaattttatttttgtgataacttttgattcaaattccatgaaaattcttgcagactctcaactagagttcatgacttatattactcagatgatataggaattgaaagacataaagatt

SEQ ID NO: 208616 - DNA, 547 bp, Cannabis indica
cctatatataatttcattttcgtaagtagaaactttcataaatcaattacattttgtatttttgattattttttatattatactatttagttttttttctcttaatttttttttaattttattaattttttgatataattttcataactggatgtcttcatttaggttttattttgtgattaaagttcagtagataaaaatactaattttttaacagtgaaagtaacagatgctaacagaagaaacataattatataactgttatattttatgggaaatttttagcaagttgtacgtatattttagagtgcaagatcatatagtgttaaaatttcacgagacaaaaatagtaattattcaaaattaaaatgagtactgtcaagtggtcatacaatataatttttccacttattttttttgtaaacaaactatatattacaattttgtaaatgatatttatttacgaaataaagaatagttaacagtgttacataattgtcataacagaatttatgacatcgattatttgctaataccatgatataaa

SEQ ID NO: 208617 - DNA, 940 bp, Cannabis indica
ttagagatgaggtcaattttagaatgatcaaccttaatccctcttttagaaaaaatgtggcctagcacaagacctttctcgttgcatcgttttaaaacagcttcaagatggagaaggcatgtgtccaaagattttccaaagacagttatctcatccatgaaaacttctatggtttgttcaatcatgtcactaaaaattctcatcgtacatctttagaaagtggctggtgcattacacaattcaaatggcatacgccgggaagcatgtgtgccaaaagaacaagtgaaagtggtcttttcttagtcctctaatacaatctcaatttaatagtaacctgaataaccattgagaaagtaatagaaaagatgaccagcgacgcgttcaagaatttgatcaataaatgagagcagaaaatgatctttacgggaggcagcattcaatttttgataatcaatgcacatgcgccaacccgtcacagttcttgtgggaacaaggatcccttttcattttggaccacggtaacacccgatttctttggcactacttgaactggactgacccatttgtcgtcggccaccgggtaaataatagccgcatcaagaagttttagtacttcatttttctccacttctttcattggtgagttcagtctcctttaagggtcccttcgtgggatagccttatctttcagattaattcgatgggtgcaaactcgagggctaatacctttgatatcaacaagcgtctaatttattgcaagtttatatttttgtagtatctcgagtaactgcaattcttgataaggttgaaggttggacgagatgataattggaaagatttcgccatctgccagaaaaacatgtttcaaaccctccggaagttggttcaattgaacatttggagtttcttcggcaggagattttagtgtttccctctcacg

SEQ ID NO: 208618 - DNA, 595 bp, Cannabis indica
tccttgcgcagggccatgctaattttctctatatcgttccaattttatcggatgtccccgaagggacattcacatatacttagttacttataatttatgcatcatactagctatcataatagtaaatgaaaaagaaaaatatttgtctaaaattttgaaaataaattttaatagttgtttgtaacttaagatgactaagaacaaaaaatgcttcaaacaaaaatgttattcattttgtgtggaatagtgaaataattatattttctatcccacaatcattttgtttttctaaccatatgtgtttggagtggtcggttaaaattagaaaaaatagacccaagttccctccgtccttttgcatttataattttatatttattattattattattaaattaacgatttaatttgttagtttggcgttaacttttttgtatagagaaaaataataataaaaaaaattaattattgaaattataaattaacatacatctaaaataattgagaagtgttaatggtgtttaacagaggagaacccgataattttgttgttaaaaaattaaagagtaaatgtaaaaattaaaacataataaaa

SEQ ID NO: 208619 - DNA, 748 bp, Cannabis indica
tacttatgcaactatttacccttaattaatttagtttataatgttgtgtaaatagctagcatgagcagaagtataagtagaatttaatggaaaaagttagtggtacaaataacccaataattaatatgcagggtaggggtataatgtgtgggaaatatgtcatgtcctatatagaccatatattcgcataaatatcacagtcacatgcatgcacatcataccaaacctatggttggtgaacttttgtagtcaaaattaatccaaccggatctcatatatttatattcatattcataatttaaatttggttatatacatttgtaaaaatatgggtttctttaaaaaaaaaacaaaagttgaaaaattatggaaaaattaagaggaatttggtactcttatgattctcactattaatgaataaccaaatactttatgtttttttcaaaaaaaaaattgctatgaaatatttttttttcttgagaaaaaattatatttttgtaaatttatataattttttttattttggagaagggaaaattcgaacttgaaacctcttctttataagcagaagtatggaattactaggctatgtctatcaccactacaaatttatactttaaaaccataaaaataaaaattatcttttatttttttataattgcgtatgttatagatatttaagaacacttttaaaaattttaaaaaattctgaatagtctaccgtatcaaaaataaggttcaaacaatt

SEQ ID NO: 208620 - DNA, 516 bp, Cannabis indica
tattagcttaaatttctgaccccaatagtttgtttttcttctggtaattagtgctttaaacgattttcgatattttggttgcttaagaaacaatttttttttaattcatgttcaacgaagaatgttaaacatctttcaaaaatagttcatcatcactttatggtccaattaaatggggtaacaacaattctgtctcacatgaaaagtcaaaactttcattggcagttgtttttactacacagtgccacactggaaattagaaaataatagtttgtcaatcagaagaattgtttgtaagcttcattgaattaaccacttccatggcatctcattttgatttattttctatgtcccaaagtcagaattaatccttttccaagttggccagttctggtgccatttggcaaattttccacgcggcaatggtcaacatgttggaccatttgaccattacaattttgattgagcactaatcaaaaagtaatttatggtataaatatttagtttaaacttttg

SEQ ID NO: 208621 - DNA, 513 bp, Cannabis indica
tctttttttttttaataaataatcaggctcaagcattagagtgccttctttttgtaggtaataccatttggttcaaatgaagaacacatcctcaaaagttgattaagtaagatagaagtgtgattcaatagtctatttgtcttagaacgtgtgtacatgtacattaacatggagaataattctaagtgtgcaccaaataatattagtaatcttatcctctaaaataatgtatactgatttagttgactgtttttgtcttgaccttgtatattattaggaaaagataacatataatcatgtttgatttgatgttccttttaattggtttgttgggaatatttgaaaaagttattattggtttggtaggaattttttttattttaatttttcaaagcttctcatctttattggggttgagttgcatcaagttcccacttcaattagtaaaaatccatgctttagttgtttgatacattagggtaatctatatctgaaatttcatgtttcaatatg

SEQ ID NO: 208622 - DNA, 1328 bp, Cannabis indica
ggtgcaaaccaaagaacacccccatcgtgatcatcttcttcctcctcaccaacaacaaccctatttcacataccataactcactatcatgtaataaataacgttaaaattacagaaaagaacaaaaacccataatctcaaatcgtcttctcccaaaaactgaaaaaaaaaaacccagtttatttaacccaaaaaaaatcctcatctataatatcttgaaaaaaaaaaatgaatgaaaaggtaaaaaaaaaaaaaaaatacatagaagccttgaaggattttcttgagtgcacagaaatatcatcgtcttcctcttgtgcgattgcaacatcatcgtcgtcctattgtgcgattgcaaccccagcactcaagcttcccagatccatatgtcgttgatgtccatatctcaaccttgtctccgtctggctctgagcagagagaaatcgagaaagagagggactgagagagtgtatcgagagagtggagagaactcaagcgagatcgagagggtgaacaagcttcgatgtggtctgacgcttgcgatcttgggggtggtgggaatctcgtccatcggttgtggtggaatggctcacggaggtcggacggaggtgcgccggaaaagaaacttgggtcgggcggaggtgcacggagaggaaacctgtgaggagagagatgagaatgatttcagttaggtttgttttgttaattgatgtggaccaatgcgaagatgacatgtggacacttacatatcacttaacttaagacatactgtaaaattttaagaaattcgaaaaagaaattacacactgaaaacaggattcaaacagacgtattgcacgcatggctattttattgtatacaagcgtaaaatagattgtttaaacactgttttttattataaattactctataaatttctcaaaatttttaaaaatatcttaaataactataaacacacaagaatataaaaaatattaaactaaaaaattattttgaatactcataaaaaatgtatcaatgcatcttgcatcttttttaagggacgtgttgtagaatcaactatataatattttattaaaaaaattataataattagaaaggctatacgtagactgaatagaaaacgattatagtatgctacttggtgtaaattaatcatttaagactgatattttcttgttcaaacttcggtagctatgtatattaactcaacatatataatacaatttaaaatttaaattattatattatgactataggaaactcacttattagagagagacaagaaaataatatagaattttgactttattatatatcttttactat

SEQ ID NO: 208623 - DNA, 803 bp, Cannabis indica
aagttggctaccgtctcggttatttccattgacatgaaaccttgcccatcatagtacagctttagttcttcctggttccactctttaatgtcacctctccatgccttggagccacctccacttgtcaagaactggatttgactgcacaatgatacaattctaacatcagttgctgagttctttacaaatttattctttacttgaagatcaagaaaaaacagttaccttttagtgtcaattatgtgttccaagcaatggtcatggccattgacatagaaatcaacattgtttgcctgaaacaaatagggtttagaatatgagtttggagtaaaattttagaagaaacttttcattttattcaatcaatacctcaagtactgggagaagttgtgattcgagctcttcggtatttccatggtgtccggcgcttttgattgtgtgatgaccaaccacaattttccactttgcagtagaatgctttaaggctgaatccaattcctgttcttgcaaagccattatgaatatgaaagggaaatttgattttttatgcttacatttgttaaattttttttttctaaataaataataactaatatttgttggatatgacaactttcatgatatccctaaaatatccccatttacatcacccccatttacaccatcggaccacccactcgggtcacccatccggaccatctatttggaccccatcggacccatccatcggacctactcggaccagatctgcttactttaaaatttttttttttttttttttttttttttcgtttttttttttt

SEQ ID NO: 208624 - DNA, 518 bp, Cannabis indica
ttggagtggtaggagagagaagtagagaaagagagagagagtagtggggtgagagaaagttgaagactttaatgcttgtggtgctaatatgactatgaagctcaaagctttaatattcatcatcatcatcaccaccatcttcctccttccgcagaactcccatctctatcgtctctcttctccgacacaagtcccatcaaaatcagacacaccacatcactccacttaattccttcgaaccttcttccctctccaaactactctcctccattaagcccctttcaatttctctcgattccttcctcgttctctgtacctccctagctttgtctttttccctctgcatcgccgatgtggacccggcctccgcatttgtggtcaccacgccgaggaagttgcagtccgatgagctcgccacagttcgtctttttcaggagaacacaccttctgtcgtttacattaccaatcttgcatccaggttcgactatgctcaactctacttgttttttttttttttt

SEQ ID NO: 208625 - DNA, 905 bp, Cannabis indica
ttaaataatttggtgtcccatagcaatgttattactattttaaaaaaaattacacaactttttttttgggaatttacgattcataaataaccattaattacaaaagtcaatttaagaacactcataacagatatttaatctttctctgaagaaaaaaatattcaaatttatcaaaaaaatatatcatgcaatgattttttattttacaatgttaagcagcattatttattattttaaactttcttattacttttttacttttaaattttcttttttatacatatgtatattaatattatatatttaaatgaataaaatatatcaaatctaaatgatgtaaagaaaaaataaataaaattgatggaagatgtgttggttttatggtactaaattaggtgtgctcggaaacttaattatgattatcatcatatcatgctcaagatctccacatgtatgcaaggaaagggacccctgattggaaggtgtctagcattttctattctattgttaatgtaatgaaagagtttctgtttgttcgtttcttttttattaaccgtagtttcaatactttggcggatggtattgctaaaaatgctagaattgctagcgaattagttgttttgtatcaaggggagggtaatccccctgtgattcccatcgactttcttaatcaatgaacatgtagttctttaaaaaaaaattagaaataaaagtatgaatagaaacatttacctcttgaaatctatcaagatttttgtgtttcttttcgcaagatgtatccaagaatgtgttgacggtgagaactcgtcaactaactcgctggtcaaaaaatcaaacttgactacaaaatcagaactaagatgaagaagaagataaaaatacaacttcaagtgtttatctcaaaa

SEQ ID NO: 208626 - DNA, 510 bp, Cannabis indica
tttgtttttttttttttttttttaatttaagcatttatgtatatttcatactacataaattaacatagtacagcctattatcaataaataaaataaaatgatcaatgaattaaaactaacatagtactatatagtatatctgcatgtcttataaaagggcttccaaatatttatgttatatatagcatagggtgaatatgtaaaataaccctaatttgaaaattagttgcacatctatttttcgggtagacaaataacttatttaacttaaaaagatcctttctttcttttctaaataatatattttacattaattatttcaataataaaattgttaattattataatgtcacgaaatcccccattagctttcagggtctcctcagctatgtattgccttaatattttggtatgtttggtttataatttttgttcaaattattttaagaatataaagaagaaaatatgttagtgcctaattatatccacggtatatagttaatgagaatg

SEQ ID NO: 208627 - DNA, 781 bp, Cannabis indica
tggaatcataccagattttctcaaacgctggctctccttaccattaattcacaactttctgtaggagaaattcctaagcgatcaaccatatctatttcagctgcttgagctgtagtcactcgtcgatgtgatctatgtaaatgactcttattaaggctatttgtaacatgagtatgctcaacaataaatttaacaacacgatattgattagtttgtcaagagaaaattttcatcatttctaaactatcaaatcttgtttttgctctatgacgtatcacttccacatcgcgcttattttttttgaggtaatcttggcatgaacaacaaaagattctatctatcattctactattcttgttatctttttgttctttacttttacgaatactaaatccaactttataaacgtaagtattgtaaaaatcatatgtgttctcttcagtttaaaactccatactcacttttggtattacctcatctaaaattttagaaagaatcaactttattcttgtttttccatccaaatcgctactacaatgtattctccaataaaaacttaatttgcactatgacaagtaaacttatttttttttttcacaattcatatttaataaattaatgatacaaataacgtcaaattaaaaataaacaaaaacaatattatatatactggaaaattcatgttctataacataactcttttctttttcttctttcaactcaaaagattatcaaaattgtgaaataagacttcttagtgcccatatatgtagccactcct

SEQ ID NO: 208628 - DNA, 1677 bp, Cannabis indica
tgaagtacactagaatgaagctacacgtatgataattgctacaatgatccagtagaaataagatctgagccagcaaaacctttaaagtatttgatagtgatgggtcagaagaagtactagcctcagtaaactgcagtcctgaggtacttggcacatcatcatcagtggggtcttcagtcttgctttgtcttgcattagcaagacgcatttctgtaaaggggttgaagaaatttattataaatcggaagttaataaactgattccgcattggcactcaatgcttccccttttatttaaattgtgagactaatcagccaacggtggcagaaaaaccattatatttaagttactccataagttctgcagcagtagcactaccatacaatacatacaccatcattatttaattctgcatttgcaaaaataacacttctaaggtacaaataaattaaacaaatcctaataccattttgtaaaaaaagctatggtgtgtttctatttgtaatcattactaatttagaactctaaataaaaccatcaactgaataaattcatggagcagaaactatccactctaccttacagcttatcaagtgtactgttaatcacatgttccactagaacacaagtgatagtcaggattcttacaatttcatctaaactaattaagttattccttactttagcaacaagctaactgtagtaatttagtagagagtcaaagaaggaatctttttacctgtctcattatcagtatcagggccttcataaatctggttctgaaacgacacaggagcaacactctcatagtgaccatacttattctcatccttaacccaatcagcactataacacttaaccaactccttaatatgcggccactgctctaaattctcctcaaactaccaaaaaaaaaaaaataccacaaacatttccaaatttaaactcaataaccaaaagaaaaccaaatggcatttcttgatgattaacaaaaaaaaaaaagcttatcggaggaaatcccaatcaattaccttgttctgccatttagtggaggccgaagtggaatcccggcgagggcggaggtgcaacattgcagatctagggtttatttcttggaaaaccataatggggtaaaattttctgcgttgttatcaaactttgatttttataaaggtgagcgtttttccattttctcttttctttttgataaagtataaaggtaagctttttaatatatatatatataatatataaaggaggaaggggaatcgaagttgaaccactataaagataaactccaccgttgaagaagaaacccatttggaaagagaaagaaaggactaagctcaaagcttaagcttcagactcaaactcaaactcagaacaaagtgaggtaagaatgatcagaagagcacagggcactagtcaaagtatagtccaaataaaagggaaaaaaatgtgaaatttgcaaaactaactagctatgtggaatactaataaaacaataataatttattttcttttgtacaacaaaaaaaatagagaattgctaaaagacattagtagttcttaacatacctcttacgtgaagttccatataatttaatattaatagttttttagggagttatcgctagcaattcgcaacgcaacaagtcgagatagtctaaggcacca

SEQ ID NO: 208629 - DNA, 782 bp, Cannabis indica
agtggagattccattcgccgccggtttcttgatttttatgcttctcgaggtcacaaggtgcttccaagcgcctctcttgtaccagatgatccgacggttctgttgacaattgcggggatgcttcaatttaagcctatatttttggggaaggtatcataaccacaatgaatatctcaacattcaagatggtagaaaccgttttatgaataaaagatgaacaccatgtatgcatataaactttctttgcatcgtgtatctgctaagctagattgtaaataccattttctagattatgatactattctcattttccatttttcttttgttatttttcatgaataatcttcatagcttagcttctgtgtagctgtgtgtatgtaagtatatgcgaatttccaactcttagttggccaagttaattttgaatggtaaagagttcactctcaaaagactagccataagaggagggttcacaagtagtaaatcaccaaccaaacccgtaactaattaatgttggattttaacaagaccatcatatagtgatagtgatatagatgttgattcttgaaaagtttgacataggataattttgaaaaattcactttcttctcagtgaaacataccatcgttgtgtgctgctttccttagatcatttctactttttactgatgattcttgcataatcaggttcctagacaagtgccttgtgctacaactgcgcaaaggtgcttacgcacaaatgatgtggaaaatgtaggacgaacagctcgacatcatacttt

SEQ ID NO: 208630 - DNA, 608 bp, Cannabis indica
ttactcacccaaactaaataaaaattctaattagttcgattggatgttggatgtattgaatttttggaaaccacatccaacatccgatccgatcaaattggatattcaaaaataacatccaatccgattaatcacaattggatatctaatgtttgacagtcaattgtaattgaatcggtcagttatcattggattgaataatttatgcacacaattatatggaactcgttacaacgtaagaaaagaaaaaaaaaatatgaattaaaaatatatgtattttatgccaaatatatttatatatttttgggatgtatataattccacttaaaaaatattcattctattcttatgtaaattgaacaaattattaaaatagtaaaatagtatagtaatttaattagaataacaaaaatgtaataaaattattggaatttttaagacgaaattacattacatacttcttttaaattaatttttttaatttttgggtaaatatcattttggaccttgtgctttacgaaaattactaaatggaccttttgttttattaaatgacaaaatagactcaaagaagtatattttaactaaattttatttaaagataaatt

SEQ ID NO: 208631 - DNA, 567 bp, Cannabis indica
aaaaagaaaaaaagaaaattgacaataaataagtttgaggagacagacacccccttttgcttttgttattttgagttggtaattgtttgtgctttgctttttctattgtaattttttctctgaaatctcaaattgtcactctttagaatatttccattttatgatctcacaagcttgtttattgaaggtgtcttgctattggaatgatgggtcggtttaattttgagtttcttttttttttttttaattaagaaatgaatgactaaaataaagcatccatttttgagccttggtttttgtaatagtgccaaccaatggatcaataccagcagctgcactaccccggtatttgattagttggttggtggctagtggtagttgctgcctagtcagattagtcagctttcgaaaagttgggtgtgcttgaccattcacctaaaaaaaacacaagattttgcagtttaaattagactaatttgtagtataaatatttaagtttaatcttcacttataaataaatatttaattttaattttttcggtaataatatcaattaaattgcaacgt

SEQ ID NO: 208632 - DNA, 583 bp, Cannabis indica
aaatattaattgtatatattattctttttatcttcatttttattagatcgataatcgatatgataaataataataattaacacgatataaaattttatttgtctcctgaaaaataaggcgaacaagatgaggggttgcttataaaacaatttggaaagtcgaaggagtttgccggagcagcaaccaatgccttgaaaggaaattatatcacagcttctgaaataaggcttcaaacaatatctgtggagactgcatatcatgttgcaagctgcatctacgaaagtggcactagctggggtacaaaggtaattaagttcatgcactaaaatattacactcttaatttattttaaccaatacatttaactttggacgggatcaaccattttaaaaggtcataccatcggtgtctatatataatgatttaatgttttggtgcatatatacttatagtggttatatgtataatatgtaccaatgtggtgcacaattttgatttttctacttgtcatgtcaaaataatatcgcatcactcacttcaaagttttaacaagtttgttgctgctaaatataaaatggaaggc

SEQ ID NO: 208633 - DNA, 482 bp, Cannabis indica
aaaaaaaaaaaaaacaagtttgtttaatcttttctcttcttgctttttctttttctttttcttcttcttcttataaaataccctaaaattaaccaccctaattcttcctctctcctaataacaaagatcaaaactcttcaccacacaattaaccactgcaccaccactcataccatcattatcaccactggaccaccactcacaccaccattatcaccaacacagtcgaccacaaccattatcacatctaccaaactaaaaaaatgtaccgatctaaatttaaaaaaatatttaactacagtgtttatttcttttgcatcttcagaaattgtggtgatgggaaagacacaagtccggcgacgatgatgatgacggcatgggagctcagtttatctctttttcacacattcccccctctctttctttcttcttcgcagatctgtagatcgatagtgggcagtgacaaataacacagatcgagg

SEQ ID NO: 208634 - DNA, 669 bp, Cannabis indica
taaatcattaatttgtaatttattatatttgttttatattttttcgttttttaattagtttaattagaataataataataataacaataaagtttataagtatataattatattaaaagaaaaatatatgaatttataagtgtatatctatttttgtctaaacagctctacaagagttagtaattaagaaatgggaaaaatttattattttgtattgcatggtcatggtcatttgataaagtgattgaattaaatcaaaattaatttgatccaaaagacattaatgggaactaaattaaaaaaagcaatggaagatcaatgaatttttttaaaattaccttctacatatggtggtggagacatctttattcccaccttgccacaggtaatagactgctcctttgattggttggtgacacttcctgttaatatttcagataatagttgatagtatctaatacagatttgtctttcaagtatttaaaagatttgtcagccaattacacaagaaggagacatcaaaaaaaaaattctaacaaactaacacagatactaatttatatagttgtatttctcacaaccaaaaatatattctgcagtcattgatgcaagttagaatttaaaaaggaaaggagcatccttatattatcataaaaagtaaattatgtt

SEQ ID NO: 208635 - DNA, 1100 bp, Cannabis indica
caaaacgcacttagggtagtaccctaggtcgcaaattcacaataacaatcaaatatcatataacaacgccactatgctatactctatatgcttagttcactatcttacctgatttccaatgtattaggagaaatctcgatctacatgtgattctgagcaagtgcccgtatccctagtcacaattcttgggtttcacacaataggttaatcccaaaatcatattttataatattcacatttaagactccaatactagtccaagtaatagagctcaaaaagatctttccaatgatataaagaacatccaaaacggagttcagagtcaaaagttatggccaaaataaaattgggaaaattcggaatgctctctgccagacttggtcgcggcaaccataagtctagtcaagaccactgggtttgaaaaacccaaaaatctaattttaaaggtctgaaaatgcccaaactcaaactcaacttcacccaatttatcaaattggttcacaagtctataatagagcataacaggtgccagctacatcaaagtactcatgcttaaaaatataaatatttgaactcaaatcacataattcaagctttgaaataccaaaatcatacaactcatgccaaaatatcaaaaaacaacaaagtaaaaccttttactcaaactcataaaattggcggcaaaattaactcctaaaacttgacctaacattcaaattaaatcaaacacaagtaacaagcttaaagttctcaaactcaaaacaagttcaacacacaaaacctaacctcaagatcataaatcaaggatacatgcaacaaaaacaaatcttcacacaactttcataactcaaattcagaatcaacacaaaataaatgaatagtttactatctcaatagttcttccaagctctaacaccaatccccccctcaaatcaagccaaatccaacacaaaatcaaaactttgccaggagaggttagagagaaagagaggtcggtggagaggttccaaaaccagaaaataaaaggtatttcactttctgtttcagacaacaaaatcactaaactcattttggtaaaattggtcaaatgaccattttgc

SEQ ID NO: 208636 - DNA, 770 bp, Cannabis indica
ttattattattatttgtcttttgttgatacacagccattatatatatttttttattgggttttgtttttgaacttttgaaagtgaaatcataataatcagaatcagaatcaattcgagcttgagctgctaaatagtagttaaacacacatttggtgaaaatgtacagtaatgggattttccttttttgaagatttttaattgtggttgagcatgaaggctggattggtgtctgtaataaaattaaatgggtgggggccactatatttgtgtttgtcttattttatatttggcattatatgtgtcactaagttagaagtatgataatggtttggttagctagtaggacactaattggtttggttggttgaattgcattgcatagcagggctggtcattagtctttttgacactgaatggcctagtatgaccttctcacttaaacacactcacttccctctttttcaaacttgaaattttcaaatatatattccatgcaaaacactagtggaggaaaaggaaatcatacatactagcttgtcttgtcttatactattatattatctactgtttttttttaattatggtcactgtgaatgcattcattcattattttgtgtttggtttattgtaatggagatcgtaataaaactaaattatttattataatatttgttttgtttttaaaaatgatataatgagacaatattgtatttataattacattaattcccgttacattaaaaaaattatgtaatgagaattacatcac

SEQ ID NO: 208637 - DNA, 583 bp, Cannabis indica
atttagatttaataaataataagtttataaaaaaaaattcaataaataataatcaaacaaacatgtaacaatatatgatacttggttatagaatttatttaattaaaataattaattaattaatttcataaagcttaaatcaaataaatatttatttcgaaattaaaatttaaaattaaacctataatttgaaatttagaattgtaacaacctaaatatcttttcaaaattatcaactaacttcttaaatttatgttattttaaaaatataaaaataaatatctaataagataaaatataaataattattatttttctaatcccataatttaaatttaaatttaataacaaatatttgaaaaattgataatatttggttagtttttaaagttatctagattattttatttaaagtatattatatttttaaattttaaataaggtcattttataaaaattatttaaatgaacaaaatataaaatatctgaccttagatttaaaaataagataacaaataatctaatttttaaaaaatgaataacaaattaagcaaacattgtaaaatttatcctttgttcaaaa

SEQ ID NO: 208638 - DNA, 599 bp, Cannabis indica
gcaaaattgcaggaaaccaatatgtgcaattcggtttcagtaaacactccacacaaaggacatgtattttcaaccaaagccttcttaatacagagattgactttggtggcaagacagttagaagccgccctccaaacaagatctttagctttgggaagcacttttagtgaccataaagtcttccaaatttcattagtttctgacaaaaccgaaggatgcttcacactttggagcagattatatgcacttcgtactgagtagaagtcatttttctctgcagcccaataccatgtactataagggtacttagttacctttatttgattttcttatatttttcaactttttttttttaattttttcataagataacctttttgaaaaaaaaaaagaaagccatttttacacaaaaaaaaatataaaacccgtaatatttataatttcctcaaaaagttaattatttggccttagtgtttaagaatatgtaatattttttaaaaggaaaatttttttaagagcctcctcagctgagtgggtcctaggcgtaggcctagctcatcttagcacaaggtaggccttggagttaatgcatgacactt

SEQ ID NO: 208639 - DNA, 739 bp, Cannabis indica
atatatttgatttctttgttataagtggtaggtatatggagtaaaataaagataatataacactccaattgttatttttccccactaatatatatatctaaaatgttttgtttttgacataatatataaaatgtttattaattcattatatatatatatatatattaaaaatactattacactgctaatatatttttttggtgctgggagaagtgaatgataagttttaccgggcctaagaaacttgtgtagatgactagagtattgactcatcactcccaaaaaattgtgaatggtctattgaaacatttgtttatgcttctttagttttaactttttcacaaagagtaacaagcttaatgtctacactagagaaaagcctaacgaaaataatataaaatgtgagatgaaatgataatcaaatattatgttgtaagtactatagagtctaagctaatagaaaatcataatatagagagatatgatatagcatagggcacgttgttggcatagacattggagcagagaaagcatattggcacgtgaatagatggatagaacatacacgtttacttcttttgttggataagatcgacaaataattgtcatccttttcaatttgtaatattacaaccataaaccattttcttatatataatatatctttattttattttattttatttttcaaatttctttaattctactttatttgactcagttttttaatttttttttt

SEQ ID NO: 208640 - DNA, 1047 bp, Cannabis indica
tatactgtattaataaaattatatacacaaagaatttataaaatactaaattaatacttaaaaaataaatatatcatgctaacaaaattatatatattactattaaaatatgtttacatactaaaaaaattatatataaaaaacaaactaaatttcatcttaaatattatatactatagacaaaaaaaattatatattatataataaaatatatatacctacaataaaaaataaaaaaaaattatataatattattaaaaatatatgtaccatattcacaaaattagatatcacttttatgtataataaaataaaaactaaacatgtatgatataaataaaatgatacactatacaataaaatttataagatttttctaaagtaggaaatttaaaaaatatcccatttatagggcttttaatagtttgttttaattgggcaattacattgtaataccgtagtcttaaatacaacatatttaaactaagattcattaaaaaatttgtcttattcaaaaaaataattcaatgagtagtgctaaggagattattttgcactctctatatttttttacgacaaatgttaattattaaacattatctatttttatttaatatttagtcataatattattattttattacacttatgctattaactaaatcactacactaatttataaataagtttaatatttatttttaaatgtcacatttttttacaggttttaaaaaataagtatcgtataatatataaattattataaattttctaaaatattttaataaaataaacacatcaaatatggcaaatatactatacatataaaattgaaataaattctaacacacaataactacaaaaaaacccctttagaggcgatttttttagccctttcagcgtcggtttttggcaaaattcgctaccgacgctgattagggcgacgctaaaaggggttataaacaaccgacaccgtatgtaccctatggcgtcgattattagctaggaaccgacgccatagggtacatactgacgttcggttcctag

SEQ ID NO: 208641 - DNA, 698 bp, Cannabis indica
tccccgtcccattaggggcgggttccagcgggccccatccccatcgaggaaatgtgcatccctagccacgaatgacctctctacttttcgaaactctatctctgagaacccccaaagctccattcctctctcattcttcccttctctctaacgcgattctccgtctacaaatgaatggagcaccacgacttccccaaggtccagatatctcaatctcgtctcttctctgtgatttgcagtccttcggagtcctccgccatcccctacacgagaagagttggagagggactgaggaagaaagagatagtgagaaagaagaaagtaaaggatttagatttaaagattaattattttggatttagtttgttttgtttttttttaatttctttatttatttgtttaaaaaaaactgttaagttaaaaataaaagaaaaatattattggtttatttatttttaatttttatattattatattaattagaccaatacaaaaagccatatgtatacatgtgtacacaatgacaatcttagttggcacttaacatctaaatttaacataaatttaacatatgtatcaaacttgtaacataattgaagataaggaggcattaccaccaaaaaaaatttaaaagattaagagtatactaattaaaacatatgatgatttaactgcaaatttctcaacaaaaaaaaaaa

SEQ ID NO: 208642 - DNA, 1140 bp, Cannabis indica
tataagtattaataagttgacaagacctcatataagactacgtactacatgatattcacacgtgcacacgtttacgtgttgaagaatttcttaaaattattattattttatttatattttggaaaatatttactatattactttgcttacctcttcaaggtcccactccaaatattgaaaaatactaaatgatattatatattagccctactagtattttattttagtctaattaggatttttactttctgaactttgacatgtatcaaattatgttccctgaacttttaaggtcgttaaaaatgctccatgaattattgaaattgttgaatttaaggatttttgtctagtttaattcaattttactatttcagtgattgtttatgtctaaaactatgctccccagactttgatatctaccaaattatgcccttcgaactttaacatgtactaaattatgacccctgaactttcatccatgttagacttttttactaaaattagaaaaaaaatccttaaatccaacaatctcaatagttcagaaggcattattaacgaccttaaaagttcagggagcatgatttggtacatgtcaaagttgagggaacaaaattctaattagcctttattttatattattattgatataattaattaagtgttgaattatttgtaaaaaatatattttagcacatttaataaaaattattattctaatagtattttaaaaaaatgtactaaatttgatacatactaaaaattatatcaaatttgacctataataaatattgcttttttatttattataataccacactaattatgatgattcattaacttttactaaattttacattctatatatactatattagtattatttaaataataaataaataataatttttgtatattcataataaaatattaaataactatcaatataattaattatttatttacttattttacattttgtatattgaagcacattataaacagtgagctaaatataatacaaattcatttttgtgccaaatttaatacaaattttacatagtattaaagatgaactaagacaaaaaaatttaggaaatattactaattaattataaggtattacttgttcaaaaaaaaaaa

SEQ ID NO: 208643 - DNA, 889 bp, Cannabis indica
ttttgcatttttttagtgttattattacttatacatgcatgcatatatagtagtttaaagatcctaacttttaagtaaaaaaaaaagtttatatgcatgtaaaggtagcacccttattacttctacttagtaaaacatgcatattatagaataaatattgttgctttatgtgattattaaggtaaaatgtcattttgatatgagtatttgtttgcaggaaatactatactcaaaattcaaaccaggaacatcagtagaactgagacataatatggttgcacatgcatggatcccagctactattattggtgaaaagggtacagattctgttgtagtgagatatgataagaataataaagctgtgaaaattactgtacatctagacatgattaggcctcagcctcctcaattgagcaatgataaagattttaagttgatggaaaaggtcgatgctttctgtgaatctagttattggttggttggaacaatcacttcaattctgttacaaagaaagtatgctgttaattttggtacctataagaatagaaatgagattgtatttaatcactctcaactgagatttcacttggattgggtaaatggacaatggattaccaactcaggggtatgtatttctatacttgttttgttttgatttgtttttacaagttttgtaaaatttaatggtgtttttcttcccttttaggaggttatatctacacctacaaaacaaattccagccacaaaagacattcagtcaccttcttattcgggttgcgaattcaatgttgctgataatgaaataccttgttcaaccaacaaagatgacattcaaattaaagagttgctattctcagctactgccatgaatggtctcagcttgttttct

SEQ ID NO: 208644 - DNA, 628 bp, Cannabis indica
atgcaaaatattatatttttaactaaaaaaacctctaacatcaattaaataaaagattaaagatttttttatatgtatacaaagtaatatgaggtcctaaaaaaaatatatatatattcatttaacagtttaatgtgacacaatcatacaagtaaaaaataatcggtttggaaatgacacaaaccttcaagtaatttacgttagtcttccaatttatacaaattattgtatttacattagcgttaaactaacacataatttttacaccaaaataaattataactcgttttgcaaagttgtctcactaattttattaaatgaaaaactaaaaccaaatgataatagattatgctataataaaattcatatgtcaagaatatttggaagaaaatgttatatatacataagcatttaggtttctctactccattatttcatagtttacgtacattttttaaattacaataaaatttggtttaaaagaagctctcatacaacatgagaataaattagaaaccaaaaagaaagatcaatattaaagtaagactattaatttcattataagagttataaatgaagggaaacaaatagttataattaagctaactactgtctactaatattaatt

SEQ ID NO: 208645 - DNA, 511 bp, Cannabis indica
ttttttgtgttgaagatatgtgttttgctgttggtaggatacgacttagaaagatgttaagtcgatcaaaaagaacagtcaaaagaacgttatagagtgatatcatttggcgcagagcgattcgtatacaatagttgcttttttttcttagggacgtcgtggttgatagactctcgtgcacacttcggacagagtcgcaaaatgtcttaaagaaagcgacgtattttgcaaacaaattcaccgattgataattctggcttagtcgcagactatgttgctctctttaagatgtttcatgactctgcccaaactgtgcacaacagtctatcaaccacaacattcctaggataatataacctctgtatacgattttctctgcactgaatgttatcacttataatgttcttctgaccgttcttttttatcgacttaagatctttctaagttgcatcctaccaacagcagaacacatctcttcaacaacaaaaaaaacctttacgatttctcaaag

SEQ ID NO: 208646 - DNA, 668 bp, Cannabis indica
aattcacaatatttatctactctatttttttattttaatttcttagcaataaaatattttttttagtccataaactaataaagcacctataaatatgacttatatgttctctaaaaaaaatgactaatatgtctggcaagtgttcataacaattgagaaatctcatgaacttggcctgtgctttaaagcccattataccaattttttgtaaggcccattataccaaattagttagggatttttacaaaaatattagatttttgataaaagtttacaattttatggtcacatagattttttacaaaaatactgtctttttataaaacaaccgtaaaacaacaaaacggaacaattaaaaacaacagtagaacaactagaaaacaaccgtagaacaacagtaaaaatttaatatagtatacagtatgaaatttacacagcatttttgaaaaaaattttaccccacagtaaaaaggaaaaatatttaaaaattttagtatatggtgtaaaaatctcaattagttatctttcaaaatatataaataagataacaaatataactaaatactaattatagtgtcaatattcaatattccaatccacatgcttgcaaaaaaaaaaaataaatattccaatccccattctctcaatattttttactaatttcttta

SEQ ID NO: 208647 - DNA, 996 bp, Cannabis indica
ccattctatttctattcctattcatccatatcaaaagccacaatgtatttgaaattcgaatgtattattagtaaattaactaaatgatctaagtttctattatcaaaagaattatatcatttccttttgtattgatcaataccttgcatgacaagcaagaatccatagtgttttaacatctcaatttctccaagctagccgagcaccttccggagttcttcaattaacactgaacgcctggttggatccacctacattttggttacaaacaattttatgatatgagttcatattcagagaagcacaagaaaattgttacttgattcttaccttgcttagaagggtggcaagaccttgaggtagaacttcaagatctgaagtcgaattgccaatgttcgataattggagaactatcttctgtactcgcagttcctttactttagcctcgtaattctttggatcatctttccatttaaagaacgcttcatcgtctgtccaagcattttgctcgattcttgagatgtctgagtctaaaaaccaagtgatgatcaagtccctcgcagatttgtatggcagctggtgccccgcggcctctattatggtcttgatcagcgaatcctctgcaattcttcgacgcagtctcttgtaaaagaaagaccgagattgtttccactcgagaatttctttaacaacaccttttgcagccattctcaacgatgtgtcatgcaattctgcaaatttagtagctatttgagtgtataaaggcgaaagctgcttttcccgggctcttatctgttgttgcaaggattcaaccagcccctgcgtgccactactttcggcttcctcaagtttttcctttagatggattagttgttgatcaagccttcccatgcactctaaaagttcctttgttctaaatttgatctcaatcgttccttctggctcgagtacattacccttagctgtttcatcagcatacatttcaatatggtctga

SEQ ID NO: 208648 - DNA, 627 bp, Cannabis indica
cattttttatatataaagatatagctagattttttcttaaattaatctaaaataaactcattctcgtatcgtattcctaacagcaaaaaaaaattgagaatcttctctaagagaagccctaaatctcaatatcatcatattcatgtaaggactttaaccaatctacttttattttttctctttattacgttgaagaatataatagttaaagtagattggggagataaaataattaatgaatatgactttaaaatcaatattcactcttttttgtaatgcaaatctttttaattttagtcattcaaaaatattttgattacatttgtagttgttgtagtcattattattctcccaataaatttattttatgagttatatatacatagaagggagatgaggtaaattttaagaaagagagaaacaaaaaagaaaaaaaataataggaaaatttacatgaaaaacacaaaattttaaaaatgttacccatatacctttataagactactcctatatttttacttttgatattattttatttacattagtacctcttacacatgcatgatattattataccacctccacacactatctattttctctctttttctatcttttttttttttt

SEQ ID NO: 208649 - DNA, 548 bp, Cannabis indica
tatcactattacatgtcattagttatatagagcaaaaagaaagaatttacattatcttgacatgagaaatgacactatacttttttgtttttattattcaaagatgtgacacctaacataaaataataccaaaaaataaaataaaaaccttcataatatatttagattagattttctatatccaataattcaaccctttttaaaaaattaaaacaaaataaaaaaattaaatctaataatgcaacattgaaattaatactcaccgccaaatctacccacccactcttcattaattaatacatatgtaaattatagttagagaaattggtgcttacatgtttatatgttgaacccaccctcttatatgtttatagtattatttatataattaagtatagaattttatataaaaaatgtattctcttgtttaaaaactatttgattaattagtcgatttatattaataaaattgtaataattattatacagaattgtaaattctttgcaagatatcaccacgtagtggtgttaagtaatatttgtgctta

SEQ ID NO: 208650 - DNA, 688 bp, Cannabis indica
tcttcgtcacagtaattaaatgtaggagttgtcactgaatcgttagatgtgtttagaatctaacatagacgtttatcaattatataaaacaactaaaaaaatttaacacataaaaactaattttttttggtgttctccaaggttattttctcaaaaaaaaaaaaaaaccatattatctaaactaattaaataaaaaattaaaatgtagaattcacgtaaaacaacaaaatcaacaatacacatagaaaatactagttacgaaatacagttagttaaaaaaaattgaataataacacgactaaaacaattataagataattaaaatataaaagccaattacttataaaaaaaatatcataaaaactcagctatgtttgttagctgagaaataattaaattaaagtaacttttaattagttatgaaataattatatgattagctgaaataattaaataacaaatatgttgagaaaaaaaaaacattaattgacaagttacattggcagcaaaatcctttttcctttttgtattaattgaagtgactgacatagtttacattaattctgtacaacaaattgacgtggatattgaaacaagaaatattccatgcaggaatcaagacaaataggcaatagcatagccctatttatatattgaaataaattccatttttttaatcaaacatttt

SEQ ID NO: 208651 - DNA, 518 bp, Cannabis indica
tataactaaaattaatcacaatattctctaattttttgctgaatcactacaatttgagtacttgttaagtgctcgctaaattttcattgagtgttcttgttttcactcaaatactcacatatttttgtatattgtcaattttcctgtaacaacattaattcaacataaagaaaggcacgagtactagaagaataaattagatgaagaaactagaagaaggaatacctatgtttattaagggaaaaaaaaggaacattgtaatgtgaatgtgatcgaaggtacaagagaaaaataaattaaatatagaaccatgcatatgaacataaacacgctataatattgttattataattattattatataattaatggtgtagattattcattttgaagtccgcctgaatgagttttattaattaataaatttcttaatttattcaaaaaaaaaatatatatatagtgtgtaattattttacaaactaatcgattattaacacatgctgcactccttttaaaaa

SEQ ID NO: 208652 - DNA, 777 bp, Cannabis indica
aaaaaatattatcagcattttgaattgtattcataaactaggagtggagaacgtgccacggacatgtaacctccattcaaatttttgggttataatcatatagtttactttcaataattatgtttataaaattatcaaaaaatgtatatttaaacaactatctaaagaaatataaataagcaaagacatagtgtggcataggttcatttattaaatctaagatcatcaatcgtcctatttaaatgtaagcacatgtgatttgttctactattatctactattgaaaaaaatttagaagaaaaattaaataataattattaaaaattatatatatcaaaaagaagaataagacacaaaaaaaattaatgtcatgtgtatactcgtaaagtattctacattattatatatttacttctctaccgagattatcggaaaactaattatttaatattagagctgaagaaaatacaagatcgataaatgaagaagatactcagagtttttacgtagttagagcgctaatgagtctttttccacgagtcagtattgttgtcggaggaatttggacaacaccaaatagaaaatgaataaaaaatatttaataaaaaaaaagcgagtaatcaacttaaaacagggagtatctgaacgagactgcctagacaatagaaaaatagtaaaaacaatgaacacaaagatgtatagtggtttagtcagatcacagtctgcttactccactgttgccaaggatttccccctttgtttattcatgttggatca

SEQ ID NO: 208653 - DNA, 851 bp, Cannabis indica
gaagccaagtatctaaaagggaaagactttctcagttgtagatacaaagacttgaattcctggttttggaaaaatatagtgaaagctaaagcaattctaaggaaagaggcctttaaagtggtggctaatggtagggagacgagcatctggagggatccatggattccccactttaaaggttttatcccaaaatcgaatggcattgttttaaccactaataactgtgtggttgatcttttgaggtctaatggcgactgagatgtaccaaagctatataacctttttgaccaagatactgtttctgcaattttgaagagtggcaaaccctcgggccaagggtagataaatggatttggaccttggaaagaaatgggcagttcacgtgcaaatcggcttacttgtctcaagctttggaaagagctccccactgtgaggttgctccttcgctctgaaataagttatggaataacaaaattttggagcggcacaaaatcctttggtggtgcattctctctaatgcgctctctgttagatcagtgattgaaaaaagattccacatagaggacacaagttgtcctttatgtgggatgggggaggaatccctggaaccccttttcctatcatgtgacgtggcagtacatctttggcgcgcttcaccgtggggcatttaccctatctataataatgggattcgggtctgagattggatcaaatttatatggaatctcactaataggggtatccgagtagaaaaagtctttctgtatgcttcaattgttgttgaaaccatctggaggatgcgtaatgatttgacacataataacacacctttggatgttttgaaatgtatt

SEQ ID NO: 208654 - DNA, 503 bp, Cannabis indica
tatatatatatatttatggatcagattttgttccctttagatatatatatgcattctgttaatctctatataactgttaaatcaatagttggattgatcgaatggtttttaatcattagaaactaaatttattatcataaaatctccaacgatgtacaaggctagggatgcacacggggcgaggaattaaaggggagtgctctccccgttcccgttaagaattttaatccccatccccgctccatccccgcttattccccattgaggacggggcggggaatcccctaatggggcagggccccgtccccataaggcaattgtgcatccctatacaaggctgaccttgaaattaagtggatctaagaaaaataaaaattattaagtcatttaattttaatatatgtagtatttttaaaaactactaaaaaaatatatatttttttaaaaaatatatttttgcatggggtctgtgggctgggtggactttaggcgagggcctagtt

SEQ ID NO: 208655 - DNA, 518 bp, Cannabis indica
tcaaaagttcaaaaaataaacacgcgtacaagaacaaaggctttttattgcatcagtgcatagaattctttaaaaagcataacttattgtttattcagaccttaatagtttaaatcaacgacatgacaagtcaagtgagatttttcgacgcatcatcaagacctattaactaggaattaggcttaaacaactgtggtaacctattcaaaactcttcatttcatttcattggtaacacaaggaaacatagacagagaggagagagtttttcatatggtgaggaaaaatactacttttttgagagagggaaactcaaagagctttgaaaaaccaaagagagaagccaagggcagaaggagatttatctttagggttttccaaagggggttcaacaaagaattaaggctcaaataagggaagtgttacaccaaaattgatatctaaattctgtacatttaatcagattgtaatcttgctattgatatagtgaaagagaattcctaaagggaaatttgaatt

SEQ ID NO: 208656 - DNA, 1078 bp, Cannabis indica
atatttaaattaatttaaaattagtataagtttaattaacttaaaacaaatattatcaatatttatatatatttctaaaattaatcttactaatactattaaatttaacgaaatatttttatatttttaaaatatattcagtaaatccaacaaaaattgttagataagtatattttatatctataaatatatattattaatgtttattattaaaacattaagtttaataattaagcataagaatagttgatgatatatataaatataaattaatttgttaactcgatcttcataattttatttattttattttttttctatttattatttattatatatatatttatctaattgatctagctatatatatagacacaacaaaataagctttttgtcattatttatatatatgaccatgagttggaatgacttcattcagtaaataattgattatgtagatttttattttatataaaatatttacattattctctcattcattaattatgacataatttcctgtgtaaatttaataaatatggtcaaaataaatacctacttctcagaaaactcataactctgtttgtcttaatttgcccagtacagtcctcgatcatattccacccattaatttcacccatatttaatatatacaaaaaacaattgtcataatttaaggctttccttataaaaaaaaaattattggacacttaaaaaaaaatgtgtatcttttaaaaacaagtaaaaaaaaattggagtccttaattaagtgagtcctagacacagacttaatctgtcttaactatatcggctcggtttgttctagaataattatttacaccatatttatatttttatttattttatttaaattatagcatctctatggtagttctcaatacataacgaactcttttatatatgtcatggctattcaaaaaatttacacgatagttgtcgtaagtttatttattttttttaaataatttaagataacgaaaacatgatctaaagagaatattgtgcgcgtggtagtactgtaatagcggtctaaaaaccttatttttggtgtgttaaa

SEQ ID NO: 208657 - DNA, 1096 bp, Cannabis indica
aaacaaaacaaaacaaaaaacattatctatatatcacacatattcttctcctatctcttctttttctttggtctttttttttattgtatttttatttttgaaggatatatagtagcaatcttgatgtatattatttattatcaatcttagtttataaatgttttattttaagtttcaatatatgttttgacattctttattttttactttttcttgaggttactaattcattaggaaattattcgaatcgatcatgcaaaaacttaaaatgctatgagaagcatatgctattttcactttaagttgttgttttttttttggttctaagattaatatatatattaaattattttttttgagaaaaagaccattacattaattcttaagaaaatttacataacagtcataagtggaggtggaaattcctccaacaatcagcatccaccgtaagagcaaacttagccaagacatcggcataagtattagcagatctcctaacatgagtgacctgtgctcgtgggaaaaaggatactaaatagttgacatcttttaacatagaatgaaaagcagaattacaatgaagtgcagcttttaaaccctgaactactaataatgaatcagtttcaatgaagtcagcagttaagccgaggttgatgagccattgcagagataaagccatagcagtagcttccatctcttcagatttgaaacaccctataatcgatttggaaaaagcagctttgatatagccattggaatccctcaacacagcacctataccaattaatttattagatctgttgcaggctgcatcagtatttagcttccatttacccacaggaggtgcaatccaaggagtaggtgagggtgcatttggtgagacaaatgttggagtggggtctgcaactgaagaaacagcagtaacctgttgcgagttgtgcacagtttgatactttgagatgtagccagtagcaaacatgaagatagcagcaggctacttgggcaatttaccatgaaactcagcatttctctcaaaccaaatactccaacagagagttagaaactgctcaaaatctggtgtagatgtattggccga

SEQ ID NO: 208658 - DNA, 779 bp, Cannabis indica
aaaaaaaattacaaactaattagtaagtaccataatatgacattaagtacattaagagtaaaaattatttaccaaaaaataaaattaaaacaaatttaaaatgagtacaaaaaatggtatcatatcaatatggcattgagcacattattaatatagcattaaacatattaaaataccaataacaagtaaaaaaattatttactaaaaaatagaattaaaaacaaaattgaacaaaaaaaaaagtaaaaaacaaacttaaaggaaaaaaaaaaaccaaaacaaaaagacaaaaatgacttgtcaattatgatgttatggatatatatttatatataatcccctcttatcctttttcattcacctaagtatatctctatatatttattaaaaaaatgtatatttatagaaatatataagcattaaaagaagctctcttttttccaccctctacaattatcatcttatcattcttttttccactacaatttgtgttttgtactgtatatgattgtcccatagtttgcaattcgtagacatcatgagtgctcatcacgcatattattagaagtcatactcctcttttaatatcaaaaaggaaaaaaggtaaatagagaaaaacatgatcccctacaaaaagtagaaaagaaaaatgaaaaacatgatccatataatatatttttttaagccacgtcatttaaaatattttgtctgcacaataatttaaggcatcataagcatagttataagatgtcagattcttacattaaatattttgtagt

SEQ ID NO: 208659 - DNA, 691 bp, Cannabis indica
ggccttcatgaatgcatcaatctgagggtctggtttaatccctaattctttttctcttaaggagagctcagccaacatttcataccttgtcccaacgcctaaacatcttcctgagaaatctaaggtttctcttactgtcatctctccatagtgaagatcatgttgactaatgtaagcacatgttctttgaggtacaaattctttcatttcatggccacagtatgtgacttttccagatacctgattataagaatataatacgtactaaagttgattaattatgtttttatgaacaattttatagatgggcacttcaattagcacaaactttttttccaaatattttgttgcatgtgattttttttaaacatatctaactgtttgaattttatctttggtattataagatattttaattttttttgaataatatatacgattagaaaaatataaactaaaaaattattctaaatgttaaaacagttagaaagagtaatgaaacacctttcttaggggtagtatagacttaacttatattttttataagctctttagaatttttgtcctaactattactattaccaaatcgtctcttttgaacttttatattcattaactattcataatactaaaatatagaacttttgttaagttttatttagagtaatttgcggcataaatacctaagttc

SEQ ID NO: 208660 - DNA, 1080 bp, Cannabis indica
catatatacatgaaagcaaatctcttgtcaagatatgcagtgggttaaaaagtagttatgattgtagaatttgccatgtatattgtgtgtacataaaattcgctattcataattgataaattataataaaaacaaattcgggccttcagaattttaataaacaaataacagtgataaagccttggtaaaaaaaaagcaatagtaacactgatatgattttataaacaattaaatctaaatttcttaattcaaaaatattcatccaacaaaatatatttgaaatctagatgaataaacaacttacataataatagccattgaattcttgtgatttatgtacacaagagtatcagtgtcaatagtttagttaggatttacataagaaaatgaatatgaactttttattttagagagagaaagaaaactcacatagtagttattgtgagttttatattagaagaaaacagaatttgggtgatggagagcacaagagtaaggaattcgtacttccttgagaaacacatccaaaatagagaactattttttatgtaataataccacaaaaattttaaaaaggagtagaagaatttattggtgcataaattttttcaactgttcatgtatatggtgttaaagagttgttactgttaacacccgaaaatgcaaaaagcagtaagaaaaagacacatacgtcttattcaaaaatcaaaatgagagcaagttttcaatatgaagaaataaaataggcttctttctttgctacaccgataacaaaagagagtactaatatataaataatttgtgaaagtcataagaatgttatttaaaatttgctactgcctaggctgaaaatggttcctctaacattgaatatctacaactccaaaatatttgatactaagaataaaaattaaaacattaaatctaagtatttagatattgcaaaagcaacgatgaatcatggaatatcttctaagaaaaattttgggtgaaattttgtttgattaattttttttgtttagttaaaattctccccatgccactttgtatgcatacatactatagttttttttttttttt

SEQ ID NO: 208661 - DNA, 911 bp, Cannabis indica
tcaataagtactattaattgcataaatgataatttgttaaggtaaaagcaaatttataagaagacaaaagtttacttctaattattaagattgataatatattagagcttgggcaccagtgataggagttcacgggtcgtatttgtatcgtgtcaagattcaagtataataaatatatatatgcttgattcgaatacgaccagtttaatagtctcgtcggaaaataattcccaaacacgactcatatttataaatgggttgacacgacataactagtttaatccgtttataaacatatttttttaaacatatcaactaataaaacgtttatgacatattcaacacgtttatgactcatttataacttgttaaaatactaaaataactttaaataggttattaacgggtcacttttgtgttagcagtatcaacccaaatgtgacctatatatatttattaaatgggatagatgatcgagtcaaaccgaacacgacccgaacccatttaaagcaaatccaaaaccctaactctcgtgtgaattttgagtcgtgttatcgtatctgacccattttgtcggcattacctaaaagtcgcaccttacaattagttaacaatattctttataatttattattttattataaattatttaaaatctgatacttaattatattaattaatgatacgacaccaaaataaagtactaatccctaataatgatatgagagcgggaatatatacttaattgcaaatctactacaagagtgaacgaaactaatcatcttcacttactttagtttaataaatattatagataatcgctaattaattataagatgttatatcgtaaaggtgttagatattttagtgtaccataataatgctcataattaagtgatgaaattaagtat

SEQ ID NO: 208662 - DNA, 716 bp, Cannabis indica
atcaaaattaacaatgttaccctaaatcccagccctttactgagttttgactgacataaggaatcccacgcaagaagatgtagtttacgcttctcatcagtgttcccccaccagaaatttctgagacacttatctacttttcttgcaatattcagtggaatcggttcagtagccacgacataagatgccaaagcggagccaactgattggatcaggcaagttttccctgcttttgaaaggagcctagtctttcaactcctaaccttttgcaatgccctatcaaccaagaaccgaaggtcccttgacctgtttagggatctgaagagagggaggcctaggtaggttgcatcgttcttcatccttttcatgtttagaatccccgcaatctcccccgcaagccccgatgtaacccccttggagaagaacactgttgacctttgatagttgattgcttgtcccgaccaagagcagtaatcctcaaggcatttaaggaaacctttagcttccttgactgaagctttcccaaataaaattacatcatcagtaaacatcagatgtgtaatggcagggccatctctgaaaaccttgaaaccttgcatgtgcccctcgaacattcttgttgttattaatctggataagacatccgcatcaataatgaaaagggccggggatagggggtctccctgacggagaccacaagttggtttgattgtgcc

SEQ ID NO: 208663 - DNA, 599 bp, Cannabis indica
ttgaagaccaccgtccaacttctttacctaattctccttttgagagttcttcgggtagcccctcgagtgactttgaggttagcagcggttcctcaaaacctgaagtctagcatcattgctgttcaaagaaaataggcactgaattttacgatcgatgacaattcttccctagttcgtggacctacattgtttgggaaggtgtgcccgatacattgcccactagttaggaaactccatcagttagagatcttcctactgcaaagactacgattactattgctagactcttcaaactagtcatggctaggaccaaacggacgtgtcgtagggcacccctaatgaccctcacattgttgaggaggttgaacaacctcaaacttatcagccaagggcaagcgaggttaaagaacctgtggccgagcagcccatggctagcaaagatgatgaggctttgactagaatagatagtgtatttgaagctaaagaggctatacttggtgtagggctgggtactgttgagaggcaatataagacttgcaccgtgattttgaacaaccctctagggtcttatgatgaaaccgagcagccaataaatgctc

SEQ ID NO: 208664 - DNA, 509 bp, Cannabis indica
ttaactatcattagaattttaattttatataaaaattgttagaactataaggtggcattttagaggaagtgaaattgaatgattgaaagaaagatagtcatatttttataactttgaaaagttacatattaaaatgaagtaattaagattattaaaagttgatggggttaagcccaagttaattagttgaatttgaattttggtaaattggaaaaggcaattgcagagggttgcttttaatgaaaacagttggtcagaattgttatttttagctaatttttggaaagaaccatggtatacatttatatttatatttatatataagttatatattgtatttgaaggaaaggaagtgcagaaggtatgtctgacagtgctccattattcatcaaagaggaaaagtactctccaaaccccatccccataattatttacttacttttatttgaaataataagagtataactcacaaaacttaaaaaaatagaaattatacaatttatagaaaa

SEQ ID NO: 208665 - DNA, 728 bp, Cannabis indica
tattaatacacttatgttgttaatcgatctatcaactttatagttcataattttatcaaactcttgtgttttttttcttatgaggcaagagtttagtagtcaaaattatctgaatttatttaaatttttaaatttattttaacgttggtttaataataattaagatcaatcttcttattattaagatcaccacttattaatttttcacctaaattatacatataatagtatgtggcgtataagttaagccaatggtgtataattaatatttttatattatttgtagcatatatatatttatatgtataggctatagctatacatataggttcaagattttgaaatgctcatctgtgcactgtacgtatacatgtgcatatgcgttttaaattttaatattaatgttaaaaaaaatattctgcctatagaccaatcataattgaacaatataacacaaaacttatattaagttaagtgtcataaaatatataaagtatatattgttagacatttatatatataaactgaaatgtatatgtttaagtattaagtgcggaattaatcaaacatatatacactatgaataaggatcgaaatacctccagccattgaatcttgagcttcaaacccacataagctttgatctgcaaaggaaattgactaccatgggtaatcgggcttcctcgctctctcaactctctttagatggaatttgctgttatgaacag

SEQ ID NO: 208666 - DNA, 1089 bp, Cannabis indica
gtataccacaaattagagctaccttcatcaaagtgaagatcaataaaccattttctcaagcgtgttatgagcttctttgcttacgctctctgaataaatattgggaagtttgataaggaagaagcccttcattgtcatttccatagtatacagcaaaggtagagaacttcttattaaaaacagcatacactgctccaccatgagttttcatctgtaagaacatagctcatgttcaaatacaccacactttaaacaaaacaatttattcatatcaataaagttaaagttcttatcctatggatgaatgtcttccctcaacttctgtttcttttgttccactaagtcaaatagacatgcaggtaaatgcatcataattactcttatggaaatttaattatttaaaacataggaatccttttgaaatggtgttacaccaaaatatcttgaaaagtttggaactttgtaatttctctttgatatcaatataatacctattttctaattgtttcaagtattggattagatcaatagtgtatcaaatagtacaacaaatgcatattttaaaccagcctgttgaaaaacacattctaatatctataaaatatgctcttcactcttctttttcacattttttaccagcaattcaagcactttagtggttataagctacacgcatttatgataataagcgaaaacaaaataattactactacaaacaaagtcataccataacattggaaagctgaattatatctccaaatgaggctacatgaggaagcatttcgaaatgcttagcaaacatattaacagaaagcccgggtttctgatacgattcatcaactatctttattgtacagaaataatctgcaaagtcatcacacagcacaaatccaacaaacatacatacattacaaaagaaattcacaaatcattatcacacatttaaacactgtcagacccaacaaaagcaaaacaaaagagcaacccacatattaaaatgcataaataggaatcttcccccttgaattttgtcacttaataaaatcatactcctcaatattaactgctctctcaactataaaagttagt

SEQ ID NO: 208667 - DNA, 396 bp, Cannabis indica
atttttacttattttttaaaacactatacaaattttacccatgtcacttcaagatattctccatgtgattctcttatgtcagggtatttaattgataaataaaaaagtatttttcaatttactccattaaaaaacatcaacttatgttgaagcccaaaaatccaatctgaaaatgggcctaaataggagacttttggggcaataactaagaggtatattacataatattatttgtgttttacattgtgatacatagtaaatgatacattcattcaaataaattgtaatttttacacttaataatatgattagttgaaaagtaattttatatgatattgtgtatggtgattttacaatccaccaatttaaaaatgatgtactgatacaccctctact

SEQ ID NO: 208668 - DNA, 981 bp, Cannabis indica
gtgccacgtgtacactgcgtacacgtggacattccaacttggcacttaacacccaaaaatggatggaaagggctaagtgctaacagaacttgagtttatgaggttttaccaccaaaattttagaattgggggttagttgcaaaaacctggccacttaaagaggttttgccgcaaacaactctttattttatatgtgtgtgaaatagactgttttaacactattttttatattgttaattattctaaatttttcaaaattttacaatatgtctgaaataattaataataacatacatgaccatgaaaaaatttgactaattttttttcttttctaaataccgaaataataggtgatgcacatctgtgcaccattttttgtcttttgggtggatcaaagaagcatcttatttatttttaccacttatagtgcacactcctaaaaggagtatttcaacattctaacaaattttttagtctaattttttttatggttgtgtacattgcagttatttaagacatcttgtaaaattttgaaaaatttggtgaaatttaatatgtcaaaaatagatttcaaacagtcttgttacacacatgactcttttatttcatacgcgtatgaaactatactatttgaactctattttttatattgtaaattattctgaatttctcagaattttacaggatgttaataataattataacgtacataaccataaaaatttcgactattttttttttcttttttgggatgtcaaaatcgtgtacattgtatgtatagtaaattataatttaaaaaatttaatctaatttacagtatcgaacattaagttgcaagcatgatttttttggggggaatttacaaaaatattgtaaaataggggaaaggttaccaaaatactgtgacacggagtttttttttacattttttactgtaccacctttataaaaatactacgtttaaattttcaaaattacaaa

SEQ ID NO: 208669 - DNA, 1023 bp, Cannabis indica
aaattatccaatattattaaattttactaatatattgattgttttagtattaaattatactctcaaatagtgtcttataaacttttattcacatcatattttcataaacttttttttgtaaaattatttcataatttttttacattgctattagaaaaacataatgctgtaaatacaaaccgaactttttgacatagtacaaaatcggcacgagcctaaaaggcacgagtacgactagtacgaaaaaatatgagtttgagcacggcgacagaaaaaatatatccttaagcacaacacgatacgagaagcacaaaagacacgatacataagcacaaatagactagtccgaaaaatatgacagacgtcaaattcgaaaagcacgacacgacatattaaaaaatttataatttattattaataataataagataataatttatcaattataaataagttaaaataataataaaacttaaattaataataaattttataattttataattaaatctattaaaacatgaaaaattaagattatatattaatttattagggaattgtcatatataatgcattttctattttttttttagattttttttttatttttataaaaactgctaccattttgagattatgttatttctattttgaggttttgctgttttcattttataaaaattttattcattttgaggttatgcttttcattttataaaagttttttttttttttttttttttcattttgaggttatgttgtttctatttttataagtgaataaaaagtcaattataaaagtataaatgaaaaactcctaatttatttatagtgtgtaatataaaaatttgagtatttaataatttttttaataattagccatgtttaaatacgtgaactttcgacactacctgatcttgtctcctaaaatatacgcttgttaaaaattctccctaaaatataacagttacataattatgcccattctattaggttttgtttcttttaccattaaaagttagt

SEQ ID NO: 208670 - DNA, 654 bp, Cannabis indica
ctttttgttcaaggtacaagttagtacgtcttagtgattatatcttagcaaacatgtatcctcgctgtagcttttaaaaatcagagaacaatgcctcttgtaaatatatttcataatcctaataaaatcagctttttgttcaacgtgagaatccctcatggcgcagctaagcataagaggtttgcttttgaccctactatctctttgactttgtttaataaacttttgttccattcaattttaaatctgtggaatgcgttcatatatctatataaatgcttgcaagtatctatgtctttttgaagttttatgctcttcattgattccggtgcttttcgttaccataaagatatgttcatggtttgattactgcagattgagcttgccagtggtaagaattcttcttttatctagtttttgtcagcttcactttaattttgaggcagatttcaagtggcaagttggttttggattcgcttgtaaggacaatctaacctggaggaaatcaagcctcaatcttctttcatgtattcatacatcttacttggtaagccttttaatatgttcattgtatcattttagccattctgttttctgtttgtacagtgaaagtctgctgcacatattgtcgttggaattgataatttgagtttc

SEQ ID NO: 208671 - DNA, 672 bp, Cannabis indica
ttgtgagctattgatagaaattttcccattcttctcttgtttttttgaacacaaaattggttttatgtaattaaccttttgtgtgtattgatgagaaaaataattatacaaaatttagtttaagttattgaaattttataatatagatttttaaaattgaagtatgtactagctttgtaattttttttacaatgcgaaaatttttgctctgatactatgttgagtattaaaaaaaaagatttcattgaattgaattaagagcacagctctttatatacagtacagagtgaagagttaattagaaaagatacttaattaacatgacagctaagcaactaactaaccaacttttaactaactacttaattaacatttggtacaaatattttctataaggttctaaattgaagatacaattctcttctttgttcataagtttatcctagctcattagttacttttcttatttggatatcttttttatgattaaattaacaattatataaatttagaaaagcctctagtatttttttcattttaatgctagaactttgtagaaaatttatatcatttggcaaattggctttgcaataaataatatatagtgtcatactaaactcaaatagatttttagagattttgttttttttttttatttacttaaggtaaagt

SEQ ID NO: 208672 - DNA, 931 bp, Cannabis indica
ctattgttttaaaagtaatttgtggtattaataagtttaattttaatagtaaataaatatttaaatttaatttttagcggtaataatacttaagttattaatatagtatgtaatggttgataatagttagtgtacatgataatagcatatatgcaatttactatattatataatttaataaatatctttaataatatttaatttaaattttaaaattttgacaaccaatactataatatatagagtaaatattatttttgaccttgtgttttatgaaagttgttgattggatcctatgttttgttaaatgacaaaatagataggctttctcttttctctctcttcttgcgacctgaactcgagttggggccatggctaagacaatggcaaaagtgcaggggaagctgcatttaaatgcaaaaaaaacctaggaaaacagaagaagggtcctacatccactgctgatgtgacgtgaggaaaacaaaacgatggaaaaagttctcgaaattgaacctttggagttttcagaggagaggatgaaatctagctccaagatccgcggaaccggagtaggaggatttattcagcctccattactccaagtcatcttgaagcaaattagatgtaggatgaacaggcagattttgaatatttccttacagcaaatcgcatgtgctctgcctccattgctcaaggtaatataataactcctcttatatagagatctagtagtattgtgaggaatttgaaaaactcttttaagaattcaaagcatgaaactcggccagaagttaagattacattggaggatatgaggatgaaattgaattttggagatccttagttgtttgctatgtattaggtgctaatccacctctatttgttttggatggatttgttagaagagtctagaaaggagaggtagacaggg

SEQ ID NO: 208673 - DNA, 607 bp, Cannabis indica
  modified_base (598)..(598): a, c, t, g, unknown or other
aatataaatttttagacaaattagtatgttaaaaacatcataccccgctcacgatgtggccaactatggtcttaaacccccattcaccttgaatcttcatctatcctcagtttttcgtatttttttggctcttgcctatactttaaagtaaatttattgttagcaaaatgagcaaaaaatcacaagttaatagatattcaatttttacttactcttttagttttttccagtatgcaataacctctgcctacacctctggtgtcaccatatctagacgtgatcccctactcacttccacctctctatatttctgaatattctccttccacgcctttttcgtatccgctctcgagtcacatataaccctttagacattaatttaacagcataatcctcgaacataggattattagttgggaagtctgaaaaaaataaacattaaagtcatatatattttttgtataatagtttagtttgatctattgcaataaaaatttgaatgttacagctaatttgtcccacatagtctaaaatgattgtctctttcacgtcctcaaactcaaactgttcaaaagatagtattgtgacagtaactagntataattgt

SEQ ID NO: 208674 - DNA, 675 bp, Cannabis indica
ggtggggtaggagcccagatctgttcagatccgtttttggccagctcggattcgccctttccctgttcgggcctgtctgagcttcctcctcgagagactttagacttagcagctttcgaggtagtagggtccacaacggttagttccttgaaagatcaataatagcttcaactggtgctttttctctagacggtgttgtctcaccggccctagacttcttggtcggagaagaggagcctgagcttcctcccactctcttctttagagcttcgagcattttctgagacatgtctgcacgaaataaaagcaacatggttagagaaaagcactagaagtatgaaagcataataatcaagaaggttaaaaacaagacgaagtatcttgcgcttcggaagaaacacttgcccgagcaagacttaaaggctcatcatcacctaacaagtctcttatctccgccaggatggctttcccttttcctactaccggagtggatggctgagcaagtagactgggctacgtgattcgaattgcatgttcaaaaggcctgtgctcggcaggaagcttcttcctccttttgagcggactcacttgctgctcctcaacctcatcttcctgctcagaatgctcctgagcatactgtttggcacccgcactcccttcaacttagcctcacgc

SEQ ID NO: 208675 - DNA, 996 bp, Cannabis indica
cgattcttgcatttgtgtcccacatggtatttctcatgacaagtgaaacagaggcctttgtctcgtttttccttgatctccgctggtgtcatttttttactggtaatgagggggtaggtgatttcactggcagactggggttcgatgtaatgaacttgggtgatgtatgtgtcgaacctgatcctggaagaggagtactcgatgaagatgatctgggtgtcgaagtggatttgaatccatcactgcgagtccgactgataatatcctcttgacgatcctcatacaactgagctttggtcatggcatcgaccaagtcagtaggcttggctagtaataattcgcgtcggatctccgtctttaatccccaaacaaagtaattcaagaagtactgctctggcactcctaatattctagtcatgagttgttcaaattctccgcggaagtttgccacgcttcccgtctgtaccaacttcgctatcttgccgagaggatcctcatagattgaagtgccgaatcgagatcgtaatgcccgtaagaacgtttcccaatctggaaaaccgccccccttctccatccattgataccatgttgagggagctccctctaagtgaaatgctactgtcacaagtctcatttcagatgagacattatgcaactcaaaaaatttgttcatcttgtatacccaatcctccacaccattaccgtcgaacctcagaactttcaccctcatggtcttcaaaattaaattcgcatctctagcctcgctgttgaatgcagagcgatacccatggagaggctccccgttgttgctcgaactcccattttcaccttgcggtttggcaatcggtgattgcaattggtccacccgaccatccaaatgagccacctgctcctccaatttctccgagatacggctgaactgctgttcggtatgcttctggaagcttgcttccaatgcttggatcatcgctgtgagttcttcgttcttcatacctg

SEQ ID NO: 208676 - DNA, 517 bp, Cannabis indica
acatcctcaagatcattccgagcgtaggaaacaggcgaaccagaaacattgtagaaattgagagagaattgtgtaaactggcagagaatttgtacttcgattagattgaacctaatgtaaagaattttattttataataccaaattgttattgagctaattttgagcatcaataaatatgtttttttttaaaaaaaaaacacataaaacagaaccaaattgacataagagaaactaaaatgtgttctaaactatcttaataagttagtataaatctcatttatcatttactcttaatttttttatgtcgaacaaaaaattcttgaaattgaacattatcatcacccaccctctcaacttttgaacttgacactttaactcattctaaaatttgatgtatcaatgtcacgttgatcttctattatcacattatggataataatacacgaattcattatattatgtactgtatctacacgacaatgaccacatatatatggggcacagattgtgcttca

SEQ ID NO: 208677 - DNA, 807 bp, Cannabis indica
aatttactaatgtggtcgctacagtcgcgcactgtatggcacgtggtgcttgttattggtcaggtcgtctttttactgagagtgatattctccttgctcttcaagcctatgtattagcggatgtttctgtctaataaaaattattttcattcaaaacaataataatataactaataaataaatttattataaagtataattaattaaattaatgcctaattcaaatttaataaaaaaataaattatttaatttcgtcgatatttttaaattaaatttaagtgtttaaaattatttcttttcaaataaataaataattatttaattaatttaacaaaattattttaacgaaacaaaatgttaaactaataatttttattaaataactacattaattattataattaataaagatatatgcaatgtaatactgtatatatatagaagatgatcatatactatcatatgtaaatatatagataaacttattgaaatggtctaattatcattaataggtttgagcttcgtgtgtgaacctttgttttgtcactgaacatgtatttttatatataaaaataaaaattataaagaccatatatataaatataaatatatatatatacatcatagcataattgaaaatgaaagtatattattaatatatgtataaaaatgattggcaatcttcttaacaagacattatataattcttgccgaatttttcttttttgacttttaaaatacctttacatacatttctatatatgagatatagtttgtccattgaatttttcttcttcttttttttt

SEQ ID NO: 208678 - DNA, 1009 bp, Cannabis indica
ttttttttttttttaatttgtgaatgaaaattaaaatttattagagagataatttcgctaatacaatagactgaaaagcataaggaacattactcttagtgaaaagacagtcaaaccagtaacaagtaccacatgctatatagtgcgcgactttattagcaaaccgtttaacttgacaaataaaaatattatctaaggaagaaaacataagctgacattcttgaacaattaaactaaatatagatagcattgagacagaactacgaatggtctcaaccagggtcggccctgacttttagtgagccatagaaaaaaaaattattttgggctcttatttagaaaaaaatatagtatttttcaaaatcattaaaaaaatggtataattttaaaaggtaaatatttttttttgggccctaggcacaggcgtagcccgcctatgcccagggccgggcctggtctcaactactaaaccgcaattagtctcaatgatcacattggacttattcttctgcttgatccaacttagtgtctccctgacgctcaaaatttctgcaacagtatgttgacagcttgtggtataaactgttgaaaaagcctcaactaatcttccatccctattgcgagctacgaagctagtaccgacctaatttctgtcaacatgatataagacttgatacttaattgcactaatataaatatcataacgaaaaatgtgttagacactatcaatatcttttaacatttctcaattaattatattaaaaataataaattagtaaaaattaaatttacaatctattgtattattttaaaaatttaaatttaaattgtaatttaacaaaataaaatatctcaaataacttttataaaatataatatttaaaaaaatatttaggataaaaattacggaacagataattctaattaatttaggaatatatcattatatcgttatatatttgggggcttttctagagagagggtagtcagagattagagagagagagag

SEQ ID NO: 208679 - DNA, 1334 bp, Cannabis indica
aaaaaaagttaatacctgtattttttatttgaatttagaatccaaagaaatcaccaaaaggaaaaaaggaaattcgacccaaaaaaaaaaatctaaagaaattattacaaaacaattaattaagaaatacgaaagaaatctagaggcggagttattaacgaatttactaaattacccacttaaggcgtgacatagactatgcgtggtgatgggtattttggtaacataaaattgcaacggctctttttcgaaaattagccgttgtaagatttacagaaagaaatctctggtgtattgttttaggaggtgataaaaatcgtttctttacatcttaaaaccctaattattatgtatatataaacccaattacatcactcgtacaattcaactcaatctctctctctagctctctctttctctctctattgcttgcgattaacgttctgtgatcaccaaccagcgctcgatttttgatactcattgcattgttttcttgattttcgtatactaatccctgtttttgcaggcttgaatcgaattttctttgttcttaaatagtttgatttcgatttttattgtttttattttttgcgatatatatttttttgtgaagttatggatgcaggatcttcttctgcttcattgatgaagacacgatctcgtttccctcttcaagaacagtttcttcatagaaaaagttctcgagaaaatgtaagcatatcaattcttgatcatcatctttacttgggttttttttttagttttatttgaaatcgctgaaagggttctgcaatttggattttttcgtgataatcatcactgggttttttagttttgttcgaaatcgctaaaagggtactgcaatttgggtttttagggttttgattgtggaataagaaatttgaatatttttagggttttttttaataatcttgattgattggggtctgaaataattttgaatgttttaatttgggaatttattgattttttgatattgtggtctttgaaatcatattctcgtaatttcaattttggggttcttgctttttagcttcattgatctttatagtattaaggtgttttgttttatgtttgaacttctattgattggtttctctttgtgattatcagctggacaggttcatcccaaacaggtcagcaatggatttcgattatgctcactacatgctgaccgagggaagaaaggttaaggaaagcccggtaagttcatctccagcaagagaagcctacaagaagcatttggcagaaaccttcaacatgaaccgaggtcggatcttagctttcaagaacaaacctcctgccccagttga

SEQ ID NO: 208680 - DNA, 639 bp, Cannabis indica
aatatggcatgaaaacttaatgccataatatatggcatttcttaaaaaaacaaactaaaaatatgggtttattaataagaaaaagccatacaaaacattaaaaaataattattttttgaaacggctctctctcattataccacaatcttttttttttctctgttctttgattgtttctctctcttgcaattgcttcgacaaccctctttctcttattccaattaattctactattgttcttttcccgtgattccaaattcttcaaggaccatgtctatctctagcaacaacaaagtccggcaaggaaaatgcccatccctggcagcaacaaactcatcatcttaaagctccaattattcaacataaaacatgtgattatacaatttcagtccttcgataataccatcagcaaacacaacaaaaacttccaattatcatctataaaaaaacctccaatcattgcagttattattggagaaaaaaataagtaaatttatatacagggagaaaaacagaatatattataataatataaatctgtatataatataatataatataatataatagtaaataacattacgtgaaagttttatatgattgactgaaaaaaaatttgttaatgcaataaataaatac

SEQ ID NO: 208681 - DNA, 2225 bp, Cannabis indica
atatgcactttaacttctcgttcatcgttctcctttaatgagtacacttcttgatgcgtggaacctctgtagataagttgcttgccacatctgatattactaagtatattcatttgtaatttttctgaagcttatgtaaatgtatctatatggaaaggggataagatgatatgagaatgagacattttgtggataaccatttgtagagtgtacagtgctttatatttactgagttgtcttcttatttgattttatttgtagtacaagtacaatgcattctggaaaatattgtagtgaagacctattttattgtggataagagtaagaaagagaagaaagtaaaatcgaatcttgcctgcctactactgaacaattatctctattttaattaagttgagtctgatcggtgggtaaattatgctgtttttccagccatttcacttcatcattacatgtttctagtttatttatgatttctcttttgtgggttatagtgtctgtctggtaaattatagattcagatgttattcaccttcatatctgtggattaggactattttggctttacttaatatatatctatatgctcttcatttatattttcccctcttaaagttttgcttaaaaagagaatacacaagtatagatttgtttcttcaaaacttgctatgagattctttcctacctacccgctttggttttacccaagattggagtttcgaaattcttaagtcgagttttggtttaatttaccatatactacttttgatgcagggagaaagttgctgtgctggataatggcctttctatcaaagtaagttgaaaatactatttcttgttggaatctctgatggtaaaattttattgtcttattctatttagcaaattctttccaaaaatccatgccttctggctacacgatcagattcagatctgtgtttctcaatggtgtgaaaggattcacaaattatttttggtagcgtaatatacattccttcatattactataatataaagattgacgatggtttctttgaaatcaaacgttaatcttataacccctactgtcgttctatctgggagtgattgtgaattttgaaaagtggcgtgattttggtctcttatcctttttatcttcctaatattctctttaggtaccacctcatgttctagccggtgaatctgtagttatcgatacaacagacgactcttatgttagaaggtaacattcaatgtagctagacagtgaatgaatgaacatattcattggtttcaatttctgaaatgaaatggtttacgatcattaatcagttgatgctttgctttgtctatatttttgcaggacaaaggtgtaagattggatgttgctttattagtcctacggaaggataatttcatttttgtaagaattaagatcatagaaattgtttattttaaacaacattattattagttattattattattattattcatacaaattcctgagagaggagacttaacaatcgagcaaaaattaatgttgttgcaagaaataaaatatgtaacacattacacagaatatataaaccaagttttgcaatgtttctattactgtctacatatacagagcacaatgaggatgaagagcttatcctttcacattttgtcattttattattattactatatatatttaaaaaaaaaatagggtaagtttgagtaatatttttttaaattcagttttttattattaaaaatttaaaaaaagtgtaaaaatattttttaaaatcatattctataaaattatttttacttttttaattttttaaataaaaaaattacttttaatttttttttagtaaaaattacaaaatatatgggaaaataataagaggttatttttttatagcataaataaataagagatttttacacctcatgtcaaaattgacaccttttttacatttttatcaatacacggttttttaaacttttttaacttttacatttttcaattttacttttcaaaaagtttaataattacaattttaccttttcccttcttccttgcacacgtacacgcacgccacctcataactcctttcttttttttttttttgtaatttttcatttatctgattcttccactcttcaaaccgagcttcccacgatcaccattatcaagcccctaacccattttccttcttcccacgatctccttctcccaagcccctcaccccacg

SEQ ID NO: 208682 - DNA, 556 bp, Cannabis indica
tgtaggtgagttcaaagtgtcttcgccatagatggtagcatcagcttggacgagcagagtgtgagaggaaggctctacagcctggtctttaaaaggctagtcggctatagcctcagtaggttggcctaccattacctccataggctggctggccacaacctccttgagtttaccagacagtgctccctcagcctgggcggctacctagtctatcccctggacagcctgatctaccaacaccccgctctcatagagttctttccgccaacgaagtgatctcacgtggaagggagaccctatgaacctgagatcgacgttggggttatgtaaataaacctcgtacatgaccatgaccttagaggataagcccaaatatttatctttgaaagcttgctggccatcaagagctagttacttctcccgaccctccttctccaacctggaggtctcagcagcaagccttatcacctcttgattccaaagaccaagcagtcagtttaggccatcattcaggttctaagactctctcaggcgagttgacaactcacctgtatct

SEQ ID NO: 208683 - DNA, 771 bp, Cannabis indica
aaattttaatttatactaacatactatataataccacataaaagtattcataaaaattaataccacatatagttttacataaaaatattgtataaaatgcaatttaatataatactttacaatacaatacgatgtaatacgacgtaccaaacgaacccaaattacattaattgttaatctatttgctatgcattcaacctgaatttaggtaagtattttactatcaaagaactttaatgtcgaaatgtttaccattttgatggttagtaacagttattatttatcattatactaccattactttgaaataataatattgtctaaaataagtgtaaattagttttctaaattttttattattgtacccttttattttttgttaaatttatatcttttagctactaatttttactatacataagtggtagtttataaaagctattggtagttattttgagaatggtttttggctggagttataggatggtgctcaactcgtcaatgttatcgtttattttgttgtgttaagttatgttcatgtgatgttgtgttatcttaagtaatatttttatgagattatagaaatttggagactttaaaagattattgaaggaatattgaatctcagaataagtttctttttcttttttattattattatattctaattttactttttttaatttattttattttctaaatgttaaattattttttcatttatctatttatagtgtgttttgtaagttgtttatcaatttatcaaagcaa

SEQ ID NO: 208684 - DNA, 651 bp, Cannabis indica
tgtattgtgcttttgattcttagtggaagagctcaagatagtgttaaaaactggagctcaagtccattgtgcttttcattgaagttcaatactttattgtgataataactattggtattattgtgcttaagggcggagttaagaattgacaggggagcaattaggagtatttatggtgcaagtagtgtgatttttcaattaccattttatttaagcacttcataatacatttttgatagatttaatcgtaccaaacacaatatttactcaattattaaaattctatcatatattttttaaaaatatatatatttacatgaaaattagttgatgacgtgggcatcagtgtttgacatgacaagaagaaaaatagttacgaaattgagtagttccaagtcataacagtagacctgagaggggtccctagcctagcactcaagtgacttcaagaactccataattaaattttagatcccaccaagttatttttaactcaccatccttcagtattctaaaccaagaagataggaagaattcaatttcgagacatggaaattgaaaagagacaaaacagcatcccgaaagtcaacctgagggcttaggatttttacctagcgccaggttgacattcacaactagggtttcaatttt

SEQ ID NO: 208685 - DNA, 809 bp, Cannabis indica
tttatttttttttttatttttccctctcgctctatcagtttctttctcacccaaccgaccaccacaaaccaccccaaaattcaccaatcgcaccatcgcaccaccacccacgaccctccttttctctagttttctccgatgagtggccgacgacccacgaccctccctctctagttctctctggtgcgtgggtcgtcaacccacgaccaccaccgtgaaacggacagacaaacgatttgtagttttttttgtatccttgtttattttttggtaaaaaattgaattttggtgaaatttgcattttttgtgattttttttgtatgtagtttgatagtggttcgataatgtacgatggtagtgtaatttgaaggttggagatgaaggttcgatagtgatccgatggtggtacgatggttgataaagacacgatatggtctgatagtggtccgatggtggtagcagggccggtcctaaggtatatggggcctaaggcgaaatcaaattttggggtccttatatatatagtttaactattataaaaatgacagttctagtgcttagtgtaatggtaaaattttaaaagactttaagaggtcaaaagttcaatcccttataactacacattaaatatttttttaaaaaaattaaaaagtagaggttgggaaattgatcccatgacctcttactttaaagtaagacgtcggtcgatttggtcagcttatgctacattttattcaactcaatataaagattgggttacaaacatctaagtgcaacccacccaataaaaaaaaagaaaatagtaaccc

SEQ ID NO: 208686 - DNA, 1408 bp, Cannabis indica
agatgtggccctcctgagataacagaatatgctctccttcaagaggaggaggttgtagtccctgtttgcctgggttattgggcggatttggcttggtatgtccatcgccttgtcgattcacatattgccagaagtaaactcgcgtgataaggctttctatctcgtctgcttcttttgttttttcttttccttggcttattccttggagtcatctttcatcttcgaaccttctggattgtcaacctttctctagacggtacttgtagagacaatgataggtttacttcccgagccagtctttaacaacttcatctcttttcttgcttcctactttcgaacaaacacctaagccctctcattgaactcgctgatgtttttcactgggcaacccagcaagttatcccacagctcacctccagcagttgagagatcgctcgtgatccctgccttaagggcagtaagctggatactaccgttcaaatttctaactctcgcagcagctatactaaaacgactcaggtaggccttaagcgtctcgcccgactgctgctttatgttagtaaggaagacgcctcaggtcgcctgtctctcgctgcctgcaactacttcttaaagccttttgacagttgttcccaagaggtgattgaatgatgggcaaatttgttgaactaactgctcgctcccccaactagtgaggtagggaataaaatacagcataaattatttgttacatttttggctcgcatgatagtattaaaattatttatgtgtgcgaccagatctgtagtcccatcgtatgacgagacgtgagggtttttgaatcactaaggtaatcctgcactcatgatgtctaaatggaaaggctcgggctcctcgtctgagtcgtaaccacgaagtttcccaaattgcctgtcttggtatctcctaaacttatcctccaactcgttgattcgtaattagataagatcctcttgcttttggtcaagttgttggcgtaagttaggcttcttctggtttagttgattacgaagatccgattgttgtgaatcatagttacttacagaccttgtccttgagtaacttttagttttatttttgcccgtactctctcgatcagtactacgacaagttctatcccctccttgcgtagattgactatgagttcttgtacgtccagaactagaactggcctcgtcatgcaccggccttctcctttgagaatgggttgatacatgcccctgctaggattcgtatgcgccccttccctatcagttcaagaaggacattgacggtgtcttggtggcaacccacctgccctaggttgagtcccaggatctccctcgttaccacgagggatttcctactccctctacgcggttgccttctgctcgcattcctgcgagaggat

SEQ ID NO: 208687 - DNA, 826 bp, Cannabis indica
tactcattcaactgtcccctaccacaccacacaacactctctctatatatatgtaccttctctcaaatcttctcatctccaactcaaacttctctcaaataatatcattattattattattattattattattattattattataaaaatgatgatgaagtggctccccattgttgtcatagtattactctttgtttctccacgtgcaacctcacgtgacattccaaataccccacttgaccaaacagttctgcatgtaaatgcgccggtaaaagctgagtcaccgagtgatagtaatggactcggtgataagaagaatttcatttacggtggagttggtggctttgccgggatgggtggttacgctggtgtgaacggcgtgctgccaacgcttggtggttccggctcatttaataaatttggagggattggtggcgctggcggaataggtggtgttgccggaataggtggtctgcctggcactacgggtggtctgcctggcgggcttggtggaggttttccgaccatgggtggcgttgccgatgctcctcccggcggtggcattttgcatccttaagtactaattaataatgattaatatcatcaaaatataatggctattatgattagggttttgtgtgtgagtttaattgttttctacgttagggcatgtttggaagttttttttaagtgttttgtatctctttgaatagtacttattatttgatatcatcagcaatattatatatttatatatatatgtttccttttcttttaacttaataatcattgtcattaaatggcttaatgttatatggtttatctc

SEQ ID NO: 208688 - DNA, 811 bp, Cannabis indica
ctgtatcaaaacattcggcctgtattgacaggactaaactcaatattagtaaaaattataattttttgccagttccgtcgacaaaactgaagcaaaaaattatacaggtttactaggtaactttttgttgttaaaaaagtattgtatttatactagttaaaactcaattttttaggacacttataccgcaaatatccctacattaaataataaaaattaaattattcttattgactacataatattcataccaaagttcagaattcaaatcatttatttgagagctcatttttgttcactggaagcaagattggccctaacaatttgggagttttgggcgaaaaattaaaattggaccttttatttaaccaaaattatcaatcaatatttcacaaattcattttttttaaaaaaataggtagaaaaaatttgaatcatgtgtattgggaccacaattttttttttttgaagtgttaagtgtatatttgctacatttcataaaaaaaagtacatatttactcttatgaatatttattatattatatattatacactatataaaaaatatttattatatataatgatgataaaaaaggagcctttaaatatagaaggtattgtgtaatggcttaagctgtcctatacttgagccgactttgcctcgaaatttagtcaaattaaaattaagtcaaaaataaaaaataaaaaaataaactcataatttttaaaaaagaaaatatagaccaaaatttaatattttataatttcgttcattttatatgttacagataaatatatattttttatatat

SEQ ID NO: 208689 - DNA, 870 bp, Cannabis indica
ctgccacttgggtcttcaaaaccaagcattttgaacatttgacttttttagatatgaacaaggagtagaaaccttggacgtattaggtttaaaaagttaggcttgtttgctcagtgtatttctgtgtctaattttcatgttattttcattctatttgtttaccaagattttcctccgccaaaagtgaggatatctatatatatatcgggggggaggctaatctaagacaatggcctctttctctttttcaaaaaaagaaataaaacgattgtttgaaggagcagaagatagtgcagaagctttataagataaaatggtgttcaatatgaaagagtttagagatgttcctttctctgatttatgaagagattggcaggtttcttgtagtgttgtcgtgctttctgaactttcattttgttttttttatgttcactgtatgatgggtggtacaatcttcgtgcacctttctacctttgtatcattactttctttaataatactagtagtgttttgacaagataaggtcagacaagcgacgaaatataaagtatgatagtgatgtgagcatattctacatgcatcaggacagaaagaggcaaaatcttttcacaaactagagactattctggatcaataactttggaactctatctagagcattcatccaaacattcaaaatgtgcatgattttttttctcttttgtaaagtaactactttgcattaagaagtaacgatataaaaacttaaggaaatcagacaagatctccaagcatgtacaattaaacaaattaacaaaggaaacatttacacgaattcaaacattcttacacaagaaaatttcccaccctataacacgtgaaaataagttt

SEQ ID NO: 208690 - DNA, 679 bp, Cannabis indica
gtcattacgtatacattgtgtggacttaatccattttcccttgacaccatcatggcttggtatccaaacaagagagatgaactcatctgagttctctggcttccagttgaacaagcaaaggaatgtatatagccttgttatcaacaatgtgtttgtctgcgaatagagtagccgagatacaagagagcaaacctccatagaatctgttcttacaccaatggcattcaactgctccttgtacaccgataagtctgattcgtagcacatcacatcaatactcggcacatcagtctggttcaaagtaccttcccaagctgaatcgaaaagaacacattctttgggaactgagtaaccctttgttgtctttaaaaacttgcttttggagatgttctcaagaaagttttcaggcaatgactgatcagaagacttggacataacagattttaggcacttcaacaatgctattgtaccagaagctgttgtaaattcaggttcaatgggactctttagaccttcaagaacaaatccagcgccaccctcaaagtcggtaatggcacctaacatttggagttcattcttgtacctgtaaatcataatgctataaaacccatcatcgattagaggaaggtcaacaaaaggcgataccgctccccaattcatactaaaaacaattgattgg

SEQ ID NO: 208691 - DNA, 1509 bp, Cannabis indica
ttctcagtcgatgcaagaggaaaaagtggtggtgtagctttgttgtggaaggatagtgaagatatctaaagtgttggggtatggcgtgaactatatagatgctgaagtcatggaaaagaatggtacttgttggcggcttacagggctttacggtgagccaaaccgaagtctccgtcggaatacttgggatcaaattcgtactctaatggctttatatgctctgccttggtgcattattggggacctcaataatgttatctcccaatcggacaaaaggggaggtaatccttatcccgcttggttaattgatggttttggtaatatgttggaagaatgtaatttggttgatatggatttgtgtggatatccatatacttgggagaagggggcgaggtacacagacatggatagaggtgcgtattgatcgggctctagttctccaagttggtatcatgtttttccatcagctaagttacttaatttagaagtatcaacttcagaccactgtccaattcaattacttcttgatgatgtgaagcgaactgagtttcaaaagaaatttagatttgaaaatctatggctcagggagcctgcttgtgcgcaaattgtcaaagatacctgggagcttctttcgggctgttcagttatggaaaaaataagcttctgtggtgacaaacttatggtgtggggaaaggattatgtgggaaatttcaaggagcgtattcgggattgcaaaacagagatacgtaaatggaagaggggtagagatgatatctcgattagtcgttacaaaagtgcagaagcacggctgcaagaagttttgattcaaaaggagattttttggcgccaaagatcgaaacagatatggctaaaagagggagaccagaattcaaagtattttcatgctatggccacttcaagaagaagaaataactcaatacagcgtttgcagaatgagcaaggggtttgggtcgattgggataataatttgtcaagccttatggtggactatttcagtaagcttttttcttcttcttccttggagattcgggaggtaactgactctattccttgtgttgtttcggatatgcaaaatgcgacccttttggagcctataactgatgatgaagttcgtagagctcttttccaaatgcatccagacaaatctcctggtccggatggtatgactccgggtttcttccaaaaatattggagtgtggtgggtggtgatattgtctctcaagttcggcaattctttgatacaggttacttttttccctcgcttaatgaaacttgtcttgttctaattcccaaaaagaaacaacctgtgtctatgatggatctccgtcctatatcttttgtgtaatgttatctacaaaagtcatttcaaaaagttattgccaaactgattaaaaaggtgtcttgccttgtgtatttctgaaactcagagtgcctttattcaggagattaattctgacaatatcatgatttctttttgagtatcatgca

SEQ ID NO: 208692 - DNA, 1377 bp, Cannabis indica
  modified_base (202)..(202): a, c, t, g, unknown or other
actaaaaaattgtcactaaaagtagttttttttttgtagtataaattgtattgtattaatattatttaatacaatactatatttagtattaacttatattaataagttgtataaaattatactatctttgctatatattcgaccctaaccctgactcttgacccaaaatcaaaatcctatcttaagctataaactccaatcncgaacccacgacccgaatcccactaccctaaactccaacctcagaccagagttcgaatttaagaggtggggttggggttcgggtcactttagttagcatttctaaaatagagagtgctttctgtttttatataaaaaaaaaaaaatacaaagaaaaagaaagaacttcatcaagggctttttttaacacaactaattttagagataattaaaataaagctacttaatttgatttgtcaaaataataataaaaaaagaagctgcttaatttaaaggcaatttaattaagaattagaaaatagaacaaaaataatataaaatccacaatatttttgcataggaacactgaaaatacatacaaaaccccctaattaaaaatataaattatttaaactcatgtaataatatgaacaactgcacatggagtaacctgaaaactaggatagaagaatttggtttcctctgtggagctcaaaggcacacgtaagtaacaatatatgtaattatgattctcaccatacttcatcttaccgtatttagtccgtacagaaacattaaggaccaccgtaacactatacaccccaccacttttctcttcatcataacaactactaaagaacacaccatcccaatcatcaaacgacatcgttttgttccccttaaaaactaccctcaaagcttttgtcgttttgtgtccttggtaaaaggacgccaaattaacgacagcaaacggcgtcgtagcgtagtaggcgcaggctctgacggcgtcgtagtagatggcgatcctagcgttgggatttgtaaagttgatattaaacgacatgtcgtatgagagtgaaaaagtagtagtattggtgtttgtgattggtttgaggtcgaagtcggtgagggagacgtttgtgacggaaacgatcacctcgcggcgggttccgaagaggattgataaaacgacgacgatgatgaggagaagtgagaagcttgctgctacgagaaagaagcagagttggaagagaaagcagcaaaagttgtttccctgcggtggaggaggcggtgggagatttggaccgttggattgggggtggattttaaccatggctcatggttattatcggacggtgaggagaattcttttatttttgttatgtttggccagcatgtggtatattatataataaa

SEQ ID NO: 208693 - DNA, 731 bp, Cannabis indica
aatcacattagacttttcccataccaaaacagacacaagcaactgagaagcagagttttatgtatagtaccaatggagtaagttctcattgtcaaaacattagctacactcctgtcaatctgagccatctgaccaatttttctcttctagagtcattcgattaagaaggtccctcaaccgaatcgccaccggttgttttggatctttgtacctcacgtactctgcctccgccatagctacccaccaccatatccacacgaacaacaacaacaacgatactgaaaccctagccattatcactccttttcaacaacttcttctacactgccaataacccagaaaaaaaacacacacacacacacaatagtatcaatcactataacactcccatttctgcgtttggtcactaagaaaaacgcagggggaaaaaaactaaacttctacagaagctccaactacgattcaactacactaccaagctccaactacagattatttattctgatcatccaatgaaaacagtgaaagaaagcaaaaacgagaatctttatgtgtaagtaaaaacacactaaaaactaatgaaaaaaaataaaaaaaagacgataaaagggagagtcttattacactgtgaaaaagagagaaagagagagctttaagcttttgcctgtgctatttcgagtgacagaagaggaaaagaaaaaaaaaaaaaaaacgaacagtgtagtagtgag

SEQ ID NO: 208694 - DNA, 413 bp, Cannabis indica
tcgatttcttcacaaaatggatacaggttgaacctttactttccataccttgcaaaaaagatctcgatttgaccatcaagaacatcatttgcaaatttgatttggaatacaaatcaaaatattgtttgataatggaactcagtttgatggcgagttgttcactaaattctttgtaaggaataagattactaaaagcttctcatcagtatcaagaccgcaagcaaacagacaagtataagctgttaataaaaccttttttttatgaatcggagaagttgtattgctcaaaagaagatttacaagttattagaaaatccacctagggccaataacaaactatacaaatgtaaacatgctagcataattcttttgtactctatactcttttaatttacaaactttgaaaccattct

SEQ ID NO: 208695 - DNA, 1064 bp, Cannabis indica
aaaaagattaacatcaaggccgacaaagttccccacttaccatataaaatgaaaataagatataacacgagagagactaaaagatttttgtataaactactcaatttaataatatcatttatagtgaagacaatgcatcacttgttagtgcccatgtgggatgatattcaatatcagaaatcataacatatataacatatatattgtaaccacttgggctacctcaagtagctataggtgggtgtgtgagtgttggaggtcttaagttcgagtccgaataaaacatgttgtaatatataaacgcttaaataaaaaaaagtaacatatatattgtaataataataataataataatttaatttagttctaccgaatttgcttactttaacattgtttattgtgtttttcaaaaaaaaaaaaatcacacacacattgtttattgtgtattgtcacaatcttttctcacgtatatctaaatagactaaataaataaaagtgtagctctccaaaagccaaaaataataatgtagactagactccaataattaatgctttattaattatgatatataatattacatatttattcttatcacatagacatacataataataagaataattagaataataaataatttgtatttttatctcttgaacattccatattatttaatcatgcctcttaaaatatatattttgttagaaattttacataaaatataacagttacataattatattgcttttgttaggttatgttttcttaactattaaaatttaacatttttacccctaatattagtcatctttttctgaagaccgaaaattatatatttctcacatactaaaatggtcattttattatttatatatgtgtaaaattttgaaataattttttaatagaaaagtaaccaattaatgtcttattcacatcaaaagtatctaaatgattgctttttttaaaaactcccaaaaaacaaaaatttatggaaacgagatttttcgagtttttctattttcagtaattgttttgaattttggtatgtatgctgatgtggcac

SEQ ID NO: 208696 - DNA, 526 bp, Cannabis indica
attgtgtttactaaataaaataaaagaagtgctattatcaactttttatatattccatagttaatctttgttttcaaaaaaatatatgtaaagatatattttgtcaattttcttatgacaatatttgttatatatctacatttttttatgtaagttttttttaaaaaaattgaaaataggttttaaagtttatttaacacgctagtggtaattgaaatattaggatcgaattctatttttgatataattaactattcataattttttaaaataaaattgtacatataatgagtattgttataaaaaaaattttaaaaaatatttgatcattttagatatagagattaattaagagatattaagaaaatattgtaattaacaataagtaaagaataattgtgtacaaaattgacttgaaagttctgtttgtttgttgtgacatttttttgttccaaatggtggattttttttttatatatatatattaggtgattgttacgtgccaagccacgtagtgttagtttta

SEQ ID NO: 208697 - DNA, 1067 bp, Cannabis indica
ggtggtggttggcgaggatttgggtaattttttttcgggatgtggctactgtgtatcatgatgaagaagaagacgaagtgaggtctgtttgccgaaggattagacttatacctctatggcgtcagttatttgaaataaactgacgccatagtgtaaaaaatacacgtgttaactatacatatagcgtcgattaatttcaaataactgacgccataaagggaaattccaaccattcacaacactaattccaaaacatcctctaaatgtactacataaattatatacctacggtttttattaaaaaactgcatttaaatgtcaattttgtatcaagcgagtattttacaccctttattttatcttttttatgaaaatggttgaaaaaaacaatctctaaaggctcatatattatagtagtgcatacatatacatccctgaaattgtgagtatcaatggcgatgttgcgacatatatactgaacaggtatataagcttattgaatgcgctttcactaattactccaagataagttaaaaaaacttcaaaagttagcagcactaacttttaatacaaatactaatacaacacaatacaatttaatacaattcagcgtaccaaatcagtgttattttttttttttttatatatatatatagaactactcactgttaattgtatgacacacatcataattattgtctaattaccaacctcacttttattgaaattaatgcttgatgtgattaatcttagaaaaaaacaaaaacgaaaacctcacttttaattttataatcatgattacgtattcacttagttattagtagtcgtatcttatctttcaatcccagtagttcgaataattttactaatagtaagcaaacgatcatcacacatcataatacaaatttagctaatatcctgcacttgcatttatttacatacatatggatatccaaaaatccaaaaaatatgcatatataaatatttaatatatttagctatataaaaacctaaattcagataaacgattaggcttgttggtgcgcatatataaggtcactccccaa

SEQ ID NO: 208698 - DNA, 1281 bp, Cannabis indica
agtttttgaatcgcctccgaaccccccccccccccccgcgcttcctggggtgctcgtggtatctttgctacccgagatcttattcggagggaaagttgttagattttaggtaacgggcaaagtgtggatctttggagttctccttgggatccttggttagaatggactgattttttagctgccttcaatccaatgcactgtctacttggtttagatctgagtttttgaatctattgggtagattgcccttactccattctcttcaacaagatatccttatgtggaaggatgctaagtatggaattttctctgtaaagttagcctatcagtctatctccaaaggtagacagggagggatggatggtctctttaagaaattgtggaagtcttctctcagcgaaggggtcaaactttttttgtagaaggttgggaggatattatcctctgtggacagtggcttcaatgcctgtttggtaacacttttttatgtgttctttgtgataatgatgtggactctctggaacacttgttttttcagtgtcatgtggctcgatttcgctagtttagaagctcgtggggcattcgtagcgatctcctccactttaattccctaagagattgtggagtggattttttctcctccttttggtgatagtgttgatttggatcactttacccattttgctgccttgctttgttttacgttgtggaactcccgtaataaatattttcataatgagttctttccctaatgacattatcataaaggtcttacactctttggcctcttgtgatcatatggtcagggatgctcctcccatcccttaccctgtggccctccttctctggtggagctaagagctggtaatctagtgaacatttttgttgatgcggcctttagagacaacgttgccgtctttgaggtgctttttcttgatagttttgggaatgttgttaaggcatttgttggtaaggagcaggttcacactctgcttgaagtagagtcttgcgctattttccatgctatctcaagctttttatcttgtggctagttcggggcaatgattttatctgattgtaaggttgcggttgatgcgattttgtcaaggactgtcctttcttggaagttatatccgtttttttttttttttgcaattgttctctctttttgattctactaattcttgtaaggtttgttggattcctcgtgtgaagaatggcactgctcacaagcttgctgccaaggctgcgtcccaatacttttgttgttttttttttttt

SEQ ID NO: 208699 - DNA, 811 bp, Cannabis indica
agagagagagagagtttgagggaaggagagagaaagagtttaaattatgagaggagtatttttggagttttgagaaaagtgtcatagttttgttagttttaaaggtattggtttaagaattaaattttttagttttataagtatataaaatcaaatttgccctacaaaatagaagaaaaaagtatcagtttagttgtgataagtaattaatatacttgatcaaattaccacatacatgattcattgactgtgtctacaaatttattaattggttctatattcagattgagttgtatgtttgattatttgtttgttagattatttattaaattttgttactttttcaaaaattgaaaagaaaatacataactcaagaaacaaaatactaattgtgttctagttttgttagtttatttattgaatctttatttaataatagctgtgttcttgcccattttcctatgatgggttttatatttttttttgattttatagtgatatatatatatatatatatatgtctaaataatgattgatagttttctttctcataatataatgctctttctaattggtagggtaatgcattaattttctaagcttcacttgaacggggtttcatatatattcttttactttctttgctacttggatctattgtgaatgcacgttgttgttgggttgtaatagtgtggtagtggtggtggtgcaatattggttcagatttttttttaaaattcttttgcttcggttcataaccgaagaaaaaagccaattagcatcggtgtactactatttgcttcagttatga

SEQ ID NO: 208700 - DNA, 905 bp, Cannabis indica
aatacaagcagtgatcatatgttaatcgcttgaacccaatttgttgtatataaatatcaaaacgtttattccattgccttaaggactgtttcaaaccatattgggatctgttaagcttgcacaccaattcaactcctttcccttccacctaaaaacccaggtggttgctccatgtagatctcttcatctaagaatccattagaaaggcagtcttgatatcaagttgttcaatttcaaacttcatttgagctgctaaagataacatcaatcttattgtcgtatactttaccacatgtgaaatgatttcagtgtagtctataccttccacctgagtaaaacctttaaccactaacctggctttgaaccttattggttctttcttgttgatccctcttttaccttgagaatccatttgcactccacaatcttcttattctccaactttggtacaactacccaagtcttgtttttctggagtgaatccatctcctcatccatggcttgaagccattttaacttgtttccacttgaaattgcctcttcgtagcttccaggttcttcaatttcagcttgttgtactgtcgccagtgcaaatgctattaagtctgcttttgcaaaccttgccagagggtgaatctctctcaaggtttatcacgtgccaactgataaccttccaaacttgtttgtcttaatccttctaaaacttctgtttagtctttgttatcttccggctctgcatcgacttctatctgaacattgtcttccaattccacactagtttctgtttatgaaccttcttcagggagcttcgttccataatccactttcatgcatatagtgttcttatttcctatttttcttgtattacatggagacagactaccttttccggtggtcaagtgggg

SEQ ID NO: 208701 - DNA, 729 bp, Cannabis indica
agtccccttgagtttcttcatcacagtgggttaccatgcctaccttttgcactgcttcaagatcaaaccctcaactacaacctttggcatcaacaccttaaaacggagagcttggtttctgcagttaaaagatgtaagtatcaaatattgatggaataattaaggggaattactttatatatataaatatatatatatatttaactttttatcaaatttacggtttgtatttctaaagtagtttttctggtagttgctacacgattttttattgtgatttatgttacagcgccagttgcaataagagtctctatctagaattccgtaaaaaataacaaaaaaaaaaatagttttgaagtctaaaaaataaaaaaaccggaaataattaattctaaaattttaacttatatataattttgtatctattaatatttcatttagggcgacgacaaaaaaagtaatgttggcgattcaaagcttgagaaacactctaatggagaccatactcacagcctcaatagccattttggtgatactatgtttggtcggccctactaaacaatgctttcaacgttactaatctcttgggcatccatccaactttttggtatctcaatcaagtaagatctactctttgaagtacggatcatcgtcactttttctatcagcaagcttcttgttcgggtcgaatggccattggatctctaattgatgccaattttatggtgt

SEQ ID NO: 208702 - DNA, 817 bp, Cannabis indica
ggaaatacaaaaagaaaaaccctgggatgacacatgtatgatgcccagcctgtgcaatctaacacccttaaatgccacatggagaaaaggccacctaccaaaccaatggatagatctcgtcacaaggtgatcaattcaagctagtgcatggggggaagttgtcctataaatacctcaacattccataagatacggggcgagatatttagaagataaaactaatgctatattatcttaaaaaaaaactctacataaaaaattcctactaagctttttcttctccaagaggaacaggaggaaaatagagtttcagtccattgtgtaccaatctgtatgaacatttaccggccaatgagcctaacaaaatggactcatggactattgatagttaacgtctgaaccacataaaaatctcgtattggtcatttaatctattatttctttcctaagctctagatatttagttgccaaaaatctcggtaaacattttggtgctttcattgagagttaaggaaagataaaacatgcgtggtgtcttctgtcataaatctgaagaaggaaggctgcctaattgcctgctagggtcaaggctgagatcaggggtgtgttggttagaggtgtcatcgcaagtggaggcttacacccttgactagacaaagaaagtatagaagatgaacacatatggtcttaaaatgtttgcagtgcccatgcacatatataaaagttcatttttaggcgtccaactctttgagaagatggctatccattggtatcctcaagccaaactccaatgcggtatgaccacgcagacacaatg

SEQ ID NO: 208703 - DNA, 907 bp, Cannabis indica
aaaaaaagaacttgaccactataagttatcggccttagctgtgaaaaatgttactaaaagaaaaaaaatgctggtctgagaagtttttttctgttttctctttacttacttctcttacaataaaactaatcactatgtttgatttgaattgaagtactcttctctcgaatgattttacttctattaattttgacattgctttgctagttagtttctcttttcaataaaccaagagctcaattaatgtatccacagaactggctgatcagataactcatcaaatccaatacagcaattgctatatataataaatctctatgctaaaagcaaagtctttgcaccataccaagacatttgttagtcttgaatctgtatcatgtatacaaacgtgaaatgatatttgataattgatgatcaaattttatggcagtgtagtttgcaatatacaatcagcaagtgttgtgtttagaacattgtggtgttccagtgtcgtaatcaactaaaatttggcttggactttgatattgtgctgcctttgaaatgagaaggatgttattaagaaactgagccttgagatgaatgcctcccctgcctgcataaccaactagttttgaccacaccattgctagttcttttatgcttcatataattgaaacactaatttgagaacctctaatcaactctttcccttaattattggctttgttcgttaccaagttgcctttgaatcttacaaaatggttttctgttattttgttttacacgatgaaactttacacacagtagtagacatgacatgaaggataaaaatacttgtattccgtagtataaaaaacatgtgtatattgttgaagcaaaaaatgaaaaatatatgtgtatatggcaattaggattttttcctctcgaa

SEQ ID NO: 208704 - DNA, 768 bp, Cannabis indica
ctctctctctctctctcaagattagatgttttacaatacaaaacctttttaatggtatctgttacaggagaaagaaagaaaaagatgtgacatcagtaagtacttcatatattttgtctattatgagcaccaatatatcaccagaactaattttaattccttgatggatgataggctatatctaaagaaagtgggaatagaaaaatgtataataatattttcttatatttgtagtataagatgtataataaataattgatataaacttaaaatatagttcatttaatatgctctactaattatgtgcaaaaactgatataaatttgacggatagtatgcacttagaatagataataaatttttttaaatgtaaaaaaatcatccactttgttatttcaactttttaccagttaccctgaaaaaaaaaattgacacatagtttgtttggcacaacatttattataatttaaaattaatatcactataaatacactaattttttatttattttgattattatattagttaaaatattaaattataaaaattttacatccatttttttatttgtattacataataaaagtaatgacaaaattgttttataaatttttaataaaaattaattaatattaaatttatatgaaaatataaaattatatattggagaataatataaaaaaattgatatagttatatcttaaacttattcatttgtgctaaatagagcacagttactcatcaaccactggtatagtcatcatgttt

SEQ ID NO: 208705 - DNA, 812 bp, Cannabis indica
gtgcaagtgccctgagtttgaaagttcttattagtatagtactctaataaaataaaaagccttaacagttatagatgcaacacttagaagtgccttcactctatgtgtgatcgttgtaaaaattagaattaaatttaactcttgcaaatcaagacggtacatgaatataagatgtgagaatcatgataaactacctactttattgggctgacaaagttaactaacttaactgataatagctctaatatccttttatttaagagacagaggtcatatgcctatgactgagctccttccaaatatattgagagccctgttttatgtctatgtcttatgtctatgactggcacataatgctgagaaactacttgatacgctacccaaaccaatactggacagaaacaaaaggataaatttgtctttgtatgtgtgtgagtacgtgtatatagagttatagacaaaaacaagaattatcttagaaataaggcaaataaaatagtacacaagtacaggattgtaaatctggaattaagaagctcaccctccagccctaaaaatcttagtaacttggcttccagcccacaccatggccattattttgaggaacctgccattgaccaagatgtaaatatctcatttaaacatttatattcaactttaaatttctacctttcaacagcagcaaggtaacccatcttccctggtgctggagcgacataaaacctaaaattgatacaaatagtttttaaaacaactgtagtatgcataccgacacattgaaatacagattgtaataagtctggaagatggca

SEQ ID NO: 208706 - DNA, 588 bp, Cannabis indica
cccaatagtgccttttagcatatatgacatttttacttcattattatgtaatttgcagaaaacccaaaaccaaaatcagcagcagaatctgagaccacaaacaacaacaacaataaagatatcaataataataataatgaaggaacatctaatgggaaccaaaatattggagcaaaaacatttacatttagagaattggctacagccacaaagaattttaggcaagagtgtttgcttggtgaaggtggatttggtagagtttataaaggcagacttgaaaaaactggccaggttaaacattacttcattttttattttttaattcaaaaatataatacattttttattttattaatgggattgttgtttttttaattattgaactagttcaggttgtagctgtgaaacaacttgacaggaatggtttacaaggaaacagagagtttcttgttgaggttttgatgttaagcctcttacatcatcaaaatctagtcaatcttattgggtattgtgctgatggtgaacagagacttttggtctatgaattcatgtcattgggttctctagaagaccatttattaggtactc

SEQ ID NO: 208707 - DNA, 1002 bp, Cannabis indica
gatgattatagtaggtgtagtttggacctacttattagcaacttaggatgagtacctaaatagtatagaaattggaaaactcaagtggaaaaccaaacacatcttaaaattaagaaccttaggacgaataatgggttagagtttattaactatgaatttgacaagacaagtcaagaatttgaaatcactaggtatagaaccgtagtgaagacctcgaagcaaaatcgtgttgttgaaaggatgaatcgtaccttattaaacaaagttagatctctactatttagttttagattagaaaaactattttgggggaaggtctagcaactgcaacctaccttataaatagaagcccaaaccgagtcataggcttgaaaaccccttatgaaatgtggtactacagaacccaaaacctaatgcactaaagaacatttgggtgtacaacatatatacaccaatctattgataagttggaacctagatccattaagggaactttcctaggatatgtcttaggaatcaaggggtatagaatttacatttccaagaagggtagaccaaagattatgagtgctagaaatgttgttttcaatgagttagattatcctcacttgtcatccgggaaaggtagtgtgtccctgtgtgatgtaggaaaaataggaaataaagacactacaagtgtggaaatggagtatggaatgaagctcctaaaagaaggctcacagacggaagccagcttggaaccagaaggtattgcacagatagaagttgatgctgagttggaagataaagaagaccaaatagaggttccggaagggttcgaacagataggtctggaaggttattaattggcatgcgatagaacccagagagagattcaccctctggcaaggtttgtggaagcagatttaatagcatttgcattggcaacagttcaacaaactagaattgaacaacccagaagctataaagaggcaatttaaagtggaaacaagtctaaatggc

SEQ ID NO: 208708 - DNA, 853 bp, Cannabis indica
aaaaaaaaaaatactaaatactctaatgtgacataataagtcaatgacaaatattttttttattattgtcattatttatagagagatatgagacactgaaaaatactcctcttataatattagtggcagttaaccaataccaatctcctaatgaattcttttctttgtaaaaaaaaaaaaaaaagtaacattagatttatattattttatttttctttttaattaaaaaaaatgtatcatttttgtctagtagaacagtgttgtgcatatagtgagcaatttaattctgaactacccaccaaataaaagataataaaaaaaatcggtgcatattttatttaaataaaaagattatgcatagtattatgtttttctttttcatatatatcggaatataatataatgttttatcatagccaaacaaagctacaaaagatatgatgaatcatgaaccgaccaagttggatccatttttgtagtcatagactcgtatacagttgtattattatatgtatatatataataggtatgtcaagacatcatgagtttgggttaaatatatatatatatatatatatatatatacgagtggggacagtgatcccttgtactcaaaacaataatattgtggaccatattataaattaagtttttattatttaatgagatcattgtaaggttaaatgagattgttattagggatgtttatctgaccacatttaatgtttttaagtttatttagatccaattcaattatatattagatgttaaattttatcgattcgatctaattaatttcagttacattaaatattttacgtctagtatgtattagattgaatccatgaaatac

SEQ ID NO: 208709 - DNA, 833 bp, Cannabis indica
agcagtacttataaattataatatacttgcaattgtatatataagaaccaagacattatccttattaagttattatttgttaaattgttaagggttcttctagtttctagttattataattgtttttatattaactagagaaaatcaataatatctttaaaatagttaatcaaaaaaataaataataatatctttaaaatatcatagtctaatataatgacaaaagagtttttgctaaatatctacatatacatagtctacttgcactaatgtataaataaatattatagagacattattttaattataataaataaaggaataattaagcaagtcatatttctttactatttttcttctatagtcaatgaagaagaaatttgaataaagggactgtatgtgaagagactacactcaaagaaaaataaaataaaaatcatatgtctaaattttgtaaaatattatgattatgtgtaattacagtacttcaaataatgtgaattaatggtaagtaattattcttttatatttgcttacttatattattaaaattaagaaatagagaatttgattaaataagagataaaagcaaaaggaatatttttcccactaattttgtaagaaatgtcattaagggtaatgaattttatttatttttaatattaaatatataatgacatttttttcctttaaaatatgtcttacaaaataattaccatgtactatagtttaactcaaaagggcaatttagtcaatttaagctttccgattgcgttttctaataaagtaaacaagataaatcactattattccatttctaaaaaaatttagta

SEQ ID NO: 208710 - DNA, 617 bp, Cannabis indica
tttccttcctagcctcttgtattgctgctgctgttgttggtgagttgcatcttacggttgtagcggtgtctgagctgtggttatggtggtattggtgtaagccattgaggatttttgaagctccactgattaatttatgaataggtacttaaatttcattttcttcttctatatttgtgatcaatttggtattttactaaagatactaatcaacaaattattactctttctcaaaaaccaaaaaaaaaaaaatatatatattatacttaatttatgtaattaaataaaaatgtaattggttatattttttataacaagggtaaaatttttattttagaattaaattaattatgtatttaaattaaaattttaaattaattacaatcgtctaataataattctaacgattaaaagtaaatataaccaaaaatttcttatgtatatttgtattatacataagaaatctgtggccaatttctgtatgttttaatttgtatatacttaatttattttttagttgacaaagctaacttaagttcatttttgtttacaatttaaaatttggtaaaattttggtaaaatttcaccaccaccctaatgtacatatgttcacttat

SEQ ID NO: 208711 - DNA, 746 bp, Cannabis indica
aaaaaaaaaaaattacatatatgatttggagggcaagaaagaaagtgttgtggcataaagaaataaaaggttggtttgagagataatgtgaatgattgtataggatgattgggtgttaaggggtcaagggattttcaattgtaagttgatgtacttaattgattttaagtgcacgaaatgtatatatttatcattttattttatattttatggttaaaaagatttatagtacacactctaaaagagttgttttaatattttattttatatgtttcaatattttagtataatatatattttttttcataattgcatacgttgtatttatttaagatctttataaatttttagaaaattttaaataatttatagtgtcgaaaataagattcaaacagttatttacctcccgtgtagaaaaaaaacagtcatgcttgcaactttatttcagtactataaaccatttagaattttttttaaaaatttataaatagtctttaataacaacaacacatacaataatgaaaaaaaattaagctaaaaaattatttgggatgctagccgatcatttaagagggtgtactactaccttttaaattttatttttcggcactataaattattcaaaattttataaaaatttacatgtgatcttaaataattacaacatatacaattacaaaaaagtattaaaataaaaaaaaaatcgagatgccaaaataaatacaatattttgatttttttttttt

SEQ ID NO: 208712 - DNA, 1097 bp, Cannabis indica
ttttttatataataattcctttatttatcatatttgtatatagatatgtaaaataaaatatcattgaaactcttacaatcatatgcatgttataaaaacttctataatataattatcatcaaactataagcatgcattttgtggaattcaagaaattttatagaataaaagaaatattattaataaaaatacaaaattatgcacaactaaatttatatgaaattatgaatattgcgcgtggaaggctgtctcaatctaaaattaagcctttggcaaaatcacaacgtgagaccataaaataatttttttttatacttttacaaaaaagaaaaaattaatcaaatatattttaaatttattgaaaatttatttttcttgcctttagggaggggaattgactaataattaaatctttatattcaatttcatctaataatttttttttctcaatagattaaattaagtcagatttgtcacttaaaaaagaaaaacaatatagttgaccataattaacaatcacgcgtagctcaataataatttatacgtgttctctttataaacttttttgacacaaaaatcgtacttaatttattgacttactgtcttatttatatgtttaagttatgttataataaatattgttaagtaaattcattaagttgaaaagactcaacataattaatttttagttagcataattaattttttttttttttttgaaaagactcagcataattacctaaaatatttggattgtgtaattctacatcatcaagtcaacttctgggtttacgtttggctttgttttcaaatgatggccatgcccaatccatgccatcacaaaaagccaattccaagttggatttgaagtggaaataaaaattaattaataattattgttattttttaattattattattattattttttccgaagaaatctagcttagttggaaagttcaatttccataccgggcttgtggttttcaataattccagccttataaagcaacataggtaagtaagtaggccagcaaccttttcaaaaaagaaaatataccaaatataagttttatttgatcattgctaatattaat

SEQ ID NO: 208713 - DNA, 512 bp, Cannabis indica
ttcaattctcgcttgaacagttttaagattgcttaaagaaaatttagtgcagagataagttgtttaaaagcttatagtgagctggaaaacacaatgtagcagttgattttattaacattgcagatgcctgagatattattgactgtgaaacttggtttgagcttacatgttgaaaatgttcacttcaagttcaactatagccatgatgttgtgttttaaatttttagagccatttatgaatctgaaaacatggctatagttgaacttgaattcaatatttcgttgaatgtactactacattgtagtttagcagttaaatattcccaaatgcaattcattacaatatgatttgtgtttccttatgttgtgcacatacccaaataaactcgttgaattgtttggtttcctgtttctgcttgaaatatgcatatttgaaagtatatgaagctagtaattgtatttcaggtcattctgttttgctagggccataataactttaaaatgggaactgt

SEQ ID NO: 208714 - DNA, 1060 bp, Cannabis indica
  modified_base (27)..(27): a, c, t, g, unknown or other
tatatatatttgatatagatgaaaagngatatttataattaatttgatggttatgtttgtgggtcaatagaggaggccaaatcacatgtcaaattcaatgaagtcaaaagaaaagaaataaggagaaaaaaaaatgagtaagtattagaaaaatgtcacaatttagtataggatgaactgttttattaggctttatttttcaatgttgattaggaaaaaaaaaacccatatcaagcctaaatgtgctcaaacttaattgtcttctcaactatttcaacacttttgaaaatcggttaacagggctcaattctcgaccgcaactaaatcgaatcccgaatatctttgttacgaaaaattgaaaaatcggtgaatataattagaattaaatagaaaaattcacctgccaactctttattctgactccattagtagttcctgaaattgttactctatccaccatcacattggagacttgggcttctgtattattaggtcctaagctaccaatgctgcatttacataaaatataatatatacaattattggtcatgaaaaggttgctaacaaaatacatgatcatgattatataaatatatatatatatatatatataataataataaagcttattgagttgaccttattccatgacctgggccacaagttatatctgtagctcttacattggttgtcccatttatgatagagatacagtcatcaccttcaaccaaaatatttaaatatactaattcagaataataatattccctaaatctggtcaataataaaggcttaattttgattatgtattttagggaaattctatggtacatctattatcgatatccagataattacaatcttaatttttttcgaaattcgaaaacatggctcaaacagtctgttacacgagtgccttttttagttaacaaacatgtgaaatagactgtttaaaatgtacttagactaactataatatacactatcatatataaaattttgagattataactatttaagatatcaaaaagacaaaaagggtgcaatcggtgtactatgg

SEQ ID NO: 208715 - DNA, 1203 bp, Cannabis indica
tccatggaggagaagtatgaaaagaagaaataaattacagactagattcagaatttgcatcgaaagtattgtagaatgaagataataaagttggtatcagagtgaggacgacagaatatacttcatatacaagaaagtcaattatttctggaagacaatatgatataatatgaaagggaaagtcaacggccagtcaacttgagcaagtaaacaagcatagttctagctctatatcatatgaaacaaattaaaggtcgtcaaataccaagttcatgattgacccagtaatcttaacatttttcaatgtgagtttggtagaaagcttttctaattatataaaagcaaagtactattaatgccccaaattagatctaatgaacatcatcgtatgtagcgcgatgaagaaagtttgtttttgatgtaatatgatggtaatattatggataattataatacaaataataatttaatgctagtcctgtaaatggaatgctagtccactcgatgacattttgagtagcattaaaacttgttatctttcggtcttaatattagggttgttcatgtacagagactataatcaattggctcatagaattgcatagatatgattaggattagataatgaattggtttaaaatgctcctttatctttcatgtaacttgtttgctttatactttgattgcatatcttaatgaagcacaagtttgcttcaaaaaaaaaaaaattttaaatagcaacatgaatgagaataatattattatattggggttacttctctaataagcctcaaaacaaaataaaataagagtctatttggtgacgtttccagttttaataaaaaaataaaaatattataaaaatattttcagttggccaaataaataaataaatatacaatctaaataaaaaaatttaacacaaataccacttgcacacaccttcaaccaaggatcaatgtttcctgggcaagtatcgcgcaaccacgtagaaactcaacgcaaccaaaatgaaaattcaaccagaaagagaactaccattaattccggcgacttcaccttagaagacgaccagaatcaatcaaagcatgggctgtttcgaattcatgaaaaaaaaaaggtatagaaaaactactacgaaactaaaattaaactggaaatctagtttaatttgcataaaactaatgtcctgatttcaatttt

SEQ ID NO: 208716 - DNA, 614 bp, Cannabis indica
gtttccttttgtgatgttttctactctcttaatagaggcattggggctatcgtatacagaatacccgaacttgaaaatgatcagttgctaaaaataagcctaaggagcgtgaagactgaagacacaacactaatttcccaggtgaggtttttcttttgaattaatttatcttaacacgtagtacgtcataaagaccataataattcatgtatgtatatgatggagattttaatagttacactcaatttataattatggttatatttatttttaaccattaaaatactattaaatagttgttacatatttagaaatttaataaaaataaataataaaacacttgtaacataatattaacttgatatttttttttatattttaaaattaaaattaattataattaacaattaacaattaacttgtaattaaaaattagttatattgacttgtaatttgttactaaataatatcatttaacaattaattttcttacacttgaattattaaaatatttatagctaaaccttttataattttaaattatacatgatctcataatttaaaatttcattacacatatactcttaattgaaaattattacacttatttattt

SEQ ID NO: 208717 - DNA, 1253 bp, Cannabis indica
gaacgaagtgaatattcaaaggacacttacaggcctagaggtactggcaccagggaccctagagtttggaactgggaacaagaatttgggcctaacctgtgtcttctctttccctgcctcctcccgagtgaccctcttggaggaaagcataggcgagctcctgctccctcttatacatatacttgttgtatttttcctcagtggttgaaataatgtcgaccctaagcaccttctcactcccggggttctaggcattgggacaaatgatcttggacaggttaaagtcgtcaatggattgactctccaagatcaatttggccctccagtaattaccagtcgtcaccaagtcatccacaattaaatcttctttcttataaccggcaaacacttgtgtgtggttcaggaaaagtggggtgggggcagtacggtgcatcggagggatcctgacccaattcgtcaataggtccggacgctcgaaagctttgaaatcagaggaaaagaaaaacctatggcaatattctttaatgttcttttgaaaattaaagggtaccagggtctcgtttgtcgggtaaccctgtaatttataaaaactgtctttaaacttgtccccctttttagggacggaaagtagttcatagaaatataaaatttcagcagggctgggggcggcctaacccctggcagcataaaagataaaaaggcctgaaaacaggcagtaggcttgaggtatcaactggtatggtgaaatttcgacaaaaactagaaaattaatgaagtaatcttggagatgtagcatggccccggacataagatgggtttggctctaggctccaaaaccattatagttacggtttggcgtctcctcatcccttgggagatggtgataaaccccggagctagatgggttaatccaagccacgatcactatcttctctagctggtgggcacaagtttgcatcaagtagagtttgtcagcttcacagccattggaacggcaagacctttttgtaagcaagcagacccttcataatttcctccaaggtggccaacttctttggccctttcttagaagactttgcaccagtggcagtaggggttgacataggattgacttggtgaagcttgagaatttcctcgtcgaacccgaagaaatcgtgattgtgaagatcttggagaacttcactcatctaaaagataagaaatccagcaagtagcccccacatcaaactctaagtcaaaaaggagaatggagg

SEQ ID NO: 208718 - DNA, 540 bp, Cannabis indica
ttttttctataaaataataggaaaactgcaacacaacaagttttccatcagaatttattttttttaaaaaataaaattaaacacatcatcctaagctaacaaatggcaaaaagggggatttacaagtttgtaaaaaagaaattctaagcgtatcacggtaaaaataatataactataaaaaaaaatattaccccatgtaaattggaatttttcaataatatacataaaatataaatatttacaaaaatattttaataaatctcaattacaataatacattgccatgtcattaaaaaataccttaattctaaaatgatattaatcccaaacttcattttttttttattattttcttggatttttaaaagtgacattttggttacttgtgatgctgataagaaactaattagttatttttatgtaaatgattttatcataaattatataatttgagataaaattttagttacccctaaaatttatttgtgaatatcataataatcaattagctattttaaagttatattatgctatcttatt

SEQ ID NO: 208719 - DNA, 695 bp, Cannabis indica
tacaacgaaagattaaaataattaatttttgaggtactcatttttaattgaaacaaattttgatgggcttgttattgttttgatttcggtaaatttattcttcctcctttctttgtatgaccatctgaaatgatcaaaagaaacaaaaggttatcatttttaagtttaaataggcaatatgattacataatttgattaatttattatgtaattaggaactactttatatttgtataggttgtatttgaagttctcagttctcacgatgtcttaacatggatctttttcttctgtttatattcatataggttattctacttaacttttgcaaaaaaaataaacattgttatcatggatttgatattttaacttgtatcgattatagattcatagagataaagtatgtaattgagcttaactaattggctaaaacttaagtacaacatttatagcatgaagagcctcaagtgaatgcctcatattttacaatccatgaaatttatttcctaataatacatatgaagatcaatttatggatgagaagttttttttttttttttaaatctggttttttcttgtagttaccataatagttttttctctatgttgacaaacacttttgtctacccccaatttttgtcagacaaattatggatataatccttctgaattgctttattatatagccatggagc

SEQ ID NO: 208720 - DNA, 810 bp, Cannabis indica
tttagacatttcaacaaacaccacaagtacatgaaaatcaaccacttgcctgacatgccgaccatctccataagcatccttaacagagactgattctgcattaagttgttccttaatctgttcaaccaaatttcatcataataaccataagtaattcccctaaaccctataaaaaccctaaatttaacatttacagtaacgaaatttccccaaattcaaaaattagaatttgattcccagacacccaaattgggattcaaactactcgaattgaacttaataagatgagatgagacaagaaccttgatttgcatggagttgataagaggtgaatcaatggcgccagcgtcattaacatgagcagcacgaacaggagtggaagtgaaaatcttccgacgaccaccagcgcgaaaatccaaacccgattgaacacgagcatggaattctctactcgagaaagtaatgaaggttcttctggtagtggtaatgctccccaaccattgattcgtctgtgtaaccctagccaatataggaaccgattcacgcattctcgtcaacaatggattagttgctccagtaaaaacgtatgaacgcgccattaacgtcttcgccgacattttcagagcttcttcttcttcttcttcttcggtatcttcacaacctgaaaagaagaatcagacaagagtggaaaatctcttcggtagaggtggaggagaactgggccaactactataggcccaatatataatgggctgaaactgagcttgaataaggttgatgggcctacaacaaagcttacaacggcccaaa

SEQ ID NO: 208721 - DNA, 1231 bp, Cannabis indica
cagaatctaattgtgttgttagtgtatgtggaggatatactaatagcatgacctaatcaagcttccatttctgcaatcgttgcataaatgaacaatgaatttgatgtcaaagatttccttccccttcactactttctaggagttgaagtaaaccaaacacactctggtatgcatctttctcaatcaaaatacattgcagatttgctcaccgacctcaaattgaatggtgttaaactatgtcttagtccaacaagctcatctcattttctttctcttacaaatggaaaaccttttactgaccacacactacatagaagcaccttaggggccctctagtatctcacattgactcggccagatgtggcatttatagtgaataaactcggtcaatttattcatgctccaacaaatgttcactgggatgcttgcaaacgtatgttcagatatcttaaagctaccattcatgagggatcatattcattagacctgcccccaaattgtgtttacaagcatactctgatgttgattggaaaagttgtccaaatgatatagaagatcgacaggggattatgcagtgtttttaggagggaatctaatctcatggtcagcaaagaaacaacaaattgttgctcgttcaagcacagaaagtgaattttctactttagcaaacatgacagccgaagtcaagtggctttcctctattttaaaagagcttcagaccagtcttccagctcctccaattattcaggttgacaaccaagggccaacctctctagcagcaaatctatttttccgcgcttgatcgaagcatataaaaattgatcttcactttgtgtaagatcagatttctagcgaaagaagtggaagtttgatatgttccttccttcaatcaaaccgcttatatactaacaaaatctctcacaatagatcgatttttgtatctaaaggccaagctaaaagtgtgtcccctttcgcttgaggggaggtgataaataaaaaactgtagctactttcaatttaattagttactagtttaagttgatttgctgttagttctttcaatttgttttgctacttgtactctgatttaatagagttcgttattgttgaattaagctggttttatcagctcccttttgtaatctctctcctatgtaaataaaggcagctcaagaactatgttacgcttttacaattctttgagattgaattcaagaagttggtctcgata

SEQ ID NO: 208722 - DNA, 664 bp, Cannabis indica
ataaaaatgctttgaatccaattttttaacatttctttattttttggtattgtatatgatcagtttcttgagttaatcattttactttgatttcactttgtaagtgttctgttgccctgtaatctctttctctatctctctccttctttgctaaagaaaggttttttagtcctattttcaattcttaaccacagaaaattactgctttcctttatttggaattttcattaacttaatgggggtcttcttaaagtatgattgtcatgcctttgtcattagaagagacttttcttacgaattggaagaagattaaactggtgttttttctttttcgctgaataaagtttttttgataaccagattaaactaatgttatatatttttacactggtatatatgctttgatattaaataaaaactttgatatgctttatatttttgctttttcaggcatactatttaactttgtcatttgtttacaaatttgaagaagtagcaaagaaaatatgtgtggactcaagttaatgtatgatgattgaagactctttgtaagattattatacactaattgctttgaattattgacataaaagaaaaaactacttgaataatctagaagaatagagatattatgtgtaggttaaagtctctggtcatttaatat

SEQ ID NO: 208723 - DNA, 1589 bp, Cannabis indica
tttgtttaaaagttaaaaatttatttgtaaaaggttacttatatgactatttgaacatattttattatattttattaatttttttcttcatttttttgttaatttatcatttcaattttaaaatataaaacatatatatttctacaaattgatttattaatattgtttatcatttttcttattttatttttataagtttagtttaaattatttaaataattaaaattagagataaaaattgacattttttacctaaaaaatacttttgtagttatacattataaattaaaaacaaaaatataaactttaaaatgatttatgtggcattctacttttttttttttctttccttagaaatacatgtagcttcacataaaattcatcaaatcacataaactcaacatgaatcatgtaaatcacataaaaaataatttaaatccttttaaatctatattttcatgaaagtaaatttttaccatgactctaaggctaggtgttagaacttattttatcaggattttaatttactaacatatatattgattataaaatatataatctaacatcctaaaatataaaattcatgaaacgataaataaatatcttgatgtttaagatcacttacattaatgacagcggaatataataactcctttcgttcagtactctaaccctagaatcctttctatagcattttatcaccaagtagtgaacctggatggctttccttaacccaataaagcgaaaattctttacaatcttctacaaaagtctgagtactatcttgattagtgtaggttggtactcaattcacctttggaacacatttttgaaatggctgaggaaagaaagaattcgagttgcctgacatgaaaagttaggtctctcttttgtctatcatcatgttccttatataggcattccttagggttagtttaacatgagatggacttaaaataaagacaattgggcttagaatctaacccatggctgaaagccattatggttcatagagttagatttttgtcactttattttaacttaatgaaacattgtgtcttttccaattttatcacttatcttatctaattatttaactaccaattttaatttaataattataaataattatcaaataaaatacaatttaaatatatttatttattagacctatgaagagtcttaattaacaaataaacacacatttattttttcttctcaaaataacccaaacttggtgaaatttctcaaataagacatagtatattttgaattctaatagacttattaaatcaactaattaggtgtacaatatcttattgtcccaaataatgtagagatcatgggtctatgtaaccaaactcccaataagtagatctaaaatttactaagtaaatttcctagctgaattattcctcctgattgtactattgatttagaatcccactcttgattacatagaacactctatataccaaatatagatagcactaggaattatccattgcttcaatctaaacaatcatttatacctctatggacaacttacatcaagtaggtaagcaattttttgttttacccttcaatgt

SEQ ID NO: 208724 - DNA, 995 bp, Cannabis indica
ttttagggccatccaaataacatgccgggcaccaaatagccgaataaatttttacaccacatactacatttttttcacttgtatacattcaaattttaaatttttgcataaaaatctagaatttctgtaaaatacccctttgtaaaattaataatctattaaaataggaaagaaaaatataaaaacccctcactaaagaagataattattccctaaaaatgataaaatcatttaagataataaaatcatatattaaaaaagaacttaccaggagatccagccggagtaatggatactgcaaaataaaaaaaaaaatcattatccaaggaagaaacgattacatgatacatccaaagaaaataaagcacaaaagaaaaaacatttccacaaagtaaaatcagaacttttcgacaaactgaaaacccagtttcaaatctcaatgtatgaatctacaacagtccaaaatatccattgcagaagaaaaagcatgtaaaaacaaaattaaaacagtgcgaaaatcaggctattttgtcgttctacaaatatttttcaaaaatggtgaaaaaaaaagcttacaatcgcagttagtagctgatggagcggagactttgcaagcttgaggaagagtagaagccttggtaacattcaaaacgacgccgagttgagcgctgctcttgaacgcctgacataggcaatcggcgtcggctttgagaacagtcttcagtccactacagcaagttccttccggcttagacaccgtgctaccattagaaacgaaggacaaacagtcagccatgttcagtattagactcgagcagtccactgctggagctggcgcgtgaggtgaagagccggctccttccacagccataaccatggccacagcgtacacaatagccaaggaaatacccatacccattttcactgccatttttgtaaatgaaaaagagaggagagtgaaaatgtgggttaagaattaagattgagagatattg

SEQ ID NO: 208725 - DNA, 1232 bp, Cannabis indica
ctcatggtcattacaaaataagtgcagcagtatgtcttcaacattctaacaaccataccgattgtgggtatgcccactttgcaatgggccacaaaattacaagaccgactcatattaaaaaaattacaaccaacaaaagcaaaagaagtgcatcgacagtgacgtgaatagttttgcaatctcccctagactcagcccaataaaagagttgatcaccaccttagagtcactttcaactattataaaattgtaccccttctcggttgccatatccagagctaagcaataagtaacaacttctccactaagaggatttgaaaagtcaagccttgacgtagtcacccaacagaccgcacctagatgatctctagcgaccacaataatacacatgtgctccaaacctactctgacatcacaattcattttgatcctatcaatcggagggggcaccaaatatctttacgcactgcaagtttgggcaactaagaaagaagctcgataatctatatagcaaaaatagatagagtcaatgaaaaactttatgctacccaaataattattatgaatcttatcattttgtgcccaccaaatagtgtccaccacaatggatgtatacaaaaaaacatcattcacatcaatgcccttatcttttaaactccaaaaaaactttatccaatctcacatacgaataccagtgtcgagaataggaaaaatatcttatggggaagacctccataaattataagcaaattgcatcgaaggaagagatgctccattgatttctcctcaaccccacaaatagggcagaggggattttctaaatggaacctcctattcagaataaaacaaagtggaagcgcattaaaaaagatactccaccatagaatgttatggagctctagtatcttactattttaaaacttgtttaagagggagggcgagacatcacaaagggggggtccgttaaagagcctgaataggtaggcagacttacaggagaacttgccactgcttccttttgtccaaacccaagaatccctccccttacctgagggttttcccccttttaaaatagcttggattgtttcctgatcaaataaggaatgaagcttctagagatcccaattactactctttgtaagtagatccgcaactaaattgagcccaagggaatgattgccattagagtggggataaaagtttggtccgtgaggaatccagggatcctccca

SEQ ID NO: 208726 - DNA, 960 bp, Cannabis indica
aacttgtttttcaagaaaacaaaacataagataccaagtaaataatagtaataatacaaaacttactttctgccaataaggcgcttgacatcaaaaacggttctttgtccattgagaggagcttgattttttgcagcttcaccaatgaggcgctcggaatctgtgaaagccacccaagaaggggtgattctgttgccttggtcattggctatgatctcaacgttgtcgtttttaaacactcccacacaagagtaggtagtaccaagatcgattcctattacagaactgggtttcgatttggatgatgaagaaccaccagccaacgccaccaccccaaacaaagccactacacaaaatactaaacacaaaaacagttttttcgctgccatcattgatcgatgaatatgagtttttttttttttttttttttttttttgaaacgatgggagtgaagtgatatatattgggagggaagtggtgtatttatagtaatgttgtgcataaatatctaaaagaaaattctaaaataactaacaaatttgttttaaattctacgtagaaaaatctatttttttttttttaaaaaaaaccattgatatttagaaagatttagtttaaattttaaatttaaaatatttttaattacttatctatcgttcaaagaataaaataaaattagaggatgaatataataacattaaaagtatttacttttcttttccaccgaatagttagtgttgaaataggtataatgtaaataaataaaaaaaaaaataagttttaaaaaataaatgaataataaaaaaattaaaggacgaatctataatatatatctatataaaaattctatcatttttaaattttttatgtgtttcataaatattaatcatgaatcaatatatatttaatggttatatttttatttgtaaccagtagggatattcattggatcacatccaa

SEQ ID NO: 208727 - DNA, 692 bp, Cannabis indica
cataatggggcctagtatttggcaattgttatcataggcctaggcccaaattatacaacctttattgtataagcaatttgccaaaccacttgtggtagatattgttggactccttgtataccaatagctgctaggttggaagtgaaatcattttgcccaatgtagaaggtgtagagtgactttccgaatatgtccggtgaaggaagtctttgtgattctgcaaaccaactttcatatcattacccaaaaataatgaaggattcgttttctgatcagtaaaagaaattttaaaaataatacaaacctttttggtcagatgagttatgaaattcattaaccctgaccttaaattccttcatttgattgagttggatagctagtgaaaatgggcttatcccagtgacaaataaggaagtgttaggaaggagcacagtggacgcaagtgtagcataattggccccatgtctataatcagatccaatggattgcaaatatgggctcagaaaatggacaatcccagagcctgagctgccaagttccacacaacagcacacatttcataattttattattattaaatattccatgccatcaatggataatttacttaaacaaaaatataaatacattatcaaaatttacatgtcaaatgataacatattattcatttcttgtataattcaatggtaaaa

SEQ ID NO: 208728 - DNA, 1006 bp, Cannabis indica
tatctctccagtcgtcccaaaagccgaagttataatgttttttttataggacaaagaaagatgaaaaagatgacgttttaaaaataagataaatatcaaattgtacggacgacgctatagtgccatgtgatattctccgaggtttcgttttagcgcaaaagcctattttttctagaacatagcgtcgttgctatagtgccacacttttggcgctacagcgccacataccattttttcactgtttcgaccttggtcagtaaatcatgcataacattcgcgtttggattccaaatgagatgttttaacatgttttgaaaagttgggaatgagctctatcattttggatttcataagctcattaagaaaataatgaaaatattgtcaaaaattagttcaaaaatcttaatccatcacaaaattgtcttttaagcacaaactaatgcacttggagaaaacacattaaatctgtacgatacttaagaaatacatattaattcatctaattattgactaagcataaatgtacaactgtgcactcatcacagacaccttttttatttttgcagtttgtgatttaaatgtcatgttatttttccagatgtatcagggcattatccttgtgcatgttatttatgtaggcctagcttaggatattgacgagtagtgggcttaataatattttatttaagagagcatcaaaactgtgtttattgggtcttgagggattttctaagttccgaaatttttcataactgcaggcttctggatccagatttggaaagctctggatctctctttgttggtagctacattttgcaacttatactgcattttccatcacaaatgctacctcacattcgagatctgattgctgctcttgttaggcgtatgcaatctgttcaaatagaagggttgaaaagctcattgatagtcatatttgctagattggtatgttcagactaagttcatctgaaatgaacgctgtccatatttatataaataattt

SEQ ID NO: 208729 - DNA, 715 bp, Cannabis indica
gagtatcgattaagtaacaagaacaagtaagaatgagaataaagaataataagtgttctacatctgaattggaactctgagactagctagctttgacttgtttttcatttacaggctgagattgacttctactcaaatcataaggatgcatacaagaacttgatataccgctattaagcagaactacttaccattgttcactctaatttattacatttcatgatgtttaagttttattggtgaaaacacagacttcactttgttattatgtaaaataaattggtggttctaatggcacaataatctgtttccaccattttcctcttttgccatgtttttgtatcaaattttatatctattctcatggcattgtttgatttttctcgatctttatttgatatatgtgttcatattaaatctttattaattaacggctaaaattagctcatcaaaacctccattgaaggagcaacaataaaactctcatgattaaaaaaatcaatgcttgccacagcctgaattagcaaccgcttattcataataataacaaagaatttttttggtttttaaaatagaggtagagagataaaaactccaccctctaaaaacaacccaaatcaattagaaccataagaaagcatacctagaatctagtgccataaatatcgatttcctccataaacacaagtataaatgtaacagtaacattattgtt

SEQ ID NO: 208730 - DNA, 704 bp, Cannabis indica
tgttaggactaaggtgaggttcacttatgttagaaggggaaagaatgctactactcaggggtaagggtgtctttttgcctatttgagggtattattgtaattgttgagtgggggtgcaagtgatatatcgttgtgaggggtttagtggggttttatgcatgtattgagtcttctctttactgcagagagtcctattgggctctaacttgtaactactttgaattaaataacactcaaccggccattttcttctgtgattatttctggtatatttgcaacattgattcaactgtataacagggcatatcatctggtatcagagcaggttgtctccgtgaatggcgactactcggagctccaagaaaattgtgggaacagagcaatcgggggaggaggaatcacaaactccggtttcaagggaatgggactcgatgaaggagaagattgactcccacgaacggggaattgctgtcattagtgagaagttggatttgctcctccgtggtcaggcgaggatggcaacggagctcaccgatggcccacgaagcccgattggaagatctgcccatgctccgatcgggtcaagcggaacgggttctcagaatcgggaggatgtcaacagccatgggggaaggcgatcggaattccgacctcggaatatcgaattgcccattttcacgggatcggatccggatgattagact

SEQ ID NO: 208731 - DNA, 1282 bp, Cannabis indica
tttcttttatttaatttttcattgatgttacaatttgtatagtgctgtattacaaatggataataaagaacatcgttttcttctttacttcgggaagttgacaaaaaaattctcatttagttatattaaattgggctcttttcatatgtatatatataactaaaataattctacaactaaacacatgtgcttccatcaacccaaatcattcggacaacagctacaacattctacttccatcagccctaatcattcggcctaacgtgcaacaaaagcgggaaacgtgctcaaccaaagcctccctgagagaagtatgctcgagttcttccctcaaaagctaagctcaagggtgaatctggcgataagcagcacatttggctaactttttttgaaaaattgaaaagacgcacctgaatcccttcttacacatctccacgagcttcacgtagagtttagcccaacaagttgcataaaaggctaaaataaaaggctggcaagggccaaagtaaggaaaatgcttatgtcgaaggcaatcgcagataatgctcccgggacttgaccttgtgaaaagaccaaactcaaaagaggacagtggaagaccctgtttcacagagaagggccacctcctgaccagctccaaacagataacttttctgaaagcgggctgaaaagcatctcgaccctgagaaaggaaggctaggattaaaaaaaaaaactgttcctgagtcaaccaggaggcaaacaagacataagggaaaaaaggttgaaacactggctgttggaaccagatgttttgaaaaacgcaaccagcccctaaactgtctatcacagttagtctctaagaaagggaacaacaaaaatatcctattcagctactaaatagccccccctggccgaggcaaagttaattgtctccgcagctgaaaaagtgtagttaaggagaaggatatacaaagcaaaaaagaaaaaacaaaataaacagattcaataaagggttggttggagaatcatggttgcgcactacctaacagagaggaaagacatgcaccgaacattccctccacagtctccgtgtaaaggtcgtgaacgaccttcatgttccgcataaagcaggcttggcttgcactttccccctccaattgctgattggcttgcagtaggccctcaatctagaacttggcatccataagctggcccagagggtttcgttgtcggcacccaggtcacggttcaacgccttaacccgctctagttctgtcaccagcacgccaacctccacggt

SEQ ID NO: 208732 - DNA, 653 bp, Cannabis indica
gatacgtgatattttgtacactagctaattttactaaatatcatgcataaacaattaatatacacggtacgtgatataatgtactcaactaccaccccacatatacatagatgatatgaacgaatgaaaataccaaaataacctcactccgacaacatggacctactatctacagtaattttgtactattaactgccacgaacagtaaggttgttgtaccttttcatactataactaacaccaacagtaaattgattgtacattttttgtaccttttcattttttaattaaaaaaacaaatttacaaccggttaccaaacctagaataaccggttgtcaactaaattaaaaaaattaaaaaatattttcatgtaccgtgggacccacttaccgtacaacggattgcaatccgtgtttttcacttctgggcacaaaattggttgcctatatttatatataagtaagtttatattattggatatatttattttcactcagataagaacatattcaattgccaaaaaaaaaagttgaccacaataatttttttccgagtggagtgccatgattgggtaagtaattattttctatttatatgctttttttttagttgaagtgaagtgatttgtttatttgcttattgattctttttt

SEQ ID NO: 208733 - DNA, 971 bp, Cannabis indica
gtagattatcatatcagtaaaaccctgtagtctgataaatctaggaaactttattcacatagtcatgcttactttccaaagtgttgacaacacaataaacaggatcaagtatgtgaaaagggtttcagaagaatttataaatcaaatagacaagcaattgataacatgaaccaaaacatacacaaatgaatgaaaaatacttctgtttctttattgatgttgaataaaattgattacattgaaatggagttttatttagggccataaaacccaacaacaagttggtattggaggaagctttgtctactctgtaacaagttcacaaaggaagaaattatgaaagcaggggctggtgcgaaacatttcacgacaaagctgttgtatgacaacagtatttcccaagagcagtttagattcagcaagtttatatggagctctcttaatattccaatgcatagatttatattttggcaggcaatcaactctcagctcctaacaagagataagtttgcccaatttcaaattgctctagacacaactcactgcccggtttgtgttgctgtagaggagagcaatgctcattgtttttttttaaaatgcatattatctcaacaggtattgtctcaaatttgcaactggttgaagagtagcagctggccgactagttatctcagctggcagaagtggctctgtttgaacaacgaggataagaagcaacgaattcatgtagcgatcttggcagccatgatttatagcttatggagcaatagaaacaattgcatcttcaacaattactctaatactgctgtaaagattacaaaagacatcaaaaatataatgtattttagacttcaaatagcaaagaaaggtagtttaaaagactatgaaagaagatacataaagtgtaatgtaaagcttggttttttatttgctttggctggtttgatataatttgtttgtgattaatgaag

SEQ ID NO: 208734 - DNA, 1704 bp, Cannabis indica
gaataataaagcggagaatataattatctataaacttataactgtgtttagttatgcaatgaaatatttagttagatttctgttattgacgcaattttttgtcaacaaatctaagaagatcgttaacgagcaaaatgaacacaagtattcgtcaattgaagtaaaccaattaatcgaaaataaatttaacaaagatgaacacgaggattagttcatccccttttcagcggtaataggctactccacttgggatgttattggtctcaatacttaaggagagttctctagagttatgttctccaagagttcagttcttaagtgaattttttagaatgagaaagcagaagtttgtgagaaggagttgacctcttttacaattaatatcacctttatataagttatcatcgactatcttagggtttaaaatctcttaacccaagacacactttctcttaactatagttaagtttaaaatacaaaataataacaaaattgtattttaaaagaaatatctaaaaaaatgataattgctaaaagatatctttaatccacacatgttggcttattttcatcacgaggagcacgtgcatattgataaataacacatgtcgagatcatgatgttgatgactcgtgaggagcacgtgctaaagtgaggagcataagctcaaagcttgagctctcatggcagattttgattgagagcatgattttgatttttgttatgtggagatcgatgtatggataatgtataattattctgtgaaggttagaatgatttggtggggttttgagaagttgaaagttgagtttttttttttttttctattgaaaaaacggtctgctgtaccaaaatttatattttggccataacttttcacttgggtgtctattttaaatgttgtatatactattcgaagcttgcaatgagctctataatatggtatattttagagtcaaagtataagttttattttagggtatttataccacgagatttggtagaaaatcctagattgttttatgcgagtattaggtagtatttttgaatagacacttataggtttactgttgttgtgacatagggccgaggtcatcgggtattttctccactcaggttggccgaatgcataaatctagattaaatgtaagaaaaatacatttgtaccacatagcatgccaagtacgattaagatcatttatgaattaaatagttgtgaaaataacaagacagtcattattgttatgaaagcaaggtgacagttattactgttatgaaagcaaggtgacgattattaccgttatgaaagcaaggtgacagtcattaccgttatgaacactgcacacccaataacacacttgttccatttatttttgtaagggtaaatagtggcataatacccaaagttttatgattgtaagaggcataaactcaatgtttatttttagcggcataagtacccaatatttgtaaaactataatttttctctaattttgtcagtacagactctaatattgtcttaaacagggcacatataaaatctaaattattgatcatcggatctaaatagagatatataatatcagttacttctaaatattcttttaatatattcagtttgtaatttcttttcatttttggtatttatgaaatatttgagaaaaaattataccatagtatagaagatgacgtggcaaatctta

SEQ ID NO: 208735 - DNA, 948 bp, Cannabis indica
cttgattctgtaaataatcacttgatacgtgttcgaagatttatcttgtcacctctaaccatctctaacttccttctcgaagaactatagtacaagagtgtgttttttttgttctgtgcagaatggaaatgtttagggaaggtggatcaacctcgagacctccgatgttggagcgtcctaactgcccatacaggaagacgaagatgcgtgctttcttgacagctgttgatgaaagagtctagatgtccaaagaagaagggtggtcgaaacaaactttaatggagaatgaaattattattcctaaacccatgagccgatggaccactgacgaaatggaaacggctaacttcaactcaaaggccttacatgctctatttaatgctgtctccacgaaccaattaaaggtcattgctaaatgtgaaattccaaatgaagcatgggagaagctgaaaattaaaaataagggaacaaatgctgtaaagaaatcaaggttgcgagctttggccaaggattttgaaaatctaaccatggaggaagacgagtcagtagctgaatttcatgcaaagttgtgtgatatctcaaatgagtcctatgctctggggaaaacctactcaaattcaaagcttgttcgaaaagtcttggagttctccctagaagatttatgtctaaattaacctcaatcgaagaaatgagaaacattgaggaactggatcttgatgacctcattgagtccttgcaaaattatgagctgtcactgtccaggtggaagaaaaccaagaaacagaaggatgcggtcaaggataaatctgatgtgagtgtcgccctcattcatcaagaaaacaagaaacgattttagaggaattgaatggcattactgacgagactgtttccttgttaacaagaaactactgatcaaaagaatcgtggaatcaagtgcagagagtgtga

SEQ ID NO: 208736 - DNA, 766 bp, Cannabis indica
tgacatttcctgtagtgtatatacactttattatgtgatatgcaagcgaaaaagaaaattgtaattatcattgttacagtttgaacaaaagtcttttttgtaattacttggaattacattttaagaaatttctatttgcatccataaaattataaatacaccttattattaaaaaaatataaaattaaataatttctaaaaattattcttaatatttttttttaaatttttttcctcacattatcttatgttaatttcaatacttattttgattttatttttataatttagtctaattcatgtatatatattttttaagaaaatatttcatataatttttcattttaatttttttctcataatattaaaaatttgatttaattttgtttgataggtatattttttaagaatatgaattgagagaaaaaagttaaaaaaatttagtaaaattaaagatattaattttatataaaattaaaattattaaaataaaggctctttataaattgttgagatgtaaataaaattttcaaaatttctaattcttaaaggacttcctaaatgagcccttaataatataatttcatatatagatgatgcatttatgggacccttatctaccataataagatttactattttttttttgttcaaactaggataaatacataggaaaaacacatatctttcaaaataatcaatacgcatagtgaaagtgacaagtatatgatcgatctacacgtagatgacatatcacactgtcaaa

SEQ ID NO: 208737 - DNA, 1022 bp, Cannabis indica
aggcagtcacgaggcatccaacaacctcatgactctctaggcacacaaggaaaacaccagtaactctgcccagacttctaatggtaaaactactagaaataagcgccgcaccaacaactctgggaggaaaatgggaaaaaggggaagtttaataattctcccacaccatagaagaagaaggaggagaagtacacttgtttcaccctcctaacagagaggcttgaggtaatcttcacggttactcagggaatagtcccataccgaaaatcctttcctatcataacggagatgggtaagagggacatgtcaaagttctagagatatcacaacgactttggccacgaaactaatgagttttaaaatctaaagagggagatagagtaccaaataaggcgtacaatccccacctacgtcgttatgtgcaagatgaccaaactcaggcacaaggtgcccagaatggagatctactgccatgtcatgtggcaggacacctatgggtcattataggctgaccccacgatgcaggcaaaaacagaaaagctacggagcactatgcttggacactccctcataagcccaatggagatatcttacctatccaagataggagctctaagcaacaaaagcctatagagcccacgatctctttcaccaaacaagatgcagctccagtcagcttcccaaacaatgatccccaggtcattattgtacaaatcgggaacatgaccgtggcaagatgtatggtggatgacgaagtctcttccaacattcttttcaaattaacatatcaaaagatggggctctaactcaccaatctggcgccttgcaaccaagtgatgtatggcttttttggccaagacatcgtacttgtcaggtatatcagattacccctcacagttggagaaaatataactaccaaaacactgatggcacatttcgtcgtgatggatgttccctcagcttttaataccatcattggcgaaccgacccttcatgaattgaaggcagtaacatctatctac

SEQ ID NO: 208738 - DNA, 573 bp, Cannabis indica
tttccagcttgaattgtgaactgtgaactgtgaaccctaatttcttgcccctttttccactgtgaacatttacatgatttatatgaaaaatctatatacagaaagaaagctttagttactgcagttggtcaatatagcagggtcaaaaaggtctttttagttttggtcaagaatgaatatgaaagagaagaacacatagaaacatatcaaacggtcttaggacaaaaattataagtgtggctacttaccaaattggtgttttttccaaaggaaattaattacatttcctaaatttgtgtacgtacttactaaatttatttcattttattttttaattaaaatagaatacatttttcttttctctctagagaagaatataactaattatgtataggaataatattattaaaataaaaagtgaataaaatattaagccaatttgcactatttaacatttgaatacggtatttttttaatattgtgatttttaaaaaaacaaattatgtaattttattattagtaatagtttgcaattttgttgtaaaacgcgagcgggaatggaattagaaaaat

SEQ ID NO: 208739 - DNA, 637 bp, Cannabis indica
aacaaatatgacactcttaaggttttcatatttttatattaggagagtaaattcgtaaatcaaaacttctcttccacaaaagatatataacatcattagactatatttataaaaatgttaagggatactgtgtttaacactaattataaagtgatatgttattggtaaagttaaatattgaattaaattttaatttaataattattataaaatctcataaattatgatcatgtagtaatattgaacatcattaggcctaataataatattttttttaaatattacttttaatttgacgaaaattaaattcatggttattcagtactattttgaaaaatataagatttgaattgtcatttaacgaaatagagaatccaattaataatttttacaaaacacaaatttaaaatggtatttttcttgtagaattcacataccattatataatagagtaattagtgatataaatacataagttcaactccccgttttaaataaatatataaatttattttttatgataataatacttaagttatatttaaaacttttgtaggtacttgtctattaagtatcagtaaattgccagcaatcttaaattgatttatgttattaaatttttattttttatttataa

SEQ ID NO: 208740 - DNA, 1212 bp, Cannabis indica
caacaacaacaacaacaatatacctcatatggctcctggcttgtcacgaagaaagtatcaaagccaaatacttgaatttttaagtatttcaattgtttccttaggaatcctgattgattcatccagttgctgtggctgttcatgcaaatttagaaactaaggtgtcaaaaccaaggcacgagacagaaaatgcctcaaaaataaaaataactattcataatcaccttcagacctggcagaggggatccactagctacttctaatttatcaacatcctgtttgaatgcaagaggataaagaaattaatggttagtggatcccatatatattggaaaagcatatatattttctccaattcaaaagaaaagagcttccataagttctgtcaatcaacttggagctgatcataggatcagtccctaccaacctcaagaaaacttgaatttatgcccaagtacagaaaaacagtctttaagttattgtccaatgcttaagacctaatgagctacatttcatatatgagtaacggcaggggcatcagcactaccctgaccaccaacaaagactaaaattatgcttaaaccctcgtttatgcttatatcctttgctgaacacaatcatgaatgagaaaagctcttaaaagtaccaacacaatcataaacaggtctatgtagaacaaaacaaacataataaaaatagtattacctaaataccaacctgagaaatatttcccgcatcattttcattaatttgttctgaagcaagcggcttagagtcatcatgggtgttatttggctctatggaatcagtgggaggctgaacttgaacctcttcatgctcttcgtcgtcctaaacacattggcacttcaactaatcggtaatatattataagggaaaggagatggaaagggatgaacatgaataaaacttgatcaactaacttacatgataaaagatttataaaaacttgcttcttaaacatgcaaaatacacacataaataaataacaaagagctttcttgattttaattccctttaaggcccattacagatatttaaacattgattagaaaagtaacgtttcggtctcgcatttatatcaatttattttctcagaaaattatctaacgactaagttcttgagaatgctctttaggattattacatataagagtacaatttactttaccctttcagaaaaaattagtctta

SEQ ID NO: 208741 - DNA, 512 bp, Cannabis indica
agactctaatgttacatgaatagaactcatatcggacctcgaccggagcagcttttgctgtgagtgatatagaatccaagaacataaagcaggattctttgttgtttagttgacttgtctaatctcactatgtagattttgaatatccaaagagaaaaatatatagagatgcaatagtggcagctgattttgaacttgttggttatgattcttcgtgaaaattgttgaagagcatttcactagttacaacctcaatttttcagaccatttattaaaagctcaggttgatgtgaataataagtcatattttcacattgtctcaaagaataactaaaagaacaatttgattatcattttaatttaagttcttaattaatctactgctgaattctcctatcccaactaaagtaactttgaaattgataataaaagaaatagttagctagcgggtaaaagaaagactagttttacaatttagaaggcatttgaagacaaattcaaaagtcaaatca

SEQ ID NO: 208742 - DNA, 1344 bp, Cannabis indica
tccttgttttctagtctgtattaaaggtttatataattctttgtacaaaatactgaaatatgccaactttttttttttgacatactgaaatatgccaacttgtttagacccaaattgccaaatgcatgcctccaacaaaaagaaaataaatataattgatgtaatatataatccatagaccttattataggtgcatttggtaatatttttattttttaattattaaaataaaagtaaaatttatgtttttaatattttattttaaaaaataaaaatgtatcctataaacatttttgttttttaattttaaaaacaaaaaataaaaatgtgtctataactttcttttctattttttatttatttttatttaagttgggtccaggtctagattcagggtcagggccgtggtctgagtctagaactagggtcggggtcggagtgcagttcccaaggtgtcggagtctaaataaaatattgattaagaaaaaaaaattatttaaaaaattataaaagtgatttttttgttcaatatttttaaaattttgactctcaattaaaacatgaatcaatgaaaaagattttatagaatatattatattttcacttttctaactaaaaaacataaaactgattaaagaagtcttgataaatgcatctaaactaacttttaaactatgtgtattccctctagctcactagtaattagttttcttattgtgatattttcataactacttaaaatagttaaaaaataaaaaacttaaataaaatttgattgtacggaattttaagtaattttataatttagaagtttttttttttcttttattttcttgtaagattacggattattaatgttttatatatgttattttcatattaattttttcaaaataatttaattacttcatattgttatttttatgtcttattgttgtttttcttttattttaatgttatttttataagacatatgtaaaattttaattaaaaaataaaaaaatggaaaattgaaaaaataattttataaaaatatataatataaaaattatttaacggtaaaaatattaaattttttctataaatagtgtgtaattcttttaaatttgtttttttttgttcttaaaagcaaaatctgcacatagaatattgtgtccgtaattaatttatatatgaaatattatacatatgtatcattcaaatattataatattcttttcattcatctgacttgtgcaaaatctagctatcaaactccaataacctaatctttctattgtccaccaatcatgcacccacaaaacctgcatatatctaaagtctaatccaagactgatgattccc

SEQ ID NO: 208743 - DNA, 854 bp, Cannabis indica
atatatttatatatattatatacttccaaagttttacgataattaacaaagaaaaaataacatgataattaatcagctttctttttcatgctgccataattattcattatatacaataattataataataaaaaaaaacacctcatattattatgtaagttttgaacatgatttcaagacattattacttacatgcatgcatacacattttatcacattacaaagaaaaattaagtactataaatatatatatacttaggagcttacataataattaataattatattataaaaattttttaatcacaatataatatgttgtgattaaatgtagtttttagtcataataaaaattacttgtgataatatttagatataaattgtcactaatttaattttagttactttagtcacaaataattataatttttgtgactaatacttttaatgacagatcttttattaaagatgacagatatgaatgatgatttataattattaatcacaatttttttatttttggtcacaaattttattgtgattcacaattttttgtgatgagtattgacttatataatataatataatatatgtgtatatatattaaaagaaaaaataaatttcataatcagacctgaccctaagtataggtggactagaaacaatatttgcataaataatagttaaaatttgtgtgtataaacacaccaatatcaattcataaatttatcaatattttagtttttgtttttaatttcattctctctttataaatattttaagttttttctttgtttttttattattagtaatgaatagtaatattcactcaatcatatgcatacatatagaat

SEQ ID NO: 208744 - DNA, 650 bp, Cannabis indica
atttttataagtttttctatattaaatataaacattttcttgaaattaagtaccccggaacaaaagtatattttccacccttaaattccactcatatataattgtatgcatcacattattattttaaattatcatgatatatatagagagagttttttcttttagtatggtggtcaatatatattaatggctttgtaaaagtagtctataatctgtgaaaactacattaaacaaccaatctcatcaatatcaactatatataatgcaaaattgaaatgtgtcttaatatatgatttgtacggacatttctaattaagtaacttaaaggatattgtatagttatttcaaagtaattaagtaatgtttattagttatctatttttttgtgtagatcttacataatgctgtatgtatgtgtggaattattatatataagtataaataaagagatataattaataaaattgattttttaaagctctcgtatgtatatgcagaccagttcttattaggcctattttgcttggtcatattaattcccatatatataaataaacaaaagtagtgaagaaatcatcattaataatggtaagcaatattttttatattattcatatattatattatatgaagaagatttttgggtaaga

SEQ ID NO: 208745 - DNA, 937 bp, Cannabis indica
aattatttatttgtttttgctttttcatcattttcttggtttgaaactctttcaggatacatttaggggaagagtttgtgagtgccctgttgttaatggcgtgcagtataaaggtgacggttatacatcttgccatggtaagccattcatcactacattaaaatgcggtgattttagataagaattaaacctctgtatggtaaaaattattgatgtaggatgaagggagaatattgaagagaataaggcaacataaataatagatagaaattttgaaatagaaaaaaaaaggaatagatagaaatagaaaaaccagtatagaagaacaagcaaatattataatttagaaagatataaatgctcgacgatttatattttcattaccaagctatctaaaatatgaaaataacttggccttttatcagacaagaaaataaggaaatctataataaaatagtaatcacaaaattacacgaacttatttcacatcaagtatatggactagcacactattaaagcggacttctatgaccattttcattaatagggtctacatgtactaaaaagcaatcatttttctatttaagtcaggtttgatcaaagctaccaatttattttctgcatttgagcaaagatgaaagaagataatctaattcttgaaaaacgtatattgaaacataataccgtagtattttaggttagaaattgttaagtcctttcagcagaatccatttgcttcatctcagaaattgttacaagtccttttggggttatgtttcttagagtatagttgggctactaaacattctccctaatcttgtatggtctctaaagacaagataaataaaagttgaaaatatagatttcgatgattatccttgctacaattgtaaattgtcattgtttgaatgttttactggtgcaatgtatataatta

SEQ ID NO: 208746 - DNA, 1012 bp, Cannabis indica
ccaaatgtgaatcctttgaaaggtttgctaattgagttcatagctatggatccttactgagagggatgcacatatcgtaattgctttattaaccataaaacaagcaaactccaaaacttaatgatctatatttggttgaaaggcttatattcaaatgtttttttgtttacttatttatttttagatatattgtacaattttctcttttgcaatagatatattgtactagaatattacagtatataattttctcacgatccccaagctcggtagctaactagctatggctttttaaaaaattttcaaattaataaaatttgttaagagaattagattgtttataaaaatttaatagtcaagcgaagtttgagaaattcagtgttcttaaaattgttattaatgtagttatagatatattagtactaggcacatcacttattctctaacaaaaataacaaaaattataaggttgaaattcacatttcctatctcttctgatgtaaaaagaatagttattattaagattccttctaattgcattggctaactccaaattagctcgatacactttttcaagcaagcggtcatattatgttagagtaatgatatgttcatatataaattaggttgattaagatttttgcccttgaattttgacacgtaccaaattatgcctctgaacttttaaggtcgttaaaaatgtcccctgaactattgagattgttggattaaaagacttttgtctaatttcattcaattttactattttagtgattgtttatgtactaaaccatgcttcccagactttgatatctaccaaattatgcccctcgaacttttacatgtactaaattatggcccctgaactttcgtccatgttagacttttttactaaaattaaaaaaaaaaatccttaaatctaacaatctcaataattcaggggcatatttggtacacaacaaagttcaaggacaaatacctaattagcctataaattacattaagatttaac

SEQ ID NO: 208747 - DNA, 1017 bp, Cannabis indica
ttaattcgttaagatcttaaaaactcagatgcttataagaaaaaatccagatggccaaaatcaaaaatctaaagctaaaattcagctcaaatagaaaactcaaatatttttcattcaatatgttttgtgaagctcatcagagtgatgagtttctgaatttggaaatatcttgttaacaccaaaacattattttgtatcctaaattcattgaaaatttttaggcttagtttgtctctaatattttgtattagatttgaaatttttaccttacaagtgtattaaatttgcaaaattcgatttgcaaagaaacattcagtttgatgattgatttattattctttgtatgggcagtactctccttaattgccattgttatttctttaatacacttctcattttgttaagttaagctctcagtggtttcaataaacactttcagcttcttcttgatctcgtctataatgatctttaaagcatcgtcttaagtgaaagtaaattaagcatcagttactcaatcacaatttccaacttgttaacaagtaacctattgttctccaaatctttgattgtagcaaaatttttaacttgcattgagctagttaatgctctctgtcctttaatagtattctcataccgattttaaagcacattacaccatttcccaaccgagcctatcaagacagccaatgcaccaaacatggttgtatcaacagctggtgcatcaatagcagctgccacaactgtgaaaatcaacaccaaaacaatgataccttgaaaataacattcgataccttcctccaagtctagagagatttcagtttcttatcaagttttctctttttttctacaactttttcaacattgtcacatgctacttaaacacaaattgatataacagaaagaactcttcaacaaaagggtctcttgcctccttgaaccgagccaattcttgtaaggtattggctaagcttctactacttctactataaccacattttgtttctagtagtaaaaata

SEQ ID NO: 208748 - DNA, 675 bp, Cannabis indica
agaaagttatattctcatgaaatcttttctccaagtagccgaaaatgataaaatggtgatgagagtgggtgctaatcaaaggtcgactatcgttaatggtagttcaatgtgggtttggaatagaaagaggtaagagaagaaaagataaccaagataaagagagattgagaaaattaggagaatttaaaatgagagcgggattttagaaagaaataagaaaaattaatgtaattatgtaatgatgtctaactaaattaataaggtccaacaatatgttaattttataatcgggttctctttcaagcataaaactcaaaattttcaattaataaaaagtagagtaatttgctgcataaattaatttttagttgcaaataaatatctgtggtaaaaatacttaagttatatttttaaaactaaattggtacctagctgttaaatataagtaattatccatgtatcatttttttttattagtatacataaattatttttttaaaaagaaaataaaatttcacgatataaatcaatcaaagattgacacgtgctaatttatttaatatttaataactgagtacctacaaaattttagatatataacttaagtattattggaccaatcaaaaattggcatgtaataatttacaataggaagtataccaaaacaacatttca

SEQ ID NO: 208749 - DNA, 743 bp, Cannabis indica
tcagttaaaattgcagcatggagtacatttctgccataagggccagtagtgggtggtgaggagcaattgtttagtatttcatcaaccaaatccaagtactctgcctccacagccatgtaaagtggtgtttctcctgcttcattagccaaatgtgtgaaatgagggtcttgtttagtcaaaatccttacaatcttaaaatggttgaacctcacagcctcatgcaaagcagtgtccatttccttgtttctctgcctcatcataccatgaccatccacacctaaggtggccttctcaagatcggacctttcaagcagtttagcacgaataataagaaactcaacaataagatcatggccgtaccttgctgccaagtgtaaaggagtctctcctcttgaattggtttgcaacaacagttgtggacacatctccaatatcccttccaagaaggacattgtactactttttgaagcaatgatattgacatggacaactgtattcttttctggggtcaataattggtcaaggcagagttggttgttgactacaatattcttcaacacttggatttctccattggctgcagcttggaacaccatggaatccatgcctgtagtgctgttagaatcaggctcaccaataagcaaggtacttgaagccatataataattatatctgttatattgtcaagctagaattcataaatatatctatccttcttcccttgttctcttcaacttcactat

SEQ ID NO: 208750 - DNA, 1070 bp, Cannabis indica
ggtgagggtggttcaggaacaacgccttcatttgtgctagagaacccatcgtgggagcagtcttgcacctcccattatattggtgcggtccaacaatgcatgaccaattattcaagggaagattaggagtgcatctgaggggttcccccactaggtcttgcatgactgccctttttgtagatggccgcaatgtctcaggagatgctttcacaaggtggagcccctggattttcttccagctactagatgcttttggggcaagttggagtccactatagaggagagggattgactatcttccctgttagcctctcatgaggcgcgcatccaggaattggagggtgagcttgtagcagtgacggaggctcagaagtaaggaagtgaggccctcgctgcttacggtgatcataaagtagcattcaacttgtcacttgaggaagtcataagggagcgagacgatgtatgcatacagcttgctgcagctattgatgagaggtacaaagtggcatgccaacttaaaagtgcttgcaaaaataagaagagactcgagtgtcaagtcgaaaaactaaaatcttgcatccaggcactgaatgaggagctgaggttggttagccaaagttttgcggagtatgattgtgtcatagtggaccaagctctttataacatgtggcgtgccaatccaaatatcgatttcggcttcttcggtcctacagctgtttagtggactgctaaatggaaggcttaattcgaccagtctggagggggcggttactgaattgactttctctttgccattaccattttttttttgtgacaccgtttagttattataacatgggtgtttgttattatttttggatgactgtaattgactcttttatttgtattgcttctttattcttttgaaatcaatagctagtgcattaaggggggcgtcaccctatctctttggtagttgctcctaccttgtttgccattcttcattatcaaatttcacgactttggcttcttaattttacggtgtggtttttcctctcttttttttattgagagagggtttgggcactttg

SEQ ID NO: 208751 - DNA, 620 bp, Cannabis indica
tgaagaatagtttcgactcaattcactaactatagcaatgtatgcggccatagtggtgtgagttgtctgttcatatcctcacataagctcgtgggcctaagatgtgtacaagactaattgagtctatgtgttaagatatctgcgtcctatctgagtcgcataaatggatatcttggaaaagtcgataacttaggaagtgcgagtccttattatcgagttatcgagtgctttaggtcatccagactagctcagtgagtaaagaatcaatctttactaattcgcaggaagacttttatggtcatcgcatatatcgtggtattaaatcgtggtatgtgtgagtcttaaacctggccttcttggtcctgcatcgtgcgaggcgtactaatgtgactagactctgtcagggtcacatcatctcgctaagtttggttgaggcgattcttatactcaagtagtctacttctgacagctcagcagtccttgaggaatgttagtccacatgtcatctttatgggagcctggtctcgagtatttaggtgaaaaattcatactataacacatgctcctagtttcacaattgacagctatgtcatgagagaaactatgagagagaggcaagc

SEQ ID NO: 208752 - DNA, 1899 bp, Cannabis indica
cttctctttctttctggttttatttttttagtttgtaatatggtatcaaagctacggctttcgtgagctctttctctggtttctttgttgattgtcattgtggctcatggctcttggaggagccaatactcgaagcacgacaaatcagggagatgaatctcgagctgctaacagattctctgtcctggaaacgaatgatcgaccatcaagagaagatcctagaaatccttcatttcgagtggagatcaatcagttgtgaatcttgttccaaagatcttgactggctgtgagaattacagctcatggaggcgatccatgattgtggctcttgcagcaagaaacaaagtaaagtttgtcgatgggcaattacctgaaccagagattgatgatgacatctatgatgtgtggtttcgatgcaatagcttggtgatttcttggattttacatgccatatcgagtgagattgctgatagcgtgatgtaccttgacaatgctgcaaaaatttggacagaactttaggagagatatcatcagaaaaatgtgccaagggtgttcgaagctaaacgatctatgcatgcattagttcaaggtttgaattctgtaaccacttatttcactcgtctgaaatcattttgggatttgatacaagagtataggccacagcccgtttgcacttgtggtgctatgaagactatccaagaataccaagataaggaccgtgttcttgagttcctaatcggtctaaatgagtcctatagtggcgctcgatcccagattttgatgcaagatcccttccctaatatcaacaaggcttttgcctctgttgttcaagaggaaagcagagaggaattaccactaatcaaggtgaaaataatgctcctcccacatcatccaacaatggtccatttgctgaaagtgtccaaccacacaaaccaaagactatctgtcatcactgtggtgtccaaggacatattatggccaaatgttatcgtttacatggatatctcccagaacacaaactgtatgggaagttcccaaacagaaatgctcaaggttctgaaaaatcccctgctgccaactcgactaagctcaaaagaatggtgaggctaatggaaatgacaagaacattgagcaagacttcatggccacctttgctcaatgtcagaagttgataaacatgttgtcacagaaaaattcagaaacaacacaacagtgagcagacaaatcagccctcagtctctcaattttttggtgaaatccttcctaaaaactcttgttggattctcgacactggtgctactcaccatgtgtgtcatagtctttcactttttcaaaatacttatgctaattctaagttttcttgtgtcaatctgcttaatggtaacactgtcaaagttctttgcttaggaactattgtcatatcacctaatcttgttcttaaagatgttttgtatgtccctgattttcatcttaatttgttatgtcttcactttttatcctgattattgtgttatttagggcagcttgaagacacatcatattgggatggctaggagacttgggaagttgttttaccttgaggagcctgctgtgaaaatcaaccccaatgtcttttctttaatttctgattccaatatagacaatgacactatttggcattttagattggggcatccctcttgtgtaaaaactcattctttaaataaagatttacaatttcaaggtcaatcttgttccaattttcattgtcctatttgtcattatgctaaacaaagaaagctaccttttgtttctaatcacaacattgctaaagattgttttgatcttatacacatagacatttggagaccttttaacactttgattgttgtgggggcaagtattttatcaccattgttg

SEQ ID NO: 208753 - DNA, 753 bp, Cannabis indica
aaaaaaaaattacaaaattatattaacatgaaatttttttatttataaaaataataaattatttttttagttgttttataatttatttatagctgttaagttgtttttttggttattttttattgttttaaactttatgatttaaagttgttgtgaggttgatttctggttgtttttcttacttttgcctgagtaaagtgtatttttataattttaaaattttataagcatatttttgtaaataaaaaatttaggccgtaaaattgtaaataaaatgtaaaaaatgagtatttttaaaaatttccaattcatttgaatgaaaaatatatgttgggatgtttattgcttgatactatcttgtagttatacatgtgttcctgtattttagaaactcttattgaaatgttacaacaaaatctactaataaaataataagaatattacaaaagtaaatagaaaagtaagcaatttatggtgatgtaattttgcaattcgaatattatatattacaacgaaccatgttttatttgagactcgaactcaggacctccaacactcacacacctacctatggctactaaaattagccttaagtggttgagcttatttttttgttaagtaccttatattttaactttaaataacttatttacatttccaaaatattttttaaacaatatacattaaaataaggagcaaacaaaatttagttgatggtagtgtccaaatttgagaatgaaaagagagagtaaa

SEQ ID NO: 208754 - DNA, 876 bp, Cannabis indica
atttttcaacaaacctacacatccatctctaaagaacatgaatctattatagttaaaattatattttaattatgtgagggtgtcagaataatttaagtacattaatacttataaaaagaggtatatttgaattaaattttattaggaggtaaatttaattaggggattatttcacaaatatacaaaaacaataaaaaaaaaaactaaaaatacagtttcacgaaattttaaatatttttacaatttttttaattttatttacaaaaaatacagtctttttgtgttgcactcttgttaattgttgttgattttttgttatttgtatgctattttttgttgttgtttagacgttatcttcatgttacttttacgtaatttttttgttattttcgtgttatttttatagaaagccgtaaaaatataaaaataaataatctttaaatataaaaatgtaatttttttaacaaaaaatagtaccttatgtaattatccctttaatcaatatataaaagagatattcttcaacttctctctaatttttattaaaaaaaaatattgataatttatgtaacacacatttactgaaattttgttacaaatacgttgtaatatattattgtaaaagacattgttctaactaaagtttgagaaacaactagatttgtatagaactcttttaaacgaatagatatttaaaaaaaaaaatctgtattttataaataaaatttaaacttgataacaaaatatattctaagtgtatatcacatggcgttgaaacagtgtcattttatagaattattaaagaaaaagagaattattctatatatttagtttttttttttttttatttttttttttttattttttaataattta

SEQ ID NO: 208755 - DNA, 2031 bp, Cannabis indica
atgtatatgttaaaagcacaacttaatttaatattgcataaattgaatatcacttctaatttaagagcatatcatattatatatcataaatcgataaaataccactattggtagaatacagtaaacgatatacaatataataaatatactaaaataattaatagtctaacttacataaaaaaaaatatgactaaacttatataaaagatactattataaatttgaaaaaaaaaattgaagatgaaagataattaaataaatgagatataagaatgaaacacaaaagaatagatatcaatattaaaaataaaaagtaaaataaatacactctaacctcagtaatagtattactctaatttattaatttttatcactaaaataaataaactaaaataataagagaaataataaatgagaaagtatatttttcattctaaaaatttgatatcgttttttcaatgccaagtggtgctattgagaataaaaatgctgagaatagtagtagcatatgcaatgcatcacttctagtggagagtggagagaaatgagaggacatgtgttggttgggggaatggctcgtttgaatggtgtcagcaagtgagagatatatgccatggttctagtcttctagacgtgggccactacctcaatatatatgacttcatttattctcatttgacaaaataggattaagataaacctgatctctatcaattgggcttgggctatacgagaacaataaagaatttgggtctttttgagcccattttctttctatgaagtccacacccaagagcattgctccatttgtatataatatcactttaggctttgagcttgagaatccctaacacttgccaaatctgaaaagtaacatcaaatttaaagaaaactaaatattctcaactaaaataacttaacacttgaaaccaacaaaatatttattataaattgcttttatacacacaattaaagccttaaaatatacaaatttgagcatcaatcacaatccccaattaacttattgctagtttctagcaatttaaacgaaataaaataatgtcaatatgatattttctcaggtttaaattgtaaaatgacacaaatattcaagcaaaatattagtaacaaaccaataagagctatataaattacttttaataaatctagagttgtgagtgtgtacaccaaacttgaactttcttaccgcaaaccatagtacataaaagcctccgagaaataagccaagtaaaagtcttaacttcattatcctcacaagtcattgaaaatatttactatacgaataaggatttcactcatagagttagaaattgaaaagtgggcactaaattggatatgaaaattaaaaaataaacaattaaataaacattaaaacgaaaataagttgtgaattatttagacaaatcaccataaagaataccacaaaccaacttttttagacttttgaaagaaaatagacaatcttttacatttattctatgggccataacaaatgaaaattaaacaacacaaactaacatattaaataaatggatagaaattttgctcttgcattttattttatttatttattttttgagtaagaggcaatatatattgatgaaaatgtaactattgtataattttttttcccaaaattataataattacacaaatactccctagtaagatttgtccatagaaaacttatcccttaagcaacagtcaatcaaatcctagtattattatgtctaaaataattatgactatttttaagaatcaatgaaaattcaaaagttattttctcaaaacacgccactcacaaaatgaacacttaaacttggtaaattttctaagtaaatatgtgctaacaaccatcttaccccaatatttggcatgtgcattttaaaactctaaaaaaaaattaagtaacaaatatagaaaaaaaaattggcttaaatataatattctacaacaataaatgagtaatttttgaaaatttgaccataaaagtattaatatgacaataaa

SEQ ID NO: 208756 - DNA, 1365 bp, Cannabis indica
tatggtatcagagcgggaaagtgagctttcccacgactgatctcgatcgcttccgcttctcctacctagccgtgtgttcttcttctccagctatggtggcgtttatccaagactgctgatccagcactctccatttcttttcttcttcttccctgttcctttctctttcttttcttgttctgcaatgtcgaacaatgatcaagagactgagacagaaattcctgctccgattattacctctaatcctcagcagatcgtcaatcaaagtactcacatgcaggggtcaagaaatccaattgaagatccttcagacccatattatctccatcatggagataatccagggaacatcctggtttctcaaccacttacagggcaagataattacatctcctggagccgtgcgatgcagcttgcaatttctgtcaagaataagctaggatttctggatggttctattcctaaacctccttctactgaatacaatctttataatgcttggattaggaataataatattgttatatcctggattcttaactctgtttctaaagaaatctcctctagtttgttgtatgatgaatctgcagctgctatttgggctgatctcaagattcgtttccatcaaagaaatggaccacacatttacaacctaagaaaaggtctgatgaatcttcgacaagataaccaaaccatcagcatgtattacacaaaattgaagaccatatgggaggaattgtctaattatagacccaactgtacatgtaatggttgcacttgtggtggtgttaaaagacttcaagaacaccatcacatggaatacataatgtcattcttgatgggtttatctgacaatttcactcaaattcgtagtaacatactcttgatggaccccctgcccgaggcaaatcgtgtttttcacttggttacccaagaagaaaatcagaaaggtaataacattactgggcaaacttcaaatgctaatattgcttttgcttttcagaatgataaaaatcctccaccaagatctgattctcagggaaacaaaaatcagcaaacaaaaagaaataggcctttttgttctcattgcaatatacatggtcacactattgaaaagtgttataaaatccatggctacccacctggttttaaaagcaacagatcaaaggatgcaagtgcaaaccaggtgcaaaccagtaatgaaccaagtccctctgaagaatcaaacactttgcttccacaactcagtgcaactcaataccaacagctgctgaatctcctcgcaaatcaacaaaattgtatgaccaatacagaaccgagttcctcttcaggagctacaggtatcgttttatcaaatcattgttt

SEQ ID NO: 208757 - DNA, 1620 bp, Cannabis indica
cctttctttcttggcactaggatccaagttttatttttctgtaaagccacattttcatccgacattgctttgttccatcctttgtgagcaagagcttcatgaagtgatttcggttcagacgtgttgcctggccattttacttgagcagagtacactttgggtttaaatgtaccaacctttgaacgagtgaccataggatgctgagattgagattgagtttgctgttcagagacacgtgtatctgctgctggatcagcttggagagaaacatgctgttgatcagtaataggaggtgtgccaagctctaaatcaacaaagagattgttggtgagatcaaactgatgttgctgttgttgtgagggacctgacataactgactgtgatgctccagagttaacttcctgctggtttatatcagttgaagctacagactgaggtgtattttggtgagaactttctgatgtgatattggtagttttccctggtttatgagtactggtttgtgaagtgttgagtggctgtataggaagggaaaaccatgagttaggtgtttggacagtgacttcgggttcagtgtgatagttgttcaagaaaccttgtttaaatggaaactcactttcattgaaaacaacatgccttgagatatatagtctaccatttgaacttaagcatttgtaacctttatgagactcactatacccaagattgacacacttagtggaatggaattgaaacttgtgactttgatatggtcttaaacaagggtaacaagctgaaccaaaaacctttaggaaagtataatctggttgtttggtgaacagaacctcatagggtgattttcccttaagtataggagtaggtaatctattgatcaagtacactgaggtttggaaggcatcacaccaaaatttcagaggcatattggcttgagcaaggagtgtcaaacccatttcaacaatatgcctgtgctttcgttcagcacctccattttgttcagaagtgtgtggacatgagtggttgaagagaattccattttcagcaactaagttgctaaaagattggtattctcctccccaatcggtgtgtaattctttgattttcctatcgaactgattttcaaccatagccttaaattgagtaaaagccacaagagcatcagatttggccttaagaggataaagccaagtgtaacgactaaaatcatctacaaagtgtatgtaataccttaaattggtgtttgacataaccggagcaggaccccaaaggtcggtatgaattaaatcaagaacattagcagctctacttaatgaggatttaaatggtaatgcatgggatttgccgaattggcatgcctcacaaaaactagaattctcattagtagaaatttttacattagttaacttcaacacttgatctaatactttggatgaagggtgacctaattttctatgccactcatccttcttggaaacacactcacggttaacagaggtaaaacattgacttctagactcaacaacaccagtaaaaggacttaatacagactcggaaaggggctgtgaacactcatttgcagctaactcgacattcttgacagtagagccttccaactgatataaa

SEQ ID NO: 208758 - DNA, 859 bp, Cannabis indica
aaaagatctaataaatctcaagatcgaccttctttcgagtcacagtacaaaattagttgggattgttacaaagttgttgttcgacaattttgcaacaattctaactaattttgtgttactattacgagtctcgagataggactcgtagtcatgatatgtaacaacgctcttttataatagaaagaaatcatgattattttttttttatataacagagtaccagagattgttttttggcatataccaagtgaagcatatgagaaagtagctccaatgggtgtgatacaaaaaccttgtgtgggttcaattaatgaagagaaagtggctcctcaacaagttgaaactggtatcatgaaacttcttcttcaaaggccatctgttaaggtcacattaaactttttcaattattaaacataattatttatgcctcaaattactctttacaaaaaaaaaaataaactctaaaatgcctttgtatattttcagtaatttttttaaaattccatattttagttaaaaaaaattaaatcttgagcatttttaaaaattctcaaaaattaatgttgtttgtttatacatgatgacaggcaatattttcaggacacaaccatggtttggattggtgttgtccctataacaaactatggctttgttttggtaggcatagtggttatggtgggtatggaggtgagtggcaaaaagggtcaagaatactacaaatcactcaacatcctttctctataaaatcttggattagaatggaagatggtcatgtccatagtcaacttcttctctttaatgtctcctctacttagattattctaatgagatatacaactacatagtgtattattatcat

SEQ ID NO: 208759 - DNA, 817 bp, Cannabis indica
aaaaaatttcagaaaattcattaagcagcaaataaagttgattttgacatgacattgcaaatggtaaaattccaaataattaaatatttgaggctttccctcaaaaaataaaataataatttatggtaatttaaggcaaagcagctttttcttgaaatttttattttttccatgtcacaccattcagaacaattctcaaaatcccttaaaaaaatgaattctcgaaacttcatttatatgcttattaggtactcatttaatagcattgcatttacgtagaacacagaatatataataattattataatcacgaatataaatattgtcaccccttttagctacaaaatataaaattttggtgtccgtaccatatttgagtcacctgttatctttctaatgctctattaatttttaagagatttttgttcaaattttgataggaactgtatttacttgggaaattttttttattaattagaaaaatagaaaaagatttatatatttattctaaaaatattactgataaatatatttatagatatcctttgaattaaaaattaaaaaaaaattacagattagtcgagtctttcttctttttaattttaatgtttgaaaaatactttttagaaatttcaatctttcatcagcataacttatttcgttaaaactaaaaaaattttgtgggtttataaatttgttgtaaatttcaactaattaataagatgttcctgttacatggccgactctaatataggtgagtcaggagtgcattttagattcgcgcacacttaaagttctaaaattatagaaaaaaaaa

SEQ ID NO: 208760 - DNA, 715 bp, Cannabis indica
ggcccaaatcactctcactagctctatattataatatattataggctcatctccacttcccttatttccttaaccctgtcattatcttcattcaggcccacttccatcacattaccctcacttaggcccatttctacctcattttccacaacaagcccatcatcattttcagcctctaaaattaggagactattatttgaatatatatcagttggagccaaaaaaaaaaatcatagatgactttctactagttttctccatgacagcccctaccatgtaattgaatcttgaaatgtaatttattcagcacaactatacaagggttttccccaattttcagttgttcgaaaaccacatgggctacttataaaattgatattattatcgattttgatctaattctttcacctacggtctctgacctagtttctgtaaataatacgatacgtatctattaaatttaagactaacagatttacaaaaaaaataactttgaggactattgttgttattttttttttgaagtttgagactaatttacatgaaagtagattttttggagactttgctgtaaaaggctatgggctaccttccaacactcgttttgtgtgtcaacttcgtgataaaattagatataagtaccgtattttgatctagtccctttcacgtacagtctccaacctagtctctataaataatacttcgacatgtaggt

SEQ ID NO: 208761 - DNA, 721 bp, Cannabis indica
aaaaatattaatttttatattatgatttttataatgtccaaactagacaattaaatttaaaaaaaattcttataatttattctcactttttattttttctatcttattattaacatattattattaatatataatatgtaatatatatacatttgtatattatataatttattcaatataataacttaattagtatatatgttatgacgttgaaaggttaataaaataatttttttcttgtttaattgttgaaactttattaaattaatctttttcatttttttaatgctaataatgataataatgtaaactgcttaaactacaccgcactgcatttttgcaatgctgtttttgcagttttaaggttgttgactcaaaatttggtcaactgacagcagaaccttatttatgagtggcaatcaccacgtgtaaattataaatgcaaaaaatacaagcgacacgacaatttatataggtttgaccttcttgttcagcgggaaatgacctactctcattttaattgtattgattctagagataatgccatgtagattacagggtttttgccttgtaaattctagctatggctctctttaaatgttacaatggcgagaacaatgtattgtagataaaaaactgatgagttcttataaagaacttatgagaagatgtgacctaatgtctaggtggcatgaagtatgagagagagagagaaagagag

SEQ ID NO: 208762 - DNA, 1009 bp, Cannabis indica
aatatatagtattataattttgaaaataatacaaatggggagttatgtcacaagctttggtcaaatactctgcagaaaacttggtatgctcttatttaaggttcagcgctctaaaatatcgttttatatacaagttagcttgtcaaaatcgtcttcaaacaaaggatagattgctgagatttggagtataacagaaaacaaatgtttaatgagtcacatgtgcacctaatttttcaatgctgctacaagtacaacagctaaactttttgctctattttacaatgtattggtattacagttcagtagaggacattggaagcttgtttgaagtgtataaattaagagggaaaaaatatcgaaattccgcagtgaatttattgtggctgctttaaatatgttggtatactgtgtttgggaagctagaaacgtatgtttttgggaacaaaaagtatatactttaaataatataatcaaaaagattaaaagtgatgtttgtaataggtagagagaaaaaaaatatagtagatagtaattggtttgggattttgagttcttatagagaaactcttagctaagttttgagtgataatattcactcatttacatcaaaaaagaaaatagtacaaatggggagggttattgtgactctatgtttaaaaggtttattataagagtgtaatatatgaaattgaataagtttagaaaggagataatatagagttgactcattattcattattgttacttaatttccaatgtggaaaattaaatcaaaaagagaaaattgtccctgaagataggttagttaagatgtatgtaccttattagtggtcctaaagaattaaattaataataaaggagctagcttcggttgcaccaacacatgagtagtctctggtaattactaattattaaacttactgaaagggacaaatcgaaatggaagagcctgtaactaaattgaattgaatattataaaccgtttcctagttatatatataatgttgtc

SEQ ID NO: 208763 - DNA, 723 bp, Cannabis indica
gcgccttaccgtattggcagccaccacatacggtctctattcagacctcgagttgacgaagacccttcaccatagacttattcatcatcacattgagtttgtgatagctgacatgtcctaaccttgcatgccacaaatctattgtttcgttcttccgagtcttgtctacataagttgactctggtgacattacatagatagactctaagcgtcattctctcatcattgttgttcaagatattttaagatcttggtagatcttgacatcttgaggaccgaatacgacatggtggcttgataccgtaagctgcaccagtgatagtaagtttttcttcatcccaggtacatgatagacatcctggagtgaaacttcttttgggctgaatctcggcatgattgttgttttgccaatgtgagcaatcgatagtcttgagttgttggtcgtcactactacacgaccacctttgtactcgatcttgtcttgcaacttctcttcatctctagtcatatgatttgagcagccagagtcgactatccaatcatcattgtagtcgatctttcctggaacagtagctgctagagctaattcttcttcctccacagtgaaagatgtttctgcatcccattctttatcacttgtcttttctgcatttgatgtggctggattacatttctgcaattttcttcttgaatcgacaatttctagccatgtaaccatacttt

SEQ ID NO: 208764 - DNA, 503 bp, Cannabis indica
tataagaaaaaaaaaaaaaagcacaaacaaaccagtcaatacactaggattaaataaatatataaactatttgattgaaatcctcaatatggatttatatattagtgtgtattgcttttaaagtttgatccaaataaagtaattattttagtaattgtaggtcattaagtattaaattgtcatgggctaaatgtctagatacctcaagtgatattttttattaaggggctaaattagaaatactaaaaattaataacctattaggttatatattatattggtagtgattcccaaaaaccgagagtcattctattctcatcttctctattaagagagaaaattaaaaaaaaatcctaatcttgtttttttagaagattattacccaaagatcatctctattcgatggactaagatcattacaagatttctctatcaatgaattaaagtagtcatgggatctattgaattaaataattatcgtaattaatagaatcaattagatg

SEQ ID NO: 208765 - DNA, 1030 bp, Cannabis indica
ttttttatatttttaaatatataagttaattaaccaaatcgttcgtaagagttgagaacagagctggcgtgacaatgtgggagccctagatgtatcgtttcaattaaatgaacaaaagagaagaagagataaggagtgagtggaaaagaaaagtagggtcaatcgcagtttgagctcggcttgcgctctactaagagaaagaagacattcgtaagaagtgggaagaaaaaaggagccacgtgaactaatgcgcatagagagtgatttaatagatcgtggtcctttctcctatagatatgagactcgggcttatggacatggggacttcttctaagcttgctagcttgccaaaactgtgtggaattgagaactagtggccaacacaaggaccccaacatcattgcccactttaagctttgaccctctctcacttgacttcctgagatctcttagcccttgttgtgcttgcctatctttcttttttttcgaattttccctatcctttgttgggcttgagttgagaaacataatgaaaagattcatttttctcttttttacagcttgctttcctcatctacaaactgataaattaggtcactgacactccatgttttattataaatattgtaggttgtcttgatatggctaaaagaggcaaaaaagtacacgaagagcacgatgaataatgtaagagttaggattggcttgaccatttacaattttcaaaataaaatctcgcactccttttgattcatcatacttaatggttgtcatttcatccataagatgttcagcttcaacgttttcaccagtgtcatatagttttttgacagcactgaaaaaccctttggcatttgtagtgtctggcaaactactcaatagatgttcaggaataaatttttttcatagcagtgaggctaagacgttttgacttttctcattgtgcatgacaagttttctgggcaacagtgctgatattagtaagattagtacatttttcttctcacaggcataagtccaaattcattat

SEQ ID NO: 208766 - DNA, 589 bp, Cannabis indica
aaaatttatacgtaaatactcttttttaatggtaagtaacacttgaatattgctaatgaaattttattgtacaaaaataaaaataaaaataaatgacttgattattttcaatgaaaggccatggtaattgataaaaaataaaattaaatatatattatttttcttgctgcagaaaaaaaatgttaattatattttgtcgtttataaaatgttcttattgtaaaaaaacaaaaagaaaaattgacagacaaaagttgatcatagcttgccaaaatcataacagaataataattccagtgtagaagataatgatcaatcatgagataataatggttatggcgaatgcaaatgaaatgatatgctttaaatattttcctaatcataaaaactgttaatccaagtaattgggatatctgatgccactatctcctaataataataataaattaataatattaataacgattaaagtagaagttgattgtcatataattaaatcacaaagtgataagagtttattttgtattaatctctgactcagcataatccaccacatagaaaagctaagctaataaataataattaaaaaa

SEQ ID NO: 208767 - DNA, 559 bp, Cannabis indica
agaagtcattgtttgacaaattgagacgtcctaggaatgagagtgaagacaagctattaggaatagtacctgatagcctattgtttgagagatcaagagatagcaattgcgacaactttgaaatatcctcttgaactgagccgttgatatgattattagacaaattcaaattcactaaacccaacaaatttgtcaagtttgaaggaagtactccactcaaattattggaagaaaggtctaaggtgacaacaagggaaagaatcttggtgtactttagttccctgccactcacaatcaaatccatgttttcttcataaaattttctggtcccattatcgatgccataggatataagaaacttttccctttcgacgtgaatcatgcctctgaaatatccaaaactagcagggatacttccatttagtccattatctgcaaggtccaatacttgtaatgagcttaaattcgacagtactgatggaagctctcccagaaaagcattggatctcaattttagaattctcaaattcttccaacttttcccaagccaatgtggtat

SEQ ID NO: 208768 - DNA, 600 bp, Cannabis indica
tatatatatatatatgattcatcaaattcatattcatctcttttacttttttggtgagttagtaggggtatatcataaacatagtccttggtatacgatcaaattatatttatggcagtgtttttttattattattttacagaaaccacattaatgaaatggagcccctttggtgagcaagtagtaggcatattcatgtttagggattagctttgggacaaagtaaaatggcatatgcctatttaagttttcacagctctggttcataaatttttacccactttggattctctcaattttagttaacttttaaaagttaaaaataagaacacacgcaacattacacttcgtgcagttacaatacaacacaacaaccttgatttcatgctctcattttatcattttcaaattaagaatcatcttgctaattaattataggttctctaatactatttgataccatgatatagttttgtggtgttacttaaaagttagttatgcctagctagtatttagttaaaataaataaattacttcaaagcttaatctcaacaattaagtaattaagttggtcgattactgtctctcctacaactcttg

SEQ ID NO: 208769 - DNA, 560 bp, Cannabis indica
gtattgtgcggaatagtctatttatagccgaacccctctcctccctcaagccaagtacacaaatttcccgattacaataatcattccgaaattataaaagaaaaaaaattaaaactaaaaaaaaaaaatttaaagaaaaaaaacacaacaatgttggttaacaaccaaagacaaatgagtattatttgctatagacaacaaaaatggtaacaatgatgagatggagaaaaaatatcatacaattcaaaagaaaaccaacaatataatactaaagacacatccaaaccaataaaaaaaaatacaaaatccattaacaaaaaagaaaagatataaactctaataaaaaatgggataagagaccaagagggaaaataaggacatcaataaattagggccaaacatggtttctaacaataggagatacacaataataatgtctaaaaatgacacttgaatcatacatacataataataaattcaacaatgcaacactaagctctttcatttttaacattggctcccaaactaagaaacatagaacacaaaaaaaaaaaaaaaaa

SEQ ID NO: 208770 - DNA, 936 bp, Cannabis indica
ttgataaatggaataaaaatgagtatattgctatgaggaacttgatacttagcaccacgatgaagtgccgttctataattagttaataattttttataatatttattaaaaaaagtgaaacttacaccaaaagcaatattacacttgagaaatatattaagcataagtactttttagtatttctcaataaaaatactcactttagatataaacgggccattacaaaaaaattaaatgaacttgaaattgttggtgcaaatttgtctagtgtgagagtgatgagcttagaaaattgagatgaaacttgacattcttcatgagaaggaagagaaataatgggtcttaggtgaagaatagtacttgattgaaacttgaggatgaaaattcttctcactttcacaaatgtccttctggttgatgtgctcatatcgaatttctagtattcttgatgagaatgggagaggggtctattctatagatgatgtggctaaggtgtttagtaagtatttctctaatcattttacttcgattcacctctcgaatgatacgtgtaatcgtgttgttatgctatttttggtaaagtcacttcaattatgaatgatgaattgggcataataatttttgctaatgatgtaaattttttgtttcacaatataaaaataataatttataattagtcacaattttttcacttttagtcacaagttttattgtgactataagtaatattttttgtagcgaggactcgatccggcccacaaacaagacaacaaaaccctaaaagttagttaaacgattcagccttctcgagatacaatctcgaatcttcttccccttctctgataaaaactatagagttcaagctcaaagattacaaacaaatcgcacacacacgatccaaagatcaatagcgcacacacaagatcaagaacacga

SEQ ID NO: 208771 - DNA, 1248 bp, Cannabis indica
aggcatagcacctctagacatgtagtcttgtaattgactagacaattacttacttaaaattattatattaaattatatgggcttagataattagttggactgatagcgatattgacacgtaagaaaatgctaagtactaatggtatcttttatctatttttcttttacaaaaatgtgtcaaaatgtgtagaatgaatttagaatgtcatttcccatataattatacaaaatcatataatggagtagtttgtagtttgtactttagtagatataattttgttattgttttgcaaagaaacatagttaatttcgaaaatatggttaagattgtacccaaggctggcctgaccatcaatggccccaagattttatttaattttttttgttttttttttttttgttttaatctaaagttgagtttgagtattattagcctatgttaccaaattttacaaaactactattgtttttactacatagtattattttgtataaaattttgaactctagatttgcaccttactaatcatactttactatagattttttccaattttagtctcaagcatacaatatgctatacatactctagaccatgcaatactcttacttgatgtataatttattggtttttgcaggcattgttaaaaaaaggtgcaaagtatgttgtagttcaaggttttccaatgacaggatgcttacctctggcaatgacattagctgctgaagatgacagagacaacataggttgtgtgaagagtgtcaacaaccaaagttatactcacaaccaagccatcttaaacttggtcaaatctcttagaagacaatttcccaaagctatcataacatatgctgattattggacctcatatctaacagttatgcaaagtccagccaaatttggtatcaaggagacttttaaagcatgttgtggcatgggtggtgaaccctataatattgatgtgttttcctttgtggggcaacttctaccaaagcttgcctaagcccatctcaatatgtgaattgggatggagttcaccttacagaagctatgtataaagtggtctctaatatgttccttaaagggtcacttatgaatcctccttttagctttttgctagaccaaaaactacaccgaggataaaaatgtcgtcggtttaatgtattaattgttagaccatctctaatgcatgatgtgaaaaatgtacaaaatttacacaaaaaaaatgagcaactgttatattcagc

SEQ ID NO: 208772 - DNA, 635 bp, Cannabis indica
aaaagaaaattatattttttacaagctgtataaaaatctcatatatatcaagtgtaattttgtcaaggaatagtatataaggaaaaaatgaacatgctgcaataataaagttttaggaatactaccactcactttgtccctttagctttgtaactaaagaataacgattcaatccaaactcaacacacaattgtccatatatgtatgtaacacattttatgtaacatgtagtgattttgataaacaaattagtataaatttttaatttttaattgacattatcatacgtgagtgtaaatatagtcttccccactttttcttctgttttctttctgacaacacctctcatatatttgtaatttgtctagtaacaaaaaatacttgcagttatatttctgagctaccatgttatggtttaggttgttttgtacaaagtaatttcagctttaatagcttgaaagtagatgaaccaattaaaaactctatacacctaatccattgaaagtcatttcaaagaatatataagaatcaaagagtctcaaaccaactaaaagaacaccaaattttacaacttttatatgtatccatagtattacatacgggtggactcatatagaggcgaggtggggcaatcg

SEQ ID NO: 208773 - DNA, 539 bp, Cannabis indica
ttcaacaacaaaatgaaagataagatcatactcgctgaagaggaacagacggtatttgcatttaatttttggcgaaccaattgacacacacttggtggaagatcgagttttgtatgcacgtatcttaacttctaaaaaagtatggctttcaacattgcagcgacaaatggctgaacattgggatggaagattttctgtgaaaattttcgaggatgaagatatgtttatgctcacttttgggtgtgaaggagataagcaaagcgtactaaatcgcgaaccattccattttcagaatcatcacattgtgctctacacgcctagtgtttgtcaaaatgtctcctcttcaaatttgattttttcgcctttttgggtccaagcctataggcttcctgttatgagtagaaccaaatagttggttgaggcccttggaaacataataggagaattcatggaagtttttcaagattcacttttagaaggatagggtcctttcttgcgtattcgagtgaagatagatatcactaaacctcttatgcaag

SEQ ID NO: 208774 - DNA, 1189 bp, Cannabis indica
acccgaccccagatcccgaacctccgtacctcgaaccatagaaactggacccagacccctaccccaaacctcggatcctggatccagacccggaccctggaccccaaacacggacacggacctggacccagacctagaccccgacccctcagaccgtagacacagacccaaacccggactcagatcccaaacttggacctggaccctaaccccgaccccgactcgaacccgaaccccggacccgaacctagacccagacccagacccagacccgaacctggactacagacctcggatccggacctcgacctggaccccagacccggatctgacccgacctaaatccaaactcggactcgggttcgggtttgggtctgagtttggggttcggtccgaggttagatgggttcatatcatggtatagtgtagaatattgatttttattttcttagtaaaaaaaatctaaaaatagtttaaaaaaacctaagccaaagaccattaaatttttaaaatgataaaaaactgttttctgttctcacttttgaaaatacaattctaaaaattaaaaactaaaaatacaattaaacagcctctaataattttcttaaaagtgctaatctatatcattgcaccactattttagtcgattctctaacaaatgtttatatgatgcataagagatgatttaagactcatttggaatgtcgtattaggtcgtataatattataatatattatattgaattatgtatcatatttttatataatactatgttaaacattaatttatactaaaatattatatatttaagtacctataaaagttaaaatattacataaaatacaatttaatataatactataatatacgatgtaatagtcttttttgtggttaataatcatgcaacgtaatgaattcctgatcaaacacgtggcgtaagtacgtagatgcacacatttacattactccaactttggacttcgaagattccaattttaaacattttagaaagatagacttatgattgtgactttgaagttcaacataccaaaaactaaaaaattccacaacactgtacgatgataatgccacgcaccatatttttgcatggtacaaattaacctttggtttaggcgagttttgtaagcgtgttattgttccattggtgagaaaattggtcaaacattt

SEQ ID NO: 208775 - DNA, 541 bp, Cannabis indica
caatagtaaaacttaaatttagtttgaaatcaatactaaaaaattattattttagtactaaattttttttcaatatcaatcacaacactaaaaattatactaaattttatattttttattattttattattttattaatataataagaatattttaatactaaatatatatataattatttaatttttttcttaaaaatattatttaattattaaaattaaaaaaaaatatagtgtgtttatagtgtccactatatttagtggaacactatagataaagttatttatgagatattatagtgatattttagataccggttgaaaatgaccttaacaaagtataaaaaaaaacatttaacagagaaattacactaaattttctttatttatttcttctctttgttgggtaatattctgaattaccctatgtcttaatatcaatttaaatggtgacaaataagataagttatttcaaatttcaatcaatcaagccatgcatgcatgcatgcggaaaaaaaaaaaaaacttacgttatgggagag

SEQ ID NO: 208776 - DNA, 1145 bp, Cannabis indica
ttatcgaaacttaagcacatattaaaaccttctctctcctttttcgtctttgagagaggatataactgacattaatgattaaatagcataggatcatgaacagagacagagatacatacttgttagggcatcatgcgccagttccttagctgctagttcagatgtaccatagaactttgtgtacctcctgcagaagataacagacaccaagatacatgtaaaataagttcatgcaacttttcactacacagtacttcgggtaactatcattctatcaattgcaatactatacagttgaaatgtaaaattcaatagatttacctatgatatgaacttcctttagaaaacttgattttcggagatgaccatgccaaggaaaatgcaacagtacatttcccatgaggctccacccatgcagaggccgaaactgctgcacagagagtctctccaggtgctgaaggcatacatggtccggaattaaagttctcttgaggaaattgtccttcctatagcagaattacatgagttaagcttaaacaagcatatcaacagcttcaacatggaagaatttcagaataatgataatcaaaccaggtaaatagagttacattcaataaacgtcaattaaatgacaaaccacaatttggtaggagattataaataaaacgcaacctaatctaatgcatataaaagaagggttttaaaaaacgaaggaaagttgctttgagttctaacaaaaatttaacattcaatattttatccattttctatgctcccgcaatgcctgccaattcctccctttcactcttgtcctagagcttaactgaaggaatttacattttctctaggtagaaacctccagcctaaattgaaggctgatttttagttttaacgacactcccaaatacatttcctattcacacctcatgttaatcaaagaaacaaaattaaatacattaagccttttttttgtgacttgaaaaactttattaaagagtaatattaaaaagaagactacaaagataggctttatttctttcctactgtttaaagataaaggcaaaaactattctaaacaggtcctgtaatgaaagcatagaagtccttaaccatctactccacatttcttttgtcagtagtgccac

SEQ ID NO: 208777 - DNA, 728 bp, Cannabis indica
cacgtaacatctattttagtatatcaatatatatgagcactggagctggaagtatatacatttatatttattggttatggaaacctactatacacgttagttttctatttttattcgaatacatatatacatacatgtattcttttttgaaaataacttgtgcttcaataaaaaaacccaggcaatacaaagcatacaagttaaatggatggcaaagaaccattccacacaatctcattatctaatcctaacccaaattttgcaacccaatgagccaactgattagactctcgatacacatgttcaattctcaggttaggactgaaagataataagtttttaatacctactaagacatcatccagaggactagcattccaattacaatgattaagtttatctacaatagttttacaatcagtctttaaagtatccactggaagatgaagtaactgcacccaaaaaatagcatgataaatggccttagcttctgccataacagcagggatatttccaatacaaggtttagccacaccagctttgacagcgccagactcatcagccaccacaataccataactatgcttttggccacgaacatcaatggcagcattagtaaaaacctgtaaataagaaccagaagtacttgtcgattccctatttgaattttgagccaacacacgattctgctgaagtttttgctgagcatccacatactgaaaaaagta

SEQ ID NO: 208778 - DNA, 922 bp, Cannabis indica
gagtaagatcactttcaactataagcttgtgtttgcgctcaataacaccattttgctcgtgagtatggggatatgagtctatgtaaaatgccagattcattaagaaaactagtgaaagcttggtattcccctctccaataagattgaattaatttattttcctgctaagttgaagctcagcttggattttattagcctcaatcttggtgatgtccacctcttttgctgctttatcaaggtacacttcttgagccattaataaggcttcaatttctggaacaatataagcatctgtgcgcgtgttaatagagataatgaagacattgtagtcactggtgtaagtattgaaaataacctcaatatgatcttgagcaaatgttttatggtcaatcaaagcaagagtgtcaatgaggctcttgatcttgaggagatcagtcactgagagagtctttcatcattgtgtttcatagcaaagttttgtactggcaaatgtgattcaatgcggtgtaatggtctctaagagtaatccatatgtgagaagttgtatcgcaaccaaccatacgagtgagaactcttttggacattaaagagagaagccaggaaagaagaacattatcttgttgctcccaatcttcaaactctagattgatttgattatcccgacaatcttgatcagtgacaaatgcagagacatgagatttggattaagaagtcgctgaaaacaatttctttttatggcgggaagaacttgttgcttccatgggaggtaatttctttcaaccgaacaaaccaagagagaatgctagaaagaaaaaaggtttttttttgggaatgggattttaagaagacgaagaaggattcaacagacatccaataacaggtatggacaagttctccataccttgaacaatcaagctcagat

SEQ ID NO: 208779 - DNA, 1080 bp, Cannabis indica
aacagtcagcaatatattaaagtaagaaattttaatgaacggtttctagtaagaaatctatatattagtgcgattgatgatcttggaagatcgttggtgtcgatcagacaattgattaggtttgaaatatcttgtatttagttaaggtgatgataatatacatcttctcggtgagatcaacgatgatcaagaccaatgtgtgccttttgaccagtaaagtcaccaagaacattgttgattagtgaaattgtggatcttaaaatatttttggtggcaatcgaaccatagattaggtctagattattaaagctgagtaaattgtagtgaccgaaaatggtacgttttacatttatgaatttgcaagcgcatgaatctttactgtagtgtagagattgtgaagaacgaggttgaacccatgggacgggttactttttctttctttatttaggtaggttgcacttgaatttttgtaaccattaggcttaataaaatgtagtataaaccgaccggcgtacagccataataaaagtcattgcaaatatcatcctatagttacatatgctcaattatttaaataatttgttgatgtagcatgcgacgttatacagaaaggtgccatgtagtatttggactatgactgtcccctgcccaggctattatagaaacatgcttggactgcttaaggatcccaagaagctgtttctttttggtgttgccatgtatttcaagattgtcttaagcaaaatcattgtgtcttatgataatttactatcttaagactcgaacgtgaatccaggaccatcgtgataagtttactcagaacttaataaaacttatataaataaaaatttaccaaaatgccctcactcttttacttacatatacttaactttgcaataaaaggtcatttctctaataacccacataatcacataattcctaattattcataaaaattctcaatacctccttataacaaaaattatcggtaccactaaaattctaaattataccattgtaacatttttaccgatccgtcgagtttctattgttataaatcataaacataataaatacata

SEQ ID NO: 208780 - DNA, 1332 bp, Cannabis indica
agcatagataaatatatctttcgatttgaaactttacgtagtaattacaacttagaatatactagagtgactcgtagttttaaactctatctctaacgatgtaccacacacaacctttctagggtgtagtccaaaatcgtgtgctttaatgatcatgcacgtttatcccagtatagtgaacactctataaatttcccaaaatttcataggaagtggccccactctcacaatcacgtaggtgagtctatcaaaagtactcatgtagctcagtactccactccaaatagagtatagagctcattaagagtttctattatctcaaccttctatcgcttcacgaattcatgcttcacatttcttataacaataggatgatttcattcttatcacttcataacttgttattactcattgaacttatttcttaggatctgcagtctataggtcgggttaaggaaaatagtcccattcattttaatgttttaaggactttctctttagctaaacctttcgtaaaaggatcagccaagttatcatcagtgtgtacatgatccgctctacaagctcatgttgagagaaactctctaatagtgttgtgcttatgacgtattggtcgcctcttaccgttgtaataacgattatgaacttttacaatagtcgcgttactatcgcaatggattaacacaactcatattgttctttcaaataaaggatctcaactagtaggcttcttaaccaacacgcttcttcactagcagttgctatcatttcagactacatagtgaactgtgccaaaatagtttatttctttgatttctaagaaatagttccaccagcgagggtcggtcctaggctaaggcaagataggcccgtgcttagggtccactcttatttggggcccaaataattttttttttaataaatatacatatttttttaataaaagtatcatttattattataaaaaagacctaaaaaaattatttttctagggtccaaattaactcaaggtcggcctgtagctatactaaaaatatagccaatggttgccttggaatcatgtaataaagtgttctagtcagcatcactatacctttcaaggacagctggaaacttctaattgtaaagaccgcctatgaatagtactttatatattattaagttattaaaggttttatgtattaataattatggaatgcatattttagaaatatattttatatatcatatatatttttatgtctgtttttatatttaaattacctaatttctgttgattgtgttcggaagctgtggaagcgtacgttgggcctctagagagtcgctatttta

SEQ ID NO: 208781 - DNA, 1147 bp, Cannabis indica
gacacaaatctgcttagtgtagcaatgcgtcctatttggctttgtacttcgttgatggttgtgggtgacttcatgtccaaaagggcttggatcttgtctgggtttgctttaaaataacatttgagggggttcgagcgttcatgttgtagttgcagaggatgtttaagtcattcttctaggtccgtcctaccatgcccccacgccttttgggacgttaacaagcatgtcgtccacatacaccacaatgttgtggccgataagatctttaaacattttattcataagccactgatatgtggccccgtcattcttcaacccaaagggcgtgactatgtagtaataacaggcctaagtttgtcaagaagcttgtatggtcctgatctggcggatgcatcttctcctttctggctttggacaatgccaagttgtaatggtgacgggaagattgttggactcctctcaacatgctacgccatgccttgttgggagtttcagatagaggtggtagatggatgttattgccttcacgccgtataggggtggtcagcctattatggcgttgaaagtccagggaatgtgaatgacgatgaactgcgccatcaatgttctggtggttagattttctccaatagtgagaggtaatttcatatacctgagtggtgttatgccttggccaaagaagccatacattacttgactgtagggtgccaaattagcgagttggagccccatcttttcatatgttgatttgaaaataatgttgaaggaggctccattgtccaccatgtaccttgctacagtcatattccctacttgtctagtatcgacgagggagtcgttgtgaagcgaactaacttgggtaggatctccttttaagatagagcttatgggctctccaagctttggttgtttcgagtctgttcttcgattgctaggatgttgcttttgggctcatgatggagtgttcaagcacagcactgcctagctctgttggtctcacctagaatatgtggtccgccaatgaagacccctaagtgtcctaccaccggatgtttgggcagacttgttgccacctacctctgtgcgtggaagtcatggggttgtaggatgcaggctggccggcaatacaatgcctgcaggttgaggt

SEQ ID NO: 208782 - DNA, 858 bp, Cannabis indica
tttttcagtcgagatttaaagctagtgacaattttttttatttttagtcacaaattttattatgattaaaagtaagattttttgtaaaaatatgctgtcaactgaatgatttttcaatatagttcttcataaaattagttgatagtttccacaagagccagaagaaaaaaaaaactaaatcgaacatagtgcaatgtacatagataaaacaaaaatcaattggaaaggtaccttgttgtaggtttagaaccctaaaataaaaaacccatttgtaatcttacgaagaagaaactataagaatacgaaggtaaaaataaaaagaactaaaatacctggtgagattgagatgatttattggattgctctacttgattaatgtacctacaaaaatacaaaacaatcaatagttaatagataatattaatgaaagaatattaaaatttataaggaaaatgaaatttaaagcataaggaaggaaatataacaaatatgatgatgagtctttgtggtgcttcaccataataaatctgagatgaaattgaaacccctcaaactaagccaaaaatgaaaaaagataacttaaattacttcaatatttcttcccactaaaaaccctctttgagtcttgaaacaaacaaaaaacttacaataaaggagaaacatattcatatattgaccatttagtatatatggcttttaaagaggaagaggaagagcttatgggtcaccaagttttgtcttattattaataaaagcaatctgttggatcccaataagctcataagttaccaattcaatccaacggttaatatgcacttttgaaaatataataatttaggttaagtttttttttttttt

SEQ ID NO: 208783 - DNA, 955 bp, Cannabis indica
ttttagctttaaatgaggtaaagggtttaaaccctaatttcatatatttctttcataccattcactctcttccgcctccctcagtctctctctggctcctaccggatggaccagctccggtcgtccacctcctaaacggaggctattttcgaactctccaatcaatccaaatcaggtataatccaaaaacgaaaaaaaatacatcaatactatggccaaatatggccaaaaaagaagatttctaggtgcatgagaaacaaaaaatagaataggtgcagtaaatatggccaaaaaagtcacaaccagaagacatgccataaccaagcaattagatattgagagaatattaatttaaattatttactttttttctgtgaacttttacaggcaaaaaatgttactttaatacatttttattacatttaatacattattggttttaaaaaaattgcataataattgttttgtagttgaatgtcaaatccaacatattatcataaatgtaaagcattagcaacaccatatttgaaacattaattagaagttcaaaacactttttttattacgttgacaagcatgtatgttattcaatagttgccaaaccgttaaatgatggttgtatagcaagtgttacacataacacattgattaaagtgatttctccaactattttcataagtataataattagacatgttgaataaacgttgtctcacagttcaatcaaacattttatatatcgtgcaaaaacaaaaagaaaaaacaacaatagaaccataacattataaccaagtcttaacatctagcattaaaaaacaaacaattaaaataaataataacattcaacaagctatagaaatcagttctcaatcaccagacttgttcttccctttaacatttttcatagacttctaaggcttctcatattcattatcaatattttttttttcatttt

SEQ ID NO: 208784 - DNA, 811 bp, Cannabis indica
ttattgatggaaattatttctctgatagctgcagttggtggtgattcttgttatgccatttcgtattttacaaatggtgtagcccacgcactaactaagtctattactatagtttgataggagtccgtgcttgaattaatgcttatcctaaattcttaagtgctcctataattaacaactgatttaatttaatattttcgtgtttgtcctaaaaaaataatactcacacttaaaaatgttcttatatatatatatatttttttttttttaaaaaaaaagataatacgcactaagagattttaggtggcacatgcatgcattgcatgagattcactactacctactatactaatatacatatatgttttgtcgatattattttagcttttaatttttaaaaataaaaacataataaatgttgtaagaatgcggcctataaattagcttagattgcaatttctactcaaaatgagttacatggtagaacaattttttaacctctattttcattaatgtatacttttttttaatcaaaatcttttgtgaaaagaaaatcgacatgtggagaagtaattttgatagagttatgaaaataaatagttattatatataaggtgactattcaatggttacatttttattgtaatcatatggttacatttttttgacctgtaatagcaggttaccaataggtaaacatttcatttttagaattaattaattatatttaatttggttttaaaatataattaatcttaattaaagttttaaaaagaataaattaacacgttaatatcatgttacaagtcat

SEQ ID NO: 208785 - DNA, 735 bp, Cannabis indica
gttctttactttatatttattttaactttctattgaaaatatatttaaacttatcgttgttctgttcaaataatttttgtgtctatttaaacatcttggtgaaaaaacagtaattaattatataatttggataattaatttgctaatcataaaaatagagcaccaatgggtatcagagcagctcactaaactcttagtgaagtcttgtggttattttttgtttgatttgttttgtgtgtgaaatgtctttctttgtagaacgtagttagatgtctcgttctccacttcttaatgactcaaactatctctacaggaaagttaggatgatagctttcatcaaagctcaagatgagaagtcttatagagagaaattttgtctagatagtagtcaccacctaccgaaaaggtgaagatggaagcacaaaggcaaatctgaacttttgtgagatacataagaagaaaaattatccaattataatgataaggctcttcacgctattttcaatggtgttggagaaagttttattcaacttgttacaaccttacaaaagtgttacagtaatattttcattacaaaatacttatatattcaaaatactgtaaatcagagtcctgacaactaggcactacatactagctgagctgatatgtaccttcatcggggatgatctcttactcatggttgccctaacttgccttttcccttacatggaccataaagcacccgttagtcac

SEQ ID NO: 208786 - DNA, 562 bp, Cannabis indica
cataatcacattgcatttacattacattatgcgatcataatgtttggtttgcttgtgcaaccaaacatggttattattactggtgatttgaagtactaacttgtatctctagtgtttttgtaagctggagttcaagatgattaagttttcggattagtttttctgccttttcaatttccaattttgattcaggaatttgatgaggccaaactttgacaaagtagaactggactttgatgggagcatgaattgcttcagtaagagccctattagtaatcttgtttggctcataattatcaatttgttcttctgaccccacatttaatttttcatgctcgttattctcactaaaatgaatgttgtcttcttcacttacagaggtttctcacaatttaattcccattttgtccaacaagctcttgctttttatgtcctgaggttgatgcattacaaaatattgtgaaccaaactaaaaagataaagaagcaaggaaataaaaccagatggtaaagtataattgtaggttaaagaatgatataaatatatatatatatatatatat

SEQ ID NO: 208787 - DNA, 551 bp, Cannabis indica
tttgcttttgtcatacaggaagtctatgaacaacagaaggaattagttttacttgcagagagaattgttcttgcaactttaggttttgattttaatgttcagcatccatataagccccttgttgaggcaataaagaaattcaaagtagctcaacacgcccttgctcaagttgcgtggaattttgtcaatgatgggtatattatgcctaaccttagtttatttttactgcctactgctcgtcttcgtcctgaaattgaatatggtatgcagacttaggacatctctatgcttgcaatttaaaccacaccatgtcgctgctggcgccattttcttgctgccaagttcctcaaagtaaagctcccatcagatggtgagaaggtttggtggcaagagttcgatgtcactccacgccaattggaaggtgtctttccaaccttctataataattaaattactcttttactctttcatacatgagtcttataaaggtgatgatatgtctaagaaatatgataattacttagggtccgtttggaaagtgaaattagatt

SEQ ID NO: 208788 - DNA, 847 bp, Cannabis indica
agagagagagagagctcgagatcttcaacctccatgaagaatgaagaagaagaagaaagaagatgaaacagagaaaggaaaaagagaaagagaaagagaaagaatgaggaagagggagcttaggaccgtcaacctctaagaagaacgaagaagaagaacaaagaagatgaaatagaaaaatgaaaagaaaaaggaaaaagaaagagaaagataaaggaagagggagctcaagaggaggattttttgggtttatggggccggagctcgtggtggtccgtggccagtgtcgccgcacaagagaaccttctgggagagagaaggggatcagagcagtgaggaagagagaaggggtagtgagttagggtagaggtgtacacttgtgtatacagtgacagtccactttgacacttaacataccaaagtgcacgaaaggagtatataacaaaataattttgtaaattagggagttaagccctcaaaatttcagtctaagggattaatcttacaaaattttaaaatttcgggagtttgactgcaaatctatatatatatataaaggagaagtataagacggtgacgtggcggtctaaaaatgctttaaagtcattgttcttttttctccttaattctctcttttcttgaatattttattaattttatttatattaattaatataaaatatattttttctttaattttctcattattctaatttatttattctacttcaaattccgatcttaattcttccgttttttaactttttattcattttgaagatatctctttcatctttgtgtgtattttttcttttataaataagaaattgtattatgaatttttttt

SEQ ID NO: 208789 - DNA, 508 bp, Cannabis indica
cttcatttattgccttccgttaagcaatattttgtaaagaatctcaagcggagacttgtttccaaacaattgactcgaaagcacattaagaagataggttgccatttggagagcatgatgccaaaatgatggaggaagagatgcatgagcaagtagagtacgagagatattgtttgtagtccgaattttgcgttcggctttcccattttgagaagaagtgtgagggcaagaaagacggaatgacatgccatgatttttacagaaatcccaaaaagagttattatcaaactccctaccattatcacattgcacagttttgatattacgctcaaattgagtagaaatatgggctttaaaggccaagaaaattcaatacacatcagatttccgacccataggaaaagtccataaatacttcgaaaaatcatcaagaaataaaatgtaatatctatgtcccgaagaactcaaaacgggagaggtccacagatcactatgtaaaatatcaaat

SEQ ID NO: 208790 - DNA, 555 bp, Cannabis indica
aaaaaaaaaaaaaataagtgtgcagcactaaccataccttaaaatgtatgttatgagaaagtattacatgcaaaggaagctaagctaaatgctacaaattattcctcacttatactttgaattatgttactactaaatagataaatggttagaggcctttacattgataatgtcttaaaagttaatactacttaatattaatactatgtatataagatgtatgactatgagtcattttgtttattggtaatgtgaaatttatccacacttttcatggaattaagtaccgtattgtacagtaatttttatcgtatttaattgctaactttttgtactgaatgagtgtaatataatataaaatatgacattgtattgtaataactatgacaattataagaattgtgaatttgagcatttaatctatgtaatgaatgacatgctaatcaaacctgtaaaaatgaaagcttgatttagttacattttcatcacttttttaaacttgttgaagtccttttgacacacattatcgtcgaacatggtttaggcataggataa

SEQ ID NO: 208791 - DNA, 951 bp, Cannabis indica
ccccaactggagacattattcaatgatccatcaaatgcgacttcgaagctacaaataatgaagcagagtacgaggctttgatagctggacttgacctagccaaggagctcaacgtaaagaatattgaagtgaactcagactcccaactggtagtcaaccagttcaatggatcataccaagcaaaagattccaagatgatgctgtaattagagatagttaaagaaaaggtcaaatgcttcaccaaattttcaattatacaagttcctagattagaaaataaccatgcagatgcactcgcgaacttgcactcgacaattcaaaccaagaatgggtgacaatcccagtagtatacatgcaatggccagccgtatggaagcaaccagaacaatccatgaacgtggtcgaaaatcagtcttggatgacaccaatcaaagaatacctcctccatggcaccttacctacagacaagtatgaatcaaggaagttgagaaccaaagcctccaagttcacgttgtacaatgatcggttatacaagagatcattctcgtggcccctcctccagatgtctaagtccatgcgaagtgaagtacatactaacagaactacacgaagttgaatgtggaaaccactcaggaccaagaagcctacgcaacaaggctcttacgatcggatactattggccgacaatgacgacagattcatatgatttcgtcaaaagatgcgacaaatgttaaagattcgctcaagtatcacacatgccacctgaaaagctccattcaacattaattccttggcctttcatgaaatggggaatggacatcgtccggaagatgcctacagcttcaggacaaagagttttcatgttggcagtaatcgactactttaccaaatgggtataagcagaagcctatacacaagttagggatcaagaagtcaaaagctttatttgga

SEQ ID NO: 208792 - DNA, 697 bp, Cannabis indica
gcaaatgtggcaacggaggcaagaatcagctcagacatgaatcaacttccagctacgccaaatggtggtttagctgaaagcaatataatctcaaccttcaaatactacacatttttggtagcaggttgtgctacgacctacaatgttattctaggatggctagttttagttgattttggagctgtaatttccattcaacaattcaagactttatttcctcaagcttagtatcttgtacatttattattaaatcccacaattcaagactttatttatgagattatatttgagaaaaattaggtattatgaatgagaaaataagtaaatttccaatcaaacatttatgtgtctttattatccacgaagataggacacgttttgacaactatcaatatgacgtggcatccacgtcagtaaaagatcaacacttcatgggctgggtttcactagatagactcaaagtcaatatgttatttgtatttaccccattagtagataatgtttacatacaagaaccctaagcctataaatatatgaaaatcccattcatgtaaagggtttgaatctcaattcttacaaggtaagacaaatctcagggttcgtaaacttggcaaacacttatgtaatactcaaaggcttttctagctgaataatattgattcgtggactagagctcgttaatacttgaaccacgtaa

SEQ ID NO: 208793 - DNA, 612 bp, Cannabis indica
aacctgggtgctgggtgctcagggccctcgggccccgagtgctcataaattaacttgctctaaatctgattctaattcgtcaaatatactgtggtatatctagttgatgtctgtatgcaagttttgaccattttgcactaagatggtcccagaaattgaaaccctagttgagggtgtcaacctgggcactggatgaaaccctaggtgcccaagttgcaggtttgtgtaatttcagctcctgaggcttggattaggttgctccatgtcttcaagttatagaatactaaaatatagagtattggattcaagttattaaagtccgaacttctatcttggagatcccaaaatcaacctaagcgcaaggctagggtcccctcccaggtcaactgctatgactcaagtctgctcaactccgtgacatcatccttcatgtcatgtatcaaatattgatgtccacatcactagggaaagttttcgggttaacagtttaattgaattattattttaatttgacaaagaatagttatattgttttcaaataatcttaaccacaaaaattttaaattttcacaacttcactatatctatactgggtaaatagcggcataagta

SEQ ID NO: 208794 - DNA, 1893 bp, Cannabis indica
ttttattttatttttttgaaaaagaaaaatttctttctaaatttattttaaaaattacaaaatgacactaatcataaaaaaattaaataaataaatagataataaaataattttataagtatatagtaatatatttctccatctctccatcatctttcaaacaacttgaaatgataactactatactttccctcccttatattctctatcctccctcaactctccatcctttattctctccatccatctcaccaaacatagtgctaatcttcctattgtaaagaagttataaaaagataaaaaatattaaaaaaaaaaagattattgacttaattattacatgagaagtcctaattacaatctctcattataatattaattaatctttatgtccaaaatcatgtgtcggaatatttttttcataatggtatttgttacagttacaatatcattcttataaattttaaataatttaaaatatcgataataaaattcttaatattctaatttaccacgaacattcaaaaaacttcaaacgtatttacactactctaaattttttgaaattttttaaaaatttacaagaataatgttgaacgaacaccgctataaaaaaaaaattttaaaaaatatttcgacatatattttcaaataccgaaattaagtaaaaaaaattaataagaaattaccagtaacactttccttaaaacattaaaaacatgagtcatttgcaatagaaaccttttttatttttttattcataattacccacatttttcttcttatactaactttaagtttaaatacaatttatgtaacaacaacaaccccattgaaacagattcatcttcttcttcttccattataatgttattattattattacttgttcaaactattccattggtagtgaattatgagaccaagtagcaaatccaccagctatgtcagtaatgtaagtatagccctgaccaaaaaacaaaaacaacataaatgagatactaaaaatgttaggttaatttgtttgatgatattgatattcaaccaaccaaccaaccaaccaaaccatattttgcttacagaagctaaaagatcagttgcagccatcatagacctttttccactttgacatccctataaaaacaaagatcaaaactgccttctttagttttttagataataatagaagaagaagaagaagaagaagaagaaaaaattggaaattaactcacaacaatgatttcatcttgctttctgaaatgtgatgatacttctgctacaaaatgagggttccttgtcatccctacattgaatcaatttgtttattagacaattttgtttatcttaaaagtattaagaactaacaaagaggttgtaaatcaaaatcagtcaataatagtcttggataaatctgtaatacacccctaaaagagtgtttcggtacatttttattatttttgacctctagtagaactttttagtgtaattttttccgagctaaaaactctcttagataacgaaataaataggaatgtaccaaaaagtctatttaggagaagacaattgctaaaaggtattattggtgcctaacatcctcctcagtgtcatactgctattggtgtaattaagtattggatcccatataacttaatgaaatagcttttagagaatatcgataatcaatcgtgagatgctacctatagaaggtgctacacatcactgctgatgttcaataagaatacttttaggagaatgtattatagagttgactctaattctaactcaaatccaattgacataatcactatccaatacaagaaaaaagaaaatagtgatgtgattcttatgattcacctgaaccaactctgtacatgtaagggatgttaacagcga

SEQ ID NO: 208795 - DNA, 692 bp, Cannabis indica
caatcttttgaatatgttccaaattaaacaaaacatgatcccttatcttgacactaaaacactaaaaattaattgtaaatgttttagtaaaatttactctgcaactggtttttatgagtatgggcttttttttagttactagaaatgttgtacttatttggggaaaaatagataaggtcccatgaagaaaaatacaggtttggacatagtttctctgcaataacaaaaattaattgccaatcataatttaagatataatatttgaccaaatttatattgaagggtgtgccattgtaagataacaaatagtatattgattctgtacaagattgcaggctatataaaaagaatgaagatgatattccaattagtaagatatagaatttgtggttgtggggtatttaaaacttctattgttggcttcttcataaaaaaaaaatctcatgataatttgttagggttttcatatgggatattataatataatgaaaaattaaattattagctatgttgacaagttgatcatgtaataaatctccacactatagtttatgatctaattttttgctttcatgtcacgtaatttaagaaaataaattattaaatattgagaaatttattaaactaacagattgtgatgagaagatttgaaaattattaaagtcagcttagttagttagattactcggtta

SEQ ID NO: 208796 - DNA, 657 bp, Cannabis indica
atattatttattcactaattaatttgtacgtttttttttttttttttttaactttttagtccaccatttttaccttttattgaaaaatttaaaactttttgtgttttgttgttttttgttttgtattggcacttactttgaatttcttgagcttctatgtcatcaagaattgcagcaaagccattaatatgcctattatatgagtaaaagatggcatcttttgctttttcctcactgcacaaaaaatccaaaaaattaaatctttatgaggaaaaaaagaaaaattaaagaagagatgtatgagattaatattaattggacattaattaatgataataaccttcctaagtaagatccaagaagagtgtgatgagattttgtagctttttcaagatcatctgaggtagggtttacaccatgagaatgtgttcccatgtacacaatatatggctgcaattatacatacacacaaaaaattcttttgatttgctaaaaaataagttcgaaaaatgaaatgtattttttggaggagaaccggaagttcagtttccatctccaaaactgttaaagttaaaaataaataaagatagatttattaaaatgaagatggttaatttgttataattatgagatttatatatataactataaatgctt

SEQ ID NO: 208797 - DNA, 1279 bp, Cannabis indica
atcaatttgagggtaagggacgaagtaagggagttggaaaaaggatttcagagaggatttgtaggagcagcagaggaagaggcattggccattattgcagaggcaggatcggaggttgaagatgacatggacgtaagtcaagaagtgattgataccatgtagaccagtaagccagtagaaaaacaaagtaacatgaaggctaattgagattagcagcaaaagctaatcaaacgaattagactaaattctttatttataataacaaagagtttgttacaagaatataagaagaccaagaaaagtaactaacaactactctaacagacataacaactaactatattaactgaaaacagttaggtgttaacattaagcatcagttttatccatgagttcgagagttcgaggttggatcctatggaagagtttgtgaagaaaaattagctttcactaaacaaacttgtggatgacttctggttttgagtcttgtacgtaaaattaaaacttattatatcaagtttgttttatttattttagtttataatattgtgttccgacattacacttgatgataaaattgaccgtgaaagatataaaatattctcacatcaacatttattaattacaatttagttaaaaaaaaaaaaattacaatttgtttaaaagaaatgaatggaaaaggaatctgtcccttacttttattactccatgatcactccatctttctagaaagttaaaaaaattaaaaatccatgaattgcaaagtcactttaccttggtaaagggtttacatgtgtgtctatattaagagtcatctttctgataagatcatcttttgtgaaaaggttatccttctctggagtaatctctagtgctaaacactccttcaattccaccacaacttgattcattgttggcctttcaatggagtttaaatgcacacaatttgtggccaattcaatagctttccatgtagagttaagttggaagtttcctctcagcctgggatcaacaacgctttgaatctctccattttcataaagcatgttctcaacccattgagatatgtgaatattctcattactgttaatttttgcaatcactggtcgaccagtgattatctcgaataaaacaactccaaaagcgtaaacatcactcttctcatttagccaatttgatttgtaatacctaaaaaaaataataaagttaataatgaagaaatattattatttatgtatatatatttcaaattaggcatagtagttagaggagtgaataa

SEQ ID NO: 208798 - DNA, 562 bp, Cannabis indica
ttttttttaagaaaaaaaaattgcatcctaaatatttaaagttaattctcagttgtaaataaatattaaattatatttttaaaatttcagtaggtatttaattattaactgataagcgaatattcatggttagattgacgcaggaggaagtaggagatttgcaagatatgttgagataacatatctacatttttttatgatttttatttcatctaacattgggtttttttttattttaaaataaagttttgaaagttatgtgtgttaaaatgaaagtgtgatttaaaaagtaaaatgtatgataagatctataaagttccatctaaaaattatttgacattacgatataaagctctcacatattttcaatatgattctttaaaaaaaattctcaagaacgttatttagttttacttacagtattttggatggtttgatcactatatttttttttttatttaagtcgtttaatatattacaattcatattttatttgggacttcgaatccaggacctccaacatacacatacctacatatagtcacttgagctagtcggttat

SEQ ID NO: 208799 - DNA, 691 bp, Cannabis indica
gtgtataaaatcaaaacataaagggattttgccgccaataacccttttatgaaattatcccatcaaatttatcaaaaaatattttaattcaaaaataaatattattgaaaaattttacaatggaccctcataaagaggggtccaccgatgcacctcctatctgtttcggcatctagggaaattttttaatccaatgagaaacttggaaaaaattaacacagcgaaaatagggtttaaacaatctcaaaattttgcaggatgtcttaaataattataacataaataaccataaaaaaagtggattaaaaaattttctctaatgtcgaattagatagtgatacatcatggaagcattctgtattatttagagtaaattgtgacaaaacctacaatattttcattttgctagcaattaatccaaaaaactcaaattttagcggtaaaatctccacaactcgtaatttgttagcaatttgctattttcatccatattaggtgttaactactatgtgtaaaatgtaattttcacatggacacatagtacacatgacataattttattgatacaggtaaatcaatatttaaaaagtaaaataaaatttataagagaataatttaaaataaaaatataataaattaattaaaacaaaaataaatcataacaattaaaaatacaatttttttctttttt

SEQ ID NO: 208800 - DNA, 1771 bp, Cannabis indica
gagaagacggcagacaagatcgaaattcgtcgattagaagatctccacaaatgcctaaatgagggggagttagtttacactatactctttttcctttgatcaagttttcagcaagatttttaataaggcagttattatggacatccaagggggagtgttataaatattattaattatgtggatgtccaaatcttttatttattaccattaattgtaattaacattactcttttcttagtttccctttttcttagtttcttaatatctcactcttgtatttgtataaataagggttcaccccattggaataaagaacttagaaattcccattcactttctctttctctcttcatcttcttcttctttcttctcatctactttatattattttataacaaaaaaccttttgtcataattataacaaacatccttgaaaaaaaataaaaataataattaaatacttagacatatattttgggatttgaatgttaaggaaacaatcgaaataggatgttataattaattggcacttttcaaacaataaaacatatttttaaaatgaattttaaacagagattatatggtggttgaattgaatattaatgtgtgttcaaaaaagaaaaaaaaaaaagaattgaatattaatgtcttctctacactttatattaatacttatgtatattatgtttttttttttttttttttttttttgagaaacattatgtttttcttttgagaaatacttatttatatattttgttgacgattatggtcgactcgttacaacttaataaaagtctgaaagtgaaatctccttttggagctttgcattggctgtgcgcatcaagcggcatgattctacagtattttattcacttgaatttctttcatttttgtcacaagaatatttatttaggttattaccatttatgttacccttgataaaatcactttctctagaaattaaaatggggcttattaggattttattcctaaaatttgacgatgaccaaattatgtcttttaatatttatatttatttgtcgttaaaaattctacataagttgagattgtaggatttaaaaatttttgtcgaattttattcaattttaataattcagtgtagtaaactatactctccaaactttgatatctatcaaatcatgtccctcaaactttgacatatagcaaatcatgtcccttgaattttgacatgtaccaaattatatccactgaactttcattcatattagattttttttactaaaattgaacaaaaaattttaaagctaacaatcttaatagttcaatggattcttaatgaccttaaagattaatatgaacatgatttagtatatgtcaaaatttgttatgcgaaaatcctaattaaaattattgaaatctaaaacaaaagatagtccttgcatctaaaaggctaaaagtaagatgttaccgtggacatgatttgtgttgttttaattacattagtcaatgattattaatctacctaattaatcaccaaattaagtgagtcatgtcttctatactttgactcaaatttgaaaagttttattagcaatctctttttacgaacttgcggatttctcaattaatcatatcattgattttaaaatattaattcaactcctaattaggtggttgccttgtccccaaaacacttgttacattttaaaaaagaacattgatagtaggtattaattgtgtgcaacattacccaaaagtagcgccaaagtagttttttttttctttt

SEQ ID NO: 208801 - DNA, 1121 bp, Cannabis indica
agcttgtgctatatttatttataatatattgttgaacacaaacccaattaatctgtgctgatgatgtcataattgatttttattattattattattttttattttgggagaaaccttgcaaattttaaaaaaataaaaaatatatatatttgtcatatgattaattagatgatagaaatggtattttaaatttatttaaaataataatacatggccatccatatatgtaatgtatatgtaaaattaagaaaaaatttaaacaaaaaaaatcataatgtaagaacccaaaattggaaatttactaatgggtgattgtttttgtgattcacaaaattaataagatacatatgacacctatataatatcactgtatgccagctgggagtccaacaaaatccatgttgtttcttctgtggcatttaccctttatatataccattaggataacccacaacattatagattttttccttttcttttacagctgttggattattattattattattacttattatatagactcaaacgttacatatgtattcataacacacatatatatattacgcgcgcgtggaattgattagatatttcaataaaaaaaattaaaaaaaaaaaaactattattatattcttcccaaaaaaataaaaataaatgagatactacctatcaaaataacaaaaataaaaactaaaccaactccaactatattattagtttagtataaaaaaaaataaaatgtatttattattaaggtaccaatccatttacacgtttgaataataacaaaatatatgcatataaatattagattaaaaaaataaaatgagaagaatatgcctgaagttgaccttcaaaataaggtcgatttgatgagtcagaccctatggtcatcatggctaaacaacttcaattggcagaaagtagggttatcttgttaggatcaatttaacgagctgctgctcacaataatgactagaacaaaggtcgtgatgactgccctgacctagggactcccgacgtacaagtttctccaacatttgatgctcttgaaagagcatttccaaaagatcttggaacctcgagcatttacaaagacaaaaataaagggatagctgtc

SEQ ID NO: 208802 - DNA, 2100 bp, Cannabis indica
tagtttttttttttttatatttttttagtgaaattgatatatatttttcctgttagtttagtcacattatatagtgtgaatatgaaacaaagacagacaaataccacaccctattacattgtaataacggttctaaatttttgtaataactccaatatcatgacaatggatcaacatagtataaatttatttttaccataaataactccactagactcaatgataatttttattttgttctattttttatttctgaggttgggtatatggtgttacaaaaatcattaggggtcatagctaataaccataatttgctaatgttgagaaaaagacaagaaagggtaagttagtcatttgggcaggagaatagtgatattattgaaataatgatatagctcattttgggtgcccatttgttttctcagcccaatataagttttttttttttgtttatcttaattcttaattgagctcaacaatcccaaaagtgattctttccctatcaggaaacactttcatcactcgttttcacacgtgtcaatcacacctgtttttaggaattttaatcgtccaggcaacctctctcatccaacggtccatattcaatctcacttttaaggtatgccatctgccacctaagatcagagatcaaaatgtagaaagacagtgccgccactctcattatctcatacgatgagccacacaaatatttccacgtggccacttcctattggtgtaatgaaataagtcgcacctaactctttttttagtttgagtttgaccagtgaaccccaaaacccaatttgctagagccgagactagtgggccctgcttcccctgttccgacacgacctctatctgagggctggacacgtggctaaacagggttcgtggaaaaccccccaacaaagtaaagatgtgacatgtttgactcttgaatatgagatcaaattttggattacaagaagttaggctatgattcgagggtttttttttcattattaattattattatttaaatagaatctaattagtatttttttttaataaaaagtcttaacaaccaaacactaaaagcaacagaaagtctatcaaggtacaacatcttctattaataagttctgaatacaagtaagattctctaaccactaaattatactttttctaactgtgaaatcaagtttgaccaaagtataagcaacactgttataactgttataagatctattacaaaacacaaaattaatatctattacaaagaccaataatatcatctaaaactagaatcaaagaagtaataagagaagtattatttttcagtttaagcacaatattcaaataataatcaaactcaacaataataattctacacccaaaggagatgcactgaatcaacacgttgcgaatagccaaagcttgagccactttaggaacaaaacagtcatccaaatgccaacttgttgaagctaaagctatttctaattaattacgaatcaccatacccaagccattataattgcccaaagaattgatagcggcatctgcattgactttgagataatcaagcggctggaaaagtttctattttgggaccacctaaagaggggctgtccaagacaggggttgtccaagacactgtcccccataaggaatgtcaactgccttccgacaacaggggaggagacgccaccggagcttgtttgttatcaaacgtcctagttaatcacatatccaatgctaattagtatttttgttcataaaattttgatatgtatagtatatgcttatttcgatttttcaagtcgttaagaatctcatctgaactattaaaattgttatataaatttaaaagacttctgtcaaatagtgtttaattttactaacgcatcaattatccatatattaaatcgtgcctctaaactttaatatatatatatttaaatcaacaatttaactaagacaaaaaaaaatgtaaccaacaatttataaatttgataggagaaagaaaaagataattaaagaaaaaggctaattatttcttttttagcaaatatatagttataaaacacagttgtattgctctagagcatatatatatat

SEQ ID NO: 208803 - DNA, 1029 bp, Cannabis indica
tggatagaaaagaaaaggtgttgtagaacaagactattctcttagttaaagttttatggaggaacaacaagactgaagaagtgacttgggagttaaagtcgcagatgcgggagcagtatctcaagttattccggtaaattttgaggatggaattcctgtaaggaagtgatcattgtaatatcttaaaactataattatgtttaaattggacatatttttattaaatatatagttatatgaatattagagtaagattataatcttacttaagccaattatgagataattagtgacttttgagaaaatgattaaatgagcgtaatttaataattatgaagattttattgaaacatatgggtatcatatatactatttttgacataaattattttcatgttcaacgaccgtggaaactcgaaggattggccaaggatgtcacggcggtaataggttgagttttggattggaccagaatgttttagaggtttgagttgtcaaaatttttggggtagatgaatttgaacaaaatacccctaagttgaaaaggtttcataagtgttgtattagggttacaatagtaattttagtaagatttatctttttgttttatttattttctagaaaactctaggctgaactaatgattaacttaagtaatttgcttcttttcttttcatttaagattattaagagataaatcaaacaatagaattattacacaaaaaactcaatatctctcattctctctcttcatttcggcttaagaaaaatcaagagaaaaaatcgagttttcatccccaaatctaatcatttccttgttgttgatccactctaggagctaatcaaacttgaggtaagcttttcttggtgttcttgaagattttagggttttaaagagggtttttgataaatttggttgtttgtatgcttattttgtaaaagcttatttttagatgtaaattaaggttatttaagctttaatttcatgattttagggttgttatattttgagttgggtgagttgagttc

SEQ ID NO: 208804 - DNA, 1008 bp, Cannabis indica
tcttcaatctcgtcaagtgattcgactaagagagcgtgattagcttcttgatcgtagatcagtcttctgtgggacagaggttctaattccatgggcagcatagcttcataaccataggcaatagcaaatggtgtttgttcagttgctgtgtttctctgttgttcgatatgaccacagtacttttagtcgttccttcagccagtttcctttagctgcttcaagttgttttttcattgtgtctttgagtgtcttgttgactgccttgacctgaccatttgattgagggtttaccactgcggagaaactttttatgattccatgagtgatacagtaatctgtaaacaattggttgtccaactatttgccattgtttgaaaaaaaaaatttgcggtagtccataccgacatattattcaccacaaatttaaatacttttttatatgtgattgttgctaaaggctcagcttctgtccactttgttaaatactcaactgcgaccactgcatactgtactctgcccttgcccttgggcaattgtccgatcaggtctattccccaaatggaaaaatgccaaggactttgaatctaaattagctcgttgggcggtgcatagggcataattaaaaatctctagcatttgtcacatttctttacataggcctttgaatcttccatcatggtcccccagaaatatcctttccttagtattttctttaataggctttgtcctgctgcgtggttaccacaaattccgtcatgtacttcagacatgagttgtgaaacttcatcttttgttacacatctaagtaatggcacggagaaacctctttcatacatcccaccttctagtatgatgtaccgtgcagctttcctcatcgttctcagagctttgtttttgtcatttggaagttctctagtattgaggtaggctattacgggtgtcacctagtttgctgctttgtgtatcattttgatttcttctacaaaattgatactaggttcttctaag

SEQ ID NO: 208805 - DNA, 792 bp, Cannabis indica
catggtgataaccaaaagcttgctgcatatgttggcgactgacaccagagcagattgtaaatgcttgaagaaaaaaatattgtcatgaatgaaattttagtaacatcttgttgtcattaaattgacacactttacctcttgttcaaggtgatcttatgaatattacaattatataagcgtatcttggctttaatgaattgaagtctccttaaaagattacagtatctacaattttttgttgaaatggatttgggtataccatgtgtgtcattggaggatatcaacttgttttggttctttttgttatgtcttgaggcttttttgtttcatgttattatgtataatattttattattgtaattaaagtaaatacttctatcttaagtgcaagttttagtttatgtagactcattattaaatgtcaaactaaccaactgaaagtaggaaacacgtactatgtaagacatgaattaattcctatgattcctttctttattttacttaatgaaacaaatatttttttaaaaagaaatactttggttattgctcaatctgattctagcaataattatttgaaaatacacaataatactattattacatgcatggaatctaataattagttttgttgttttatgtaattggttttcaagtttttgtttttaatttggttatttaatatgtgttagttttaaattgagaaatttgtggccaaatctctttatgtttcatttgtttaacatttaaccccattttctttgtctttggtggaaaacctcctttagtttaatt

SEQ ID NO: 208806 - DNA, 935 bp, Cannabis indica
gacacacttttttgtaattatgctctaatgcaataacaataaattaaaatgtaaattgacataaaaattaatgataagtaataaattaaatatatattttttaagaaaataatgacaatattataattaaaaaagtatattaaagtaagtaattaatgttaaatgataataatataaataaaaatgtgcattaaatacgtgttatatttgatataatactatatcttgttttaaatttggcctatttaacgtgatgatcaaaatcattcatgattaataatacaacaattcacaattaggtggaacctccttgaactaggatagctcatcgtctaatcgaagagtatgttttgccaaaccatgagttatcgaattcttatcgtaagcaacatgagacaaaactgctctcagaaatttagacaataaagctataacatcctcaaacaacacccaaactcattaaaaaatactctttctttgttgatagctattagcagagaaagcaaatttaaataaacctctctaattgagattctgtacgaatgaacccaattgagtcctaccaaaagagccaagatttcaacttgtaatactaaaatactacgtgaaaaaaaacacacaaaaaaaagaggtattagaagacacaatcttttaactaaaataataggctaaattccattaaaacaactgaatgaataaaactaaaaactcaactacaaaaaagagaaggaaaccccaactaaaaatctaaggaaaactaaccaaatatattatcctttaactagtatcatcaaactaagaactcaaaataaaacacaaaaactcaaagaagaaaattttaaacaaagcgtaaccaactcaaaataaaatagtaaaatcaagaaaatctgtaacaagtaaaatatgacacaagttttagaggaaattacactcta

SEQ ID NO: 208807 - DNA, 713 bp, Cannabis indica
gtgcaactatgccaatgatgactgaatctgccctaagctgtggtcaagtgacaatttcactaggcccttgcttgaattatcttaagagcggcggagcacccggaaacaagtgctgctttggaattaagaggctagtggggatggcacataccacccccgaccgcaaatttacttgtaattgcttaaaaactgtcgccacagaaattcgcggaattaacttgaatttcgcctcttccctcccttccaagtgtggtgttaatattccttacaagattagcccttccaccagctgcaacaggtaatataatatatatgtacaaatcattaagataatatatatatattcatgtttttaattagggtttctatttttttatatgaatatttaaaatatgttctattttaattttttatatttttttttatgaatatctgaaaaaaaaattagtataattaactaaataaaacaaaaattattaaatgagatgctagtataattttttggatgtaattaattaatttatatatatatatatacggttaggtttaatttaagttgtttttttagtcacaacaataatatatgcttttaaatacaaaatatatctataaatacttgtcaaaaaagtatatattatattgtatatacacatgacatgtgtctagttattttactcaattgattttcgccatgtacatataatatttttttt

SEQ ID NO: 208808 - DNA, 1026 bp, Cannabis indica
gtgtagcttgaaacattcaatactaactacaaaataaattaataatatcaaagtatagaaaatgttgaaaattaataagtatgcataaaaagtattaaagaaaatctttttcattagtttatatatggtaatgacaaataaaaacatataaatccttgtagagaaagcaactacttgacaaaactttatctatatatttatagtaaaggtggtatgtgtcactctcctcaaactgtttagatatatgtttgtgtctatatgtataatggatgtatactaatgttcaaatctgagtatagttacatttaaatgtaagcgtcttaatttcaaggtctcaaaaataaagtatacttttaatttattaacaaaagaaaggaaaattgtatggtggagccctctttagcgctgatgttgttcttagtagagtgacacacaagctcaaatatggttatttaatgaaatattattagaagaacacgtaggcatgcaaataattgttggcattttctttaattaattaataataaaataattaatatttgagcttttttatttttacactttgaaatagttttttttttttcttgtatttttacaaaattttacataaaaacatctattgcaactagcagagcaacctaaatcgcaactaaaaattgtatagcaacctacataaaaactaccgaataaaccactttagaaactcaaacggcaaatttaaaaaaaaaaaaaaaaaaatttaaaaataatatatggggtaatttctctttatagttttattttttaaattttttacactaccaagttttgtccatatgacatacgtcttgtaaataatacctctcgaaatataatttgtatagtagtatagtttttccatcacaatttattcaattttattgtaaaattatatagtgaaatgatagatggtatatgataaatattgacaatattagaaaaatagtgtatatcttcaatttttgacaatggaaaatataaaacttgaaaacaaaaataaggataaaa

SEQ ID NO: 208809 - DNA, 1131 bp, Cannabis indica
  modified_base (1124)..(1124): a, c, t, g, unknown or other
cgatggataggcgatctactgggggttatgttgtgtttttgggtgacaatctcatatcttggctgctaagaagcaacccgtggtggctcgttcaagcactgaaagcgaattcagggctttagccaatacggctgctgagctacgatggatcaactctctattgactgaacttcgtgttcctttaaataggtgtcctattatctgggttgataaccagagtgctgcagctcttgctgcaaatccggtgttccatgcccggtctaagcacattgaaatcgatctccacttcgttcgtgatcaaatattggccaatcaacttgctgttagattcgttccttcaattgaccaagtggctgatctccttaccaaatccttatctacagagagattcaactaccttaagtccaaacttcacatggctaaatccttgctctgtttgaggggggatgttaacacctaactgtttttctgtttttacagttagttgtttttctgttaaggtagttatttctgttattcattcttgatctttgtactttgtaacaaactctctctgcttataaataaagggattagtctaattgtttgattagcttttgctgctaatctcaattagcttttgtgtcactctgttcttaagtttacaagaagttcagaattccattcatctcagatacaaggaatgatcaaaaaatccaaatgtggcacatgagaaagagacaaagaaagaacaaacatgaatttggatattaaaaaaaaacaatcccccacatgttgctgaccttcaatccaaacctaactattatccgaaactgcaccaataaaatttcacttctatttgatcatagtagtgacatgaaagaatttgctattcttttctccatcccgataccataattcttgcgacttggtattcctaccacatttagttactacaagagtcttgcataaacaataaaacaatcgtatttctaatttcaattgtggttagagatgttgctggtggaacaaagaaagctatcaacttgcagtttaatgtagttgatcacctctttcaatttaataaattctgtaggatgaggttccacactccccatatgaccctgttaaatagtttttttttnttttttt

SEQ ID NO: 208810 - DNA, 1322 bp, Cannabis indica
aaatattacaattaaaaatcaacggtaataagccatgtgtcttgatgaaaaaaaaggagaggtcttttggatttgaggttttttcttatcgagcttgacttcagaacgaagccaagactcgacaacagaaaggagattagccgagttattgaactcggctatctcggttaacttctcagatctcttaagcttaccatcttgaatataagccaaatgagttgcccatgtctccaacccatcaaagatatgggttgcatatactatagttgctcctctctataattaatgaacaaacattgttatacattaccagaccagacaactaaacaatcacattatactaagtttactttgtctggaaataattcaatgcagaagaatcaccaaattaagtttttcagatccaatagcacatgtactgtctccccctatatatatataaatatatgtttgtatgcatgtgtttggatgttataaataaatagaaataagtagtcaaattacctgttcacattcttctttgaagaaatcgagtaagtctagtctagcaacaacgtctaagtcgactgttacctcatcaagcaacagaacctgttaagtcattgaaaatgttttatagattatagttagaagtaaacaatgttggtattctgtttttgattttttttatagcaatgataactttattgaaaataatataattcagtacaatttagaaaatctaaatatttctaagaaattgagagatttatggtaactaaataagttgtttatctattctaagagcataatcagaacccaaaaatgaacattaaactctaccatcaaatttctttagacttttagatatcattgcttgttttaatttttctgtttttttggatgactagacctcggaatgagtcccggcctatggtcttgctcttgtatctactatactgaagaacatcttttgtaacgatcatgatgtctaattttagttaatagtaaaacgttattttcttttccaaaaaaaaaaacggtttactcggtttttgggaggtgaattcatacacactagtaccaattcagttcttgaaagaactaaagtttagctgttcattgattatacaaaaaaattacaaaatttcctagctttttcgagacactttggatatctaccctaagtaaattttagtcttaacagtacaaatcaattccctaatcctttaggattaatcagtccctctatctatacttattcatccctactgttttaagctaactattaggacagctcacttaacaactaaaaatttgacaactcagcctctataatccta

SEQ ID NO: 208811 - DNA, 619 bp, Cannabis indica
gagagagagagagagaggaggtgaaattacattggaattgagtttgctgggagccatggctggaactgaaattggatcctttgattttttctgaaaagtctttcagaagtatatgatatgactagtgcataccatttccggtaaaaagatttgcttacttataggaagagagaatagggagagaaagtaaataaataatggttggaacttggaacttgggactcaatttcagaagagaagatatgggggcgtggaccccacaccccaaagcaaacgcgtggcgagtcaaggcaagtgttggtatagggctagaatatgtatcatctctctcttggagtctcagtcaactaaccaaaccaaccacccaaacaaacaactatttcccttttaagttatctgctgcttcatcgaccacctggtccttcacttcagttacgtcttagttgacttttacaacacgtgtcaatatgacacaggtcggagttgttgcggattcaattttctgttttttaattaatccgtaatcttggaggacctgtcaaatctcacacaaatgcatttcttttatcctttcaatttcatgattttactgtcaaaattattattatttaattttttt

SEQ ID NO: 208812 - DNA, 869 bp, Cannabis indica
cataaaatatgtaaaagcaatatcaaacatgaaactgagattttaaattgattaagaatatatatgacaaatatgtatctcaaaatttttgggccaatttctctggtacatagtcgattcctccggtacaaaaatgaagtgttctgtacaatcactccatgagaaagagaaggaataacacaggaaaaaaaaagaaaattacaaattgaagaaacggtgaagaaataaaacaaaactgagaaataggaagaagaagaagaaaacgaagaagaaagagaaagagttggcaatgggttgcacacgcaacctaaaacttttagtgacagtaaagaaatagggtgaagaagaagaattgagtggagagagaatatttttttaattattattttaaaaataatatttacttttacttgttatatattattaaaatattttaagaaataatataatgtagcgcaaatatgtattattattatacatccacctatttattaccattagatttatcatctatggttgtaaaaacttctctaccatgaggacaaaataatagttcataccatagtcttgtcctatttatatatactagattacttttacgtgtatgtttagttttattttatgtcatgtattttaattttaaaatattacaataatcaatctcatatataattggtgatattttgcattcagataatcttcaaacatacataaaaaattataaaaaaaaaactataaattcaatttcaaagaataataaatagattcattatatatgtgttgagtcaatattttctctctgaataattcttcaactcatgaaacacttgcaacatgtcaagagtaaagaatgagagagagagagagag

SEQ ID NO: 208813 - DNA, 1659 bp, Cannabis indica
cgaggttgagactgtttatggcattataagtagctcccagtcctcaagtaacttgaagcaattgttgaaatcgagtcaggttttcctctcaaacgatttgatagacaaggttctgaaaagagtcagatttggccatgccaaccctttgcaaacttttgaatttttcaattacactggaaatagaaaagggtttttccacagtgctttttctttggataccatgctttatatcttaggaagaagccgtatgtttgacaaaatttgggatgttttggatgatgtgagacataaagatcgaacgataataacctcacgcacggttatggttgttttagctagagttgctaaagtgtgttctgttaggcagactgtggaatcttttagaagattcaaaagggttgtctccgagtttgatacagattgtttcaatgctttgttaagagcattgtgtcaggagaagagtatgacagatgcgaggaatgtatatcacagtttgaagcatagctttaggcctaatttgcaaacattcaatatattgttatctgggtggaaatcatcagacgaagccgaggggttctttgaggagatgaagttgatgggtgtgaaacctgatattgtgtcatacaattgccttattgatgtttattgtaaagctagagaaattgacaaggcttataaggtggttgagaaaatgcgcgaggaggatataatgcccgatgtatttacacatactagtatcattgggggattgggtttggttggccagcctgataaagctagagatgttttgaaggaaatgaaggaagacggttgttacccggatgttgcagcctacaatgccgtgattagaaacttttgcattgcaaagaggcttggtgaagcttacggtttgatggatgaaatggcgagcaagggtttgaatccaaacgcaaccacttataatcttctctttagagtgttttattggtcgaatgacttgacaagctcttggaatttgtatggaaggatgatgaagatggagtgcctgcccaacacacagtcttgtatgttcttaattaggttgtttaagagacatgaaagagtggagatggcattggtattgtggagtgatatggtggagaagggttttgggtcctacatgttggtttctgatgttttgtttgatttgctttgtgatttgggaaagttggtggaagcagagaggtgcttcttgcagatggtagaaaagggccagaagccaagtaatgttagtttcagacgaatatgtgtgcttatggaactggcaaacaagcaagatagcctacagaatttgacacagaaaatggccatgtttggcacagtaatcaatccttgtaataatagtgttagtgtagatgtttcaactctcactcattcccctcataattgaattcgaaaagttttttgtttaatcaattattttgtatcacgttgcattgtattgcatattgggatgggttcatgggtggtatggtatataataataattttttttagtaaaaaacaaaattttaatagtttaaaaaatatgagccaaatactattaaattttaaaatgacaaaaattaatttctatcttactttaaaattaaaataaaataacagcaaaaagccctactacctccacctactgtaatactg

SEQ ID NO: 208814 - DNA, 521 bp, Cannabis indica
catatattaatctgaattagatagctctggttaagggataaagagctaattaaatatagttgatcgaggaacattcaattttttaatcccaaaaagtggagtagcttttccaattatcatgctctgaacccgagagaattatctaaaatctaaaatcttaattaagcaaaaagagaaactttgctagttaatacaaactcatcatatgtcactcatttgctggttatggtaataatggttgatggggatagtaataataaggcagacttcttaacttttttgtctattcaagaatctggtaaaacataaagcagacacgaaagtagtaaatatattaaacccaaacacaagtcatataacactcccttacatactcttcttttatacagagtatgcggaaaaaaataaaatcatcccaaatcaaaatatgtacataacttcagaaccttatgcctgaacaaatatgaaaataaagcaacttaaacaaaagaagtgtggaaccaaaaaacaaaaaaaaaaaa

SEQ ID NO: 208815 - DNA, 727 bp, Cannabis indica
  modified_base (706)..(706): a, c, t, g, unknown or other
tcaaaaaaaaaaaaaacccaatacgcccgtctatgaaagaatgatcctctcttccgattactcgtctgagttgcaccatttataatgcccctgactgagttgcaattctgagaaatcgatcccctctttcgattgcgccgtctgagtagttcccctcgttcatctatatatcgcttcgcagctcagcacacgacacgaacatttcaaaacacgcttttcccgctttactgccactccatggagacatccaaggtaccatcatttttctttctttcttttctcgccagccagatggcctacattacttttcaaggtgttaaaattgcctaaattctttttcttcagttttttctagggcttttctaccttttctactctattataattagtcgtattggtcatcttgattcccactctaatttggaattgattgtcatttcattttctggtttgggttctagatggaggctctctactctaagctttacgataagtacaataaaatcaaggtatgcggcttaatttcctattagtttgagcatttacaatgtcattctactccatcaacattttgcattcaacttggtactttccaagctttagacttctattgaagggtatttttaaaaaacttgtcctgcatttcgatataattataagcttgatcattcttgtatatgcatttatttatttatttatatatatnttaaaaaaaaattaaaaagac

SEQ ID NO: 208816 - DNA, 635 bp, Cannabis indica
aaataaactttattagcgatgtataatataaaataaatgttatttttttttacacttattagtgcttttaatgaccttttataattaattgaattcactttcaatctaaatttaatacgattttttcacacatttttataaaaaataaagttaatttacttttaatatattggagtaaaattataaaattttcaactaaatataatattaactgattttttgagttaaatgtagcccatcttgaaaataactcaaagagacaatctgcattcatatattatatgtgcatatgtatatatatccacatatacatggagaatgaggggtggtgaaaactaaatcatttggtttgtgtatgtttcataattatttggctattatcattattcaataatattatatatctatatgaaaaattccaaaaattgtacagttaaattatttttccttctaattttctatgataccctctcttaattaaacaaatatctatgattttttttttctttcttgtctgataaatatctatggttttaaccaacattttgtaggaaagagaatactattaaaacactaaagtcaacacttcttaagaatctaaagtatatctcatcttctttccaagattccaacaa

SEQ ID NO: 208817 - DNA, 804 bp, Cannabis indica
tatatacaacctgaaagccgttagtttgtatcatagatggacatatatgaaagtgcatccacaaatgtatcagaaatgccatccctacttccaaacattacatttctgttcatgttcaatatagaggaaagcatatcttcaaattacaaatacaacaacgggtatgacaaaaccagattcacgataattcagcagaatatgtttaacaataagaatgatatgacttattacctgagactttgatggagcttgctgagctacctttttggatcccttggcagttccctgatgaactgcgaggtcatcaagaatgctatccaataaccacaatgtaaaagagccaagtccatcggaagaccgctggctgatccagtcaatcgacgtcttatacaccttgtcagatatataaatcagagggatctgttttggaaaacaatacagtaacaaaatatcagcaaaccttgaaaacattttatccacaagatcgaaagaactcaatgactcaatcaatgtaatgaattaaagtagctttaatcaaaatgacatagtaggttaggatcacgagagcagaacagtagtgttaaggataaatacttcaaagattgcttctgcaatcagatttaccctttctttagattcattaccctctaaaccaatctaattatatctatacatatacatacactatataataacgagagagagagagagagagagagagactttcaatgtaaaactactgaaattctagcataaaatccacatgctgcagtttctgctcgtaaaagtttttttttaaaaaaa

SEQ ID NO: 208818 - DNA, 1155 bp, Cannabis indica
ttgagatagttgtagacactacatttatttatccatataaattatccctaaatataatacactacttatagtatgtgtaaaatattttgagtattacttcgttttatttttccttggtttatatgtacaattcattcttgcttctttctaaatccaatttacctaagagtagtagtgcactagctatagtttgaaatgataactcagcggttaaactgccatgtgtcatttttggattggaacaacaaataaatccaactttcctttgttttggtgttttaaatttttcagcatgtcattgtttttattggaaaatgtgtcttccacacttggggtcactgtgtattaaatttaattgtgtaattagaagtaatttagaaatttctttataatctaattcttatgtcctatgaaaatcgagtgtaattacattgtgtaattattattttatttttattttaaatatcaattactatttttttttatgtaattagtaactgttaaaatacagtgtaattaccactctagtaattatacagttgcttctaaacaacctttagatggtgtttgattaaaggtaatgagaatagaatagaaagaaaacaatctttattccattctatcaagctgagtagtaagtacctgttttaatctaataagttatacaatccctaagccgaaagcccaatgcagcctccaacaacatgttaatcatctgtaatccgttctagcacagcaagagagactctttacctttttcattacaaatctccaatctaatgcaaccaactcaaaacacttattggagaaaaagtgttagaacctcttcacgacaagaaaagtacggaaggtgaaacagcaaatgcaccaccacttaaagactgataccaccaaaattttggagggacaaatacatgcatatgtatagaacaatatgactatagtaaccacattaatttttgttatattggtctacattatattatactgggcatgctatggttttctatagaaattataaataatttataatgtggaaaataaattttaaaatttagttatatacttgtgtttatatctactataatttttctatattaaatccaatctatttattaatcgtataaaaaattacttttaattcgttttaatata

SEQ ID NO: 208819 - DNA, 810 bp, Cannabis indica
tcctattctcataattactttatcgcatatttcattattgtttgtataataattttttctctcattacataattgttcagcaacttcttctctcttattcttaaccttccaacaattctcactatctcactattttcatcaaattctgtatagaatatttaagaatttcattgtctaagatttctacatccatgaaatcaacactttatgagaaaaatgttaattgcatgcttctctcttattattttctttcacgtcactctcactgcacactttcacttattttgttctttgttaacttgataagaatttcattaattaacaaagctttattaacttcttgaaatcaactctttatgagaaaaaggttttgtaaaatgctaatttgaaatatttgataaaattaacaaaatatttattatgatattattttctaaatattgaatgtatttatttttgtgtgaaaaagttttcggtttttccaaatttattaataaaataaatatgtatttatatttgtttttgtgtgaaaaggtttaataaattggtttaaaactatgctggaagaattgaatttttttttaagtaacaaagtttggattcagatgcgaagagccttgtatatatatatatcaatattatttttataacgaataattacataagacactattttttgtaaaatatttacatttttacgtttaaagaatatttttttacatttttacggttttccaaaaattaacacgaaaacaacataaaatcaacaagaaaacaacataaaagtaacatgaaaataacatcaaaata

SEQ ID NO: 208820 - DNA, 1219 bp, Cannabis indica
aaaagaaccttttctcttaatatgatttagatgaattgatcttttaccatttgttgtatattaaagtctgattattattaatgaagagtatttaaaagaattgatttattccttcaaaaaacaaaatttagaatttgtcttataaaaataaataaataaataaataaaagtatttttttttttgagtttttgggtattttggtcaattttattttatatgtatattggtagtttactagtttcacttaaatctggtctggtccagaacgcttgcactactatcagcgtagccaagaagcgaagtttaggaaaaccacggagacacacactcactcacacatttatatatataaagtgactgacccaacggaagcacatcccaaatccttacttcagaatcggaaatggttgaacccaaaaccaagtacgatcgtcagctcaggtgtgctccctctctctctctcagaatttaactaatttgccccaactccatagcatcttttaactccaaattctgctcttaagcttcatgtatttagcgatgtattttttgagcgtgtattaggatttttcttcctatttttgactgggctttgcgtacttcctctttctctccaagaatttcatattttttatttttaatatttccgggaatttgaagttttgtcttgaaattttgagtccgaagcaaagttcattgcctgttagggttttcctgttgacgtttagaggaatcttaagtttgagttttccctagaactaggtagtataaggaggacacgaatttgttttaacttaaacttcctgcgtcatctggatttttcatgttaggggtggactgagaagaacgattaagcaagcatttgtatgtattgtgcttgctttgttagtgtgtgtattttatagctgtaggaatagatattgatatctttataattggggtaactgtgtcactaacatcttatctcgagtttagattttgtgtttgactggagttagtacttagtattacgtatatctgatcgtaagctctagatgtggtattttatgtatatactgtcaatgtgtgatacgcttggtttttcttaagcaaaaatgagattctatatctttttgccgttatgtaaatttttccatctaaaaattgaaaaattgcagaatatgggggtgaacagggggcagactgctcttgtgaaaaagccagtatatgtctgcttaa

SEQ ID NO: 208821 - DNA, 1551 bp, Cannabis indica
ctaagcttgatgtaagagaggaatggctcaattgggtgagcagtggaagcagtatggcaaatatagtcattaaggtgagaaggtttctttttggtcccgacaacttttgtggaggattgagtgtggatatcagggtatggagcagaagtatgggtgagagtggtgtgttggatggaagtatgacatgtgggaaacataagtcaatatctatgttgggtttttagagaagaaggagaatatgttttcatggaaaacaacatccctaaaaatgtaaatttggtttgtttctatatccaacaaagtgtaagctttcattctatggggatatctaatcaatatagatgcacgacatcgaggggtaaacttatgtatttttgaggccaaagtggagccataagcaaggcatcagaaagtccttaaatggtcataagttggaggcctattgtgaaggacttcataggatgtgagtccctttagcaaagtagatggggttctattaagcaaataggtagctgcttgtatgatataagaccaataggataggggtatgtttgattggaaacaaagtgcccgagtcacattttatatgtgttggtgctttctttctactaccgagttttgttgtggtctttccacacatgagtggtagtgattaatgcctttagaggaaaaaaagaactcatattaagttcttttgcattgtccgaatgaacaactttgatggttgcagagaattgtgtgcaaatgttgttaaaaaaattgatgagcatagtttgagcatcaacctttgtttttagcatatgtgtccatgtaaatcttgatttatcatcaacgattgtgagaaaatatttatagccttcaacactaattatgtggaaaggtccccatatatctatgtgaagtaaatcaaaaatgttttgtgcaaaattgttgttagaggggaatgggagtcgtttttgctttgctaattggcaaatggagcagtgatgcgagattgaatatcataagaagggtcaatcttttcattgaacatgtttgaaacatacaatgaggggtgaccaaggcaattatgccattgatctacattattctaaaaaataaaaggggaagattgacttgaatatgccatagcaccaggtttctagtgcagcaaatatagcttgccacaacgtttagctatcccaatcacctgattttgagaatactcctgtatgagacacatttcaggtttgaatgaaactaaattagctgtgtaatcatgtatgcagtgacagaaaaaagattaatcttgaagcaaggaacaaataggacattatgcagaaataatttaagagttaattgaacatttccaatggcatggacagggatgttagtgttattaggtaaagtaacatgtttaggaaatgtagttttagagaaagaagtgaaatgacctatgttggagcacatgtggtgagttgtaccactatcaataatccaagattgagagagagtagtagaggtgttaccagccatattagatgcagcaacatgtatgtgatggtcgggagc

SEQ ID NO: 208822 - DNA, 1381 bp, Cannabis indica
aaacaacctgccattttcttctgttgaaaacaacaaggcctcaaaacaaccccaatttgacccccaaacttcaacatgagctctaaataacccaataacaacataatagactagttccaagcaacaaaacctcaaaatacataataattcaaaaactaccattgttgagccaagtttgagttcaagaactcaaacttgatcaactccacaaataattaataaaacaaccttaaatatgctttaaacaacatcatgaaacttcataagtcaacccaataaaacctagggtcagacagaacctaagccccaactttgcatgttcaaaaactaaaggtaagttatcaaaacttaaggaaataggttctagagctttacctttgaatcaaacttccaattcccttcaattctttactgaaaatcactagaattagatgagcaaagtggttggtcctcttggttcttctagggtcaaaaatggaggagaaaaagagagaatgagatagcactttgtttattctttaattttccttttttctatttctcttaattaatgaatcacataatatattcagcataaaacaaaacataggaatttctactaactccactacaagacaacatctcaataaatggcaaatttcaatttccccttacttcacacttaagcaatctataggcctatgggtaaaatgatctaaaatcataatcctgcctaaccccgatattccaaatatcaacatatgaataccctactaaaaaaaaaggttctaagctaacccatgtggctaaatcggccatctatcgcatattccatcgtaccaagcaaaaatcataaaattataaatttcacatttagcataaataatacacatagagtttaataaaatttctaaaattgagaaattataaccctaaattcctattttctaaaaagttggacccacaacaaatattgtaacaccctaactattttaggcatgttaacgtaattttaaacttaactgtgcagctcgttgctaatcaatgagtttgttgaaaattgtgattaattaaaattttacttaattaattgtaaacataaaataacatacatatataattttgggatcccgtttacaaaagcatttacaaaattttcactgtacataatcaaaagtttgttgtcctagcgactatataaaataagccctgatatcccaaagaccgtacgcttcaggcctaaccgcccaaccatagtacaatctccatctgctcgctctcacggctgctccgccttagtcttccccttacctcacatggaaatagcaactgtgagttacatactcagtagaaaagcataaataaaacataataatgacccgggttataaatcaggcatcca

SEQ ID NO: 208823 - DNA, 534 bp, Cannabis indica
gagaggtcaacattggggttgcatagcgtaacctcgtataagacctctaaagacaagccaacataatcgtccctaatggcttgttagccatcaagggcaagctttagtgcttgtccatcttcctaagttccagctctaacctaaaggccttagcatcaagtgtgttattctattggtttctcataacatgcatgtgctccaaaccagtaatcatgctctgtctctgttcggcaagagcatctaccttggtgacagtatccccctttgccagaagctatgtctcctaggccttaagcttctcctagacagcgccctaggaccccttggtcttgcaatgagagaggctgaacttcaacaaggcctgaaataaaaaaaaacagagttactgccaaattaaaaacctagtcgaccaacccctctatggtgcttccatggccagccagcttctcaaaactgcaacattgatcgctaagctttgaaaagctccatacttggtcggtcagcctttgacagtacaataatttgagcaaaatt

SEQ ID NO: 208824 - DNA, 516 bp, Cannabis indica
tctcaattagggaagccaaaactaaaaacagtgacaaaactatacatgtaatattatcaaccaatctctatctgtgtgagtaacttttttattatatgaaagctcctaactcaaactctaaggaccttatgttcccaaagtgctacaatctggactctccaaatcttatacacgataggtgccaaacttatcagcaaaataattctttcccataatcattggccaccaccacattctaactcagtcaagctttgattttgattttttttttttttttttatttaagcgttttatatattacaacctatgttttacatgaaactcgaacacaggacctccaagacacacacatccacctatggccacttgagctagcctcaagtggttagctttgatttgatttaaacaataataacaagagataacaagaaggaaatttaggagttagatgaaaaatgtctcttttaatcaattaactaaggtgccgtttggtaacactttttaatcagttttttg

SEQ ID NO: 208825 - DNA, 1015 bp, Cannabis indica
cagcatatacattacatttttctacacataatgcattgattacatatagatttgatattcaagactaatgataactccttgatcaatgattggtaatacatataaatatacaatgcctatattgaaaagataacactcactgatatagtgaagcaaaataaaacaagggaccagaaaccccaaaggaaagggaaaatcaacaaacaattaaactgagttacattactcaaccaagataaatgatgatgttagtgaggataaattaacaatgactagagaagaattttgacaaagaatctagttttatattggaaaaattaattatgattgatgagttctattttcaaggaagacttcagtaatttctaatttactgtagttacaataaatgtagataatgcatgtgttacacctaagaactatccactattctaacctcccatactttaatataaggaagaacacctcctatactatgtatgaccatatgtctcaagtgttgaaacctagaactatccactattctaatctctagaataaaattagaacccaacaaacacaaaaagaacacattaacataccaaaaacacaaataccgatattttacatggtttcgccaatattgcattcatccatgagtccaaccagtaaagaaacgccttctattgagaaaataaaccctaaagttttgaactataaagtccagtcctggagctttcttatgtaatttgttgctttcaagatttctctctataatttataatctatatttttccacccttagactaattacaaaacttaccccgcctattatttgcattaaaagacacttattactgaagataatttgtttgtactagcccaatttattttacaaaaaaattcatatagacgacaggcttttgagtacattcaaatatcatgaatcaatagagctcctctgttaccaatatctttagacctggtgacattaaaatagtctctcataacatatcgtatggttcagcttgaagac

SEQ ID NO: 208826 - DNA, 666 bp, Cannabis indica
gcaaaagtctagagaggccttcagaacaaataagaaagaggtaaggagaaagtggatccctttaaacctccttgaggtattactgagcccgaaacagcaccattaatgagaaaaaaaaagtgttttgtatgcatacaagtcatgatgagttcaatccatctaatattaaaacccatttttcccataacaacaactaaaaaagaccattccacgcagtcaaaagctttgctcatatcaagtttgagcgcagcatagcctctggaacctttcttgcggtgcttcagataatgaaccagttcaaaagccaccaaaacattatcagtgatcagtctatttggaagaaaagtactgtgagtctcatcaatgacatggaggaggacttccttcaagcaaagaactagcattttggaaatcaatttgtatatgacattacaaagactaaaagggaaaaagactttcatagtgtgaggctttttgactttggcaatcaaactaatgaaagtcttgtttaactcagcaggattaccaccctcattaagcacatgaagaacaaattttgaaaccaaactttatgccaattatgttgaaaaacattcccgacataccatcaataccaggacttttatcagaacccatggtgtttaaagcaaaaacaacctcagccgt

SEQ ID NO: 208827 - DNA, 913 bp, Cannabis indica
gccgaatatcaggtataacattcatataattaaatactagttctattttaataatcacaaataattattaaataatatataatttaaatatacttattaatttattagaaaaatgtcagaattagtatattgccttttatttatctttccttttctatttcactcaacttagtgaaaattatcaaaattgaccaagtcaataatgtaaattttcattgattaaataaatcaattattgtgacttactatttgatattatcctacactccaaggactatgggcctatgaaatctaggatcccaataagtagaatttaacaaataaattttctaacttattaattcatcttgactccactatagacctagaattacactccttatttcacaaagtgcttaatatagataatatatacgctattaattattcattgtttcaatcaaatcaatcaatgatcctctatagacagtatacaatgagtaagggctaaattaccatttcatccctcaatatattttatccttaaacacttagttctttgtaaataatatttcaataaactatgtaattactgaaatgagatcttaatcatttaacacatttcaccaagctcaagaaaacaattatttcacttttaacatagaagttatagatgtccaaatctatgattaactctctcactcaattatactatcgagtttccaaaatgcaagtgttagctaaactgtactcctccctcgctcctccttccttgggctcctcaactgcagtaatatctctttttcgttcaatctctttatcttttaggatttttctctctctaatattttcatgtatttcaagtttggtggtagtgtagtggtgggttttcgcccttgatgaaggtactcatactctctctcctctctctctc

SEQ ID NO: 208828 - DNA, 657 bp, Cannabis indica
gtgtatggtttttctatagttattttactattgtttttggaatgatataatgttaatttattgaaattctatcaaaatgttatagggtatgaaatctatagcagtacttttgaagagcaatggtcgatattgggaagaaggaaaaaattatatcgattacgaggctagtggagaatcataccaaagaattgcaagtacgaataattcgtacatattctcctctcttcattggcatgcgaactcacaaaaacaaccatacaaattcagtaccaagcaaaagatggaataccaccaattaaaatattcaatgatgcgagcctcttcttttacttgcaactaaagatcaaaaaaactgatttcaccacatatacattgtgcgtcaacacacaaaacaacatcacaacaactgctgcaatacctatatttgaatcaagagcaacacaagttcaacaaaatgtgggaatacttaagaacaacgtgccaataatcgaatcatacacactggaacaactagctgaagaagaaggagacactgaaacagacgaatgtgacaacaaccaattcaacatagttgactatgcaaatcttattgctgcagaaatggtagaaaaattagaatgcaactgtaaaaaaaaaaactgatccagacatcaataa

SEQ ID NO: 208829 - DNA, 1712 bp, Cannabis indica
tgtttgcaggcttgagcataagatttaggttctaagaattttgatgttgctagaacagctgctcagaacttgggtgataacctgctataagaaagaaagttggtaagaggatgagctatgctattagttgaaatgattaaatcacaattataatatgtcaagtctgtaagtttatgtattgctctaccagatttggaagccatgcgaggctgctgtgctggaatagtaggacaaatatctaaaatgttaaaattagatgtattggtgtctgctgcagtggaatcagtagtagaataaaattgaaagaagttgtcaatgttaattgttgtgttagattatttgagtggaaagatagattcataaaaaacaacagctcgtgaataaaaaatgtgattggtttgcaagtctaccaaggtgtatgctttcatgttttcttattaacctatgaaaatgtatgctcttgctcgaggagcaagtttatggtcagaattgacatgagatgcatatgccttgcagccaaaatttcttaagtgagtgtagtgtggttatttgagatgtaataattcatatgatgtcttgtctttgagagttacagatggtgttcgattaaggagataaacaacagttgtaaccgtgtaactccaataagaaagtggtaaatttgactgtaatgccaaagctcgagcaacattaaggatatgttggtgcttgtgtttgacaattgtattgttaatttacatatcaatttactttttgtgataaatccaacacacaagtatacgtatcgttttaacaagtaatactcaggtaagtgatattgtttccacgaggactgtagctaagtaccaatcaattgaattattgtttttatttgacaatcgaatagataaattgtgaaactttttaaactaataaaaaataaataaaataaacaaataagaggtttaacaatggatgtgaattagggatatgatttcaattgtatctatctattatggtctaacatgattcaattcctattaccaaattctatgcaatagtagatttacttaagtaatttatgtcttttcaaatatataaatctcaattacatgcaaattttctattctcgtgataaattaaacatgtaaaagacattaaataaaaaaatcctataagctatccaaaccacatatgtaccctcgtcttatatcaaaatttattcctacttcactatagcataattgatactcacttctcagatttcgtatcaaaattataaacaattaagtgatgaccagacaattagaagaaataagtatgaatggaataaacacatagaaaattgggaaagaatcaatcatattaaaaccataaatagatgacaaattatatccatcaatgccctaataactatctagctactcatagccattgtgaacaattgataacaactaattaagaacatgaaaaataaagtaaaagaaagaactcatggaaaaaagaatgttgaaagtctccagagccgccttctgttgctaattttcgtactcctaaagttgtctgctaattaacagtttttgaatttattttagttttgaaaatcctcctaaaaacactaataataatatgtttatataggctaacaaagttacctaaaagatactaaaaagatttaaaatttaacttaaaaaaaaaaatacgcaactctacttggaaagcttttttttttt

SEQ ID NO: 208830 - DNA, 1115 bp, Cannabis indica
ggctctctatgggttaaattagatacctagagcctagtttgaaagactggaataacctttctcacttttggttgtatctcagacaaatctgatcagtcctttatttattcaacactcttctaaattttattactctaatttttggtgtatgtggataacataatgatcacctgaatcaatcaaggagttattgctcaagtccactcgatgtttgtaaaaaaaaattctcaaatatctcagtagcaccatggagtttggtctacatcttaagaagccttaacatcatgaagttgttgtattttgtaatgttgattgagcctcagatctagatgacaaaaggtactaacatacaggatatgtcaatttaattttggtctcgtaatcttggtacttggtcttaaaagaagcaacaaaacatcgcaaggtccaagtaaaaaaactgaaatgcaaaaactctaactaatgtagttgcagaaatcacttgaatcactctcttttttgaattttcacatgttatcccctagctagaatgtacatgagcactgttttgctcattgcaaatccagctacacatgataggaccaagcatatagaacttgatctatactttgtaagagaaaaggtgttgcaacaatatgttaaagtcaagcatgtaccaaccatagatcaaatagctaatgccctcaccagctatttcaaccgcttcaatcaatttagagacaaactttaaattaaaggtgcttcaattataagtttaaaggagaatatcaagagtgctaatacaaccattacaattagaggagtcggttaggactctaaccaattctgttattgttgctcactcttttcttgttagctagtgactagtataaatacctataaatattcctttatccaataagataagatttcatctttcacctcattctttctatttgttttccctctatttctttatcttttgttctctctctttttacaatgtcaaggaaatctaataaacatccacgatcttattattattattaggatgcattgtggcataatcctcaatacttttattttagtagcaattaacctccaaaaccaaaattttgacagcaaaacctccaaaa

SEQ ID NO: 208831 - DNA, 1547 bp, Cannabis indica
atcatcatagataaaaaggaatatcataaaaacttaaaaattcatataaattttacttctatataatcaaaataagttttgtgattaaaaaattagttaaaaataatcttgttaagacaatgaattaaaaaaacatgtaacttccatacaactaaactagtttctttataaaaaacttgttacgaataccaaaatatataaatttcacatgatttgtattctagtttactgtatgtaatattaaacaaatcacacattaccaaaactaaaaccaattacaaacttctcagaagctccaagactcgactgtcaacccactacccaaaagagtttcttgatgaaaaatcagtttcatgatgaacaaaatagtttcttgataaaaataaccaatttcttgtgtttcagatttgtttaataaaatattgcatttgaaagaaaatataataaaaatatggcataaaaaatataataaaaaagtaaaaattagtctaatcccataaaaagtgagcaaattaaaaactgccgtatttttcaaataatattttagaatacaatattaagtgtaaattctaggagtgttcattaaaccgcccaaaccgcccgcaccacaaaaaaatacggtttgaaattctttgtggtgcggtcgcagtttgaatttttcctaaactgcgcggtgcggtgtggtttgcggttttgaattgttaatatgcagttcaaaccgcaccgctccgcatattataaaaataacaatttttatatttatttaggtccaatatgtgaatgttcaacttaaagtctactattatttaaaaaaaaaacttaaagtctactaattattgtattgttgacattttatttttttttcatatttattttcaagcgttatggtattttgacaagttttgctcaaagtttgttgtatttgtgatagtttaattatttagtgatagtccaaaccgcataaaccacaaaactacaccacaccacactattttttgcgatgcgatttttgcgggtttttaatttcgcggtgcgggtgcggtttgggaaatttgaaaaaccgcatgtgcgggttggtttaaaaaaaatagtcaaaaaccgcaccacctgcaccgcgaacactccaagtaaattctacataatattggcccatatgaatgggatcgttagtgttaaaaattattttaccaagatctagatttactaacatgtatgttgattatataactataatcaaactatgaaattcctacaaataataaataaacacattagctagggattaagtaatccttacagtgacggcagcggaataatatggcttcttccattcagatctctaactcttgattcttgtttgtagagtattatcaagatctgaacctgaatcttctcctatttcgattgtgttcattagggtcttactcaaatcactttcggtaataaatttttgagtagagaaattgtatagtgtattttgaaaaataaaaaagaaagagaaaaggagtagttgtctgaaataaaaaacttaggtaaatctctctctt

SEQ ID NO: 208832 - DNA, 553 bp, Cannabis indica
gatttgatacatgtaaaagttcggagttaaaaatttataattaaccattaaaatacgtgtgatttaatacttaattaaaattttcttcttccgccttttagtcaatatcaacatataggacaccaatatcaatatatgacaattttaaatggtgttggatagtgatgttgtttaacatttgtcaatggtgtggagggagtgagaaattgagaatggtgtacccaaaaattgatggaagacaagacgatggttttggtttgcggtgtgtgtcagaaatagtaatagtaaaagaagtagactagagagaatgaagtgtaataagttgatattattaataataatctttttatggtaggagtgcaataaaaaataataccaaaactgacaatttcggcgccctggcccaatgggcttctttcggctctagatgggctcctctccctccctccctctcaaaagtctaaagatgttaaattgatgcatttttatataaaatatattaatccattaataatgcatagtttttatagagtaatatttaataataattatt

SEQ ID NO: 208833 - DNA, 823 bp, Cannabis indica
cactattctccactaaataaatgcataatcaagaatcaaaaggtctttttaggcttgtaataataggctttggcacaggtggataaaatagtcatttaggctcacatataccataaatatataaatataaaaccaatcttgacattaacatcctaatttaacataccctaagttcctttgtatttcgaaggattgagaaaaattgacactagagaaaattctttttttttttttcttttcgttcttgtgttttctttttttttttcttctacctttatatatatttttttctcaatccctacttgaacttctctattgccaatgccactctacaaagaataacacccaatacaattcaatctcattttcttttatatgcccatgatactaatttaggactgaaaaataccaagtattcaattaggctcgaaatagatgtttaacaataaaaagtttatctttatgctcaaaaaaaaaaattaactaaggaaaaatttaatcaaggttagcttgaaaggtagaatccgtccaaaaattttctaaatcacttccctaattatgcatcatttattatttcgccttaaataggaaccaagcaaattctagaatttttttgaaccaactttccacatttcacatttagcatgcataaatcaacttcaattgttaaaaaattaccaattaattatattacatgtccttaaagctcaaaattgaagttattaaaaaatgcaaatctctccaagcacacaaaacttttataaataatcaatgttttctcaaatcatgctgcatactcaaattcatcgactcatatttaata

SEQ ID NO: 208834 - DNA, 814 bp, Cannabis indica
acaatgaaagtggagctgttgaatttcaaagctcgcttagtcgccaaaggttttactcaacggcatggcattgactattctcaaacttatgctcccgtcgctaagttcaacactctgaagatttttttggctcttgcagccatgaacaactggaatgtccaccaacttgacatcaataatgccttccttcatggagatctccatgaagaagtctatatgaaaattcctccaggatacaaagcacctcccaacactgtttgcaaactaaacaaaagcatttatggcctcaaacaagcctctaggcaatggtttagcaaactaagtcaaaccctcatctccgatggtttcactcaatccctttctgacaattctctcttcatcaagagaacatccaacattttcttagccatcctcatatatgtggatgatattattgttgcaagcaacaatgacttgctatatcccattttaagacttatcttcatgacaaattcaaactcaaagatcttggaaccattaggttctttcttggacttgaagttggtcgaaccaaacatggtatctccgtctcccaaagaccatttaccttacaacttctcaaggatacgggatacataggcaccaaacccgcctccactcccatggagaccaatctcaaattaagcaactccaaagggaatctcttacctgatcccacggtttatcgaagccttattggaaaactcatatacttgactataacaagacctgacatctcttttgctgtcaatcacttgagtcaatttctaaccagcccccgggttcctcatcttca

SEQ ID NO: 208835 - DNA, 572 bp, Cannabis indica
ctattattgaaattttcattttcgctaaaaaaaaaattagtacgtgttatatttgtgtcaaatttaacatagtttttcgcatgtgtcaaatttgaatatatatatttgacattatttatttatttatttatttatttgaagataaataaaaatatccattattaggtaaatcaaacaaaattacatagaaaaatcgctcaaagagcggactcaaaataataagctaacgacattgtttacacacacaaaaaaataataataaatagataaataaataaaaagctaacaagatcttcaactaacggatccataagacacccgctttgaagcacaaaaagactatgaagaatgctaggtttccaatctaaatgaattagtaacaaaatcaacctatcaatggttatcaacaaaagatctctcaaaaaaatggctaatgacaaccttatttttcaaagtagaataaaagaaaatgacataaccaatcatgtacgggacgatcctacaaactatgggatcaataaaaatttggaaatcctccaaatctaaatatagagagttgtagtcatgccaca

SEQ ID NO: 208836 - DNA, 1378 bp, Cannabis indica
tctatccgcaccatctggatacaacaaaggcccctttttttctgaaccaaaatcataacagccgtcacacataagcaacatccacacaattagtcaagttaaaaagtaggaatcttagaggctattccgtctgcacatattaaaaagtgtgcatttattaaactatatacacagcacaatacaatacaatctcaacacttcaggctcagcatcactaagtgctctaagaagtcacaaccaaccaagtactgcaacacagtcatttgttcacgcataacagcattaccagcccaacacgtcttatggaaaacctctagaaaaaggcagccttttgtttaaaatcatatgctccattaaataaataaataatccaaaccccatcatatcccattacagtagaaaactttattataaaagtgatcctcaatgaaaccctaaactagaaaacaaaactaaaaacccaaaatcacctcccccccaagcagacaagacaatagctcaatccccatacaaatgacaaactcaagaactttaaataacaaaaagatccatttaagctaataacataaataaaaaggcagaagaaaagtaatgccagcaaaagaaaaaacaatcaacagaaacagaaagttaaaaagagaaattagggctatgaaaaacttacacccaaaggtgagctaccacacccctaagttctctacttcttcttctttgtccagaaaaccaaacctaaagagagaagtaacgcatagcgaaacaaagagagagtggagagagaagaagcaataaactcctacctaagaaccagaagagttgaaggaggagcagaaagaggggcaatggagaatgaggttgaagacggaggtccgggcagtttctctctccgataacagtggttagatgagtccaaaaaacccagagagagaaagctccggtggtttgtccgtaccgtctctgggtccgtcaattacaacgtatttgcatttataagtaaaaagaagaaaagaaaagagaaaagaagtgtctgagttgtgaacttgtgagaaaataaaagaaggaaaagtgtgttttttttttttttttttgttagaagaagaaagtgtgttttgttttagaaaaaagttttaggtttaaggttttttttaaaaaaataaattaataatagataatggaaaatattattataaaattttataatatattctctaaaataaggagtaaatttttaatttaattttataaaattatttatgttatagttatttaaaatattttaagaatcatgtgtttaaattctgttaggtttaatttttttttttagtaattttaaaatttaatataaataatttaattaaataataatatatatgtctagtaa

SEQ ID NO: 208837 - DNA, 767 bp, Cannabis indica
ttttttttttgagaaaaataattcaatgtttcacaccttgacatgaaccaaccccacctcgatcttgacaaggactctagacattagcccgatcctgatcctgggcctaagaccacgacccaatcgtggacccagtctttgacccgactcgaattggacctggacccaaccctgaccccagcttggactcggacctaaacctcaaaactagtattcgaaccccagaccctggatgctaccttggcctggaccccagattaggccctaaactcaaccaaaaacatgtctcggcctggaccccggacatccttcttcatctcgcaccacaaatagaagggttttaaaatcctgatacattttggtagtgtcaggataaaatgaataaggagtggtgtgagcttcctcgagaatttcattcttaagtaccacactgcttggaacacaaactctggttttatacaacaacatcccattacctgacactgtgaagtctttagcttaaatagataaaacttcttctcgaatcttcaccattcgggatcaactagctaggcagttctaattctatctaacaaatatgattgtagtgtcaaattattaagtttacccacaacaaactcaatccttgatctgaccttgtcatttgctagctgaggtaaaatcgtaaccatgctaaatacttgttcgggaccctttctacttagggcatctgccactacattgaccttcctcaaatgacaaaggattttacaatcataatctttaac

SEQ ID NO: 208838 - DNA, 1003 bp, Cannabis indica
aagacatacatatatatatacatataattatcaaatataaaaccagaaaatgataagaacacatcacagaaaaaaggaaagcaaaactataacacaacaattattgaataaagatctaaacttgggaagaaataaacaataaataaaagactaaccttaatgaggagagcattttgctgctatgaaatccaacagtccattgatggggcttatgattccattaaagtttaaacagaacaaattgaaacaaacaaggccaacaatatataaatatataattataagaaaggaacaaaaaagattatagcttgaattgaaggtgatgacaaaaagttgaagcaataaaaaatatatttttatattaaaaaaaaaaaactagaaaatagataaattgaagggataaatgttctgaagagttgaaaagcaaagaattttaagaaaacccttaaaacagtgatgatgataataataatgaaacagtgaatctttgtatggagaaaagagtagggattgagaatcagaaccgaagaaaaccaaagagtggttcccaggatttttgagggttttggagaagaagattcaaaacgctgcgttttggatcaacaaaaatagatattatttttttttaacctatttttctatttttatttattaagtaatattatgagaattgaggatcctattccctactacaatacaagaaataataatattattttttttgatgaaaaaaaataataataataataatattattgttattatgaggactttcctaaaaaagaaaaatatgacatatattatgaggaaatttttgtcaaaattatgtggatttgttaaaatatatatatttgagaattttttttcttatattaaatgtggttatttaataaaaattattcgattttttttagtaaagttaacggttaaaattaacaccgttaaatcaatcaattaattattttttaaacaaaagtaatctttaaatatttaaatttaattt

SEQ ID NO: 208839 - DNA, 1289 bp, Cannabis indica
aaaaaaaatctgtttaaaaaaaaactagtgaaaaaataatttttttgtcttcaaaattttgaaaattttgattcttaattaataatttaaaaggtgaaaacactttataaaatataattttaaaaaatattttcacttttttaattttaaaaatataaaactcattaaaaaagtattaccaaacatcattttaatatatatttatgcatatatatatatatatttggttttttagattgggttaggatgattctaatttagaacctcctctttatcagttgtgaaactactagattatgcatatgagtacaccacgcttaaatcttattgtgatggtataatttagtttatttataatgacgtggaaacgatgttttgccactaatataattaattaattagagcattttcaataaaaggctataaatatggtgtattactatttaaaatattttgctcaaatttaactcaaatagtaatgtaaaatgtgtgtcaaatttggcccaagctaaaaattatgtcaaatttaacacaaaaaatagcatgagtcaaattttagcccacaataaatactaactttttcaattacctctttgtcattcattaacactatttattaatgaaaaatacttttttatatttataagatattaaaataatataaataaaattagatgtttggtatattttcaatgagaattaatggtagtattagtttttatagctaatttgtaccttgtgcgcacaaatacaaaaaattgagccaaatataattttatagtatatttttggctaaatttaactcaaaatatatatcatccatcgaagatgatcttatcttctgacatagaaaatattggttagaccatctccaatggaaaatctgaaattttagttaaattttgacacaaaaaataagtttgtgctatattgaacctactatttacatttgtactccaatgcacaagttgtaaaatagaaaaagattattgaatatattgatggttgtttaccgagattttcagaaacaaattcataagaacttaatgaattgtaaaatattaaataataaacaaatacattttttacgtggctcaagtgttgatgattcttcatccatgagtcagttgtattagccttctttggcaagtatttgagtattacaaatgtttacaatgacaaactttgtattcctcttctttctcttacagaacaaaactttctaggaattttggctgagcttttggaagtaagaattgttcaccctttgttcatagaaagtagaggta

SEQ ID NO: 208840 - DNA, 1079 bp, Cannabis indica
ttttattttcggaggcaaaaatacccaacgttacaattctcttagatctgttattaccacttccgttaactcataaatatggacacctgaaaagttcagatgcattattatttttttttattattttaaaacttaatattcttaatatcagaactaaatatcacttgtttaaaaaaaaaatcagttttcataataattttcacatgatattgccacttcaattcgataatcatgtgccatatactgcactggttcactcagttatggtaatttgggataacatctctcttaactttttttttgaaacaagtatcatttagtttttgatattaagaatattaaattttaaaataaaataaataaatgtaatgcatttgggccgtctacgtatctatatttatgagttaacagaagtggtagtaacagtgtaaaagaattgtaatattgagtatttaagcctccaaaaataaagataaggtatttaagtttataagtgaaacattaagtatctatgctgcaatttaccattttttaacaatagtgcggaaagaaaagaagagagaaagagtgaatcaaattcttgtattgattgaaaaattacaatagtggattaactaattaaagtaagtgtgataacttgaaacagaaaacatacagctatgactaaaatgtattaagctaccaactaagtataagagctctctcaacattttttctactcaatcatttataatatattactaaaattttaccttttttttttttttttttaaaattttacaacacaattttatattacaccatacataaccttctttaaaattattggaaattagctcattaaactagccacaagccaaatgctacaacatttattcaccaaacatcctactatcaaaatgttgcagcatcagttcagagcatttgtagttaagttagttggcttctatttctgtcaaattgtcttaacttctaataactataaatagacataacagccctacactcaaggcaacttcaacacctagaagacttctctctactaccttgctctctctccttttatctctctctctctc

SEQ ID NO: 208841 - DNA, 732 bp, Cannabis indica
gttgtaaatcatgtattttacgccaattattgtattagtcttataggaatttggagactggccgttcctctcttaattttttcagtcttccaacatactcacgagtacgtgggttaatgaactgcaagctcttaaagaacttgttatctaccctttctagaaatatagcttcagtctttgtatttttttttttgaattatctaggttagctctctagataatctcagaatattattgctgtgtattatgatcgttttattgtttactttacatataggccaagagtcaagactagagaaagactataagcttagttttatggtgatacagtcattcataaataaacataatattatatactaatcagtcgttatattgaattaacttttaggaaatgatataaaatgctataagtaattttacctaataattgcacatacatatatatcaagtgtcagatcaaaacaatcttgtaggacataaagttgaaaaaactaaaaaataattgcaaccccactaaattaatgtatcaataataaggaagttcctggccacaaacacataatctgagacaaatctgtataaacattactatgatttttttaataataattaattgtgtaaacaaaacaataaaaaaaaactaatacaatatataatacaagtcttatttataataatatatataaggagccaatgcgcgcagcacgtaaaactaaggctgagagctta

SEQ ID NO: 208842 - DNA, 1651 bp, Cannabis indica
cccttaatataaatatttaaaccttgtgtttgcttgttcttgagagacttcaaaacgagtctttatctgttcagaaacaacaccaaaagctaaaaatccagcccaagcaagcccagcaccaagcccaaatctcctagttaaacttgaagctatccaatctgtggaatcagcctttaaatttgaagaatagcccttttgttgttgttgttgttgttttttgattgggacttgttccattggttggctagaattattgctcaatgccttagatgatgatggtggcggtgtcggtggcggtggcggtgtcgggggaggtggtgtttgggatgaagaggatgagaagttgagagttttaggagttagaggatgagatagaaatggtggtgagccaaagaaagaagccatttttttatgtatgaaaatggcttaaatttttttggtatgtgtatgaatgaatataagtgttatggaaaatgtgttatggtattggtttgtttgtttggttggtcctaccttatccttttttttaaatgatgggttgtctttactttttagattttttttggatgtgtttggctagaaaaaaacacttcaacttaaatagataaattaattaattaattaaatatttatgtttacaataagttttgatttattgttgatatttttatatattaaaaatgattattaatagtaatttttggtttaagggtgtttttttaagttaaatttaaaataatattctattatttgataaaatattattaactaatttttaaataaattatttgtaaaattcatttaaatgaataaataaattattaaaattttattctttaaaagattttttttaaaataataaatatattgatgaaaagagtttaaatacaaagtatggggaatgatattttaattgggattatttcgtaaatacacaagaataacaaaaaaaaattacaaaattacattaccaactaatccattaagtagataataatttgaaaaaaaaaattcatattactttggctatctgattttattttgttatttctaattttgtcaatagtggtttatatataatttccatcgagaaagcttttcacacattgacatgaacttgttattagaaaagaatttgaatagaatgcataataaaagaataaggaatttttatttttatagttttttaaggtataagtttacaaaaatatgatttctttttaaaaaaattattagaaaatttttagaaaagaaattcaaaaaatattaagaaaaaaaaatcccaatatttttaactttccttcaatttttctataaacaattttttttgaaaaaaaaaaaaaaactatattttaaactctataaatttttacttttcctctaaaagaattttgtgttatgctatgaaagtgtaaaatgaaaattgaaaaaattaccactaaaaaactatgaaatggttagtattaaaacacatcttaaattgtatacacttataactatctataatataatgtatataataatgaatagggaaaagtttacaaaaataactggaaatttgtagtaactttttacaaaagtaactgttcacacggaaaatttttttaaaaataaatttgtattttttttaaaaactaacctagtaaaaact

SEQ ID NO: 208843 - DNA, 1236 bp, Cannabis indica
accgatttcaggctttttttaagctatagtcaatcaacatagaacaacaacgccgccatagtagtggaggtatgctttttcttatctctatctttctttttttgttttctattcgaagctttccattggggaatatggagatgcgattttttttttgtacgtattttttcattgatttatattttatatcatagttttcagtcattcgattgcattttttgaatgtaattatttttagaagcattgtggaaactctcctgtttatagatttctttctctgttggtttttgtttcctgtgtaatttttagtttattgtccggtttcttttagtttgagatttgagatttgcgattttaatcaattgcaaaaagtttacggtcaaaatttgatccatgttttttttttttggttgaattgctgttgaggcggcttgcttgtaagtaaatggcaagaaattcctggtcttagtggaattgtggaaatgggtgcaattgaattacctgtgtgtgtattcacgtaatgtgaattgaatacgtcagcgtaatgcggaatgaatgtgaatttagttgaatcagaatccagcgaatctagcaaagagtcggaattgttttaagaatgacttcgatgaaaacatgaagctaaaatttgtttcatgcatttttcatgcctaaaagcatgaatttgttgccgtggtatgatttgggaccgtgagtcatcagagtagtagaatagagtttttcatagcaccaaggtcacaattgaacaaaagatcattactttttttttttgttccttttgttattttaattttgtcggcaaaattttgttgaagtaatacatccgagctttgtatatttggtcttaaaattattggtatcttattaatattaatttctaagcatgtttatgaatagtttgtcaaataaattgacttatctgattattcaacatactaggatagaagagttttgatatttgtggttccgctctttctttaagtgattaagtcaaaaggacagttcctttaccgtcgttaagagttgtgccattgaaaataaatatagaacatatccaaacaatagaattttctctgtgttgatgtttgtatgcatatatgtgaggagatacttgcataggatatctttttcttatgtttacgattcattttgatgtttctacaacacagcagaagcctccaggaatatgactgataggatttgaagaatatgagctta

SEQ ID NO: 208844 - DNA, 1328 bp, Cannabis indica
tatactctaagccagttcagtcatttttttaagtgtggcttagaaattcagctgaaagaaaggatgaagtaattttaaatttctggtcctagcaatttgacttctcatcatgaacaatatttcttactacaacgaaattcaatagtttagaacttgaaatcagtttggtacagatttgaaaatacgagatataaatttggtttttcattgcaacaaaaatatatgttcatataaaaacatgagaatatagctattactattacataatacgatcaatttttaacttaacgatccaatgaacttcgggttattggaaaaatattatttcatttgactcagattcctattatttattgcgcaagtttgtttttcaatatgcgaagttttgagtattataaattatggccatagattctcttaacaaaaataaaagatgaatgatattttcgaatgaaaaattttggattgagtggcgatcttggtcgttttttttaagacgtttatggtactgtctaggagtctacaaacagtaggaatttgccggtcgtctccaccataaaatagtctagtcgtactgtattgaaatcccactgcattgtagagcactcttgaatacacttaaagatttttaatatcgcagatgaaattttaatttttacaaaaatagtatcgtgggatgtagttggttgaatcgtactaaaacacttctatattttgttaaaagattcatgaaagttctaacagatattcttttatacatataatcgttggctttagctacttttctctaatcttaagtattgctctaaaataggaaatggttactgatttgatttcatatataacccaataaagatataataataataaaaatgaatctcgaaatttaaaaggtgatgaactttggaacacgagtttctttgagttgaaaataagatttgaaaataatgccagcataacttgattgtggcaagttatttagtctttttaaattagtgttatattacaatcacgtgcactcttaataaatgaattttgtgttttttatgttccttctaatgatccgaatgaaaattgatttgaaacgtgagaagcaaatcattgttatttggtgttcaaattacgccgatctaaagcctcatattaattgaatcaaaatgttaccattagttaatttgcatgattagtaaaaaaatatttaactggtaatctaattccaaagtgtattgatcaaaactcttgtctcaatccactctagaaaataattttttttggagggcagttaagaaaaataacttaagaaactgtgtaaacgtgtttgacattat

SEQ ID NO: 208845 - DNA, 1120 bp, Cannabis indica
agagctataaaaatgtcactggaaaaaatagggagctgggcaaaatagtttattgtaggttgttctcctcgacgagctaagtttagtggtgaagacgactcatcaaatggacactagaggtgactggaaaatccgttcgaagtttgaacccccaactttgacttgtgatcccgagctaacagcggcgaaaggagcggcgccgcttgggaggtgaggtcaccgacacctggggttttgttttatcaggcccctggggctgggcagtggtcggagatgggtcgccggagagtggtggtgatggtggtttgtgggtttcctttttgtattttgtagagagagaaaatgacatatatatagagagatgatatgaaaagggggtctcctttgattttttttatacatagacatatattatattatttatttattattatatatatgttttacttttgattcggtcaagtgagtctttacatattatgtgaacaaaagtacaatagaaaatagaacttaaatattattttaaaaaataatataccgtgtaacaaaaaataattataccattcaccaaaatatatacactaacaaaaataataaaaaaatatatatattactaatatatatatatatgtatactatactaataaaattatataccacaattaaaatatatataccatgaccataaaattatatactaccattgtatataataaaatagaaactaattaaatattatttataataaatacttttgatttaattaaaataaataaaaataataatttaatatatgttgcatgccaataaaattatatacatacattaaaataattttactatgctaataaatttatgtaccactattatacatagtaatataaaaaataaatatcatctaagaatgataatataccatacaacaaaacaaaaatatactgtacaataaaatatatattccaacaacccacaacaacttataaaaattagaaaaacgacataactttcaaataaaaaaaaatattttaacaaaactagtataaatataccataaaatttaagtaacttgcttctaactctaaaaaaaatttcatttcaaaaacaaaatatgaaaaaaaaa

SEQ ID NO: 208846 - DNA, 602 bp, Cannabis indica
ttttatatttttctaaaccactttttgggtcttaaaacatctgacccaatcagatgtataataggcacttgaaaattttcagacacatattctatattttttttgaatcatatatctattctattttgtttcttctctttccattttggtttatttttttgcaacacaacttcaatcacctcacatttcttttaacatatataatattatgcattaaaaaaaatatatataatattataaatagtgtaacaacacgtcaatcaccttataatttaatagtgtatttctaataatatataatcatatatacatattatattcataaaaataatgattaataataggtatataatatttagttttttttttttaaaagaaaaatctcaaacataaattagtttctcctaatactttatctttcttatcatataaatttatataataatattaaatttatattatggtgtgtttggtgaattaaaaaattatttatttataaaataaatatgatagtgataatttaaaaaattaatatttaatttatataaaatagttttacaaatacaaagtttatttaataaattagttaatgttatataatt

SEQ ID NO: 208847 - DNA, 1038 bp, Cannabis indica
aaaacaagtcggtagtatattaattaactattgagattctttaatataaaactgctaagtacgatttactatacactatacttctagtgtatgtgattttgattcggattacaaatgtagattgacctataatataagtacaatgtataattagattatgcatgacttaaacaatatgtaataaacaactttcatcaaactttacgtttactatgaaaagagtttatcatatcacaataatgatcattagtagacaattcagtttatgacactaaaccagagagacagaaagataaaagagggaaatggggaagaaagagagattttcgtgtttcaatcagataccacttttgtcgaagaatttaggttcgtcgacaaaggttttaataaataaaaaaaattaccaaaacgtagtgttttgtttatttttactttttctagcgaatctaactgcatgcgttggtaaaagatttcccacctactttatttaagacgttttaagcacgtggtatttttctctccaattatttagcattttagtcgatgaagttaagcataaatgcataccaatatacgagaaagaagtgtaattttttttccagcaaatataattctcttgcataattattattttaaataatttgagatattaaagtataccatagtcttaattaaaagagagccctgtttcaattgagatgagaactcatttcaaatatatataaccgtacgttaataaatttattttatataaagtgtctctatgtaacagaatttttgatttaaattatatttttaaaatatttatgttaactttaagatttaaaagaatataataatatatatttaaaagtaaaaattgtgcatgtattttatataaaaaaattaatttgattatatatatttaaaatttaaagattatgtagatattttaattttattatatatatttcaaaatacttaaaattatagatattttatcatatttttaattttattagttcaattatgaattaaaaaattatttagatattttat

SEQ ID NO: 208848 - DNA, 663 bp, Cannabis indica
aaaaataataaaaaaaaagatagtagcgtggcttagcaaaagctacattagttatgtttgactttgaaaattattgctctgataaatcagaaatagtgcagcaaaaaaacaagaacaaatagcataaaagtgttcaaacagtaagtaaagaaaaacaccaaagattatagaggctcaactccctattgtagtgagtctaattctctagcctgaactccatatctttgactcagattcttgcactaaaacgaatgaaagtttgaactttacaactctaaggctacttgaaacaactccctcaaacacctctgcacaaacagagtaaaacagctctctaaggcattctctctcacaataattcagctctttcagttctctctctaaacttacaaaattatgtcacaaaaaactccctcagcaaaagaactagaagtctttaaatagacttactaccaatacaaactcaacaacataaaagaataagaaacaagaatgctaataaccaacttaacagacttccatttatgataccacaaacaaagttcaaaatagttaattgcatgcatacaaaatgtttactataactacaataacatgtatgacatgcttaacgatatggacaaaatcagtgtccctaccattgaaatttctctctctctctct

SEQ ID NO: 208849 - DNA, 1102 bp, Cannabis indica
aaaaaaaaataaagtaacaataattcatcaacatactcactgattttgtggttattctttctttttattattaaaataataataataataaataaatagaaaaactacaaacaaatacattattgtcaagttttgatatttgggtgacaaaatatctttttcaattaattgcttcagacctcatttaatgtgccactttcatagaataatgttaatcaatttccttttcttctctttgattaatccactttgcatgatgagcatattaagttttggttttatgaaattttggtctattagaaaaaatggaatggtgaatcacactactattacattaataaaaaattgttattttgattaatattaaaaagcgctataataaaaattgaggaaattagtaaatcttttttaaattaatgtttttaatttttacatttttttttaaaatctattatatttatattttttttaattattctaccaattttaccactatcacttcatgacagtatcaatttttctttaattaaaattttgcctcaacttttttacaaacctacatatttatctctaaaaaacataaatttattatgtttgaaattatgtcttaattatgtgaaagtatgagaataatttagatacaatacttataaaaatatataatagatttatttaaattaaattttatttaaagataaatttaattgatatatatatatatgaaaaaatattttctttcaacttttttcacaaaaattcagattaaaaatacagtaattcaaatatgaatggcccatgatttatagcttctacttttttacaaatacgttctttaaaaatcgtattttgatttttatgttataagaatattaaggtattacatgttacgaaaacggataaaggtacgaactttgcttttgaaaaaacaaaatatataaataaataaaggtagtacaaactaataaaggttctctttgatataatttttactaggttttttttttttgaacttacaaaatactatactaaagaaagtttacaaatatactgtgatataaagttttatatttatatttttgttgtaccaattttataaaaatac

SEQ ID NO: 208850 - DNA, 1018 bp, Cannabis indica
tatgaggtgttgtacttgtatatttattattagctaggtacgtgttttatatatatatgtgtgtatgtgtgtttcttaattttcgtctgtgtttagtacttacgagagttagaattgtactgcttttgaatttattttattgggtttgtttgttttgataccttaataattcataattaatttttggttaattacgatttttttcttcttaatttgacatttaatactttttcaggttccttcgattcggtttaattttaccaatgtctacaattttgacacgtctttaaatattggtgccctaaaaatttaatatttatcaaattgtatcccaaatttacgtttactttaagcacccatcagtaaaattaaacagaattggaccaaaaactttaaatcaaataattgcttggtcgtttctttcctttcatctatttctaaccaattgacaagagtttcttatattgaacatggaattgttgtaaactctgtgttgactttttttgttgcatggccatgggagaaggttgttccaagatgttaagattagttttttttttgttccaagatgttaaggaccactgttcatttcacaaattccagagtgaaaaactgtcggagaaaggctgagagtgacgatggccgtggtggctcaggcatcgattggtggttgagattaatctgatttcatcacttctaattttccaagaggatgatgcttcattgttggtatgtatcttagtttgttttttcttacttaatattattgtcaacttgtttgagaaaatgtttgttaaagttagatacttattgctaagcttaatttatacaaatttcagttgtgatactagaaacagagtttgttagttcttcaatagctcatgctcttttgctttattctttttcaaagaattttttgaaattacaacttaattggagtggttgctctggtttgatgaccaacataagttttagcaataatggaaactttttattatatcattactgatttcactta

SEQ ID NO: 208851 - DNA, 541 bp, Cannabis indica
aaaagccattcactgagttaacgtttgaaatataaaattaagtttgaagaactgacaaatgaataagcaaacttagccgcacaaagtgcatgattctctaattaattaatgtttattttgttcttaacttgtctatgaatctatcagatgattccaaaaacagtataattataacaaataaataataaaaagtgaaagatctgggtacaataaatatacatatttatagtcttttaggtacttattatctgctccacgcactaactgtcacaatctagctagttgaattcttatgtggtagttgaaagtgtgggtgtcataatatataaagtggcatttttgtggactgcatgttcattttgtgttgggcaatgaaaaatctttataaaaaagaaagaaagaaagagtgttctctttgcttgatcacactttgaaattgttttttattggtatgataaagtttcccataattagcttatgtgtaaagaaaaaaataaagatagaggagacaattctcaacatcttgagtgtttaagagacc

SEQ ID NO: 208852 - DNA, 830 bp, Cannabis indica
tggtagatattaaagtttgaggattatgatttagtacataaacaactgaaacagtaaaattaaatgaaattagacaaaaattcttaaatataacaatttcaatagttgaatgaccaaaaaaaattcaagagacatgatttagtacatgtgaaaattcaagagactaaataaaaataaaaataacaccaaccatttgttaattttttttttttaataaattccaatcacacttttaaacttcttaaattttaaattttttaacatataaccacaaatatttattttttaaatacaaaactagctcaactccaattccattccattttgctctgtacccaaaatttaataagtctttgagattgtttactttataatcattttacaatttttaattattagattatatatattttttggtaataggatgaagcatatatagaccgttgattagtgaaaaagagtagactgagacaaagttaacggcggataaacttttgtcaaagatatttcttgagaacgccacgtgtcgacggtgtaatgatcagaggaccaaaccaaagtccttctcacttctctgactgcttagctcaaatcaactcatcacaaaacatcaatcaaactcatcctcatccccgaaactatacaaacaaaaccaaaccccactacacttcaccagaccaaaccctcttctctctctctctctctctctctagggttttcgctttccctaaatctcttcctcaattttttcaattacttcgccatcgtcgattctatcccctaattcatcgcaagtgatcatggaggtaagttttttttttgtctttatt

SEQ ID NO: 208853 - DNA, 720 bp, Cannabis indica
gagatttctcaataaatagttggggctttttgttttgattttctataaatatatagagggggtttgaaggttgagagagagaaagagagagagatggaggtaattgtgttgagagtgttgtattctatatgtggaataggggtattggggttcttagttcatatctataatagtgtttggttcaaatctgaaagagtccgaaggaaactccgaatgcaaggtattaaaggtccaacgccgtcgtttttatatggaaatcttcctgagatgcagaaaatccagcttcaaaccttgaaagctccacttaatcatcatgactgttgctctgagtccttcgtagaacacgattacacctccactctcttcccatacttggaacagtggagaaaagaatacggtatatatataacatatatacacacacacttctactcctctcttaatatataattatatattgcatctctatattattgttattttctaattttgtataattaagttgtcatcatatattacatactataaatatatatatatgtataaattatgataagttttacttataaaagtaattaaaatatatattaggtagtcatgatcggacagcttgtcataatagatatagctacttgttttttagaagttataacatgttacgtatttgtcaagaaagacaacgcaccttaatttatttcatgaacaacaattattaagtac

SEQ ID NO: 208854 - DNA, 798 bp, Cannabis indica
aaaaaaaaacaaaaaaagacaaagaaaactttacctgggaaatatcaacgcgagaaaatcgaaaagaaagtttcagactttaaagaaatgagaaagagagagattaggttacgaagttgtgtttcgaagagttagcagaacgatgtaagaactggcgagaattgcatgaatgaccaagccaatttatataggattttcggagaggacgagcaagttgggccgtggggcccatcagggcccatttagcctatggaaataatatctttctttattttatttttttttttggagattaaatgtaatttaatttctcgtgttttctcctcaaaaaaaaaaaaaagaatactggattccgtaataacgttaatcagcgtcgagttgccgcgtggacctgcgttcaatgcgccccgagacgataaattgaagtaaatatcgaaaggtgagggcgcgatatatcgtgagggtaaggaaataactgcgaagtttctctgtactagtttacagccgttgatgtgtgttgatttgaatcaacggttgagattgtgacacgtggaagatgaagtttgttgcggtttgcatttttatattatggattctaaatttgtaactatgtcacaggtgtgcggcttaattggcatttttttaatttttctttttccctaaatatcgcaaaggtgattgattgaattaaggtcacgtggtgaacacgtgtttcgtggcctttagtctaggtctagtctcctctaatttaacggaaatgggggaccttttttcatgttaagtgttatgtgggtggag

SEQ ID NO: 208855 - DNA, 1585 bp, Cannabis indica
ataaaaatcttaaatgttatataggccatacaggtactctcttctaatatcgaaatttgtacttatttcactataacataattaatactcacttctctgattttgcattgaaatcataaacaattaattggtgatcagacaattaaaagaaattaaatacaaatgaaatagatacacatagaaaattgaggaagaactaaatcatattaaaaccataataaattgttaaacaatcttcattaacaaccttgattaaaagtatagctactcatagtcattgtaaacaattgataacaactaattaagaacatgaaaaataaagtagaagaaagaactcgtcgaaaaaataaagttgaaagtctctagagccgccttctgcctctaattttgtttctcaaaagtcccaatcaaaagctcccttataattttcgaaatcagggttttaaaaaaccctattgggcctctaaaagcaggtgggtcgcggcatggcccttcaatgtcgtggcccctaggtgcattttttgggtaacaagcttcctagtgcgacgaataataagattttagccataactctttcaatattgctcggaactagacaattcaagatgttttggaaagttaaaagagagatctaaaaattttattcacaatatttttcctcaaagtgaactcatcatagtcaaaaattgtgaagcttcagacttgattttcgatcaaaaaacaaagcgtgttgagcaactttaaaatctttcacaccattatatcttaaaacttcaaattccatgataaattcatcatattcatcacatttaacatgttttttttctcattttcaattcatattatgaattttaccatttaaacatgaaacaagtataaaataagtgtaattttgcacaaaatgaatataatcaactgaaacacacctctaaaacacttcataaaatacacttaaaactagcctatcaaacatgtactgttgtcaagtgttaggtggtcctggggacaggagtagtggctgcaacgtgctcgttgtcaggacatcagagcttgcaagtgagacacctccacaactcgtcctctccctgtgctaaggtgtcgcaggcgaagcgtggccttagtcgcgtgcgatgtccttttgattcttctcctcaaaacatgttgagttttggctgcctcgttgacggacgtgatgattcagtacaataccttgatggggtttgcgaggtcaagaagcatgcatgcatgcatgcatgcatcgagagaatgaggcctacaagaggcatgttgcttgtgaggggcttgctgcctgcgaggggcacgctgccaacgagcagcctgctgcctatgagagacttgctgcctgcgagaggcatgttgcggcttgcgagtggcatgcttcttgcgagaggcatgctgcctgcgagtggcatgaggcctacgagtggcatgaggcctgtgagtggccttaacgagtgggtatgtcgtcgaacgatcccatcatggccaactccaggagtgagcttcatcatcctctcgaatagcctggacaaatctaaaggattacaagtgttaatttttgggg

SEQ ID NO: 208856 - DNA, 811 bp, Cannabis indica
acaattattaataaaatacttttaaatattgagcatttgaaatttcatatctgtcagtgtcattatttaatatatatatatatatatatggcttgtcttgttattttattttaggtttagtttttctttaatattttaacatattttttatgtaataattttaatttagaaaattattaatataattaattaaaatatattatatttaattattgaaacagtggatattacatgattggaatgacgaagaaagtgtgaaaatattaaagaaatgcaaagaggccataaccaagaataataagaaaggagggaaagtgatcataatagacatgaaagtcgaaaaatgagaaagatgaagacgacgagtcatatgaaactcaactctttttcgacatgttgatgatggcgttggtcactagaaaagaaaggaatgaaaaagaatgggctaagctttttaaagatgcaggcttttcggattataagattacacctattttaggtctaagatctcttattgaggtttatccataattaattaattatacttataattaagtagtgttaatggttgtgttgtttgtgagctctttctctctctattattggtatgttgtaataaggaaacataattaacattatgagtaattatgtaagccaaaagaataagatatattgatgagactcatgaagtttaataataatgtgtttaaattttaattatgtttgatatgtattattttcctttcataattagtaaaactttaacaacgtttgttgttttatatgatgagttttctttttgttttttttt

SEQ ID NO: 208857 - DNA, 1913 bp, Cannabis indica
gtagtgacgtgtatttttatttacttctagatgtaccccttagtttgcgtatgtaattgagcttggttttggtatattattcttttcaactttatagacttaactaatattatacacatatttctaataaactaatattaataattaatcatctctatatatgacattttagggcataattgaagagaaaagtttggataattgtaacatagctgtgtattgtccgagtgcaaaggaagtgagaaaagtgattgaagaagaaggatctttcgagttacaaaagatggaaatgtttgaacttgcttatgatgctgggtttattaataatgcaaaaataggagaaaccaataatgatgataagtacaatagagcaaagtatgtgtcggattacatgagagctagtttttgagtctatattaacaaaaactattttggagaaagtgtcattgatgattttttcatgaggttcactcacaagatcattgaatcatcattggctaatgaaaattggccatacataaactttgttatttccttgacaaagaataattaagcaagcataaaaagtatcaaactttacattttgagtatttttatggtagggaaatgtatgtgtaggaacaactttaattaatatatgtaagagatgaatgtagttaaattattgtgaagtgtgtatttgagttattatttgttaaagttgtttcaaaagtcaattaacttctttagttctatgctttatgacttttcttttctttattttgtttggtaaataagctaacatttcattgctaattaactaacaaatttacaacctacccactggagaaacagcccaaggtgttatataattatgtggcgtgttattaattatgcgtcagatcatatatattttaatttaataattattataaaatattactaattatttatatataatattgcttcattttgtgatagttgtaatctaataacaatgctttcttttttctttttttgtaaattagtcatttgtactgctcgatcatttcaagtttgtacaagttttcaactaaccagttaatgtacacttattttgtaaatatcctttaattatagtaaataaactatatgttcttctttatcattctgtagttatagtgaacaattatttttctaaagtatttgaaaaagtcaattaatttgtgtcctttaattgttgtaaataaccttgcaagttttcggtctagctagtactaatctaccaatataagatgggcttttcctttggttataggaatacacatcagcaagcttcaactgaagcaagttttaatttggatggccaaaattatactttattttctttgggatcattttaattagctcctggttttttaatagattatttttgatgaaatatagtatttaaataaaatcagccaaatggtagagattgagggactaaattaatgccctatatatacgaaaataggggacctctgtacacatagtaagttggggatgccaagtacaattaaccttcttttttttattaactaataatacagaaccattattattattattattattattattattattattattattattattattttgcaggagaacttttctaatcggaaaaatatgatattttgttttttggaaaaataagacgtaccacacgtacatatctgttgtttttatcctcgtggattttcatgcccacccatttgaaatctttcacggcttttgctgcatccaccgagattcagtggattttgacctccctcattgccttctgtttcaaccatattaccacgacttctcgtgtacatggcgtccatatattaggacttagcttgtgaacccataagtcaagtaggtcagatagcgattatatatattctatgtactgcacttat

SEQ ID NO: 208858 - DNA, 712 bp, Cannabis indica
aaaagaaaaaaaaacagaaaatgacgaccgttgaggagaaatagctaataaataaaaacgtaaataatttgccatgtgtggatgtggtccatatctttactttaaaattactgttaattgttaaacctgttatatatatgtaaataaattagctagatacgtatatttaattaatttaaacaaatgaatataaatgcttaattaataaatgggtaaatactattttggaccctgtgttttgcaaaagttactgattggaccctctgttttgttaaatgacaaaatagaccctgtattttccaaaatagtaaaaatagaaccctgaactttttttttttcaaaataaaatttaataattatccgttctaaaagtgttatgacaaaactgtttacattttctatatctatttgtattttcaagttggttatattaaaaaaaaaagttgttattcaaaaaaaaaattgtcaaaaattaagttcaggttctatttgtactattttagaaaatacagagtctattttgtcatttaacaaaacagaaggtccaattggtaacttttgcaaaacacacggtccaacatggtatttacccttaataaatatataaggtaacgacaagttttttaaggcggatacgaaatgtacagaaaattaaaacatgcgttaagttaggctttgtatggaaggattttttatttattttctcttaaaa

SEQ ID NO: 208859 - DNA, 1195 bp, Cannabis indica
tttttttttgttgataatgctattgactaaactttgcacaaaacaatattacatattattttattaattttctttccctatctctttctcactcaattttattattttgaaaaactttttagatcatattaagcatttttacttaagaactgtatcgttatgacttattttttaaggtggatatgtagaaaatatattttttttcttttaccatcaccaaaaaataaatttttagtttcttttatactttattaataagtaaataactaaactttaaattaaacaaaatttatgtaccaaataattatttttttttgtaacttatttcgattatataatgtgttgatgcgatctttcgtcaatggatctaagaagatcacaaagcgagcaagatgaacacaagtaatagttaatcaaagtaaattggtctgcaaaagtaaattcaccaaagacgaacacaaggattttatagtggttcacccccttttagcggtaataggctagttcacttgaagtgttattgatctcaatgcttgaggacagttctctagagttatgttctctaagagttcactcctcaagtaagtttttagaatttgagagtgggagctcaagagtatgatctcggtaagaagcaacaattagagggcccttttacaagtgatttcacccccttatatagatattcatataggatttaaaatctcctattcataggtgcaccttcccgtaactatagttgggttaggttcaagatacaaaataataatactaaaataattatttaaaaaaataaatatcccttcacttatcatttttttactatattttcgaaatttctttaagcgaacgtgtctctcgcatttagtggacctggattgtcatgggtatatgaggggagccaattgggtcggttcgtgcccatcaggtccttgagataatttgacagttgaggagctctttgggccttagcacctgacggagctgggagcttagtgtgcccaaaatgttcctctttgaccaatgtgctcctccttggccaatgagctcctctttggccagtgtgctcctccttggccaatgagctcctctttggctagtgtgctcctccttggccaatgtgctcctcgttggccaatgtgctcctccttggccaatgaggtcctctttggcatgagctcctctttggccaatg

SEQ ID NO: 208860 - DNA, 1062 bp, Cannabis indica
aaaaaaaaacaagaggttccgtactgtttgttgaacaaataacaagttgacgtgttatgaattgaaatgcaatttgtaaactcaaatcaaatccaaatttcttttttatttattttgtcaaacttttttagcatttcttccattttttttattgttatatcatatctacattaattcgttgagtacgtacactaaaaaacaagtatataggcaaatggatcatataaatattcacatatattataactgacctaacatctcctatatatttagtatttttattcttttatttgaaatatatatataatagtaaatataattcaactattatattattgcacaaaaagaaacaatattattaaccatacatgttaaaattgccaaaaacgtgcatcgaaactgatagttaagacacacaatatcaattaattaaatatattaatttatatacatagttatcaaacaaaaaatcatatatacgaattaattatatctatagttttctaatatatataatatcttctctttttaatttgtggcttcaaagaaaaggcagttaaatatacattaattaatttgggtagttagctaatgcttacatgattgttccaataaaataatgtatctattatacaaatattattatatataaatattagtgtgttgtatattaatataataaaattaaaatggtgtatagtatgcatgtaataaataataatggatggatgaattatttgctataataatcttctaatcaaaatatgaaaaataacaaacccattatatatatgaaacaatgaccaatcaagattttaggtcctccaacatgacctatcctaaggtgagataaacaaagcatacgacttagacaccacctcaacgctcagggccttgaaattataaaaaataaaatattagtaggaagccaagagaataattttcagacctttattttttttttgagaaattttaaatgtgcttataaatgattgaatcttgaaatttttaaaaatattaaaaaatattaccactagtattagaaagagcattgctattagg

SEQ ID NO: 208861 - DNA, 630 bp, Cannabis indica
atagtatatactaaattcagaaaaatacatggaaatttgtatatataaatggttgaaaaggttattatttaatatttattttattgatcaattgtagtttaattaggaatgaaaaagttggttttgaaattggcctttaatggataagattaaagaaggcaacatgaaaaaggcctatgactctctctctataatctatatatacatgagtggggtagggtagggtagggtagggtagggtagggtagggtagctaaggcatatgttgttttggcactactttaaaaatgtcaaattttgttccttctcttattactgatcttcttttgttcccctccaatgggattattatgaccccatctcgatgactttcggtcactacacatgacaaaccaataaaccatatgggattcagtcttcaccacaaccacacccacaccacaccaaagaaaaatataatatttattttacattacaaaaatatatctctacaaatttaataatgacgactttgcttacctccttatttcctcatgtcctacacagttacttattatatgacttaatcattgttttttttctttcataataaatgttcagattgtgatcatttgattctcgtctcttcag

SEQ ID NO: 208862 - DNA, 987 bp, Cannabis indica
actataaaaaatgaacgacatttggtaagtgagatttgtttgaacattagtgtactagtactactatatctatatatataaaacttaacttctagtcttaccaaaaatttaaaatctatacctatagaaaaattgttgggtagtgattgctttttcttatcactatttataggtactttcagtatttttagtacatggataaattgtaatttttttcctatgaaaagagaaagggaccacttgtcttagactggccccaactcgaatatattgaaaaccctcacttatggcagaagaaaaccgtggtaacaaacaatacagtgcaaaagaaaaaacggaaaacaagaaataattacatcggaaaactacatgagttttccactctctacacatatctaagaatgagatctctctcgaaaaaaaaaagagaatgataactactcaaagtgtttggtcttaaaaacccaagtagctgtcaaaaacctgatcttctcctataaatcctctgctgaatttcagtaccttaaaaaattctgttattcctttccaaacagcccataatgttacaggggttctcagaatagtttaggatgtcgaaattatgattcaaacagctaattgcatcgtgcatttgttttaatatttttttcatagtaagctatttcaatcatgatttcggcgtcctaaattattactgaattttttaaaaatttgtggaaagtcccatgtatgtaactacattatatttcttcaattaaaaaaaaaaatacaattagaacttattatgtaacaaaaatgttaaaccttttttagcagtttagttgtcaaaatatattttaatttaactgactttcaaaaatatcaaaaatacttataggtagtgattacttttacctataggtaacaatcccttaagtagaaagacttctttggcttaaggctttgttggagttttccagatcatgggttttttttttctttcttttt

SEQ ID NO: 208863 - DNA, 807 bp, Cannabis indica
tataatatataagcaatcagtcggaggcagttgcttagtacgaaaggttattaaattctgtctctgaggataaaccaacggcaacgtgtatgtggttcaagaaaagctgactgagtctgagtaaggtacttttatgctcgaccatataatgatataaataaatttaacaccataaaaattaataaatatattgtcttgaagtacatggatctaaaattttaattgtgaataataaattacaattaaaaaatgactaattggtgatgattatcacataaaagataaattataaaaggacaataataatttatattataaggtataatattattattgatataatttaatattaagttacacttattttaattttataaaaaaccacaatgtaagcatattgatgccccatgacaatatttcacataaaaacgagcattgttaaggtgcaatggtgctaaactgatgtaatatttatattatttattaaattaaaatgtagaacatttaatattaaaacatatactaataactcacaatttataattgcaaaaagtacacacataatttaaaaatatttttttttcttttcattccacataagatttgtcacatacttttacaaaaataatctaaataattaacaaactctaaaaatctgtctagcataacatagtctcacattacattaaataaacgattgttttggtaaaaagtaactttttctcaaaaaaattgtcatatagtcgatatttatattgagcaaaagcaacactctatataaaattggtcttgaaaattagatcacat

SEQ ID NO: 208864 - DNA, 853 bp, Cannabis indica
ctgcataacaaacacccttatttactatatttagaggcttgacaccctattaaaatatttatctaatagggttaattttcatttgacataaataaatatgataatacttacctaatatagaacattgagttaattaatcaaatattttttttttgaaagcaataaatcaaatattatttaagaatgaaattaattattattaatatatttattaatgaatatcacataatattcaactcacaatatttattaagttaaaattttgattaaaaaaaggtgttttttttaatttatactataaaagagtttttttttttttgtatttttacgataatttacataaaaatttatatagtaaccaacagagcaacttaaagttagggctgtacattggtgggtttaggcggtttatcctatatattttctaacccaatctaaagttcgggttgctaaaatttaagtacaacacagccaattaaaaaaaaaatgtataaaccgactaacggtttgggcgggtcgaaactttttttttttttttaattttaaagtcaaaatcaataaaattaaaaagataaattaaaaatatcacattccaccaaagtacaacaccatatatatgactttaaaactaataattaagtatataattttatattattatatatttaatcatttatgttatatataataaaaattaaaaagttaaaaaaaaaattaaaaggtagcaaaaccgggttggtcggtttaaattgggcgggttggacctattttcaaccacccaattaacagattggacggtttgtaattttttctagattatttcggttcgtaattttttatcggtttttttcgg

SEQ ID NO: 208865 - DNA, 1087 bp, Cannabis indica
cacttctgcgtttgtacgagtactactacgaaagaaaaataactataacatttagatattgcttacacttagtgttagtgtgagtcagtaaaagacattgaatgaatatttaccttaagggcatatagtgtaggggagagggagacccactgtgttcagcagtattattattattggttatttatatatagggccatatatggatgtgtattctttattgactgtaactggaaaccacattacattttaagacatagcaatttcctgtttcaggctgtccactcctgttgaccggaccctcaaaacagaggttttaatgtaagaaaaatccgtatattaagggtctggtagttaatgtgattagcttatggcttctgggttcttgtactaagaataaaaggcaaaaataaataaataatttgctatgtccatttttcgtttttttttttgttcaaattaatttgaataagcatggcgtcagtactgcatgcaagcatgtcagagttggagttattattaagctaactgattccatctaacgtaacttaaaaggggtttgtcatcttattactttatatggacaaaacttaatgtttctttggaatagtttcatataatacacctcttgaaccggacttaaggtggcttcattgatctgctggctctggatgtactctgttttctcctcatttctattgtttctgcttccactgaaagcaaccactcattatatcattaaccttttctttttctttctgttttttaactttgagtaatatacgtttaatttatgcatcagatgtttacacaccagaatggtaaaatgcttttttagtaatatctattttagactagtagcagtaccatgtaatcatgtcattacattaccccatattattattttaatgggggcagagttctttccgttattattattattattttaaagtgtgaatgagattattttgtcacgttcaaaagttagctatcttaatcatggattgaaccatggattggcccatttatggttaaggccagggcccatgtaacagagcagcagacattgtggtggactatccgagtagtg

SEQ ID NO: 208866 - DNA, 530 bp, Cannabis indica
actttttttttttttgtattgattagtgtgaaaatttaatatttataaaacttaaaatgggccctaccaatgttgttagcgttggagatgccctaacattattttgtaccaataattatcgagaatagatttttttttccttatgaaaatactacttttaagcaaagaattaaaatgaggagcctaagattagacatcattaataaatggttctatcatatgtaatgaccatgaagtctaactatttcagttttattttatgagcgcatcatctcaaaaaaattctgaccctattcacttttatagtgtatttacttacatgtaatcctgaataaatgaaaataaaaactcatcctaaatgtaatttcatctaatttttggaaatatatgaggggtccatgtgtgaaagattaatagtgaatgttcaaaaatcacaaataattagtagtaaagctatagtataatatagaccccccactataagatttatttgaagctcaccaattaagattattctatgaaagattaaa

SEQ ID NO: 208867 - DNA, 422 bp, Cannabis indica
atggtttatagatgaaggaaaaagaaaggtggaaaattaggggaaagacttatcatctccatatcttctgatagagaactttatttcataactagggaaattaatccattaatatcatcaattgtattctacattcctattccaaacttttcaattgctcagattttcttttgttaatttaatattaatgtatattattttgaattaaaaatatagtaaataagttgttattttcgataaatagttaacaaattctctgaaatttgtaactttcactgctcaggttttattttgtaatttaatattaatgtatcttatagataagtatttaaaaaattctctaaaacttgtaatatttttttgttcattcatttttgaccatttaacagagagaaattatagtaattagtaaaagatctaaa

SEQ ID NO: 208868 - DNA, 891 bp, Cannabis indica
aaatttaaacagttacttatcactaaaaaaaactttatttttgctgctggaaactatttgaaatttttttgaaaatttatctgtggttctgaataactacaatgtatacaattataaaaaaaaatttgctaaaaaattattttggatgctgaaattgataggaatgtataataataacccttattaatttttagaatgtatactatagaatgaccctttgtaaaattaagagatctaaaataggagtgtgcagaaagtcatccgatccaatacaacaatttaatcacaattgatctaatagaatcgaatatctaatcataattagatcagatttgatgtaaattatcaaaatccaattgggttgaatcaattgttaaatgagacatatgatccaacgaacaaccgaaccaaaccaatcttattatcaatcaattatatttatatgttattttaaaatatttttatcatttaattttttatatatttatttattttatttaataaaagatattaattaattaaattcttaatacgcacttgcacatgtgagatcagttaaaaatactaaatttaaaatatcacacattattttcctaaaccattaaactgaaaagtaatttattttataatttatatgatatttgtatttggtgcattgagcttgtttattcacgcttatgcttattaggtgggattggatttttattatatctttatattttgattatgatatgttaatgcttattatatatgttagatttgtgttttattactataagaattaagtttttcattatgatatatattttttaatgaaattaaaacaatataaataaaacttatacaaagccacctacactttttatgcgctttcttttatattaatatata

SEQ ID NO: 208869 - DNA, 567 bp, Cannabis indica
tgatattagtcataaatacgactctgcagccagttggccgaatctgaggtccaaatcacaaaatctaaaatgtaatctaggtcatgataataccaaaaatctcaaattttcaattaacaaatgaaattatgaaatcgtaaacttatagtacacaacaaagagcatgaatacagaaattgataccttcaattcctccaaaaggatgatggaataattatgaatcctggcaagacacccaagaacgtgaaagatggaaagaaatcaccaaacaactgatcaagagagcttgacaaagagaaaaggatttgattcaaaatgtatcagggattaatattaaagaagacattggaggagtcattgagatttttagataagataattaagaaagaaaaaaaagatgaagaaagagatatttatttggtgatatattacttttattaaaaatataccggaattagagttgttttgtgggttgagaatttgaaaatggcgagatgacaagctgagaacggttctctaaacattttgagcggggtcacaaaaagtttggggggggggagggggggg

SEQ ID NO: 208870 - DNA, 624 bp, Cannabis indica
cttaattgggtatatgccccacacatatgaaatccatgtatgtctagcaattttcattcaagacaaaaaggttgcttctattttggacactttcgaagggattgattcaggtacaagggtgtagaaaaacttcccgataacaaacatagtttttatagtatgaagagaaacatagtccaaaagtacagaaagggacagggtgaggcccactaattcatgtaaacacactacactaggcgaaaacaaaatcttgtaaatatagtttaaggaacagtttttttttcttggcatgaaagtttaaggaacagttttttccatttattgatagtattatcctctttctttttccttaaaaatatgccgagtttgttttacacatgggctctttctttctttttctttattttaagaattaatgggtgccaaaagtgtccaaagccattgttggtgtcataataaaatttaattaagttttatacattttaatttttgttaagctttatttattttaatttaataattataaatgttaatgactagtaagtaaccacctcaatctcagaattggatattaggacaaatttccgaaattgaacaagttttattttttcaatccatatatct

SEQ ID NO: 208871 - DNA, 1259 bp, Cannabis indica
agggactgttgcttaaaccagtacaaggtgtttctattgaatgctactctgatgcagactaagcaagctgcattgatgacaaaagaagcacaagaggttatgtagtgtttttattaagtggcaatttaatttcctgatttactaagaaacagcaagtagtggtaaggtcaagcacagaaagtgagtttagagcattagcaaatgttgcagcataggtaaaatggattggttctctcttaaatgagctccatttgccacaatttcatcctccaatcatttggattgacaatcaaagtgctacagcccttgctgcaaatctagtctttcataccaaatcaaaacatattgagcttgatcttcattttgtagatcaaatcctagaaaaatagctcaaagtccgatatgttccagcctttgatcaagtagaaaatgttacttacaaaatccttgtccactgacagatttcttcatctcaaagtccgaactttaaatggcctacaacctctttttgtttgaggggagatgttaacactacaattagttaggagttagtgacaagttagttggttttaactgtgcattgccttttcaatttatttcactgttgcttgtaaatggttttgtgttttataaatgaagatcttaactaaagtgagagggtgcaactgcattattactttcattttttttctctctgtttgtgtttttggtgtctctacactattactgttgtttcatacaacgcttatagtgtgtcagtatactatgtcagtatacacaagttgaaacaaaggacaataatatcatatcatatataaaaatgcacatatatatgtgcaaggagccatgcacatgcattatttaattataatattcaagttcatcactaaggggttgtttggtatgcggtaatgggagaagtgggaatgagaatctgaaagtttcttatgtttggttaggtttttaatattttaatgttggctaagtgaaagtggtgggctttagttggctggcaaggaaaaccccaataaaaatgtggttttcactttccaatgctattgacaaacacaaacttttgcattttaaaataatttttatatatatatgaatactaatgtatataaaaatatttaatatatgaagtattttacttattttttaggtctaattaagatttttgcccccttgaactttgacatgtaccaaatcattgttggaaattatttacctaggatctatttactatcatgtatgttgga

SEQ ID NO: 208872 - DNA, 884 bp, Cannabis indica
ttttttggctataaattattttgtaaatattgtttacaaaaatacatacatttttgtaagttacactaataccacctttctaatgtaatatttagtatatatacatattctgatttatggatagaattgttcacttttttgtttagtaatcgacagtggaaaatcaaatgtgagtattttcagatttcactacaaatttaaataagtggttataaatacaaatctttttaggaacgtgttcttgttttcaacttgatttacaatctacactgcacaatcatatatatatatatataaaaaaaaatcaatttaagatccaattttcagtttttcatcttattttccgtacgtcttattagagttagctaaaatagttagtctattattttgttacattagttaggtatttttaattaatcagttaccaattaccatcttgtaactgttttgtaatctatcttgttactctttacgagctacctatatattgatgggccttgtatcatttcatttcttttcatttgaaaccattcgttcatcagaaataaaggaattcttttctctcaattctcaattcttgttttacttttacgtctaaaatctatattcatcgaagcaaaaaaagaaaatcatgccattattcaagttgaacaattttgttttttggcctttcaaattaacaatgtcaacctagtttattttgtatttgttgactacatgaatcagttaaaaaaaaaagataagtctaggaatacacattttttgtattcattaataaaaaaatgtccttatattatatacctgcttttgtaagtatgttgcctaatgtaccctcaccttttactttgatcgaacacatcattacattaacttaaggagtataa

SEQ ID NO: 208873 - DNA, 567 bp, Cannabis indica
ggaattaatacaagtagttttaattgctcttcaaaattaagaacggcctctcacaaccggaaagatcgtttatttaaaagttggaataaaaacaatacaactttttagagggagtgagtgagtgagtgagtccctcggccaaaggcccaaaagggtgtaatggtgtgtatgtgcacaaaagtggactccacaaaaatgaaaaattatattttaacgtttcatcgatctcataataattaggaaaagcataaaattcgactacttttttcctagtcactccattaactttcacttattaagtttcttaattaatattgcattatcctttcatgcttttgataatttaattaattattactaaataataactacaagtacgtatactcctccctatagattcactttagttatatgggtttttgttttttgctaacactatatgggtttgttttgaatcatttatatctattctatatatgtataatttccttcgttagaaaagtctctgtacttgaataatattgcaattaataaaatctgtatgtattagaaacacttggtacattt

SEQ ID NO: 208874 - DNA, 1262 bp, Cannabis indica
gcacttgatataactttttttttgattaagtggataattttattgaagaaaacaaactacaccaaactagtgaccacaaaggggaccacttcccttagaacacccctacagtttgaggaagttactctagcccaagtagctaacttatcagctacaaagtttttcagcatgaagaataaaagtcacttcaacattttggaactccttacacaacttgatacattgagaaaacaaatgaaaaacactccagcaaagtgggattgaaccagcctgaaaagtaattacagcaacctttgaatctgtttcaatcttcaccactctaaggcccgcattactagccatctgaagagccaacagaataccctgcaattccccttcaaggacattgtagaccttgccacacttagctgcaatgagagattctttaacatgtgtactgttgacaaaaattacagcaaagccagcctcatccctgactacagaagcatcgaccctgaagcaactagtatcaatgaaattctgctggcaaagcacctcccctgtccttttctggtaaaatatccataacaaccgagtagtgagtcaattggagctcactaatccttttcctgcaatctgcatagatgtcctccaaaacacaaactcttcccttgtgtactatatcgttcctccacctccagatcgtgtcacaaacgaatgctgcaaaagtggtcagatctctatctttaatgctagtccaccactcgccaaagtccttaaggttgttccaatttagattatcgattcgaagtctccaaggacttctaaaccagatactacacacaacggggcatttacagaaagatgaaaagtgaattcctcctccgtattgcaaaaattgcacaaagattgatctcccctatcaacaccaagccgactcttagtcgggagtatgtcagaaatgatcttctagcatagaagttgaagacgcggatgaatcttcaatttccaaagctttcccatgtcttgcaaggctccttgaatctcttttgttggcttatctagtagcgcttttgacaggatttagaggccttccaaaacaagatatcagattcttcatctatagggctgatcctaagtatctcagctgcaatattcgagttgaaacaatctcgaatcagctcctcattccaactttgtaagccatctataaacaagtctttaatctttcataatgcatggttatttatgaaattgaaattagctttcaactcctccatgtt

SEQ ID NO: 208875 - DNA, 1483 bp, Cannabis indica
caatttcatatttgactcataatgggacttggggtaatttgtaccctctggaaataactcaatcaattttgagagatcatatcaaaagaatggttactccacttattgagaactttccagtgcattagcttcaccaaagcattaagcgctaatttttttgcaactcgggtacaattcagtttccatatcattgaacaaatcgtcgtacttaccagcaccattcagaggggactcgctgaaggaagtagtggtagaacttgtattgtaaaaactaggatcttctcttaaaatatcaaccatcacattcgcaatttcttcttcatcgttgtctactatttctatagctggttatgtgaacggctcccattcaggtttgtaatatacatatagtgcaatctattctcttaagattgcttctttttctaaaaatttttgcagcacctctccacagttatgattagtaagcaaattattaacaagtcttccgacttaaaagaacgtgcaacgagacgacgtatcaaaatctttaacaaagaacaaatcaaatgagtaatagatcacactataggtatacaacaagcccaaactatccatgcagacataaaaagtccaggataatttggagaagcgtatttaagagtccttgctgactcagcctctccaaacgggtctaaggaaaaatatacacgtgaaagaaaattattacttagtgataatacaaacacaaatgttctatcctatctttggtttataaccaaagagatcaaataaagataagaatttgattttttgctatcttacaatatcttattcaatcttataatgtcttatgctatcttataatgtcttatgctattttatgtaccacctataaacttttattgctaatttttaattttgcaattagtttaaattaataatttaatttttttaatgtttaatttatattttattaaaattaacacttattttctaattttaaaatttcaaatttgttaaagtttgactattattttgaatccaattcttttaattaaatgattaacttttaaattataattttttaacttaataaatttctctattagtgatatggtaactattttttataaaatatcattttaatttttcaatttgttgaatttaatttttttttttttatcattttaaagtttctaattatttaaaatcaataaatttatttttcacattctaatgttaccaacttatttaaataatttttttaattaaaatataaaataatttacttatcaatattttaaattaaatttaattaatataaaaattaaataattataatatttactgctgacttcgcttttagccaacgacaatgagtctctttaataagcgataaacgatatgtcgtattgagaatatatataagaaagcaataataaagacacatgaattttatagaggttcagccccgagcagttcggtaatagcctaatccttgtta

SEQ ID NO: 208876 - DNA, 1447 bp, Cannabis indica
gttttctattcctctagtttactcttttgttgtattatttgtgtgtttggttttcagatcgatctagatctagttttgttcatttgtttgatttgtgtttctagagtgatttggataatagctttgagtttcttcgaagaagaaactctttgctagggtttatggtagctcaaatcaaagaccaacaaattggtcgagaaggtttctttgaatagggtattgttttagaggatacaaagtcgttttgactcgttgactcttaaaaatcgaaagaaataaaaggtcggtcttgactttggtaaaactgatattataaattgttggtgtagggaaaaattggtatttcaaatctctacaccaactaattgtaaagtgatacttccaaaaatgctaggcaccactaatactcaataacaatactcatttatatactaaatagtttgctccacaaagttagtttttgtgttttaaattttacataagaatttaactaatattatattttgcataatattatcccaatacataaaataaatataatataaaaatgaaaatatcatgatggttagtaaattatatatttaaatcataattaatgataatattgtaatcgaaaatgtgtatattaaaacttatattaacaattaataataacactgtaattattttttaaaaatcaaaaatattgtggcatagatctttttctcattttttcggtagcttagctaatccagagactacatgccagttataagagctttatacctcaattttctcttaattaagtcatcgatatgtaccttgagggttctcatcccattaagtatgatcttgccacaacaagttaatctcttaaaaggctaaacataattcttatcataagtagttgtagtgggattcgaacttttgaccaagcaagaaaatatatcaatgaaggcattcctaccagtgcattatacaatacgtcgttaaaactttgcatttgttgttatataaaatttagcacaacttcaacatatgctaaattgatacatcatttaacacatcattaaaaataaatttcttaaaaagtactataatataacattatatcactatttaagaagtgtttattagaaatgtttagaaatctttgtgactaattgcaattgcaaaaagtaaagatgacttttacttttaattttcttgggaaatatatatttattgttttttattatatatatatatatttgtaattattttaaattatggggctctaattaagttgagtgtgtgagagattaacaattaaagacaatgatagatgttttgttaggtgtgtatatgtcatcttgatatatactatataagaagtcatttctagaatgttctatatttaaacccaaaaaaaaaaaaaattgtatttcgaactcaagattaagttgaaagttatgttaaagcacttcct

SEQ ID NO: 208877 - DNA, 1532 bp, Cannabis indica
ggtcatgatgatgatgatgatcatgccttgatctatatagtaattgattcatttttctttatgaagaatgtgtgagatgaaatgagaggaagaaagatatgcaatagatctatcaaaggaatgatatttagtcatttataacaatcaaatatttttgtaaataatttgtgttgcatgaagattattgaagctaattgtgcatttgaagggctcactcacatttgattaacttaaacaaatttagtttaattaacttacatatagtaaatccgaattaatctagaaattaaaaaaaaaacaaagaaaaattatttacatgaacaaatattctttgatctatagtgagtagtgaaaaacaataaaagttcatattagaacaaactttcagtctctttacttattagacaaatgttatcattacaaaattaattaactcactttgttaagttatttttatcattatatacatataacaccctagtgttagataaatttaacttaggtgcgtacaactcatgatcataattaattaatatattttgatgaacaaaaatacaaaaattattaattagagatttatgtaatgtataattcaaatattatacaacaaaaaataccttattttcattcacctaattaataacaacatttttttatctaaaaaaaaaaattactatcatgacacacatgcatgtttatagaaaaaaataaatatatttaagaaattatatatactttaattaattaatttcttaattatacccataaaattataaataagcctcacaaatatttttataacaattaaattatcaaaaataaaataaattttctataataaaaaattttaagtctgccactgattttaattaatgtcacaatattttcatgtatatatatatatctaaaattctatacagttttacataagtaattagtatataatagttttacatatcaaataattaatacaatcatacgaaaaaataaataataatataaacacaaacgcagcaaattaacatgatctctctctcaaaaaacaaaaaaaaaaacaaacatgaaaactaattaaaaaatataattaggtattaataatcaacttatgattaagaggagcgtgtccaatgaacaaagccacatgtcccataagtttatccttcctagaaaaagttgtcccacaagaacattgccacttattaaggtccccacaatgcttctcatgagtcctcaaatcagacaacactgaaaattgcttgttactacatctcttacacacatacattttaggacaatggcttctcttgtaatgattcttaacacaaatcattgatttcaatggttggaatttgacatgtttcttgttccatctacacccttcttcaggcaagagtactcttcttatggttactctaactcattttccaatgctcattggtagtagtagtattaatacttttattgttgttgtaattctacacaaggcttcacttgtcttgtattggtctccatgtgctctcatgtgcatcctc

SEQ ID NO: 208878 - DNA, 1623 bp, Cannabis indica
cagtcctactgatctaagaggcatggtgtgcagaaagataggcctagtgcgttaaggtaaagaaccttagttgttacgaagaaaacaaatagagtacccaatagttttgttaactagagtgatgacattgtagaagaaatccaacagctttctgatgaaagtctacataataaatgacctccgggcatgttagaatagctaaaaaaaaaaaaaaaaaaaaaaaaaaagccaaagggcgagaaattaaggcctcccagaaacgatctcagaaatcacatcaatgatcatgtttgtggaggtgaacctcaagatgccacaactaagcatctggaagaacaaattgctgagttaactaagttcaaggaatgactcgcccggaaacaaaatagaaccatatctaattcggaagaagaagattcaaaaccatgtgtgagaagaataatagagacacccttgcctaaacactttagaatgcctcaaatggaactgtatgaatgtaggaaagaccccagggcccacttatccaaatacacccgactgatgaagtggcaaaggcaagcgacgatgcaaaatgtctctatttttcattaactttgacaaaatctgtggaagattggtagaaaagattatctcatggatttgttcgtaattgaaaagattgccaagtgatgttctagagaaaattcataactgcaaaggattatgatatagaagtaagctcactgacaaacatcaaaaaataaccaagagaaagccttaagaaatatatacagagaatgatggatgcaactacaaagactaaggttaatgataatatgaaactagtagccttaacttaacctcgggaatatctaccagatcctttctatggggagagtcacaaagaaaaaggtctaacactctgttcaatttcttggctagggcccaagttttcataaacttagaagaactgtatgtccatgcttatggagtaattccgacaccatccaccaaaataagtagtgcaactcaaaatccccaactatctgctccaactattgtcccttcgggaagtacgcttacaactctaacagtgtacgaacctggtgcctttaaacaagcagctgcgcaggctaaggctgaacatcgggctggtttgtgtagttttgggttcaaaaaattttacccgaacccggtctgtgaaatgcttaggttcacaggtcacgggtttgcgttgaccgggtcaatagattgaccaggtcaactcggtcaactttttttttttttttaaaaaaaaactcaaatcctatatggttttttctatatattaaattaagaatataagttataacaccataatttatatttatttaattaaaataataataataaaaaaaaagaattaatttcatatctaaaatacaagtctatctaaaaaatttcaaattatattatataatatattataaactgttatttttaatatattatacatgtaataaaaataaaaggattagattttagggtttttatatttttaatatattatatatgtaataaaaataaaaaaataaaaaaaattaattttggccgggttggccgacgggttcaggtccaacccaaaactcgatgactattaaaagt

SEQ ID NO: 208879 - DNA, 727 bp, Cannabis indica
acgtatataattaaaaaatcccctattttttattgttctactataaagaacacttttattgttgtgctataatactaaaaaaatatttttatgtttatttcttacttaatgaagttttctttttcactcgaaagaaaaagatgtttattgatctatttatttgtcaataaaatatataaatatatatatatatatttatttttataaaaaaatgtcctttattacaagagtaaatatttttgttatggtgcaaaaatgattaatttttatgtttatttcattaattatgatatttatttatttgatcattaaaaaaatgtacacatatttttatttttaccacaataaaatgtcatgttttacaataataaacattgttgtttatttaagaaaaaaaaaatcattgcgttatagaaatgcttatgttttatttttattattaataataaaaagtttatgcttagttttttttttatttacttagggtgtttattgatatagactttaatttgattcttttggggaagcaatattagtgtttattgattaatgttgattttttgattagtaggctttataaggttaaatatactggtaatttgttttctgctgtattgggagacaatcatagtttcatttggcgtaatattctggaagcaaaagattttatccacgcctgtgctcaaagaacaattgctaatggggaaaatgtctacattcttaatga

SEQ ID NO: 208880 - DNA, 1042 bp, Cannabis indica
gagttggggaggtgcttactgctttaattaatcttgtgatgagttttaaaaaaaaaaatatatatatcaatgtcggcatgtaacagtcacacttttttaatctctattcccttgtcaacaaatttactgtgaaaatttaaaagttggcctaatgttttagctagccttttaaatctctctgaattctttggttttggttgtattcgtttcttgtagaaatttcaaaagctccagaaggttaaatgtgcatgtgaagtaagtagtaacataacttacatggctcccgtatatgatcctatttatgaatatagctcttacaaaattcattacaaaaaaaaaaaaaaaaaaaataagcaaatacacttacatacagtactactaaaacattttattattttgtcattaaagactagttaatgtaggcattgtcagcactctcttactttatggtaaaacgattctgagatgctcattttcaaagttcaaattttccttagtagtttagtattaaaaagagacaaaaacaaatacaaatcagatcaaaattctaaaaatactagcctcacatgaacgtttagagtgcagccaaaatccattaaaggtcacacaattactaacacttccagccaaagaagaacaaaatgattatttttcttaatgggcagaaaaaattgatactagttcacaacatgaaacttgtggactagcaaaatgaggttgatttatgtgaaagggaaaaaaagaaaaaaaaaaaaaaaacggaactaaacgaaggtgacactgtatcagaattttgtaatcttagtgcgctccaacgttcaaaaaatccaactaggaacccgtcgattcatcgaacggtcacaaatgtccatgtgaacgtctttaaaaattagattttctacagacaaccctccaaactcaaaaaacaaactagttttttaactttacttaaactaaaaaggtttaagggtagttggtcgtactactaataaattgtaaaggacaagtgtttgtagagtacgttctagataacatactccaa

SEQ ID NO: 208881 - DNA, 600 bp, Cannabis indica
ttgtcggcgcaagtaacttcgctaacaaaacatttttgcgctagtaggttgctggaaagttttgttggagcatgatacttggccgaaaaatatatttttgtattttttttttaaaatttttaatagtttttgtcaacgcatgtaatggcaccaataaaaattttattttattttatttttaaatatttctttaatattataatatataaatataatttaagtttaaatttaaattaaaactaaaatttcataaattataatacaacaatataatctcaaccgcacattataattatattaaattcaagtaaacattataaaactaattaaaaagtcgctttatagaaaaataataatatttacattgaaaatagtaaaataaaagtcacactataaatcaacagcagcatcatcatcatcattctggctgggaggggagacttgtgatgactaggggaggaatctggccatctccatctctcttaggcggatttttgggttgatgctgcctattaagggcatacagcctccggcttggcaaccccccagccttgggtttagttggtcgttgactcgtctttcagcttcatcattgccatg

SEQ ID NO: 208882 - DNA, 1010 bp, Cannabis indica
cctccttggaggtgctctaagtacttcatttgaaaaatggtttataaattaatgtacgtacgtgtctataaacaactgcctttagtaactttattgttgccacttctcatttggaatctggattaaggatcttacttgtctctatccatcagaaaatcatcatctgtttcattaaaaagaaaaatcatcaatcaatgtgactatccaaagagaaaacctgggaatgaaagtgaaattttaagcttcatcaatatatatagcccctcttttttgagtttctcaaaaaacatagtttcaaattcaatcctcaaaaataaatatggtactttatgacaaaattataaggccaaaaagaagagttagacattgtttatagatattataataataaaaaaggttgaaatataattggtcatttaattattttatttatacgaatagtgggattgtaatgtttcaatttttattacaaaatcatcaattgataattattgataggtggattttgaaaaatatttcatttaggttggaaacctaatttacttcccaagtgttcatttaagttgaaaacttaatttactcacacttttttttttgatacgattgatcgctgatggcttattaaatcattcactgaggttgttataatattattagggttttcttcctttttatagtaaacaatttagtatatgcatagtattattgttcactacaaatatctcacaataaaatttgtaattaaaaataaaaaattgtgactaattattaaaaataattgttatgttgtgattaaaaatttatggttaaatgtattagtcacaaaaatcacaatttgttaatgattaatatatttttagtcacaatacttgttgtgactaaaattaaattagtaataaattgtatctaaatactataatttagtcataagtaatttttagttataaaaaattatattatgactaaaaaattgtgactaaaattattttttgggttaattttacaaatgt

SEQ ID NO: 208883 - DNA, 514 bp, Cannabis indica
cccacgtacggtctctcactcactcactcagtactctttttttttttttaggttaaaaataattgagtgtttagtcaaagtttttgcttgtgtttagtcaatcacggttgggagttcaagtatacgggcttgtgctgagccgacacgcacacattagttaattggtacagttttctggccaatcatgatcactttctagatatttcttttctgctgatcaataatttctgcttttttcacttttactatagtagatcttcattataattgagtcaacgattctttctagctaataaccatcacataattatcttgttactaaaaaagatgacatacgttatctttggatgttgttcattagttatcatcgtttgttctccacacgaaactatattatatatattaatatattcaccctcttaattaattaaaacttaagtactgcgatgtgacaatctgaacctctattgggaaacttcactccaaattagcctacactcatcaattattattt

SEQ ID NO: 208884 - DNA, 303 bp, Cannabis indica
ttttttttttttttaaaatacaagagaaataaagttgatttatttcatataattttttatctcaaaaatatgtcaaaagagtcaaattctatacaaaataaccctcttatagctaaatatctacacttatttgttaactttgctttatctctctttctctcccctcttttctcccatggatgatgatggcaatcacaatcactacttagatcttatctatttttctccttaatttttcttctctcccatcaatttaaccaatgttaagttaaccgtagatattaaaaaaaaaaaaaacagaga

SEQ ID NO: 208885 - DNA, 790 bp, Cannabis indica
tcccaaaaatgatcgatctattttcccttaggttctatccttatttatagattttataactgctcataaaatgtggacaattcccacgtttcatatttacaatatctggataatatgaaataatagttgataaccgcctcgtttttatagttttcattgccgagataatatatccaaaatatagctcgcattcttcaaagatttttgggaatgactagtcgtattctgcgagatactaactagtcaagatatttgtcctcgttgttactatgtcaactcctaagattagtcttttaggaatcctgatataagtcacattttgtgtatttcccttagtctttcaccatactcacgagtatgtgggttaatgagttgcaagctcttaaagaactcgttatctaccatttccagtgatattgttttagttcttgtatgcttctgagtgaccccaattagctccgagatgacctctgaaagttgttatctcgcaatactgtgtactttatcatcaccatgtgtgttagtgatgttgtagcatagcacgaggttggtatctatttatggttgcttctctcgaggcaagataggcattgtaattatgatcctcttttaatattcgagaataatattcacgtgtcttgtccatatttatggctcaaaatatgggcataatatttttttatatgactctaataccatgataaaatttaggatggaagtgaatatatcgtaagtgtctaaggttccatctcaaagtgattgacaatgaaaggagtagcacgtgtatcta

SEQ ID NO: 208886 - DNA, 556 bp, Cannabis indica
aaaaaaaaaactacttaaaaaaattagaactactgttatgaacataaatatatagtattaatgaaatatagaaccaagtagagaataaatgttataaaatttctatttgaaaaatgcacacagcaagtgtcgaacacgagatctcttacttgtataaaagtagtctaaccatttgtgctacctttaaaatactagcaagataatactttgtaaaagaaatgtattttcttattatatgtataacatgtcatttttttttttaattttgggcctccaaaattacgaggcctagggtcgaggccccggttaccccacccttgggccggccctgactcctgactaggatcagcttatttgtataaatatatagtgatagagagaggattatacttttcttctattggaacgaagagctgtctttaagagtattatatttatattgatccaaattatcaaaattctattatggaattttaatttccatatttcaagtgcatcagtatgctaaaattttgcattgaacaatctctttccacataaaaattactaacctcaa

SEQ ID NO: 208887 - DNA, 527 bp, Cannabis indica
aaaaaaaaaaaaaaacttgataacattcgtacaaatggtaattccccattattatatacctataattttattaacaaaattattttttacaaaaacaaattagtaattttacattgatgttgttttgtaaaagttctctctaaattgaagggatttttggtgggtcccatctcaaaattttctaccaattttgctctcttcacttttccttccaaccaaacaagcatttttataaaatgagaaattattgtacacatgctaataacatggctcacgcattaacaatgtaaaatagtataacatcgacattaattaagtaaaatttagtgcacaatttgatttatactttggaatgaaattgtgtgcaaatttcacattaaatttgaaaaaaaaaaactgtgtaactattacagattagagatgctctaagataaaaaatttcaccaaattttacttattttcatatctctcatcaggaaagaatttgtctttaaaaaaagaatatattctgtaacaagctcacagtt

SEQ ID NO: 208888 - DNA, 524 bp, Cannabis indica
ctaaaaagatacgcttttatgatccactgacactaatgttatataatttaccctaacccctaaatcgatttacacacaccactttgccttcaacctctgaagcctttcctccgttctggcgattattctacgaaaatccaacatgattcagacagaaaccccaacgataagtctcttgtcttcccatcagtaagtctcttctttaatgggtttcggcgaaaaaccccaacatgattttattttcttcaaatttcatgggtttctcatttctctctcagatctctcttctgtcactctccctctctcaattttttttccattgttgtcatttttatgtcaaacaaaaattaaaatcttctaccaaaattgagcttcgattcatgatgacatgcttgtgagttttgcctattgcaaaaatgggtcataaaaaatcgagcttattgaaatagttggtacgtcagaaaattaactctgttaattaattgtaactttcctaacttaataattctatcattctaatgttt

SEQ ID NO: 208889 - DNA, 883 bp, Cannabis indica
ttttagtttctctgtgagcttagatcttaaatattttatttgattgcatggacagactgagtgtggagaactgaagcgactgggtttcgtaagggtcgcggcgattcaagcgctggtgtgcgtatcgaatttgtacgactacgcgaaacagaactcggggcctttgcgatctgcggttgggactgttgaaggtgtggttaccaccgtcgttactccagtctacgacaaactcaagggcgttccggatgatctccttgtttttctcgacaaaaaggtatgattatgaatcgaaacttaaatctttctttacaatttttttcaggcctaatcaatcttaacagctccaagaaaatactttttgttattaatgatttcactcaatatctgatatactcagctccgagaatcttatcaacgattctttgagtctgatctattttttcgaccttcgtttcctgccttagcatatctaaacatgaataagaaaagttttctggcgctcatgtacaggaagataaagagagatcttgatcttgatcttgattactaagcttatttgaaacgaaaatgttatgatatatgtgaattgggtgtttattaggttttccctttgctcaatctatatgtatacgatgtcaattattttccattgcctgtgattcaaattaagaagtggattcactatgacaggtagacgaagctacacacaaatttgataagcatgcgccaccattggctaagcagatcgtttacaaagctcattatttgacagttaaggcagcggagaagactcaaaaatttgtgaacgatgcacgaacagaaggccctcgtgcggctgtgagccatgcggccacggattacaagcattttgtaatggatagga

SEQ ID NO: 208890 - DNA, 600 bp, Cannabis indica
ttaaaggtagtgatttaaaactcattagtgatatttcataaaaactattatatttaattatataagaatgatatttaattgtactgataaagatataacacattagagggtgctaggttgtaacttactgactcttagggacgctgcatgtgtgcttttataaattagcttataataataaactaacagcaaaattgtgatttaattaaaatcttgctaactaagttgataacataaaatttcttaacattattctttcaagatcaaggattccctttaaaatattacaaaatatgtcattacattatttgaataaaatacacattaagttcagaatattgtaaaatatgaatcccgacaactcagttccacttgttggataagctgatatgtacattcattggagaagatccctgactcattattgtccaaatgtttcttaacctttacctgcaccacataatacccgttagttacaaaaactcaacaagaaaagcaacaacataatatcacaaactacctgcatctaagagcttgggataaactttgtcttcctaagtccttaggaggtcttggttttcgaaaaacgaaagaaatgaa

SEQ ID NO: 208891 - DNA, 877 bp, Cannabis indica
ctcggtcaacaatatatatataaactagatgtataaggtggtgacatgatattctgaaatcactataaatgcatctatttattatctctatgattttctcatttttttttaattttttattagatttattaatatttattgattttctcattttttgagaggtataaggcggtgacatgatactttaaaattactctaatgccttttatctattctctccttgattttctctttttttttattagatttagtaacattgatcgatatttcgtaattttttatttatactttttacaaatattaattaataataatttaaaaaattcaaaaatctattaattcctaaccatctatttatatataacagaggtataaagcggtgacatgacactctaaatcactttatctattctctcctttattttctcatttttttttaaatttttattaaatttattaatattgatcgatatttcgtcattttttatttatactttttaaaactattaattaataataatttaattttttttaaaaatgtacttattcttgaccaattttaaaaatacttacttaatatatctgttacaccctgattttgtaaaaataaaacaaagacaacgtcccatggacaaggtctcatggccaaacctcatcactttatcatctcaacgctaaattgagaacctcatcatcacctaggctccatcatctttgcatccttccttaagtatcatcttaccaccatctccaaagactccatctcagccatcacagtcccacttcatctaggccctacaagcatctcggcctcaccaagcatctcagcctcacctgtgatagtctaatagtcatgtgatccgtaagagaaaaagta

SEQ ID NO: 208892 - DNA, 878 bp, Cannabis indica
ctggtttggagaggagcttcctattgcctccctactttggtaatgcttattaccaagcgagttactgttactagtctttgtccaatctgtgattcacatgatgaaaccattttacatgctcttgtcacgtgctctgtggcagcaacttgttgggaaaaggctggggtaaacacgactatcacggctggtatggatttcttggactggtgtgccaccactttcgattccgcctccaacgatactcaatgtttggttgctgttctttgttgggccatttggaaggctcagaatgataaggtgtggaataataagcttcctaatgtttcttcgactgtgcttttgctattacttaccttgactaatggaagaccgctcaaactcctttggagtcatctcagttggctgctggggatggagccgagcggtggaggccccctggtacaaatggtgttaaggttaatgtcgatgctgcagtctttgaagggtcacaaggcaatggtttcggtgcggttgctagaatgacttcggctaccttattgaaggtgttacactttcctatttaggggtggttagaccggagctagcggaggcgattggggtgccttaagttggatcaaggccaagggctggctgtgacacttgaatctgactgcttgttggtcgtagaaacaatccgaagccctttgagaatgatttctagctttggtttagttgttcaggattgcaaggccttacttttggaattaggtaatatcttaatttattttgtaaaacgttgagcaaactcagtagctcatttatttgcaagagcttctagtttatattctgatcgtatttttaatttgggggatgtcgcaactgagttgctatcttgtttg

SEQ ID NO: 208893 - DNA, 570 bp, Cannabis indica
taaagtactcaagtataatccttatggaattaacctcactctgtctattacttgttaacgatacgtatacttgcgtgttgaaaatactaccaacaaaaactttggctgttggagatggtaagagacttgtgatctctcccattggtaaaactactctttcccccaaagtctttttctcctttacacttgaattctatcttacaagtccttgccatgaaaaaaaaccttgtttatgtctccaaattaactcatgataaccatgttttcttagattttcacaggtcttgttgttttgttaaagacaaacaaacggggattgttttgctcaaagggaagcttaaagatggtctctgtcttctaggagatgatgaatccaatttgtctcatcatagcttggaatgtcagcttgctacctcaaatttttcaaattgtaatgattgccttacatgcttcaattgtaatgctgctaatgcagcccattaatgtaacaatttgtcaatgaataaaaatcttgtttcaaattacacaaattcttattctccatctgcctactctatttcattacagtct

SEQ ID NO: 208894 - DNA, 1014 bp, Cannabis indica
attaaataatagttgaataattatatttcttgaatatatatatgtatgagtgaacttttaatgggtattacccatgggtaatattagaaaaaattgactttttaagcttcatttttttatccaattagaaaaatctctcatttttacattatataggttatgatgttccatcgactaaaaaaaaatcaagataatatttttttttcaaatatatttttaatatagtgtaaaattaaatatttttatattttttttattaagtataaaaattcaaaattttcttatattagtccaccttggagtaataccttggagtaatgcctattgaaaagtattacatatatattacttgtatttatatatgtatataataataaaaaaatatatttttagtattatggttggaataaaaaataaatttaatactaaaattatacttttttggtgttagtttaacactaaatataaggtttactgttatggcatgtttacttaaaagaaatggaaatgaatggtatggtattaattcccatacaattatttattaaattttggaaagggagaaactagtgggaccctcacaaattagagagaaaacaaagggaaaggttctccccccatttttatagggaatgcctttcccttttcttacttaattttttttaattttaattttattaattaaaaatgaaaaaacaaatataccccttaaaaatctataaacagaaaataattacatgttctaataatgacaattttgtcaaattaaagcattccgattacctttcctaattatgtaaacaaaataaaatgcttctcgttttctttccggacagtttagttaacatcattataaaatattgtttccgattattttccattttaaaccgatacatttctcccattgattattctgattccaattacagtttagtaaaaacgctattagagttagcttaattgggtcccctaaaacttaaggtaataatttttaggggaattattttatatatt

SEQ ID NO: 208895 - DNA, 759 bp, Cannabis indica
gtacaaaatataatataaggtaattggttacttctctaattacctaagggtaacccttacatgttttttttccatatttttttctactttttattgaacttttctttttttttttttaaagcattttattacaaagattgtataaaaaactataaaatttgtaatttcttcttatttacaagttagataaaaatgacattttaactgtgtatatttattatggcgtctaatgtacaaagtagtgttagattagtgaatacaggtatttctatatattactattttttatgggaactttttttgcacaatcactatatgtggttctttatcagagtttgtgtgtaatccacacgttactctcgcagaccacatattgcattgcactcaggaagaggaactaaagtttccctcactcaaggaatggagtagagggcctattattatttactaggaatagaagcttaatcacttgtaaacgttgcctacgcgtactagagattggaaggaggagtgtgagattcgtaattccctcaatcaagctatggaaaggaaagctctttattggaaacaacgagcccgtatcttgtggcttaaagatgggggtagatgttccgaattctttattttgactactaccatttagaggaagatgtaatgtcattgaaagtattttggataggtttgatgtttaggtgactaggtatgacttaattatgaaagaattcactgatttctagagtagaattttttcgagaaata

SEQ ID NO: 208896 - DNA, 650 bp, Cannabis indica
cccaagcactagtcggctggaatttgtttccagtgcaaatgaagcttgtaaattactgccttctttactttcgatcatttacatgattcttgaattgtgattttacaattgatagttgattccttagtaacacggtaatctgaatcaagtaattaggctaagttgttctttcagttagtatcaaagccagaaaattttggataaattttgtgttagatcctctacttgcttggtgcttgattcgaaacaaaacgggtgtctcttgttcaagatttactttcttggttgattctgttaccactaatcctctctaagtttcatctcgaagagcttcgttatggctgtttgtgttttctttctgttctactatgccatgtggaaatgttcagggaaggtgggtctacctcgagacctccaatgctggaaggggctaacaacccttactggaagaccaagatgcgacctttcttgagggcggtggatgaaagtgtctggatggccataaaagaaggatggataagtccaacgatgactgagaatgaaatcgttaaaccaaaatgcatgagcatgtggaccattgatgaaatggagagggaaaatttgaactcgaaggccctggatgggctgtttaatgatgtcttcacaaatca

SEQ ID NO: 208897 - DNA, 640 bp, Cannabis indica
aaaacttacttgggagtgcatcttggagtggttctggtgtagaggaagcctggtctgatggctgaaacagaagattggaggaaaatggagaagagaagaagaagactgatactttgatagggttgttgggccatgtttggatcagagaataatagtatggagctgagttgtatatatagtgttgttgatgataaatgtggttgtgtgaccgtttcagatttgaaattgaaaatggggttttatttttttgtttgtttaataactgagatttctttctttttcaacttgttctcattggaagttggtacaatttacgatgctgttgtaattttatatggacgaaattgccctttcactttttgtattaagactatcacacgtgatatatgattatataaaagagaaaagagggcgccctagcaccctcgtatgtgtcaatatcgttattggtttaattaagagaaatgttatcgctattggtccaactaaatatcgggtctcatataatttaatataataacttttagggagtatcgctagccaatggctacgcgacatgtcaagaaggtgttaggcaccactgatgcctaataacaatgctctttaattaagtatctgatcttacataatttaatataat

SEQ ID NO: 208898 - DNA, 632 bp, Cannabis indica
aaattttaattatttctgaaaaataaaatattatatttgtatttatctctctctctctctcactctagagttcttggtcataattttttttgttcattttgttttgtgagtttttctttggtttgtgcgactgtaaatgggtgaagacccagttgaggattctgagtaatggaagctgacccagttcacgccataacctacattggtccctaaatggggaaagctgaagaggaacagaatccggtgtcgaatacgggcgcccaagctgacggtaatcccaattctcagacccgatttgggtgtcggtgcgctcggattcggaggctcattggcttgaaatgcatcttcattctcttgctctccattgctgtttttctctccgccattttctggctgcctccctttcttcagttcgcggatcaggccgatctggatctcgattctaagtttaaaggttagcttgaccctcaatttttatttatttattttccttaagttggttattattattttgtaacttctccgatttgatttgctgggtttcgatattgcctggatctagatgcttctctgcaggcttgattcgggaattttgatatgatgtgattgatctatttatttttttttttttt

SEQ ID NO: 208899 - DNA, 937 bp, Cannabis indica
atttctggtaaaaaatatattagttaaatatatacatgtattttttttttcaaaatttcacttaaacatcttttttttataaatagaaaaattttaaggataaaaatattaaaaaatttctaaaccgacatgaattattttttttttgttcgccatctttttctatgaattatttttgtacgaactcaaagcttaatcatctttgtttttgtcagatgatgtttttttgtttatgtcatggtgactttaaatctgtccatcaaatgtttcaaggtctcaagctattttctcaaacataattaagtttggcaaaatctgaaatattttgttgtatggcagaaaatgaggttcaaaggatagttgatgcctctgaattcggtagaagcttattatcactccgatacttgaaaatactgatttgtgccaaacaattactacctatagttgaattaaacaaaagtactacaacatatttcttacttattaattaataagttgattataattattccactcgtgatgacggtgataggtgtaaaattcatattcttcaattagtggtaaataactttggataatactcaacataattgcaacaaattatcttactaattaattaggttgattataactaaatttgagacgaccgtgagaggaaagttcatattcttcaatcattgacaaataatttgttggacaatacttaacgcagttaccataaaaaaaatatataaaaattctgaaattaatgttgtaattaagtaatcatttcttatgagtatcagttttaaattttcaatcaataacggatagatctataagacacacacgtacgtaaacacatactttacatgcaatacatttattaattttaaaatggattccattgtaaatatatttttcacgtatatgttatgtctttttattctttttagta

SEQ ID NO: 208900 - DNA, 576 bp, Cannabis indica
tatatatatatggagagagagagttagggagtgttcgagcacaagtgaggaaagtttccttgtaactacttgagttcttagttcattcaagaattgtaatgagagaaacttggtgtgattaatgaagaggattgaggttgctattcaatcgagatgtatagccttgcacatggctcgaaatcgttaaatcttggtgttatctttctttaattttcgcgcctatttccctcatttaatctctttttattggttctatttattgtgttgttgaggtttttgtgtgtttgtattcttctcgacctgcctatgtgattcgatcacaacactaataattataaattggcctgttaaatcaaagtccaccaccatttgcccaaaaacatactttgtttactcctcaagtaaaatgatatatatttataaattggaaatacttattgaaaaatgttccgtatatattttaatgggtattacccattcatgattactaattaaatttaactattaatattaattttaaaaatattgaaccattacattttgatctaatggagaataataaaagagaaattttaa

SEQ ID NO: 208901 - DNA, 1456 bp, Cannabis indica
tatttgtcctcctggcgtagcatgcttaacatggataaagttagtgccacgtggcagtacatggaaggccaagtcaacacctaagcaaatggagatcacggtactcaaatgggcatcaagttacagaccaactccctctcaggagctggcctaccacccttggccggtcagccttgggattgcaccatggctggctagcatggcctccacaggggcctagccgggcaagaggtcctctgtagggtttcctgtgcacttttacatgtggacaacaagttatgggctgcgagttgggccctaaagaccgaacagaatggttcaataatatctagattcaatgacactttaatcttttgtaattatctaacaatctatgaaaatatctaggatttaaactgtaatctaaggtttcagacctcctatataaaggccttaaccctagcctagaaacctaagttaaatatgagcctgaaacctgcctccaagctctaagtctaagtctgaaaaaattctctcttcctcacttactctctcacacgcctacactagcatcatcttaacacttgagttttgcaattattgattcatacattgtattcctaagggtgctatagtaaatcccacctatagtaatctggatagtattaaccctcggtattaatacaactaaaaggaaagtaggtcattacccactatcacaaggggcctgaacctctataacaaatcctatgtttattgcttttgattcttatttgtgcaaacacgtggcaaacgtcagatgtatacgaccccactgttagttgatcactttttgaggtcaacactcgatattctaggaaatgaagaacactttatactactttttcatcaatcacaaccaatgagccattctttctgtcgtctgcttaaacttttgttccttcactatctaggttttatcgtgcactgtgacaagctccgggtcgtaaaattatcctaattctattaaaattttagtagcataacagttgtaatcggacgttcctaaaaaattcaaacatgcaaaaaataagaaattaaacaaataaaataatacaaaacaaacaaaagaaaattaacaataaaaaattaatccacccatccgaccacagtacatttttgacgagaatactttggttcgtggtctctagttttggaatggaagaagacaaagtgaatgaggaagatgaaggttagggacggttttagtataaacatgtttatggcgtcagttattagaaactaactgataacatgttgtatacgtgtcacaataaaattatacttacgcgttggttattttttaataactgatgtcgaaggatgttttttatactaaaatatctcaactcaaataattatagttatagggtttttgttaactttatagttatggttttcataaaataattgccttttgtaaagtcttttttggcaa

SEQ ID NO: 208902 - DNA, 686 bp, Cannabis indica
tagctacaacaaaattggatgagacaaaatgaatcaatgattttgataaggtcaccatgagatatagtttaactcttaaatatcaagatgaataaaaatactattttagatttagactaactttgttgtttataaaaattactaattgattttcgactatatcaaataataatttagaatctatattttgcaaagatgaacataacaatatctccacaattaatcataaaaaaatatttaggttaaacataatgcgatactcgtgaaatttcaaacattaacccaaattaaatgggagcaaaagcatctataccaagagatcaaaggggcaatattcaaataatcaaggaaaagactgtatgacattgacaaagtaatgatatagatcttgggttcttcattttgttcatgagatcatagtactagtaacaaacaactatgttcatatctgtttttttttttttttgtgagaaattactattttccccttataatagagactagaatcgatcctaggttatgatgggctaaggacttgcgtccttaagatctacccattttaggatctcaattttaaaataccattattttataataagtgtaatttttaatttttaagactcatttcaacttagaaccgaatagagaaaaaaaaaaataaacgtaagatttttttttttttttac

SEQ ID NO: 208903 - DNA, 750 bp, Cannabis indica
ttataccttcaatttacatgaaataataataacacacaaacagatcaaggttctcttagaattgataggacaattattataaagaggtaccatcttagttccaccgcgagagctaaactttatttttatgtcatcgaccccatgaagcgtagctaatcatcaaaaattatttgcaagatttatgtttcaaaattgagtggattaacaaatattatactccaaagcaaagtaaatatgtgaaaaataatgttcaagtgagaataaaacctgcaatgctagcctggaaggagcttctttctggtcttgtgttgcctcgtactcgggtattgaatctaacaatgccattcttgtgtgcttcttcttagaacaaagttgcaaagtctttgttaagataagtggagttcgaaaaaatgacccagcgatatatacctcaattgtcggtgaagcagtgtctgcagccatcaattgcttccctttgagaaagctagtcccaacaattatatttgattcacaatccatgatccatctttggccgtgatgattcgattccttagtgaaaccattactattacacaaatctaaaactccggacaacaaaaggacatccttatcaatgacctcaaatttcacacttccagtgatccttatattatcggtacttacaaatgtcacttcttcagatttcttatctaaacgatcccttcgaagaagggtcgtttccccatctgaatagataccagtcctaacacc

SEQ ID NO: 208904 - DNA, 524 bp, Cannabis indica
tttatgcacaatcctcttcaagtacactggcttgactagtttaaaaggaattctaccgagtatgttagtggaactatgaaccatggtctagcatcttaaaaggtccaactgaccccgacgatcgaagatcaacatctgggtttgctgtgtttccaggtcccaatttaatcacttggcaatcaaagaaacaacacaccatctctcgatcgagcacggaagcagaatataggagtcttgctagtgttgttgctgaaataacttggctccagtcactgttttctgaattgcaaattcatttgcccaacaaaccggttgtttggtgtgacaacttaagcaccattctgctcacacagaatcctgttcttcatgcaagaacaaatcacgttgagttggatctttactttgttagagaaaaggttcaacaaggtttgctttctgtcaatcatgttcctgcagtggatcaattagcagatggtcttaccaaagcaatctcaagcaaccgatttgccaacttcagaaccaat

SEQ ID NO: 208905 - DNA, 795 bp, Cannabis indica
aaaagtagtttcatgaatcatgaacttccattcaaaattacaatttaaggtgcacaattcctatcaccataatttgttcaacataatctttttatgtacatatttatatcaaaaaaaaattcaaacactaacatttttatataattcttatttttagttttcaaaagcagaaatattgtgtggtcccttttgcaactcttatcctatatttatgtttgtgggaaggcattcaatttttgtttacacgccccgttcaataaacttctttttaaatttattttattgtaaagacatctaatttttttttttaatttttataattttgcaaacttaatataattttcacaatagttaataatatttctaatttcaatatttttttcattatttataatacccacatcaaaatattacatttttttatattacaattaaattagtaaaaaaaaatacaaaactagggttaaaatctgcgcgaagcgcggcttaattccctagctatacaatataatacaacccaatataatatcatagaatacaataaaacacaacacaattagtatactatacaaaccaatatagcgttgatctatggcaagtgctagactttgacagttagattttggtgaaataagaaaaaataagaaatacgtttgggaaaagaatgtaaaaataaattaattaaaaaattaaatttttcatatttgatatggaaaattgtattaaattaagtgtttttctatatactttttctttccataccaaatataagtatttgttattattattattatt

SEQ ID NO: 208906 - DNA, 894 bp, Cannabis indica
ttatattaatatttttagcatttttcttaatattattattatttgatttaattgtgtgtacaattatttttacctgctatgtatacatctacacgcatacacctacctacgtttcaaagcacgcgcgtgtcttacaacctcataaatcatataactttatttatctttcattcatctcaaaaccaaaaagaaaaagaaaaaacttatattactattggaaattatttattatgcatttgtcaaatttatttatttgtgtatgatatattattattttgatgttgtaatttatttttgtcgggattcatttttgtttttttttattttccgttaaatttattattaaaatgttcttaattagctagtttagtgtagtatattttttccacacaagttcaaattcttttaaatatttgttttaaaagtttaacaaattttcttttttttaaattaatgctagtgcagtagtaattttcacagcaaattctatgtgaaaggcaaaataaatcaattttttcttgagcattaattaattctttggactccataacaattctcccttctttcctctcccaaaaaaaaagtcatttcttttcctatttatttgccaatatgaacatgaaaattagcttcccatttatagtgaaattatctcttttctttcaataatcatatatatatatatatatataataaaagcatgaacacttatgtacgtagtgtgtaattatgtatatattatatagaaaaacatacatatatatgtggtatgcatatagaagctcttttaattaatttatttattttaatttatataaatacaaattttgttggtattgttttggactaaacataagcatataaaattaggtaaaaaaaaaacgaacaatatag

SEQ ID NO: 208907 - DNA, 532 bp, Cannabis indica
atatctatatgtatgattagttttatttaaccctcccaaataattttttgttcatgatttgccccaggttgtatatcttccttccctgccaaacttcgtacttttacaattattaaattaaaatgacatttgatattaaattatgaccactacaacactactctagtaattataatatacatgtaacataaccttaaacaagtttatacatatacatttatagctagtaagaataagtttatagtgtgttaattaatattaatagtagaagaaaaccattgtgggataattaattgattgatgattgggtttattgtacttaggaagggaaggtatgaatgggtttaaaagcttggtgagagcgcttacaaaaaaaaaataataaacaaaaataaataaataaatataagtttggaagaaaaattatctagcttttctatttatgaaaaataaggtaaaaatgataagtgtggttactaaattcttttctatctatctagctgtgatattttgatcttgtgtgaatttttta

SEQ ID NO: 208908 - DNA, 630 bp, Cannabis indica
aaagcatttaatccattgaaacaggttttgaagaaagaggttgaggttggagaatgatttgactcatcttcctctatcttggtacaatcatactctttcttattattatcttcacacataagaggcaaagtcaagcgaaattcatctctttggtcggtctccattgtctccacacacagaaaaaaaaaaaagaaagaccaatttctaaatctctaaatggctaatctaattattacatatcccaaaaaagctgagaattaatatgtacttatatatagagagagagaagtagaactagaaaattgaagatatgaagaaaaagttaaaattgttaagagatgtgtattataaattaaaaagtggtattgaattttcaaagagtgattgtcaaaagtgaatgtcaaacatgtttggcgagaaaagtgtggatggcacccaggtcccatttcccaagctaactttaattttgtctgtactctaacttcccacgtttaataaaacattatttaaagtgaaaattacaatatggacttgccaaaacactcacaacaactcggctaaacactaaactcactccacaacaacagagacactcaatttaacaatagaattacctcatgtttaatatgg

SEQ ID NO: 208909 - DNA, 596 bp, Cannabis indica
atctcctcaacacgaggaggctcgtacaaatggccactcaaagccttgacaccgttcttgcccaaatcactctccgattcatttgaattttccaacagagatggcctagccaccccaagataccattcatgacccccaatcgaacctagacactgggtcactctcgcatggtgtgtaattgacgcaaattccagtggtcttttctcaattttcataatgtataacctgttcgatacgaaatcctaaaattaacaatcatcaattaacattcaattgatttggtagtggataatgcttgaatgaaaaccctaagtatgaattgagatcaaaaccttggaattccatgggtgagatcgagttgagcatctttagagctgaaaagatctccgtcgtcagaggcctcgacgacctgaccgaactcttggaaggtctccggagtggcttcgatcggcttcagcttgatcgtcgctggcttcggtttcgatccgaaacgattttccatttttaccctttgccgtagtaaggagagtttcgcggataagaagacaatggtggaggaaacagaataatcgtccatgagcagaacgtcgtcgttt

SEQ ID NO: 208910 - DNA, 1002 bp, Cannabis indica
ttctacaaagatttgagtagtaccactttcaatagtataggctagtactcaactcaccttttggaacaaaatttgaaaagagaaataatatatttatttcgaattgcttaaggaaacgagtgtaaagaattttctctagtcagatttcaggttaagtcatttgaattagattaattatatgacaaaacaatcattttattccttatatagacacttcataggagattacatgggctagaaaaataaaacaatggaccaaaaataaaatcccagcccaaaactatactttatgactcatgaactttgatttttgccatttttatttcaattaagctaaatgaaataaattgtcttttttaattttaccatttctcatctaattatttaaataccaactttaatttaataattattaaataacaatacaatttaaatatatttattaattagatacacaaagtgtattaattaacaattaaaaacccttatttctcttttcttctcaaatttgccaaaacttagtgaaaattctcaaagaagacatagtttatttttgaattctaattcacttattaaatcaattaattgagtctacaagattctattatctcaaaaaatgtggaaaccatgggcctatgtaaccaaggtccatatataagtagatcgcaaatttaccaagtaaatttcttaacttatttattcctcttgactccactatagattcagaattgcacatttgattacataaaatgtcctatatactaaatatagatacgatatgaattattcattatttcactctaaataattaatgatcctatatatatattttacatcaaacagagataaatttaccattttaccattcgatatattttatccttaaaacacttagctgtttataaatgatatttcagtaaactattataattaccgaaataagaactctttcatttattatctcatttagtcaagctttaaggaaatcattgtttcactttt

SEQ ID NO: 208911 - DNA, 1124 bp, Cannabis indica
atatcttgggctaacattatacaataatttcattttaaaataattaacatctttgcccttaaattatttacactatcaagtcgtgctcctataggacacgacttattaatatataatacccttcaaaatataacttttactataatgtagtcctttcttcacattttatttaattttatggtaaaataagtgaagtggtggatattaattgctaaattgatacaaattaaatacctttcactttttttacattaatgaataatagaataaaatgactttttttatataatcatttttgttgacctcgtttttagtcaacgacactacactgagtcaataaaatagtaataaaaaatacttgataaataataattaacaaaaagcaataaacaacacaatatatatagaggttcgggtcccaaatttagtaatgatctactcctcttacttggtatttctttgaaatatattaagatcacaagaatctggttttgatactctttttgcaagaattacagatagtgttttggcagcataaaagctcttgtgagagtctagaattcggtccaatccatagttagaatgacccactatttatagagttacaaatgagtaactcgcattaattacagaatatacagtaatggttaattgagtcccactattctatgcatccaaaatgatctagtcttcagggattgacagttaatgctaatccggacttggtattcgcaatcctctcggtcggatgctccgaccaggatatagcaattgctcttcgggtataattgaatgactccttttgaccagccaagtacattgattggatatcaatactccacgcaatattttcatatttcccaaatgttgtttaatatttggttgttaggaacttgtcatgtgtcgtccaacctcttttcctatagccatgtgtcatcctatcagtgccttatcactcgagtaatttttgggataagaatttatattttatttttaatttttaatcattaaagtaaaaaaagcaaaatgcatttaatttgtatttagttatcaactatcattactcattttaagataaaattaaataaaatatgatagaatgactatgttactgtaaaaattat

SEQ ID NO: 208912 - DNA, 676 bp, Cannabis indica
tttcaaagaacaaatgggcatcactttattgtggggctaaagaagtcagtataggttggtccatttatgctaataatactattaatttctatagtttttatttatttatttatttattttttggaagggttttcataactattttctaaacttagagaatcttttaattcaatacaccgacaaatgaatatgtaaaatggataaataaatagaaagagttaaaagaaaagactctcactacgaaaaaaaacagttaaatttagtgataatatatttattttttttctaaatatgacttttagtcacaacaaaaagttacttgtgactaaaatatattatttagatacaaattgtcaataatttagttttagtcacaacaagtattgtgactaaaaacatacttagccacaataaattataattttggtaaataatacattaaatcatatattttttagtcacaatataataatgatgatttataatttaatcacaacttcttttacttttactcacaaattttattgtgactaaaaataagattttttgtagtgatactcttatatgattttttattgtatacaattaattaatgaattttcttcttactcttttcatttttctttaaatagaaataataatgtatggtgtactgcaataaaataaataaataaaa

SEQ ID NO: 208913 - DNA, 1284 bp, Cannabis indica
tattgggcttttagggccaaatttgtagcccaaactacgcagtccacgtgtaaaagtgcacaggaaaccctacagagcttctcttggtcggccagacacctgtagggagtaggctggccggcaaaagtgcagttcagaggctggccggccatagggccagccaagagtggtcgaccagcttctgtgaggaagctggtctgtcatttgttatccgtttgaatgtcagggtcctcgtttgtttaggtactaacttggtcttcttatgggtgagttgtactgccacgtgatattgattttatccacgtaagcactactacgtcaggtggacaaaaatcaggataacaaattgcatgcttcgtaagtctattgcttagtaaaaagatttaagtatttagcgttttgctgtaattaattataataatgagatctgagaaaagtgattatctgcggagttaatagtttaattttaaaataaaatataatagaaaattttacattatgacacattaataacaatttatttacttaaatcttgtggtccaatataatataaaatattacatttttattatattgtttggattttaattgttttgcttttaatacagcatgtgctgacatcatcatgtatgttaaaactttgatggcttttatttatttattttttatttttaagtaggaattatataatatagtcttacttgagataattttctctaattgaatctttaaaagataattttggccacaccgtaagtcgtttgggctaaagagtgatattatcacaatttacattttaaggtgattattttgatatgtaagaaacatatattttatcgtcatcataacaatttaaataaactatttagttacttattatagtaattacatatttattgtttacctttctaaaaaaaattattttaattaattaactcaagtttatgtttagaagaaaaaatttattttaattaattaattgactcaagtttattttcataattgattgattggtttatgttatatgtgagacataaatttgtaatttcttttttaatttatgggtggaattcaaattaactagtccaaaaatgtaaattaaaaatgtaaattacttgctgttttgtaaatttcttttcttattggttaatcagaatacatttatatataattcacattttaatgataataaatagctaaaatgtgtattatatattttttatataaaaaattactatgcaatatattaaatagaaccatttattatacatgtaagctttatat

SEQ ID NO: 208914 - DNA, 1181 bp, Cannabis indica
atcattccccactgctcctggtgctggattgtcatcgcatcctcccgagactctatacaacaacgacgatgacattgcccgtctttagaacattaaatattttataccacagttagaacttcacttttttttagtaactattctttttaattatttttatttatttacttattaattttacaattttttattactttactaattttagtactaaaacgaatatttttgtatattagttcgattcaattatttttttataattatcaatgtaatacttatttgtttttttttaattatgtatctttcaaatatagttttacatttataattaatttaattataattattataattaaattattaattttaaaaaaattattttgccagcgcattattgtgcctgtaaaacttacccttgaatcactcgagccaaatttaacattggcgtcaaaggttttgtcggggcaatatgtgcgttggcaaaaccttttgcgccaatcaaggaaaaagtcgcgaagctttgtgcgctggcaaagattttataagctatgaaagcgcggattagagtcgtcgtttgtctcggcgcataagtttttatagcacaaattatcacctgcacaagctattttcaccggggcaattcacctttgtaccggtaaaaacacttttactgaccaagtatcgctgactttttttgtcaacgtaattatgcgctggtaaagatttgtcgacgcatttagtgtatttttgctggcgcaaaaatgtgccggtaatagtacaatttcttatagtgatctccgtatctcgaaggaggcatcaacccctctgacgccattccgtggtctcctagacgaggagcattgctattaggcaccagtggtgcctagcattttctcgacatgtcgcgttacgattggctagcgatactccctaaaagctattatattaaattatatgagacccgatacttagttggaccaataacgatattgacacatagaagggtgctaagcaccactagtgccctttagcatttctccctagaccagtaatcccaaattaattagttgtcactttttgttgttactaacaataacaattcattgttgcatacaagtgtgatggtgctcaagatcatcttcaagatcattagctagttatagcttttctttttttttttt

SEQ ID NO: 208915 - DNA, 363 bp, Cannabis indica
attaccaatgagctattttctttttgctccaattaattatgactaaaatttagttataaaataggggatgagtttatttaatattagtttatttgaaaaaatttataccagtgaaccaaataattaatgtaatctacactaaccttggtgagattatcaacataaaggaggctctaataagctgagttaattaagaagaaaggatggcacgatgttatttttgaaactgttgctatccaagcgattctgaactcagttattatacagtctatttttggttctttagttttctgattgaaaaactttacttgattctcttgctaatttcaaatttgattatatatgctaactcattatcttact

SEQ ID NO: 208916 - DNA, 717 bp, Cannabis indica
tactacaaaaatggcattttgtttcgattttaaagtgacacaaactatttgtgtcagttagagtaaccgacgtaatgaccgcaaatgtaaatagtcaatttttgctttattttagaaccgacaccaaatgtaaaaaagagtttttgcttcagttcataattaataaaattaaaccaccaccaccattttcatacgagaaaacaatttttttacaaaaaactacaacctccaacgacaataataccaactaaaaaaatctatttaaaatccaaaatctattccaataatataaatacaaatatatttaaaaaatcatatcatattatatataaattttatatatacaaattagtataaacatatatataagggagttgatatagatctgaggaggatgggaccaccggagagagaaaccctgtaaaaaatgagagagggagaccgacgtgagagagaagcagccgacgagaagaaagagagagagttacctgcaatcgtcgataacatagcatagtttcgacttttctctctactatatcgtcgttacgctgtgcgactggcagtgtggtctctcctctaacgataggctagggctaatgcatggcttggctttgccgagaaagagagcagagaaagagatgccatggtgagactagtgtagagagagcgagagagagagagaaagagctgcagctgtgtgtgatatttaggttaagt

SEQ ID NO: 208917 - DNA, 1263 bp, Cannabis indica
attttattttattttttttattcagagtgctggtttctatattaattctgatgcttgtgatgtatgaatgaggtcttctatcatcatcagcgatatcatcttggggattctgaattgttatgttttcataatataaggtatccatttgttagtattgtttttcttttaattttgcagaggaactggcaaagcttggaataactgatggtgtgagaggtaagatttgcattcttttaatgattaaaatgttacgagtatgcggctcaccaatcctaatagatcatatttattttaactcaacagaggtgaatttgcaacactccgccatttggatggcgggtgtatatttgatgttgataatgcaattcctggaaaacaaagtggttgtggatcttactcggtctgagtttgttgaggcacaagaggtagatgctatgccctaattagtgttatttttatgctctttcccagtttgtatgtttggttgttatgtaattgtttgaactagaaataattaattgaactatatatgttgctatgcaactttattcttgcttgatataccaccctgttatgaattaaacccattgtttctgataggcactgattcaaatgaggaactggttcatgcgctttccaacaattttacaaacttgtgagagcataattgagactctcagggggcaatatgctcattctgttgggtgtcatagcgaagctgctttccattatatcgaagcttcaaaggtaattgttctacagttttccagtcttggctttaaagagatgtcaaccgaccattatccaatcttcatactctgattaggcaaagggattcttttatgatttccagtgatttcgatttgcttcttgatgaatggaacattttcttcaagtactaagaatcactggctattgtaacttcgtcaaggaatctactctaaatcttttttttctttctttctttatattcagctaacacagagcaaatcaatgcaagccatttgccaagtttatgcggctgtctcttacatctgcattggtgatgcagaatcttcatcacaggtgaagtgtttcactgtgacacccatatgatttcttcttttagctgttataattttgtttcaaagctaaaaaaagaaaatatatccttatccctgaaaacaaggttttgtgcaggcactagatctgattggaccagtttacagaatgatggattccttgttggagttcgagtgaaaaccagtgtctttttgcatatgg

SEQ ID NO: 208918 - DNA, 712 bp, Cannabis indica
cttaataaaataaatggagtgtgtcctagaccacccagctatatcaccctcagtgagtacacacataagcctccaaggtctcactcgccaccaactttctaactttcacaacctgaatttgcgcatggtaagtttgataagggtgatatactaaactcagtaaggaaatacttgtcaagtagtcacctaaaataaaaaatatataaccaaaacatagatgcacatatctagataaatagaaatacataaacttaatttttaacattagtaactattaactagtttctcagctaagtcacataataatgattacgttcgagtctgacttgtgcaaataaatctgaactattagactaaatggcggagggttggcttcactaaaattgtacccactactaaatgaccttctatctaccatatagacccaacagtcacgtattcaactagtatcttctcgatcaaactatgtgtcataaactatatttaatacttaatttaaataatgctaaactacgtactatacattatttaaatatcataacatattataatcacaactttgtttaaataacgtgaatctattgtagtttgaacaatgtgaatctattgtgccgtatattattcaaaccacatacacatatttgttgtttaaataatacgaattcactgtattgtccattattcaaataacataataaaataataagcaaat

SEQ ID NO: 208919 - DNA, 504 bp, Cannabis indica
ggctaagagcaatattctttctcagctatttaaatctcattcctagacagaaaaagctatcatatatagcaaagcatctatatgtctatctcttttttctgggtcaggatatatgtctttgtctctacacacttttacctatatacaaaacatgtactcgtgtgtgttcaatatttaatagttatacatgagtggtgataactatatcaacatctcattgatgttagcaaggctccattaaaagtcacagaagaccaaaaaccatgaccccataaatctttgttaaaaaacaaaaataaaaaagaaaccctgaaaaatttgaaaataaaattcaaataaattcaaacatacctaacaatgttaactaacaatcataataaaaaaaaataaaaaaaaaaacaaacacactcatacacatcacaaaagaaccctaaaaccaagcacccaaaaacgaaaaattaagattttagtaagcaaaaacagattcaatactctctgaagtgt

SEQ ID NO: 208920 - DNA, 1615 bp, Cannabis indica
attatatatttagaattaatttttttaaatattatttattatattaaaatattaataaattaattattttttggttatattataatactaatgttaaaatgattgcacgaagaaggactatatttatatatattagctaagttaataaaataaaatatacaataagaaaaattaaaaaaaaaaaaaaaagtaacaaacactactaaaagtacaaataaatatttttctttgaaaaaaaaacataaagtacaaataaatctttaaaatataaaaatgaatatacttgcatatttttgcttatagtgggctgcttttaaccaaataaatgcagatagttcaatgaggttttcaaagaatatgacaaatttatataagtagcattatatataatttcatgtgggtcactctattcttatcaagtaaatgtgtatataaaagtatatatataagacatatatacatatgataagataacccaagataaccatatataaattccctctcaacatttctttgccgtgtggaaaaactcctcaatgattgagtatataatataatgtttagtagacgcttatctattttgtgtaataaaatatttgataaaattttagttttggcattaaaaattagtttagaagccactagattaacggtgagggagggatgagaaaaagtgagaggtcatggattcgaactcaggacctttaactgttaagctaatgtatgattgtaaaatattattatgttacaaaaaatttacaagtgataattctaaatagtgcattatcataaaaaaaaattaaaataaaaaactctcttaaatgccgaaatagatagaatctacctaaatattaatttataggtagtgtactataaacttaccgtataatatatatacacataaattaatgtttagtgcaacaaaatatttaataaactttatttttggcattgtgaactaatttttaaaaaatttacaagtgattttaaataacgtacacgctcataaaaaaaattaaattaaaaaattctcctataaatattgaaacaaataaggagtttacctaacatccctttataggtagtgtattataaacttaccttataatatatatgtggtgaattaacacttatcaaaaatcaatataaaacaagaactaaaggaatagaatggtagaatcaatcaagaacataaactaaataaatgcagaataaactaaatgaaatagagacaagatctagatggttcatcattctttttgtggtgactaatccccgtaaagaattgtcatttggccaagctttattcaatcttcaataatcgatgaatacagaagagaatacaagagttaagttcatcaacatgtcgctgtgtcttgcaccttacaaatcaactcactttgagagagatatgatcaaacacgcatatcttctttaacaatcctcctcactcattacaaacgtaacaatatcatcttataggtcaactcaatatgaggaggacccgagttggtaaactgaaataactaaatcgagagcagactagacagacctgcaacatctaacaggtcaatgagactagcaatagcagtgtataccaagttactaaaatctc

SEQ ID NO: 208921 - DNA, 517 bp, Cannabis indica
ttcaaggagaatcagccagtttggaattggctttggcattctgatcttcaccctagaattgtagttttactttggcgagttttgaacaatgctattctggttaaggaaagattaccatttcttgtagacaaggagtgtgctctgtgtagattccagaaggaaaattgcttacatctcttcagagattgtagtttggcaagatctatctggtttctaggaaaaattcctcttagaatatagagaaaattccaggggacagcatgctggaatttgtgaagaacttggttcaggaagtgactgcggccggaatggagaggaaggaaattctaacttatttgggttgcattgtggatcaaatttggatgataaggaacaatcatagtcgtcttggcgatttggtgaagatagatgaaattttaaggagagtgaggaaggcttttcatgaatactcgagtttctcaaatggtgctaatgcagaagtaacttgctgccgtgctgatagattactgagtgctga

SEQ ID NO: 208922 - DNA, 710 bp, Cannabis indica
gaatgaagataataaaaatcactatagaatcaaactatgaatgcttttcagttacgatgttagaatctttacagagctactgatcttgtcttttcatggtgaatttgagcttgatgaactaagaattatttcgaagaaaactacttacaaaagtctaatttagtaggagctcgacatacaaattccttttaacaaactggtaatgtgtgtatatatatttttatggattatatattagagtgtgataaaaaaatacattttaaatgaaaatgtggtttttgttttttttaacttaaacagataactagattactatatttatttaaaataagttgctttttaaataaataaataaataattttaaatatttttttatgatattttttgttgtataatattttttcatattcatatatagatataggtattgtgtagtagctaagtagggacaaaaatggaaaggcagaaaaatattttcttgaccactcacaatatttggtgggtcgtccaaataaaataaaatatttacttttctatatataaacaaataaatcaagacaaaatgttatgataaactttttgagatgctgacatattaatttcttatacaatatgtactagatctgacagtaattaatccataaatttggatttttaaaatccacaaaaatgattttattatctataaaagaaaataatatatatatat

SEQ ID NO: 208923 - DNA, 866 bp, Cannabis indica
tagtaatacacaagtacttgtccgatatgataagtcatatttgatactttataaagtaatcgatctcattgttgtctaataagacaaccctgatatccaggtccggccctcagttgaaataggccataggcaaaaaaaataaaaattgagcccttactataaagataaatggtatttttaaaaattattaaaaaaatgtatattttttaaaagatattctttttatttgggcccctaaaatgagctggccctaggcgtgggcctagcccgcctatgcctaagattggctatgctgatacctaatatgatattcaaatataacaggtgttgtctcattagacaaacctaatacctatcatggcatctgaaatcactgtcgttacctaatgaaataactgacaagtaagaaatctaacaacggtttcaatttatagccatgacttttctcacataacggtaatgatcgtatcttataaacgataataatcgtatcccagtatgacatgatatgtagtacaattgtacttttcttaccacctttaatccaaattcatgcacgccagacaacctgagtagagaaacatcagacaatctcagccctatgtcacaaaagtggtaaatcaatcaacaacttaacctaacttgcactaggtcttaaatttgtaacccaaaattttcttatcaataaatagcatggtaaaccataaatgttgaaaaaaaaaataacaaaaatgaggttcccgagcatcacccaaaatggtagactgtgtggaaaaatagcaagtcatttttctaggcttcttaccaggaaaacggtagaccgtttggtaaaaacggtaagctgttttcctggatttcctgctagg

SEQ ID NO: 208924 - DNA, 776 bp, Cannabis indica
tcaacaaataaaataaatttaattttaccataaatacatactattagaatattttttcataaaaaaaactctttattttttatttaaatatttcttaatataaataagtcataaacacatgatattgatagcatattaaaattaattgggcttttcgcatccagaattacggatctattccgatagactctttaccggagaacattttgtgtaatgaccacgaagtctaatttgtttcaatatatatctacgcttatttcaaaaaaaaaaaaaaaaaaacagcatattaaaattactatttatttttattaaaaatgtaaattaaattaaataatatgttgataatgttaaaaatcctatttattggttgaaataaatcattttcaaacttgtacattaaaacttgtactttccaacaataacgacccattaaacaagcaaaaagaaactataaacaactttttttttctttcgaaaattgaaactataataatttacactttagttaataatttttttttctttcgaaattgaaactataataattttacgttttagttaataaatcagtccataaaaagcaacaaaatctaatataatagctatgtatcattttcttattcgaaattgaaaaaacaagttttgcattttagttattaaatcagtccacaaaaagcaacaaaatctaatcgctatatcatatcacaaaacgtagatgtttcctcttactaaaaggttctcctttaaacaaaaaaaaatatagatagttttttttt

SEQ ID NO: 208925 - DNA, 1028 bp, Cannabis indica
aaacttttctttttggtttggtttgtaataagaccttctaggcggaaacttcagatgccaagttcttaagtgggggtttgcagcaggcaaactagcagttgaggaggagaattcccaccattctcgcttcatacggagcatgaaggttgttcacgatctatacacaaagaccgtggggcggatctctggtgcgggctcttccttccagatcgggcggtatctaaccttaaacctctagcaggcctcccaaattaatgttgttttttatttttcttcttcttctttttttaggtatatcgtccctttaaccatacttctttcaccattgacacaattaaaattctccctggccgcggggggctataatagtaaatagggtccttttttgatgttctttaattagagatttgttgtggtagacttttaggagctgattgtattatcgaagcacctggttccaacggccagtgttttaaccttttcccattagtcttaattatctcttgatcgattcaggaacccctttttaacttaactttttctttcctgggaccgtgacaatttttcccgtcacatgactttcttctcgaggaggccactcgctcaaagttaaccaagagatggttcccttctatgaaaggggagccttcgcttctttgttcatcttcttcaggttttagttcttggacgaggttgagctccgggagtgatgtctgcgaacaccttagacttaggcattttccttaccttggtccttgccatccttccatttatccaattatgcaacctgatgggctaaacctttgtgaagtttgcagagatgcgtaagaagggattcgggcgtatttttctatttttttttcaataattttggctgaatacgtatcttatctctgaattcatgcttggatttagcctttgaaagaagaattgaagcgcacttctctgagggggacttagtcgaaaatgtttcctgtttttggatgcatgtgcgtgttaaggctagtcaactttggacataaggagtt

SEQ ID NO: 208926 - DNA, 1030 bp, Cannabis indica
ctatataataatatttatttttaacaaaaaaaataaaaaaaaaaaaaaaaaaaagaaagcaaagctttgcttaggtgaggaagaaaaaaaacttcataacctagatctaatacaactctaaaactaagttacagcttaccttacataccaaggatgtggaaaatttcacattggtctgtacactacagtgaaaaattggtcagtcaaattggcaaaacttatggcaatagaatttacgacaccaattgcgaagaaatctgtcttattgtgttgtgcaatcaagaagcgggcttcttgctgtttctcttgacagctttggcaatagcattagaaatctctcttttccgctttatgttgttattgttgatgttgatgtcgttgtaattgttgttattgttagcattgcccatgctgttgttgttgccacccagacttgctgagcaggaactcttgccttgaatttctagagcatcctttacaaaaaactttagcctccacaaagtggattcagtctgcaaacggaataaaataggcattaaccattttgatatcagcatgatgcattggacacaatataaccaaaatgggcaattaaatgtgaaatgaaaatgaccacctgagcatcaatgtcaaggtccacctcttcagcagtagcttggaacccaggattattttgagcaacaatctccagtgccttgctgagatcttcaggagacaatttggtgagagatgccccgagctttcttttctcttctactgaaatttttctacatccatggtttaagataattagattcataaccatcaataatatgtgcaaacaaactcgtgtattttcagttatacaagcaatgttcccgacatcctgatggtaaagttaccaggaattgggtattatacacacaagagtgtgcagaatgcaagggcacactgcaaaatgaatatccgaagatgagacatactactataagccaccatcatcatgttaaaataaatgttcatagtaggtggtactataagccatacaaac

SEQ ID NO: 208927 - DNA, 902 bp, Cannabis indica
gaagcctctatgagagaaaattcaatagataatgcgatgagaaacagggtgagtgggcggcctggggagattggaaaaattgacaacttctctttcccgattggagagagctcgtgagatatcaggatgaaaagaatccataattgcagatggagtgagatgactgtaactgatgctgaagaagaaccttgaagaagaagaagaagaggttataatttgaaaaaagaagagcgggagtggttgagatacaagggaggaggttataattcaaaatctgggaggaaattggaaaagaaacagttaaaagaaaataacagaaacaactccacagagcaaattttaagggcagacaatgctcacataaattttagaagttttttgtacatgggagacttggagttataaaatatataccaaatttattatttattgatattttgtgttaaatttatcataatatttatattttcataaaaaaaggtaaatgctattttaaaccttgtgttttgcaaaagttattaattggaccctctgttttgttacatgacaaaatggaccttatattttccaaaatagtaaaaaatagaacctgaaataaattttcaacaattttaatttttaatataaccaactttaagacaatttctaatacgaacagatacagaaaatataattagttttgtcataacatttctagatcaggttatcattaagttttattttgacaaaaaattagttcacggtcctatttatataattttggaaaacacagaatcaattttgtcatttaacaaaatagaatgtccaattggtaatttttacaaaatacagggtccaaaatagtatttatccttaaaaaaaattattttaacttttgagttttctctctttactcaattact

SEQ ID NO: 208928 - DNA, 1405 bp, Cannabis indica
taccaaaaaccctcaaaattcattcacattatcacatatacactatttatatagaaatatcctagagcagttggggacttagtcattggtaattgtacctttatacagagccgtaacctaaaaggtttattactgaaccattaatggacgaaaagatgtcttacaatatacttaataatacaaagaaaagaagaaaataaataaataataattagaaaaggacaaaaacaaatacgtcctttttattttttttatgtgttgagagacattgttgattagagctgtcaaagagtattactataattatatattcctcaaccattggctactttttaatcccattactttatgctataaccatacaacgatgtactacatatctagtagaacttactgtatcctatatgcaaagtggaccatataaaattcataagtccaccatgaaaatactcaagaaattaacctttttttatttatttattttgggattttgaggaaaagaaaaaaaaacttgtttttttatttatattgtttttttagaggagataaaataataagttttgtaccccaaagtctaccacgacatagtggcatcttttccccacaaaagaagatttgtacagattccatggacagcagacaataccctttttcacacgttagaacaaagaactaaacttaacaattttagatcttctagatgaactcctaaaatctctcaaatatccctgccatgccagctttaaagttttattaaaattagaaaaaaaaaaaaaaaaagggaaaaagaaaaccataaaagctgtactagatagtgacaaatttgtcaatgccattggtcatgtaaatatatcaacagataatgatgatgctttatttattatatcctttaacttaggtacaaaaccattttatttctttctctttccttttgtctaaacatggaccaagaaaaaaaaaatacaagaaaagacccaaataatatttatatattcttttctaatacgcaaaaaataaaacttcattaaaaataatacattacatatataatattatctatgcaaaaataattggatcagttagttgggtagttttgaagcttttgataggctgtgacttctttaatttctcttgtagattgccattttaagatacatacttgttggttgcaaaaataaaaaccatattaaatattagaaggaaaattttgcagagaataaacgataataaatatgtttatgtatattgaacattagagaagtcaaatgttttaaagcatatgttattaaagtcacgtgagattttttatgtaatgcattaagtcttgaatataaaacacgtacacaaatatatatgttgaagctaccaagtatatcttcttagctatatatataatttgtattcg

SEQ ID NO: 208929 - DNA, 662 bp, Cannabis indica
aagaaaaagttaaaaaaaaaaatcaacaagtgtatttagtaaaataatcgaacttcttggtgtggaagtctcaggttgtctctatcgtccttggacatgatttagataaaatcttgtttattgaatcacacctccttctaagcttgttaatggcgatcccaaccttatgtttctccgctccttctaagcttgttaatggcgatcccaatcttatgtttctctggtggctgcgcaaagaccaacttctctcatagcttcgttcattgatgatcgaaggtgttgttggtacaattattaatttattctagctcttattttgtctagaaagctttggagtacaagttcttgagtcaatcgaaagctcgattgttacagctcaaaggacaactttcaactcttcaaaaatgtactcttagtatctctaattatgttgataaggttaaatctttgagtgattctttagctgttgctggccatgccgtatctgattttgatttaattcttcatcttcttagtggtcttggccctaagttcgatcctgtagtgtctaggataacatctcgaagtgattctctgtctcttgaagaagtatatgctcttctcatgtcacatgagattcgtcttgaatgtcacacgtctgttatggagctctctacaaagat

SEQ ID NO: 208930 - DNA, 1278 bp, Cannabis indica
cataaaaaaaaatattattgtgccaccacaacaagttgtttttcttaaattaagcaacaatatttattcttatataaaatgaaattttattatagtgaaaaataacactacatgcaacctccgattcaataagttaggttgaaaaggaatattgtagtgttatttatattagaaatattattatagtcaagtcatttatcaatgatattacctcactcttggtgcctttgagcttttctaaggctgtaattaaaaaaaaaacttacttaaagatttttttttgttttaattcctttaagaaaaatgaagagatttttttaaggagttttttttcatttttacactttaaaatagtttgttttttgcatttttacggaattttacataaaaactcttattgcaactagcgctgtaacctaaattgtaacacaaaatcactttaaacacccaaaccgtaaatttgaaaaaaaagttaaaataaaaatagtatatggagtaattctattttttttttaattataactcattttttattggtaatatttaattcattttttcccactttctatcactttatttctcttttatttgcttaaataataataaaaaaaaaagataaaaaatagctagggagcatatttctattttttttttcaaaggcaccataatttcctctaatttttattttttcttctttttttggtcttgttttttatatatttttttttcaagtggtaagtggtaagtgtgttaggtatgttttataaactagtataaatatgatggtgagggactcaccgtgctctattagggactgttccaaaagcacataataacgcctaagccgatccaaatcgtatgcatcatcatgcatcctcaaaacatgatgttggtcatcactcatgtattctgtattagtgtttacaaaaagtaagaatgagagcagtcttttgaatacaagtcacagggtttcctacaaataaaaaaaaatactaatcacaaatcattgcaaatttttttattcggttttattctgctattttttttaacaaaaaacttacttatgtggccatgagttaacaattattaaaaatctaatttattaacattaaaatattaactctagctaggtatataaagattcttataatcgattagactatttgtctgaattaattctttaattgagtagattaatgttatattagtgttacttcaataaattatttgaaaaatagagcataatataattagagagatatttgtaacgatttttat

SEQ ID NO: 208931 - DNA, 811 bp, Cannabis indica
attttttttatctgttttgatatctaatagagttttctattccaaagtatgatggtgactatgaatttttttaaaaaaaattaaattgtttgtggtaccgaaaataagatttaattattttattgcacgttactcatttttttagacgcgtagttagcaactctttgtcaactttattttctgcactataaatatttttttaaaaatttacaggtaattttaaataagtacaacgtacacaaatatcaaaaaatactgaatgaaaagctcttattgttgccaaaacaaatagagtacaacataatgactttttatgtgaaaaaaattcctaaatcaattatatagtaggtgaacattatttttaaaggattgctattaggcaccagtggtacccaacaccttttataggtgttaccttatgattggttagtgatatttcctaaaacttattttcctaagttctataggacccactatttaattacaataatagtagtatgacactaaagaaggtgctaggcaccaatagtaccctttaacaattatcttatttttgtcttaattaattataagaccatttcacaatgtagaaaaattataaaatattttttggaaatccaaaatatgtaggatttgtttggcattgtatttcatttatttttaaaaatgcacaaaaaaaataaaatctaaaaataaaatacgcgtttagttaatattttctaaatacaattttcattttttaaaacaaaaaaaaaaaaaaccacttcaatatatactttgagacaccgatgtgagataaattaaagaaaaa

SEQ ID NO: 208932 - DNA, 614 bp, Cannabis indica
aaaaaagccttgttccagatgcatccagacaagtccccggggccagatggtatgagcccgggattttatcaaaaattctgggatgttttgcgccatgacgtggttcaactagtaaaagatttcttccaaaatgcaacctttccagatcagctacctgctaccaatattgtccttgtgcctaagaagaaacaacccacttccatgactgaaatccgaccaatctctttgtgtaatgttctgtacaaagtcatctctaaggtacttgccaatagaattaagtcggttcttaatcatgttatttctgaaacccaaagtgcattcatccctaaccgattgattactgacaacattatggtggcttttgagattatgcactacatgaagagaaaaactgcaggaagaaatggggttatggcactcaaacttgacatgagcaaagcgtacgatagagtggaatggggttatttgcaagctgtccttatcaagatgggattcgataatcacacaacctccctcctaatgagctgtgttacctcggctacataccagattgctcatgctggcagactctttggctctattacaccgggtagagggttacgtcagggagaccc

SEQ ID NO: 208933 - DNA, 933 bp, Cannabis indica
tttttttttttttggattttagaaaagagtttctcctacaaagtattcttgagagcaacctcattttttcttagtaaattgcaaataaaataattaatattttcaaaatggtacacttactcaatgtttgcaaaatattttacttttgagtaatttacagcataatttataaaatattatccacgtggcaacacttgattagttcacgtcattaaatttttatttttttaaaaaaattaatttaaatatactaataaaaaaataacgtgtggataataatttaacatttaacaatcaggtacctacggagttttaaaaatataatttaagtattattaccgctaaaaattaaacttaggtatttaataactgagagttaaacttaggtatttatgccgcaaattactctttactttttatatccattatattccttttatgtttgtagtaaatattctcaatatttttatacttaatctttaaaaataatattaaatagtattagtgactaaattctcacttttcagatacagtagaatttttatctaagaatacacttgggatcaagtaaattatattctaattcggaggttataactaaatagaattacactagaaaaaaaaaaaactcaaaacaccaaaaaatatcaatgtaataacaatatcaataaataatctttaatactatattataataaaattatttttgtgtaaatataatatttatatacaatttgaaataaaattattaattctacataaataaatttataaaatatatgtatatattttattaaaatgtaattattcttatattaatatagaaattagaaaatgcataactaattacaatttaaatgttcctctgaagcacattctattgtttttaacgatttgattagtttataatgataccgatttgagtcaaaaaaa

SEQ ID NO: 208934 - DNA, 843 bp, Cannabis indica
gtccttcctaccaaatttaccattaacattttattaaaataattacctctttttttttctttttcaaaatctaaatattttcaaaaaaaaaaaagaaaaatcaaaatataacctaattcttattcattcactccaaattaaatttgccataaatcgtcaaaaaagtgcctaaaagtaacatcattattcattacttgttaatcaatatgatatgatattatatgtgacaaaacttcccttcaaaattaatctctccttaagtcattgcaacaaaatcattgaccaattcttctaccataaccaacaatcttctcttttttactttatcatttccttccaatttccatgttattattttgttttctataattactatgacttaaatttcacactttttctcaaattagttttttcttttttcttttgatactattgttaatctccttaaaagggttgctccaacctcataaaaatattaaaaagtatcaatggtattaatattcttcaatcatgactgacataagcgatttgagcccgtatttagaattcacaatttttcggaagcccaaaataaaagataaaatgtttcattagacttttatttaaataaaattaagtgtattgattgagtgtatgtcacattacacaatagtgtgagttcaagcctcatgaccaatatatcatatcgatattgatataattaaggatcgagtttcatataatttttataaaatatcgctaaacaattacaagacgctaccatgtggtactaactattattggtgccttataacaatatttttagaagtgttgtttcttgttaactcatttcattagggtgac

SEQ ID NO: 208935 - DNA, 974 bp, Cannabis indica
agataagaagatatatataaatactagtataaatatatatttcctaatatataatctgcatcgtcttccttcaacacacatatgtaaatataaatattaagtatgtatgaataattccctactaactttatgaataggttcatgagctgtgttatattaattataattatttatatgtatctatatattaaactgctttaattagtgtctatttcatcatctatatgtgtgtcacatgcaaatgttattttaaaatttgacatgcatattgttacattattgggctattcatggaaagaaaaatgggcgaaaagctggcttaaatctattggctaatgcctgttccctaaaatcgtatcacataatttttaaaaaattaatatttaggtaaattgaattcatgctaaagaaattcaaggaaggaagacactagctaatcattaataatttctaataattaatttagataatgagtatagagagaaaaataaataaataaataaataaataaaaggcaaagaagtggctgtgtcacatgccgaaattggactgaattaagatataactattaactacatgatgcagcttgtgagtggagatacatgttctgccaattttaatattgatcaaatatattaataattaggggtcttttcaatattatacctaaaattaattttatttataaaaatacctttaagaaaattatttgcacaaataccgattgccacatcagcatatataccgaaatataaaataattaccgaaaattgaaaaaaaatcaaaaaaatctcgcttccagaaatttcagtgttttgcaaattttaaaaaaaagcaacattttagttgcttttgatgtaaataatatatcaattagttactttttattagaaaaaaattaattcaagataatttttttctcatacacatttggttgcttattttgatcagacaactttaaaattaatatatat

SEQ ID NO: 208936 - DNA, 1302 bp, Cannabis indica
ttgttgttttgatgttatttaaatgttattttcatgttacttttatgtagtttttttattgtttttatgaaaaacaatacaaaaaaaaaaaaaaaaaaaaaaagtaaaaaatgtagtttttttagaaaaaaatagtgagcgtacaggaggactccaaccgcaagtgttatcacaaatgtatccgaattaaaacgatgaatgcgttgggccggttgggcttcaccaaggacaaattctaaagagctagagttgttaaatattattatgatgttaaatatattggaaaactttataatatatccccttaaaacggatacaccgatatatctttatctattttagtattcgaaataattttttagccaaatttttttttcatggtgatatagattatagttatttaagacatcttgcaaaattttaagaaattcgaaaaagtttaatatgccaaaaattacgttcaagcagtatgttgcacacgtgactattttatttatacgcgtgtaaaatagactgtttgaacattgttttctacgttgtaaattattccgaattttttaaaattttgtaggatatcttaaatagctataacgtacatgaatatgaaaaaaaaaattagactatttttttttctgaatgtcgaaacaagtaaagggtgcatcagtacatgtcttttaaggaggtgcattatagaatcacccatatatcatttttcttttattttaccgcagacttttacattacaccatacattaaaataggaacaaaatattatttaaataatattaatttgttgtttgaaaaataaatagtgcttctctacatataaaggggcattgtaacaatctttaaaacttgagctaaaatagctcatctgatggagctccattttaattatttttttcactttctcttctctattttgaagaaaagagcattataactcatcttatataggtactctaaaacacgatcaagttctaaccactactacaaaaaaacttattcttattattttaaattcgattttttttttagtaaccgttcgctaataaagttaagtgaatgttaaaactgtcgggaatactccactattcctaacagttagtcacaattttaaaattcaaaaacgaagttaaaacggtattgccgacggtttaaaaccgtcaggtatactattgccgacagctttaaaccgtacaacaataataagtataacacggcggttttaaaccgctgtggatagcatgctaaacatataaaaaccaaaaaaaaaaaaaaaacttaaaaattttaagttct

SEQ ID NO: 208937 - DNA, 522 bp, Cannabis indica
agttatgtgtctaaggggaagggggaaattaaaattatgggaaaaatcaattttattttcttagtttcttctcttaaaatagtgaaacagagagcaagaggggatggtttggatcaggatataatattttggggttccttttgttgaggagaaggaggtggtgagtgatgttgcctcagacgtggttgcggataagattggtgttggttctcttgggtcacccgttgggatgaacaacgatgttggagtgatttctattgacttggcggtgcctgtggcacagggccacctctaattatgaatgtgttagcgtgaaacgtctaaggcgtgggtaatgagaggaagttccgagcattctgcgccaatatttgagaggtaaacccgaacattttatttctttcttagactattggaaatgttgctcaaatggaatctttacgggttcatttaggctttgcgagtaaacttgtggttgagaaaggttcgagaaagtgatgtctttgtctcttttggttggataat

SEQ ID NO: 208938 - DNA, 1425 bp, Cannabis indica
cttaattcctctcctcattccagcagcggtatctttgctaaagaatatagatgttttgagtttattgaccttcttcccaaaccactcacaaaacttctcaagacaattccaaaaacatttagcttcgtttaggttggctcgaccaaccaggatgaggtcatctgcgaagaaaacatgggatagcaccgggcccccctacttagcttgataccctgaataatccccttcccaagagcttcttccaaaagtctagaaaacactttcgctgcacaaatgaagaggtagggagacaactagtcaccctagcaaagaccacaagaaggcatgatcttgccgactggaccaccattaaggcatatgttgagggaggaggtggatatgcactgagaaacccaactacagaacttttgagggaaaccgaagcaaccaagaacatgatcaataaatttccaactcagcctatcataagctttaacaaggtctatcttgatcgcatagaaaccctctttacctttcttcctattgaaggaatggatgatttcttgcaccataacattattatcttgaatattccttccaggaacgaacgcggcctgagtagggcaaataagagagggaaggataggtttaattctatttgcaatgatttttgatatgaccttatacaacacattgcaaagagagatgggcctaaattgatttggtctcttcaggttctgtacttttggaataagcacaacattcgtagaatttacacccttatgcatactacctttgacaaaaaaatcagcggcagcttcacaaaaatcatccccaacagactcccagtagtgtttgaagaaaagaacggacattccatcaggtcctggggctttatgattactcatagcaaacagagtacttctgatctcttcacgggaaggacaacaaacgacctcgacctggttcttaggagaaatcatctctctgaataaatgaccacaatccaaaggccgatcataatcagatccagaaaaaatactttcgaaaaattccaagaattcctgaccaattagctcccgatcattaatccagacattatttttattcaaaatgcactcaatggcatttctccttcctcttatagcagtaggaagaaagaagaatttggaacatttatcaccatccttaagccacgaaattctttccctttgtttccataaattaagcttttctggctctagcttcattcaggttacgtctaatgtcgttctccaaattccaatctctggttccagcaaacaattgttgtaatctatccagtttctgttccagatctttaatgacccaatcaatttttccaaacggggttctattccaatgaagaagagctacccgagtagctcctatctttttaaatacgcgagcaggggcccaaggatggtt

SEQ ID NO: 208939 - DNA, 629 bp, Cannabis indica
tttttttttttttttaatattgggaggtgaaaattaatgtatgtctatgaccacataatttaatgcttgttcatttagtttttatgaatttatactatataagctaatttttatttatttaatttctacatgtaatatttataaatacgtaatatataattatttttggctaatatatattttatttttattttgtgcgtctaccccatcataactgcgatgctaataggtggtaggtacaaaaataaaataaggttaaatgaaacataatatgaaatttatgatggatcattatttttctttcgaataattgaattaattaatgaataaatttattcaaattattataaaaaataaatgcaaagacaatgaatgaaatcatagggcggcgactgattagatttgctataatctcattatatatgttatatgtataattaattttaaattaaatttaattaatatatgtattcaaatgatccttaccaaaaaaaaaattctatgaaaaaataataactaccctgtttaacttgagattttaaaatttaagtaaaaaactatagtagtatagttttaatcttttctaacttcaactgacatttttaagaaaagaaaaaagtcaaaaaggt

SEQ ID NO: 208940 - DNA, 1155 bp, Cannabis indica
ctacattttagaaccaaatattgaacaacagtactcgttcgagaaaaagaatgaaaaaataataatgagattttcaatgagaatgatgttcagtttcagtgtccattggaccattgtctgcattagagttgtttggaatccaaaacgtaagaacattggatgctgcagctgcgaacatgactctgcgaggcgcccactttaagcaagatgccactccaatgtgactgttccagtttgccacctacacatatccaatccatgaaattacaactttgattacacaaaaaacttatactatacagtacatcatcatacttagttgttgtatttggggtgtgaatacaataggagagctcagagtgatggagatagatagatatatggtacctcatttctgctgttgacactccatgcatgcaaagttccatctcctgagccttcaacgaaagaaagatcaaacttagcatagaaatgatatcccaatgatacatggaaagaagtttctctataccactgctacaatagtacatactgtttatatcataggataggataatagcataagggagtaaacatggatacctgacactatatattgcccatccggagtaaatgttgcctctatatttttattaggagagggctctaaactgtacccacaacgctgcataaaccgaaattcaagttattaaaatcataaccgcaatagaacgagtctgtgtaattacagaatgaactgctttcttttttcttcttaaatttttctctgtgagacacccagttggacattttaacaaatatgtgcacacagaaacttaccttctctcctccatacgcatcaagaacatagatgttgttgtctgttgtcgtcaagagcattgatttgccatcattactaaatttaatatcaaagacctcagctgtatctccaccaactaggaatgtatcaaagggaccctaaagatggaaattctttgttagatccatgagatgaaagataaaaaactgaccaagagaaagctacatagctatcaaccttgtcataagaacgtgaatcaaacaattttatagcaccccttccattgccacggcaaacaccagaccttgttggtcgtaagcaaccgtcggtctaccacgcagccgtaagattccctg

SEQ ID NO: 208941 - DNA, 1587 bp, Cannabis indica
ttggtttcacttaactcccaaaatccacatttaggcggtaaaatctccaatactcgtattctgttagcaatttaatattttcgtccatgttaggtgttaagtgtcatgttaaactgaacacagtgtacacgtgacacaattttattttattatggttgcagtaacccacaaatccgagtgtaaaagtagtaaaggttcattataagttgtggaagaaaagggaaaaggtaatttatggtgtttgccaagacaaaagctatacactcatcaaaaattattttattaaaaaattggacattacaagaagatagagccaactttataattctagttgtaagttggccaagcctactgtgccacaaagaaaaactaaatttggtacagacactaaatgattaaggcagtgaggacttgaagactggtgactcaactcagaaggcaacaaatgagtgacactggaggaggagagatgactaaggtagaatcaaatttgtaaaagtccttgtcaagcttcccaaatattgtggtattttgagtgtcttgacccttgacataataagaaaatgagtgaaatttaaagaagacattgatgtctttggaaaattgggagatgcttaatgaattttggttatggtagaaacatataaccgattattaagggtgagatgttgagagataaaatgagaaaggatatatgagttaccaatgtgtaggagttgtgggcaccaagattggaccccttgttagatgatgagttgctccaaattctaggtaccaattatcatatgagatcaattcaggtgaagcatgcaagcttgcatttcaataagatgagctattgtaggaaactggttaacagattcaggacatgtaaaagatctttcaaacatatagaaacattgtttggttgtatgacccatcttatgatagaatttatattagaattgacattgtggcttttggctccaagaattaggttgtcctcttccaaagctcggcaaaccagcgcgagctgtagaattgggattgttgtgattgacatgtctagaggtaagaccaccttgatgtatggcattcatcatatgaccaacaccatttgagcaaaattaaggaccacgagaagatccataaggtatccataaactagaaggaaagggattgtgagtgaaaaaattaggtttgaagggtttaatatgagagatatttgcttcacttttgtttatatctagagacttgacattcttgtcaattcaaacacactgggccattagaagtgcttccatctctgcaactatctagttatcatttcttgtggtgcagaggtgacaaagacatcatactagggagcaagaacactaaagattgcctcaatatgatcttgaggtgtcttattgtgaccgatggtagcaagaaaatcaacaattaattcccttaatcttcagcaggtagtcattaagagaaccactcatcttcatgttcataaagttgagtctagtaaagacaaatattgatagtgttaagggttgtgtattactcattttgagagagttccaaatttaagaaatattatcgcatccaatcatgtga

SEQ ID NO: 208942 - DNA, 877 bp, Cannabis indica
tgccttgctttgctattcccatctctctctattttcgatcactgtcgagcgtggaaggactatatatattccttagagaacgacaagccgtattgactttgaactggtttgcttttgtaatgtttcatgtcgtttttccatagaaaaatttacttgacttatttatgaagacaaaataaataaatggggaatttagaagacaaaataaattttattgttagcttttgtcttttattaattgtatttattattttgaaaatttatatctattgttgatgtagaaatttggacaaagaaatttgactacacttgctcgttagattgacgagatataatgagaattaagtataatgaagagagatacaaaaatttataataattcacttcccgtatcgtgacagtatttgagctacgtgtactttgagtttttatttctcacgagattacaagaaaactggctaaggaaatggcccaggttgacaaagtgtcgttgacaaagtgtcaacctgagtgctaggtcccagttctaacccccaaacggctccatttgtttctcgaaagcactcaaatcttaattgttaatgaaaacggagaatatgcccaaaagacttcatctaaattgctgatggaagtggcctaggttgacaaagtgtcattctgggcgctgggtccccatttggcctccaggtcgattcgtttctcccccgaaagtacttgttttctcatttagaatgaatacgaagaaaatgctcgatatagtttttcaatattgtggttggaaatgccccaggtagacaatatgtcaacctggacgctagatgcctggggcacccagtgctctgagtgctcaaaattgaaagtgcttcgattttgattc

SEQ ID NO: 208943 - DNA, 709 bp, Cannabis indica
aaaaatgttgaataatataggaaaattctaaggtgcacatccgtgaaaggagtacaccgatacatatatgtttagacattcaggagaattttttgatcaattttaatttcttttatgattgtgtacgttttagttatttaaaacataaaatacaaaattttgggaaatttaaaagaatttaacacgttaaaacaaaccaaataatctgttgcacgcatgattcttttattttgtacgcatgtataaaattaactatttgaatattgtaatctatattataaattatttcaaatttttttaaattttacaggatgactcaaataattatgttgtacacgactataaaaaaagattggactaaatttttttcgatgtcgaaataataaaagatgcaacgatgcatttttttatgagtatatattgtaaaaatattcgataatatataagcatcatacccagtaattagtacattcatttcattacgtaaaactattatccatgaaaagaataatttaaatttgagacaataaaatttaatttaatttgaaattaattgaaagaaataaagattaaaagaggaaaaaatataacaaatacatatactaaaaaaataaagaaataaaaacagatttaaaaatatcacataaaaaaatgttagcgcaaaggcagaaaaaaaaacgcattaagttaaaaaaataaaataataata

SEQ ID NO: 208944 - DNA, 813 bp, Cannabis indica
tttattggggaacatagaattagtactatattggccctgtagttacaaagtggaaaacatacaatttttatatatatattgacaaaatataattatagtattgcattaattcgaaagggatgtatgaggatgtttataaagaatatagataaaagtagggaattcattaaaaaaaatagaagtaggaatggtaaaacgtgtttcgtgtttgtgtcatattttatttgacctgtttttatagtttgtgtcaagactattgacctgcttttaacttatgtttaattttctcaatactaattctcgtgtcattttttgtgtttatccactttaaattgatttgttattagtgcggttgaagttgtttttatatatattttaaaaattatatattttgatatagttatattattttaattaattttttattttattttattaaaaaaaccgtgtcacatttatattaagctggtggtgtcgtgtttgctctatttttatttcgtgtcaaattatgtaaatatgttttctatccatatcaaatttaaccgactctaacccataaaatttgtgtgcaaattaaaatccattttaccacccctaaaaggaactacaaaatgatccaatcaattttttcataacatggtaaactagaaaatcaccaattggcacaaaaacacagaaaaaactccatcattttctttcacttcttgtttttcctcttcttattctatcactttggtttttgttgcctcaacaaacaaaactcaatgttaccccaattgtcttctaaaatttcatatggggtttcgatttcat

SEQ ID NO: 208945 - DNA, 469 bp, Cannabis indica
ttaattaatcaattaatatttaaaaaaaataaaaaaaaaattagataaaactattttaagtgattttaaagtgttattttattaattcaaatgagatatttaaccagaaaataaatagaatcattttgagtgagtttagagcgccatgtcagtgtcttatacattttttttatatgtatatatattgatgattatttcagcaatactatttacttcaccatagaaaaggaaaaaaaaataataaataaaataaaaaataaatagggatatctagtgtcaagcagcactagaaactagaatatgtgacataccaaaataatcataagatacaagttgatgagaagaaccactcagtcaagtttctcattcacggtcaatttatacacaactaatccataaaaaattataaaataaggatatttcaaaagaaaaagaaagtacattacaaaaatttacaaaaatactggaa

SEQ ID NO: 208946 - DNA, 830 bp, Cannabis indica
ataattatgaatagaaattattaacttacaaattgatttctttccttccacctaaactaaacaattagagaaatgttaaaaagtattgttggtgtctaatattctcagatattatatcactattagtgtaattaaatatcaaatgtcatgtaatttaatgtaataacatttaaaaatataggtaaccaattgtagtgcgacaactctaaaagatgtttgcaccagtaatgtcgaataacagctcgaacaattaacaaaaaaaattaaatttccgaaactcaaggatttattggtaatgatttcatctaatgaagatttgtgacataaatatctatgtttagcttctatccatttgtagtgcgacaactctaaaaggtattagcaccaccaatgtccaataacagctcaaacaattaacaaaaataattaaatctctgaaattcaaggatttattggtaatgatttcatctaatgaagatttgcagcataaatacttaagtttaacttccagttgcaaataaatacttaaatttaattttagcggtaataatacctaagttatatttctgaaactatgtaggtacctaaccgttatatattatgccattaaatccacgtattattttcttatagtatatttggatgattttttttttttaaataataaaaatttaatgacttgaaccaattaggaattcacacatgacaatttactacctacataaattttaaaattataacataagtattatgtttttatttgaaacttaaacttaagtcaaattactctaatcttttattctaataacaaaatcataaaaaaaaaaaaa

SEQ ID NO: 208947 - DNA, 1781 bp, Cannabis indica
tgtttaaatgttaattttttaaaatgtaattgaggtttaaggttttttttttttggtttatacaagaaagtggtttcattgttcagatttttaattagctaataaatgtaattggtttatgagagacaaatttcaatgtctaactccagtgacgattctggcatcaaactctagtgacggcgataactctgataattttgtttgctgattttttctagtgacaatgtaaatttcgacgacttttttggcaccatcagcaactctagtgactttctgtcactgtcagtgaattctgacgactttttcgacacgacagtagctctctggcaactaggttggtgtcttagagcttttaagaaagatgtaaaatttatatgagttttagtttttgtaattattttttattaaaaaactagttttcgattatatagaattaattggtttattaatttattgtcttaataaaattatttaaatattattttaatttttgtaaaaaaaaaataaaaaataaaataaaattcagttgacattaattttttattctagcattttatttttcaaaaagaaaaaaaaaacacaattttaaagtttttatatggcatttcttcttacatataataatttttatccatatttatttatttcttttaaaaaaaaaatgtaatattttgtacaattaaatttttatgccatatatatatatatcaaaacttgtatttatttttctatatttttgtaaatagcacaattaattattttaaaaaaaattattaattatgattaatttaattcttaaaaaaaattacctattgataacttactaatacaggtaaaaaaaatataataataaaaatattatcattgagcaatcacccttatatccatattatatatatatatatatttaacactaccacatattaactataaatttttttattgtattataaatattacagttttctaaattttaatgggttcctcgtaggtgcccaatggatataattatgaatttttttacaccatactcctaattaaataaaaaatattactttttaacaggtggtaggagtttttttacatttatagggttatcatctgatattttcattattttaatgccaaataattcaaacctaaccctagtggaatgctataaatagatagtgaaggcttcaggaaatttacacttttacttctgatttccttcagagaaaaacctgagccttctctctctatacctagccgccaccttcttctctttcttccctcttcaatttcgaaattacttagtgttagagtagtgcccacacacagcaagtgatacctcaatcatagtgaggaagatcgtgaagaaagacattcaacaagaaggagtttcagcactaaagaaggagagaaagagatccaggttcagatattgataatgctctgctacagaaaggaatcaagggctagatatctgaacggaaggagtcatattattccgctgcacccaatgtaaggtttctaaaactttatatgtgtttatttcatcgttttagaaagttcatatttagggtgttaatcaacatacttgtgagtagatctaagatcctggtaaaataatttccaacaactggcctcagagccatggtaattgatttgcttgcaagaaatttggacttaaaacgattgtttgatgttttggatggtatcatgttgtattgagtgttatttgatgattgattgatgtttgtgaattttcgtgaaaaataattgaatatctgtttctggaa

SEQ ID NO: 208948 - DNA, 702 bp, Cannabis indica
gcacaatatatttaatatcgtaacacaaaacaattaatacactgtagtaataaatttatatactataacttttttaacaaaaataaaaaagtttttacatgaaaaatacaaattaacactttattcaaaaaaatactttcataagacctggacaacaattttgtctttaatgagattttatttaccaaaatacaacttacacatattcattcatgtcaactcgaatattaacattttttttctcgttttactttcattttttatttttaaatttaatattcaattttcttttcttaattttttattttaaaaccacattccagtcattaattaccctttcaaaacccacgttcaaaactcactaaaactacctcccaaccataacctttgccatcttcttcttctaactgcctcttttatcagttttcttttatatatctttcatttcatatttataatggctattacctgtgactttactttttccatctctattgctagaaaaaagcttcaaaataggtcatagaatagttgctaacaaggttaaagagaaacgcccaatcgtcaacgatgatgactatgatttcgctccctcagctaaaggtggtcgtcgtccagtgaagacgaagtcaaaggtgtctttgcctgaaaaaaattccaactccgacggccaaaaggaaagaagtcaacttcaagacaatt

SEQ ID NO: 208949 - DNA, 688 bp, Cannabis indica
actctcttataaatagtaattgtaattgtaaatgtaattataatctctgattgtactatatatatttgttagtttgcggttggtaatttagaaagtgagttaagttagtaagtcaactttcctgcttgactcttaattaattagttatattaagtctatatttgaatacttagttagactttcattttgtaactagtatattacaaacgcttgtaacttgtaactatatgcatgttaagatgaagactacttcaattggctgagaagaaaaaattaaaattttataggatgattctatacttcactccttaaaaaaatgtgcatctatttcgatattaaaagatttctttagtttaattttttttagtcatatatgtaattatttaaaataacttgcaaaattttaagatttttgaaataatttataatataaaaaaccgtgttcaaactatgactattcataaagtatctgattcgattcaatccgcactattaagggtgcattgtataaaagttcaatattatatacactaacaatattgttattataatattgtcccattacaattaaagtcgatttggcggacttgcgagtgttaaagtgatcctattaaatagtttaatatataatttaatttaattaatctcaactactattaatatcaaattatatttacaatttttttaa

SEQ ID NO: 208950 - DNA, 1010 bp, Cannabis indica
aaaaatggccagcttccatatagtggaattatccacttacccacttatccacaaagccaaatatctaatttacccttcattaatgcttaaataacaaatggtttaggggtaaaatggtcgaataccaaaaccctgcctaattccaatatcaaacatatcacacataattgtcccgttagataaaaggttctaatctcacttatgtgactctaatggccatccgttacattttctatcgtcaccgagcaaaaatcataaaaattataaatttcacatatagtataaataatgcacttagagtttaataaaatctcaaaaattcagaaattataactctaatacccattttctaaaaatggaacccacaacataaatattcatatgtaattataagataaagataattaatgttaattgccctactaatccatattttaatcatgtggtcattataatatcgtactttactcgagctcatccgtttttcttaaataggtcaacctattttcttatacgaactcaaatttatactccacacacacatatatatattttatagctttcattatttttatataatttttcagcaacctttacatacaatcataaaaaaaattattataattattataatttaaatatttactaataaatattagcatttttaattcataactttttaaaataaattaatatgatttttttttttcattttttatagtttaaattatagaattataatagttggtgttatatttgagttttattatcattttagtttataaataatcgataaataagtatttattattggtgagaattatagattttatttgtttttataaaatttgtgcaatatgatttttttttctaaaaaaagttattttatgtagattttctttaaaaagaaaagttaaaaaaaaaaaaaaagaacaaatataaggtaaattagttaccataaagttttacactatactgtttaactctttttttttttctactataataat

SEQ ID NO: 208951 - DNA, 987 bp, Cannabis indica
aaatagtacattatataattatctcaacaaattgtacagaagaacaaagtttggatatggtattatcggctcccaactcccaagccatgcccataaatcaagttttgatctttgtggcaaaataattctaatacacactgtaaatgtactaaatatgaaatggatcatcaagtctctgtttttgtgcccttgaattgatttaattttatttaatctaccttttaaaaatagtgtaaaaaataatatcaaaaaattgtgtctaataaattcatttcacatcataaataatactacattattattggtataattcaatatttcacttaataacaatgtttattaaaaaattatcaaaatgatcattttactggaaactttatgataaatatcatatcactataaaaaattatgatagctatgcatattaattaataaaatatgaaccatattaagatgtgattccataaacaacaatataggaatctctcacaaaaaaatatatatatattcactttattcaaattaagaaattttttaacttattattgatatgttggcacataatacaaatttaatttgagttttagagtaaaaaaatgaaattgaaataagatcattggcctatatttagatctctaaaagacataatatgaccataaccacttcttattttccaatcatcaacactgtacaaattttttgcatcactgaagacttcagcattatcaaaaactaatttagtatatgagattcatcaatggttgtcatttgttcaataaatgaatctttttttttgatctctatgtagaacctgttaccatttctggattaggttgtcctagcagactgtatgtctctccactccattccatgtacgaagctaaatttatatttagagcactaaatatgcgttcgggccaaaacctaatttgaatacttgattttccatattcaatccaccaattttcatttgcttttttttttttt

SEQ ID NO: 208952 - DNA, 867 bp, Cannabis indica
ctttgttcgagcgttatggtcattgatagtgtacctaattctgttacttagttgtttgttttagctgcattattttctgttgttaataaccgtttctggtttatgtcttggtctgtttttgccaactgtattctcctatgtttgtgggttttattccctataaataaagccctctccaaagactctgtagcttttacaagtctttgttttcactctcatagaatgactactggtaggactttgtatagatgagctcattcatggtatcagattgccattgacaaacgtcgcaaatggatcctagccgccctgaaaatccaccccgttcctctgttcaacacccactgctcccgctcccaccacccctccggtcacacaacaatggaatcctttccagagctccctcaactcctccctcactgtcaaattagatcgctcaaactttctgccatggaagtcgcaggttcttcccacggtgatagggcatggccttgatgatctgctcttgactggaatccctccgcccgaacgattaatctcaggagccccgaaccctgaattcaattcttggagaaggaaagaccaacttctccttagctggctccgatcgtctatgtccgagacgattcttggatctttagcccagcataactcttcccatgccctctggagagctctcgatcagcgctttgccagtcaatccaaggctcgccttcttcagatcaaatcgcaactctccaccatacggaaaaggtaatctctcaatccctgattactatgataaaagttaaaagttcttgctgactctttagctactgctggccatcccaatggaggaaactgacctcataactgcatctctttgaa

SEQ ID NO: 208953 - DNA, 1699 bp, Cannabis indica
ttcacttacaaaatttaaattttcacaagtttttgaatcacaaaccaatcaaaccctaaacttgatcccactacttattttgcggaagcaaatgggctgtttttttattttaaaattgtgctcttagaaatgaaaacagtatataacttttaagatgcattttgtaacgccctgatccacagggataccacgtgtgtgcttttacaaactaattcttagttaatctattagtttaggaaaagtgcggttgaattaaaaactttaagaataaactaaaacgtaacttttattcaaaagattattaagtttgggcatccgctattcaaaaagctttacaatttagttcaaatccagatttacaaaatagggttacatttccataaaatagtcaaaaaggatggatcctatctactgacagccgaaacaccgcggttgatatatacatcgctgggagacctctgactcatggctgaaccacttttcccctccctttacctgcaccacgaagcacccgtgaggcacaaagacttagcaagaaagcaaggaatcataaacaatgtataacatgagatagcgtaacaatgcatagcatataattccatcatacacaaataaacatttatacaacacataattaatcaccataaccaaatgtacccaattacaacacatcacatgctaacatgcttaatcaatttcacatcattataatcacataatttcagtactttatacaacacccttaccactcgttaacaatgagctacgtatgtcactatcgttgcccgatacagcgacgataagtaagaaacctatctgcgatttcaagagtaattactcttaacagtaatgaccgtttccaactcatgttcaataatggtaatgaccatatctttatctcgatcataatcgagtcacacacaataataatcatcacctcgatcataatcaagtcacatacgatagtgttcattacctcgatcataattgagtggcatacgatagtgttcattacctcgatcatattcgggtcacatacgatgataatcgtttctcacttattatgcctagtagtgcaattagctttcttaattacctcaaaccaatatcgggtgtgcgggccgacctaggtggaaccatgctcgatgatccaggtcctatgtcacgaataacataacttgatcaaccacttattcaatccctaatacaaaccctaattcacaaccggacaaaatctaactcccactggttcaaaattagcttaaacatccttagaataccctgatccaagctctgaaaaaaccctgagaaaaactggtttcaaaccaaaaactagggtttcccctgtaggcaaaccggttgaccgatttctcagctcctgtaaaatcggttaactagtttttgcaacacggtgggaaaccctggttttccacattgaaacccaacctattctccaccaaacctactcaaatgttccagaacagttgtatatcataaaaacaatgcatacaaacaaataactctcaacaattcatcaaaaccctcaattcaccattaaagagcgaaatggagttcttaaactcaactcctttaactctaaccttaatcagccaagaaatcattcaattcacacccaaacaatctcaaaattgaacctaaaatacaaatctgaaactcaaaccaaaactcaacaaacccg

SEQ ID NO: 208954 - DNA, 842 bp, Cannabis indica
ccatctcatcaacttgtataaaataaagatggcagtaagaatgcgtatgaacatgggggagaactgccctggactaatgccaaaatagtcggccacatctttgaaaaaattattgagggggagtgccccccataagtgatatggttacgggaccatgcgcacagtccctctccagggtcgtgtgccaactggtctggggaggagagtatcaactggcagtccttgccgttcacagtcagttcctccacattttggaattcggcctctctaagactactaggagtggccacaaagggagtcttggtggttttgcaacgggtagtgcgaacctccttaagcactctcggggcgaactctttcactttgagagtgacttgcttggaaccctcagcttgttccttctcactggcatctttatggaaggtattcttggcttcctcttccgcccacttctcaaatgctctcactatttcctccatggcttcatcgtctaatccagtctcaagatcgtccgacaccctcctcttcgtaatgacctcctccatatgaggactactggaagagctagcctgactttttttttagtgcgagccatagcgagtaacatgacgaccaattttgcggtggctatagtagtctcggccagggggagctctcctgacgcgccaatgggcacccctactagaatgttagtttcaccggaaggaagggtgtatgtccactctcggggcaaataagattgtatcccctttccaagctcccagatgtgcctattgtatgcttcaccacctatcatctctcagtagaggtggttgggcatttccgacccactactagaccct

SEQ ID NO: 208955 - DNA, 1251 bp, Cannabis indica
tattcccaacagttaaaaactgttggcatttacaattttcgtttttaaaaaatttatttggtattgcccacggttttccatcgttggcattaattttcccaacgttttctttgcttcggttctaaaccgttgcaaaaaatccccacttactttttccaacggttttcataattgaccctcttattaacggttgagaaaagccaattttgtagtagacattgaaatagagttttatttagggcataaaacccaacaggcggcatcttgttggaaatagtaataatgcccccaaaagatatatcaatgaaataaagaatggacaattggtgtttgctctagaaccactgaataaagaaaaattagatgaaccttcgattattttctcagaggacacaaaacatgtgcagtatctgcatgttgatcctctcgtcgtaatagttcaacttgccaacaagagagtgaagagagtattggtggacaacaagagttcagtcaacatcctttacaaggatatattgaagaaaatggggttagagaatgtgaagttgaagccttgcatggtaagtttatgtagattcacaggtgatagtgttggcatccagggcatcattgaacttccattaactgtaggagagccatcattatcaacgacgctaatgtaggaattctagttgttgatcttccatcaatttacaatgtattgatggggcgtcctgcattaattggactagggacagtaagcttgatcaaacacttatccctaaagttcccaacagaagcgggagtaggagtagtccgaggtgaccaattactggctctagaatgttattgcatagaactttaaaatagaagagccaattatcaattgatggtagtcataacagaagaaggcgagaaggaagataaatatatagatccatgaatccaagacgaaaataatcagctcaaacctattgaagagctggaagaggttattttagatccaaataatcccacaaaatgtggatacattgggaagaatttggatgaaaactaaaatagcaattaatcaattttttgaaggcaaactagaatcaatttgcttggagccactcagatatgatatggatagactctaaagtaatttgtcatcatttaaatattgaccctagctacccagtgaaaagacagaaacgacacttggagtacttgtatcgacttttcagacttgaataaggaatgtcctaaagattgttttccactacccatgat

SEQ ID NO: 208956 - DNA, 657 bp, Cannabis indica
agatggttattgctgacttggaaaattgtgtctcgtcagatatgagttctccttcttgttcatcttaataggaaaaaacgctaaatgttggaaaataattcatcttgtcatatttttttattggtactagcagtgcgaggtgatcttctcgctatgtgtaacgcgagacggttgtgtgttgcaatatttaatctgctcgtataggagagtatcctcttcttgtatatgtaaatgagtttatcctgaggcagatatatgtctcgtcaatatcagtttaatagttattattcttgtctcgcataagattgagcaacccacgagtttgaacattatctatcaaacttatatttaacaggtacgagttattttaaattgtatttaatgatacatcattattatattatcacagttgattcacattctttctgtaggacacgtgtcaatttctattatatagccgaatttcgggtataacactaacaaattcacatatttatttatatattaaacagtatacatatcttaaaatattatttttctaatctttttcaaatagtgtaattttctcttactttataatttaatattatttaattatttttttataaactcttatatatttcattttttataatcttcattaattattatttattt

SEQ ID NO: 208957 - DNA, 622 bp, Cannabis indica
aaaaaagcacacttcatatttacacttctttcatcttttaccaccaataaactagatgagatatttttgttaggctaaaaagaaaacaatgacattgactttcattaaatctttgccaaattaatgtttgacccttcttgctggtttagtggattcattcatgtgaataaacattaactatgatatatggttgcactctaataatgatatcatcataaaagtcatcgaagtcagtgcccaatattccaagtaatgtgaaacaaaaatgttccattgtctatgttcgctgtacctgatcacaacccaaacacttgagtttcatcaccactaactaatctcctatttagtatttactctaactaatctcctatttacgtccagagaggaaaaaaaaaccatttgcggctcaaaactaccaacccaacccaacccaaccatccaaccacttaacgaaaggttcaagctttgtacagatggcgataatggaagaatcagtggtaaagtgggagatttcgccacccaacacttatgcagcggtggttctcggtggtacgtttgaccgattacacgacggtcaccgtcgtttcctcaaggtctttctttctttctctctctctctctc

SEQ ID NO: 208958 - DNA, 1563 bp, Cannabis indica
aagtaagattttttatagtgtaacctcacaataccatatcatgccaacgtaacttatacactagcttatattaattagttactaattttttatatcatttactaattaaatcaaaatatgtgtaatttgatattaaaatgcactttaatttgtttagtacgttgtattacatcgtaaataatattacattaaattgtattctatgtcatatttttatgtaaattctattgacatataaatatataatattttaatgtaaattaaaaattaacataatattatatttataatacaatacactacgatttaatactcatactaagctaacccaatatattacctcatatagattagaacttggtgtcttatagcatttccaacgttttcactactaactcttcttcttcgtacttattacattattttagttgatgagatgaattattgatattgagtacattatatatattgaactaatatcttcatcaatcaacttggtgagtgtatctaataatacgtatacgtacattttctcctatcaagattgtattacgtatatgagatattatactttattcatatatattaattggatattttataaataaataataaaaaaaaaaaagattgtggcatatatccgcaatataagaatttttgcgtggatatacaccattatcgatcgatccattggtagtgtcagttaatcaatatctatggtgttgaattgtatataaaaaatatctctaaatataaataataaaatcacatttcattaaaaaaaaaaaaaaaactgatattttaataaggttgtgataattgcactctatagatttacttttatgtctttttataaaataatgcgtacttgataagattaactaaacaagttgagaaacttacaaaaaaaatattaaaatttgggataatttttacaaaaatatcgtcacacgaaatttttttcaaaagtgctgtgtttctataaaacaccagtagaacacaaaatagaacaattcaaaacatgcagtagaataactaaaaaataccagtagaacaccagtgaaaacttaacagaatatactgcagtatgaaatttataaaaaaatacaataaaaaaataaaaaatactgtctaacagtatttttataaaaaataataaaaattagtgtaccatgtaaatttcccaacaattttaccaattacgtttaaataatttgataattactcctaattatatttatttcaacaatcaccaattaagtaacttaaatgaagaggacaaattccattttccttctcctattaatataataatgcaaactgaataatcttagtttttcttggacatattagttgttatgcttttcttaaccttggtatctaaattaagtactacttggtacaaattagtgatatcgtacacaatcacaatgtgttcacatttgcccttttatcttttctctgtacaatttcacactccattaaagtacctttgagtccccaccaaaaaccaattacactaatacgttgtaattattataaaattaggaggactaaaaatgc

SEQ ID NO: 208959 - DNA, 748 bp, Cannabis indica
aggctggcctaactgaagatccacgtgctgttgattctgatatattttctcaaaagagacgcgaattcctgagatggatggatgaccaagagtacatccttcgatctcactaggcggagttagaccactgcaatagagaggcaagcaacttgataagacggttcaattagagaaccaatggaagagaccaggatctcattagaaatccactccaaggaagacttgttggtagataagggagggtctatcaacaacctgatcaacccagttcttcagaaacaaagatagaccttcctttacctgaacgaggacaagccctcccactaaaatctaatggcgagaacagccagctccttgcaatcaacaacatggggggccgaccaacaatctcaggctcaataaaaacccccattaactagcctttggacgaccaaacaactgcagcagtccccctggttggccagaggagtacactacctccctaaagggagcaagcagctcaaaggccaatcttcaaccgactaggaccgagagcgggtggaaacacccaaagtgacaatttgagaagttaaactaatccaccaaactccagcaattggtgtaatctacctcctatcaacacaccgataatatcagcaaatcagggagttatgggcgaccatacactgcctgatgcaggtctagtttgccatggacagctccctagtgtaagcttggctagccaaagccaacatccttacctaggagt

SEQ ID NO: 208960 - DNA, 679 bp, Cannabis indica
catgttggcttctttctttttttggagcctcgttccgggtttgacttttaccactcctcttgccggcctatagagtaactcatatttgattatggcatctccgtttattggcttacctgtttggggacagtactgtatttggattgtgccacctgaaaattgaagaaattagtttgcctattcttttttgtttcgttcatatttatataaatatttgactgaatatggatctgtattttcttctatctatttctattggttataaagcttcaatagttttcaagagctttatctcataataaatttttttctgatagaaatataaaatgagataaaaacaaaagaagaagaaacaagtcctaaaattggcttgctgctcctttagagagagatatagcataacaatgtggtaatagcttagtctgatgaaacatacatattagatcatatcttttgacacatcacccttatatatgatcttatctctattattgtattgtatcattagggtggctggcttttagaattggcatgaactaaaaagtagttgttgagtatagtaaacaaaatttaccatgatttggctggctctgttcagattaaaaaaaagtattatttgtatagagtttagataaagaaataattatccacttgttatttattggaaagagggtgagaa

SEQ ID NO: 208961 - DNA, 803 bp, Cannabis indica
agagagagagagttaagcatgcaagtttgtgaagctagaaacatagttggggccataaagattgcgtagtactatctcacaccacaaaatacattccctcgcatagatacaatacatcatgtatatgtgtggcacttgggattaccataccatacgcattgaatttcataaagtgacatggaccatgattgattaaaaaaactttatactcatctttataaattttttttttttaaaaaaaaaaaaaaagtaagtagtggtactcatgcaatgccagaaaaaaaacaagtaggtaatcttaagttccatacatcatcacagcattgtgatgacgtgatatatacatattattaaattagtataatttataaagatggtatagtcaaactcccccgatctcaagcaaagtccatgtgggtcttatgggtcgccaacaccttaaacactttgactttcaaaatttcttacagcacattctctccccatctctaataaacgtgtataaatcggttcaaatatgtaactttgttatctcatctttattttccttttaattttttaaaaaaactaatatagttttcctgttttgtccaaacgctgatattgaaagtgcaaaactgttgatacatatttatacaaagaaagaaaaggatgcctagtgagattgagaattgtgagactgttgttagagaccctcgtccggtggttaggaaatttttggctaggcaacaacacgaagggttaggtgccattgttagaaggagtattggcaggtgacactttgcatcaaaaagccaacatgg

SEQ ID NO: 208962 - DNA, 1585 bp, Cannabis indica
agataatttattttattaatatcccattgctaagatttaaaggccatcacttattttaaatttaaaccccacacacatgtatacaaattataaaaacatatataggaagtgttgaatgatctcacataaattgaggaaatggatcaagcctaaccacagggtaacaaaccaaaggcttggcccttggaattgacaacccaaaaccttcatccaagtccacattggtaccattccaatcaaagcactgaaccaaagctgctactgtagctggaatcatcaaaagagccaaatttgcaccaggacaacctctcctcccactcccaaagggtaacaactcaaagttttggcctcttacatccacatccttcttctcctccgtcatgaacctctcgggtatgaaccggtttgggtcatcccaattggctgggtctcgattaatggcccatgtgttaacgaacacacgagttttcgctggcacatggtatccaccaataatacagtccttggatgactctcgggctgtgaaggctcctccagggtggagtcttagggtttcttttattatggcttccatgtatggaaggtttggaaggtctgactcttctaccagtctcttgtttcccactacttgttctatttcttttcttgctttctctatgattgttggatgggtcattaactcggatattgcccattctattgttactgattgagtttctgtcccagctccaaacatgttctgccaaaatatatgacaagttacactttcaagatcatatttattaaattaaaatgtatggtccaatattaaattgtattatatcaagtgccccttaacaatattctttttttgtaatgacattgttaattaaatgagacactaatgaagtttaatataatactatttattctgattggtataattgaataaaatactgcatagtttactttaaattataaaatttgtaagatttaatattaaattatattaatatcgatatttcataaaagtaagcatacaaaatgggataatgaatcaagttagaggcccaacccaagaggacaactttaatctaatacaactagttatgtgtgtgtgttttttattaactaaaaaactttcaatacccaaaatcaaaagttttggctcactaacttctctaaaactagctccaatttaagatttaaaaattgtgataaatttagtaaaaaaaaataaacaaaatgtatttgaagtcataactttttttttttttgtagtgtaacgtaatggtattacaatcattttcatagcttaaaagttttgggttcgaacccataatctctccctttttcctaaccctccctcaccactaaactaaccctagtggctttttaaaatcataatttagatataaagagtctcatgtatttacgtaagcttggaagttgatggatccttttcacataaaaataaaaggagttttatttgcaactttttattacaatcacttttttaacttttgtgataaaaaataaatggaaaaatatttttttttctaatttttttcataaacaatattttttatagttacaacattatcct

SEQ ID NO: 208963 - DNA, 962 bp, Cannabis indica
gaacaattctgtggtggaaaaaattttaatctgtggggaaaagactttactggtaacttcaagcttctgattgctgaatgtaaaaaggagataaggaagcttaaaaaagccagtgatattggctcgatacaaaaaggcctaggagcaactccacaaaattttcactcaaaaagaagttttttggcgtcaacggtctaaatagttatggttagaagcagtagaccaaaacaataagtttttccatgcgaaagctacttctaggcacaaaaaataatctgattcataaattgcaagatgcttgtgcgtgttgggtggattgggatactggactaccatcggtgattattgattatgttactaatcttttatcgtctagtgggtctatttcaaatgatattgtgcaaggtgtggtgctattggtgtccttttagcagaatgaagaccttctccgagatgttactaaagaggaagttcgcaaagctctcttccaaatgcacccggacaagttgccaggctctgatggtatgacactgagattcttccaaaaatattggagtgtggtgggaagcgatgcggtaactcaagttcgagagtttcttaatactggtatgcttcctaatgctttgtgcaaaacaaatattgtcattatccctaaaaagaaaaatcctacaaccatgggagatttgagacccatatctccttgcaatgtgcttttcaagatcattaccaaagttctagctaaccacttgaaactcatcctcccccaagtaaaatctgatacacagagtgcttttgtgccgggtaggttgatctccgataatatcatggtttcgtttcaagttatgcactacctcaaaaggcagtggaaagaaggttatatcacagtgaagttagaccttagtaaggaatatgatcgaattgagtgggatttcttcaagccatgatgcttaaaatgggttttg

SEQ ID NO: 208964 - DNA, 599 bp, Cannabis indica
tgatggtgatggtgatgatgaagagaaggagtttggaccgataatgaagtttgaggaggtgatgaaggaggccgaaactcgaggagtgaagcttccttccgacatggttgaggctgctaaatccaccggaattaggaaagctttcctttcccggtacttagatctggaggtgaaagtttttcagtgtttgcaatcatttccttttcacaatttcgttttttttaattagtgatcgtttactgagattagctagccaagtttagaacctgagctaattttattcatttaataaatttgattttttaggattcaaagtaaatccctgcttaaatttttgtttatgaagctgaaaaatcacaactttgtttgtaaattgttaatttttttcccattacatctaccaaatcatgctttctcaaatttttaagccgttaaaaattcttctgaattattgagattgttgaattcaaagacttccatgtatttctgttcaattttactaaccggctgacgtggaaaaaaattcgatttggtacacaaaaatttgttagaaaattgaacaaaagtagacgaaagtttttgaatctaacaatttcaat

SEQ ID NO: 208965 - DNA, 569 bp, Cannabis indica
ttttttttttttcctttagagaagtgctagaatatgtttggttaagctttttgaacaagttaagaacactcactaaacaatatatgggattaaaatgtgcttggtaaaacccaaaataactaatagttggaacaatttggttcaaaaattgacacctatgtggaaatctcctttaccttttggctttgaacaaaaaaagacaaagaaaagatcacccaaattagtccatttttgccaagatgatcactgctttagtggcctatcttatcttattccccatttgtaatatagcaaagaaaagtaactgttttcatggtgagaaaagatttattatattatagcaaatgtgaattagtaatggtaataagaatatgtgctgcaaatctatgctcatttgatttgatgataatggtgaaagaagggtggtataatttattgtgttgataccatttggtgactaatttgtccacactctatttctctacaatatgcttaatgggatctaaagttggtctttttattaaattacttttcaagacaaatgcttttacctttcccatctattttag

SEQ ID NO: 208966 - DNA, 677 bp, Cannabis indica
gtattattaatttcatatcatataaatatacgtgcctattcactagcggctttcgtctgcctaaaatatgttatatgtaccagtggtccaacagttcctcaatgggatagggtgctttttttatcgtctctttggactacagtggcaaaggatgtagtggtttgcacctttttgctactgttattagttgaaggtttcagtgtccaattagattttctttataatcctttttttaaacctcttggaattatgtttctggattttgcattatctaattatttttattatttttaaaaaaacatgtttatacattattcatgtggaagttgttaagcttctatgagctcgactgagaaggttgtaaagtgtgtgccttgctttcttagaatataataaatactctatatgtacattgttctttcaatttttcttttgtttgcatctatgtgctctttattttatttttttttttttgacaaaatatccaatattgcagctggatgcgtcggggaaggatttgaagcttgggcttgtcatcttcagtgccctttttctggtttggtcttttagtaataagctacttattcacaaagcatatttaaaatgttactcgggcctattcactagattttataacatattcgtatattttttacaattcaaaatcagaacaaata

SEQ ID NO: 208967 - DNA, 1210 bp, Cannabis indica
atatacatttcttgaaaacttttcactttccaggtgaagatggcggaagagacagttaagagagtgacaggactcaatccactgcttctagctgcgtccaatggctcgtgcacaggcttaccctccatgaatggtccaatggatgcatctactaacgctgctgttgcaatgcaacggaaccaaaaccagatgtttcaccaagcagtcccaggtatcaacgctcccattccacaccatcagagattagatggaagaggcggaggtggaggctaccatggtaacacctcaatgtctcttgttgggaacccaaggaacgatgttgctccacagaatgatgtcgggggaaacaaattaggtgagatgccttcgattcagcattcgggtagagttggaaacttgccgaagcatctcagtcaaggaacaaattcatcagcagcagcagcggctgaggcgttgcccagttggggaggtgatgttgccaaaaataacaagcagaaccgtatttagtggttcgtatcccattttagatatggggcctagaaacaaacttactcatttgaataagataatggattcagaattatgctttcctttttttctttttaatttctgttgcgtcttttatattattattattattattattatcactaatattctccatgcaatgtttgactcctcagacccattccttcgatgaaattatactctagggaaatataattagcaagataaatagttagttatgacttatgtgtaaaagatatcctttctgtttgtcattaaatccttttttttttttgttaattttaataacaaagtaaaagatggtagttgtctcatggcataagtgttgtaattccattccactaaaattaaccatgatacatgacatgataaatatgaatgtgtacatcaatactaaaagaaaaaaagagtataaacaataaatgaaatagtcaaaagatgagttagcctatctaaaatctaaaacaataaaatacatgatgacatgaccaattactagtccatccagtgcacttgtaaaattcactgctgctgaattttagtaccagcttggagacctgattgaactttgctttgaaaatgagtttccagcctaaaccaaagagagacacttatgaaattagaattgattataaataacaaaagatgaagtagtaagaagcaagatcatcatgttcatggc

SEQ ID NO: 208968 - DNA, 1988 bp, Cannabis indica
ttcacttggatggtgtggatctttcttcacccctacctaaatccattgcaaatctatcctccttgatatctttatcacttagtggctgcaatctacatggtgaatttccccaaaatatttttcatctaccaaatattcaaatcattgatgtttcatacaatcataacatcagtggttttcttcctgttaattttagttctcgtagtaaactaaagtcaatgaatctttatttcagtagtttctttggaagactaccatattccattggcaatctcaagttcttaagtaatttagatctctctagatgtgatttttcagggactattccaacaactttatttacaatccctagtttacaatttctaaatcttagagagaatcaatttacaggcccactaaccattccatctttagttaagaatttgtcatgtctctcatctcttgacctggttgccaacaactttaatggtcaaattccatcaactttgttcgaaatccctagtttagaatatctatatcttgaacataatcagtttgtgggtgctttgaccatcctaaatatctcgttgtcatcccaattgacgattctaaggttgggtgggaacaagctaacagaacaaattccaagctcaattctcgaaatgaaaaaactggaacatctcaaccttgaggaaaattactttagtggcacaatagagatgcacatgttctcaaagttgaggcaacttcgacatctttctctttcacataacaatctatctgtaatgacaaacccaagtataaattccactctaatcttcaaacttaactatttgcatttggcttcatgcaacattacagaatttccaaagtttctaaaaacccaaaatgagctggaacatttagatctttccaacaacaaaattaaaggaaagctccccaaatggttctttaccataggggcagagaacatgtttacattaaatatatctacaaatttcatcatcggttgggaacaagtgccgaaagtgctttcgtggaaagtgttgtggactctcgatttaagctacaacaaatttcgagacccattaccaactgttctgccaattcttataattgggttgtacatttcgaataacaacatcagggggaaaattaatccattgttctgcaacattactagtctaagatatctagatttgtccaataacaacttcaatggtgagattctcccatgtttgggttccattagctcccttcaacacttggaattgtctaacaacaaatttgagggctctattccatcatctcttgggaatttgactcagctttcttatttggatctctctaaaaataggctttctggcagaatccctcagctgggaaataactcaatgttttgcactttaagcaatctcggagttcttgatgtctcaaataatcagctaactggctctattccacaatgcttgggtagttttagcaaagatcttcaagtgttgaacatgaaagagaacaattttagtggagagatgcctcagatatttgtggatggaacagactaattacgctagacctaagtcataatcaactagaaggaatggttccacaatctttagccaaatgtaatgaattacaaattcttaatctcggacacaatcgactgattgacacattccctttttggttacaaaatttgacaaatttgcaagttcttgtactgcgttccaacaaatttcatggtccaatatgggatccaaacaagtatatgggctttaagaaactgcagattgttgatctctctttcaatcatttcaatggaacattgtcatcacattattttaccaattggagtgccattaatacactcaataccagtgcagataagtcaatgttgcggtacaccatgggtgggaatcggtactaccaagagtcactaactgtgacaaataaaggcttcgaaatggaatttgtgaggatcttaactatcttctcctgtattgatcttt

SEQ ID NO: 208969 - DNA, 906 bp, Cannabis indica
gagcatggccgaccaggattgacctggtaggagcatggccggccaataattattgatatctaagtttcatattgttgcatgcatgaagtgttaaatgtcaatgtaatgcacttgtctcaaaaatgagcactagggtgacatacacaagactggtttttttctttctgcagagcctaccgtggcttctacatcctgaactggatctatcgctatttcacagaggctcgtttcagtcggtggataggtacaaatttaccctctttattttctcacctttcctgtcactaatacagttctcatgtttgccatctgacacatgtattgaattttgtagcctgcgtctctggtctggttcagacggctttgtatgctgatttcttctactactatttcataaggtaacgacacctgcaccttaatgtgaaggatccacacctgaagtttttttgcattatagcaacaatgaattcctttgttttgcagctggaaaaacaatgccaggcttcaactcccagcctgatctagagaggaaatgattctagcccagggttacatttaattgataatataatacaaggaagaaaggaatacagaactctcaaaatctcacttgatatagcaacctcaactttgtacgtgagaaaaaaagatttaggcttttcgggtgtctttgctatcacagtatccaggcatcttcaaatttttagattagaaaacctatgtttatttgtgacgacatgtgtttgatgttgtaatccaagtgcgatcatcatcacttttcaaaagcgttgttaggaggttttggctaacaatacagttcatcaattagggacactggagtttatatcttacctattaaagttataagttgtttcagtacaatttgattaaccaaaatacattctt

SEQ ID NO: 208970 - DNA, 1015 bp, Cannabis indica
gtgtatgtcattctcaacccactcttttgtattgttacaatcaaatcatgatcaagattgcttagaattctattttttatgaacgctaagcacagtgaaatcaacggtcatttcactcgtcaccttctgaaacttggcactatcactttgcctattgttcctttcttttacaaatagttgacttttttactaagttgcactatatttctcgatttcattttctagctatacaaactctagatgttcattactaacgcatcatgaatttgaggggagtattaaggttattattttgagctcataagggtattttagtctaaatttatcttttgccttttctaaagacttgcttgttattatctttgtaaaattttattatcttttgccttttataaaggcttgcacttgcttgttattatgtttgtaatagaacctctgatagaattttcttagactagaaactttctgccttcaatttagacaccaagaattaaatccctaaaagacttcctttactgttaatagttgcaaaagttacagctagctttcaagaggctagtctctcccaattcaacctttcaggagggttgttctctctaattagagttaaactcttctattccgaagctgccttacaaatgaatccctggacatattaaaatagtgctagctatctaggatcttctaaaactaagacatatcagcccctcttaaaagaataaaagaaaaaatgccaagtaaaagaaaacaattaggaacaaaataagaactagcataacttggccttctactgtaaacaaaacgtagaggaggcttatcatacacactaacctgctctttctctcttcatctttgcactttctcttctggttcaatggataagtagtattagtatatatatcacttctcactatagaaatatatcattatactttaaaaaaataaaaatggccaactcccattggcatcttcaaaacgcaacataaaatacaacagtagatgccatccatccgga

SEQ ID NO: 208971 - DNA, 644 bp, Cannabis indica
agtacatgtacaaattaaatatagaatatagtcatgcaaagcatcatattcttctcgaaaaaacaacgtgcatacaagcctcaaaatagaatttttggttttctgctttggttattacttaaatagttttctaatattttattgtcagccacaaaactatgtgcagagttcaatgtgcatgtctatgttacaatttttaaataaataaataaataaataaagtgacaacccttctgaccccaagccagacaatacaattcttcttgcatagaaaatcttgcaagattatttgacacctcatgattgagacactgcaaagttgttaaaacttatattctaagcaagcatatcacatgcaaatgttaaccatatctttagcaacacttcattgtttagaagaagaagaagaaatatatcatgtaaggcattgacatatatcagcaaaaataatgccaattgtacaaacaataatgtatttaagaagagcgcattggataattagttcttcatgaggaagtcactttaaaatgtcaaatttcataatcaataagtcatattagtggttttattattgtctgaaaatagattattattattgtgtttggcctaatccttgtaaaaatcaaacagtttattgttatatt

SEQ ID NO: 208972 - DNA, 948 bp, Cannabis indica
gactttgtgctcttgaacaacttcagtttcaagaactacaatggctcttacatgttcaaggagtatgccatcaatgtgacctcagatgttttgactctcactttcattccatcaaatggctccgttgcgtttgttaacgcgattgaggttgtctctattccagattctgttctacctgaccaggcattggctgtcaatccatcttcccctttcagtggtctatctggattagcattcgagactgtttaccggttaaacatgggaggtcctgtgattacttctcagaatgatacccttggaagaacatgggaggacgatgagaaatatctccatgtgaatagttctgcagtgaaagtttcagtcagtcccaaaaacatcaagtaccctgctgctgtcacacccgagaccgcgccaaattgggtttatgccactgctcaatccatgggagagtcgaatgttaccaatgaaaactttaacataacttgggtcttcactgtcgatccaagttatatgtattttgttcgggtacatttctgtgatattgtgagcagggccttgaacactctagtttttaatctctacattaatgatgatgctgcacttacaagtttcgatatgtcatccattactggtgatttggatgtgccaatgtacaaagactacgttgcaaattcatctggtggttcagatagcttgacagtgagtgttggtccagattcagctgctgatgctactgatgccattatgaatggattggagattatgaagattagcaatgatgttggaagcttggatggccttgcatctgttaacaaaattcttcctagttcaccttcaaagcacatgaagactggagtcatagttggttctgctgtaggagctgtggctgctgtggcattaattggtctttgttattgttgcttggcctcgcgcaagtcaaagactact

SEQ ID NO: 208973 - DNA, 617 bp, Cannabis indica
tgtttgtacttggcatgaaatacttatcacgaatacttaaagaggttggagaaaaaagagattttcactattatgagagatgctcagagttgaagattaatcatctggcatttgcagatgatgtaatgctattctgcaaaggagatttcaaaagcatcttttatatgcttcaaggattgaaattgttctcaatttcgtctggtttgtaacctaaccctcaaaaaccaacaatatattgcagcaacatgccacaggaggaggttagtagagttctttcagcctctggttttactctaaaagacatgccttttacttacttaggtgtacccatttgtgctaaaagaatttctgagaatgaatgcattgctttggctgaaaagatgactacacgaataagaacctggagttccaagaatctttcttttccagctagaattatcttaatcaattcagtgctcatggctattcatgcatattggtgccaagtgctcatttttcctaagaaagtggtaaggcaactggaatcaatatgcaaagcttttctatggaaaggccaagctgtgcaacaaggccaggtctaatagcttggagtcatatgccaatctaaagctgctggt

SEQ ID NO: 208974 - DNA, 532 bp, Cannabis indica
gatcgttgttttttagatttgttgactgaaattttcgacaattaattaaatgtacgatgaaaagtgataaaacatttgtaaagaatgagacttttgcgtggttcaaacagtaattagtcttactctacgaatcacttgtattgtattgtattgatatttaaaattacaacaataacagaatcttatagagtttggcagtgattttgcttaatacaaaaattcttgatctctttacaatgagtataatgctcctatttgcaaaataaaagcctttgccaaaagtcttcctaaaggtggcatctttggggtatatcttccttcattaagaagaatttttctccttaatgagtcttcaaatcaggcccaaatttgatggtaggtgcatatggacaagacttgtccactgaccaagataaatttttttctaaataaaaattgctattttaatttagttttattattaaagagtgtggtaattaaattttatctgttgattttgagaaaattatgaaataagtcttcaaaacttatg

SEQ ID NO: 208975 - DNA, 1245 bp, Cannabis indica
ccttcctttttgaaaaaacatgtccaaactctctataacaatgataaaagcctttgaggacacgagctgctagagagttggggaagttataaaggcgactcgcttgtttggcaagcaaagcttgattaaaaaggtgaagattacgaaaacccatacctccttcattcttgtgtttacaaagatgatcccaagtacaacaatgcatcttccttttaacatcagaaccaccccaccaaaatctagcgcacatcctatgaatgtcattaatgagattcataggaagtttgaagaggttcatagtatatgtgggaatggattgaataatagctttgattaaaacttctctacgagccatggaaaaaagcttagacttccagttattgagtcttttccaaattctctcatgaatagaattgaacagaccacccttattatgacgagcaaagctagggaggctaagtaattctcatgacacacaacttcaaccacaccaagagcattaaccatggaagaacgagcatgcacctccacattaggactaaaacacactacaaatttagcaaaatttactaactaacaagaagcttttccataccagttaagcaaggttttaaatctcgcttgcattgaacactagaagcacaaagaaagaaaagactgtcatcagcaaacagaagatgagagatggacggtccagaatgaccataaggaaaaccagtaagtaaatcattagagtagtcaagtttgacaagtgaagagagaccttcagcacaaagaagatacaattaggaagaaagtggatctccctgtctaaggcctctctcaggagtaatgcacccattgacttcaccatttagaagaatggaatattcaacagtggagatgcacacttaagaaccttatgaaaccagtcgggatggaaacccaatttgatcataattcgagacaaaaaagctcattcaactctgtcgtaggcctttcactactacaaaaaagactttttgctttagtttttaagtgacataaagaatttgcttcggttggtgtactcgacgttataaccatagacgcaaatagtgatcgtttttgcttcagttatgaaccgacgctaattaattatttctttcggttatgaaccaaagcaaaaaaatgttttagcttcggttcataactgaagcaaaaaattagtgcactgaagctaattattttttgaccgaagcaaaatttttttttgaaaaaaataaa

SEQ ID NO: 208976 - DNA, 645 bp, Cannabis indica
ttaacaaataaaaagcttgatatatgctgacatagaacaaatattaaaaaaagtaaatattgggaattgattccttaaccttatggcttaaaataattttttcttctataattttggggccggagtgtttggagaccgaggcgcaaagaaagagagagttagcttcaattgtaaacacaaatcaatactaaggaaagtgatttgaacacaaatatagaagtataaacacaaataaatgcttaaggatattcatgtaaatatgaatttgaatgaaagaaatataaaattaatactaagaaaagagattcaaaaaaacaaatatagaagtaaaacgatgttgccataaaagagataaattggtagaaagagagtaagggagagtggttgataaagaaataaaatttggaataggttgataaatatacattaaacaatgtcatacaaagaaaatagaaaagaatcgtagagagagatgaagagaaggaagagtgtggcttgtatataaaagatatataataataaaatttgagttattgagaattgagatttagaatataattaacttgatatatatatacattgaatatatttggttaaggatattttagataattttctaaaactaacaaatatattttattgata

SEQ ID NO: 208977 - DNA, 792 bp, Cannabis indica
gtttttcgtttttttttttttttttgaaaaacaaccattattgttttctgtataaatatattttaacattaatcacgtaagtgctaaaaaaatcgtacgtacagtactagactatagtagtattcattcattaaaaaaaatattttgtcaagttggaaaaataaagaaaatattttgatttattttctatggttgttgggtccgttcattatatgctatcagaaaaaggtgacaagacaactaccaatatggttggtggagcaactaaaagctttcaccctttcacaaaatcatgattcccaaaaaacaaaattggaaaaattattacttacaaattaataacaaacacataaaattactaaataaatatttgtgaaagtataattgacaattcttacacatatttctctaataaataaaataacagtaaaattttatcttggcaattttaattactaattaaaaaagaaatgataatatattattaaattgctcattaaataaaaaaaattatattttaaaaaaaaatcttttttatttatttaattaaaaaattatattattttttgtatttaaatttgtatatttttttaattaaaaataagataaataatagtattcaataatatgttacttattattatttttatcttgtcatttaacactttagttggcacttagaggtacagaaataaaattataaaataaaatattttttattatgttttttaatggagttatttcacaaatacataaaaacaacaaaaaaaataaaaaaaaataataattata

SEQ ID NO: 208978 - DNA, 542 bp, Cannabis indica
tatatatatatatattgttaggtttgaataaaaagaatcctatttttattacacaattaatgcattatataaatatatatgtacacatatccttaatttttcgaataattaagcgtgttatagaaatattatgcatatctttaaaaaaaaaaaaaaaattatgcatgtttgacaacaaacaaatgataataataagaaaacgtgactcgttttatttgataaaagaaaaaaaaacacataatatgtaataagccatgcatattttaatttattggcaatgtgttctagggaaacgtctagtttacttccattgccacatgcctttatctatataatacttacttgagctataatatatataaggatataatttcggtcctgtaattgtatttttacgaaatacattctgtgatgtacgacatataaatatatattgcgatacaatcataaagaaaactaagtatcgatccaaagcaatatcctagcacaatttacaagtacaatttcttaattaatatattaaatatttttatgtatataat

SEQ ID NO: 208979 - DNA, 1651 bp, Cannabis indica
catctcagttggcaaatgacatggacaaatcacgtattgagtttggagttggcaaacttaataatttgacactataatcagacttgttagatagaataaaaatgatcagttggtggatccaaaattagtgacgatccgagaagaagtcttagttggtcaagctaaagacttctcgatatgaaaaaatgggattttactttgcaaaacctaatattgtgtccctaatagtgtggaacttagaaaagaaattcttgatgaagctcgtaccactccctattcattgcatcctagtaccaccaagatgtatcaagatttaaaccttattactggtggtgcggtatgaaaaaggatgtggtagaatacgcagtgcctgacttgttagcagattaaggctgcacattaaagacctgcagggggtttgtagcctttgactctttcttagtggaaatgttatgatgtcaccatgaatttttggttggattacctagaaccacgagtatgtttgactccatatgggtagttgtggatcaatttaccaaatcatcacatttttttcggtaaaaacaacgtacacaatagatcagtatgcagaactttatgtaaaggaaatagtaagattacatggggctctgaagtccattgtttcatatagagatccaaatatcacttcaaagttttgggaaaatctccagcaagccatgggtacaaagttaaagtttagtatagctttccatcctcatatagatggtcattctaaacgagcgattcagatacttaaagatatgttgtgagcatgtgtgatggattttgaaggctcctagagtaagtatgtttcactgatagagtaatcatacaacaataaatatcagagtacaatagggatggctctctatgagatgttctatggtagaaaatgtagatctttaattcattggaatgaaactggagaaagaaaatacttaggtctggaatcaattaagtagaccaatgaagaaatagagaaaattaaggtcagaatgcatacctctcagagtaggcagaaaagttatgcagatgtaaaacgcagaaatgtagaatttatgtaggagatcatgtattactatgcgtatgtctaatgaaagggtgaaacgctttaggaaaagggaaagttatgccttagatttataggaccttttgaaattctcgagaaggttggattggtagcttaccatctagccttgcctccagcgttgtcaataataaacaacatatttcatgtctccatgttaagaaaatgcatctcagatcccacacatattttgagttatgaaatcctagagctccaaccagttttgtcatacgaggagcaatcagtacagatccttaacagaaaagataaattccttcggaataggaccataacattggtcaaggtactctggagaaacagtaaggtggaggaaaccacctcagaattggggggtgtaattgtaatgatttcttagctttattttgagaattaatagataattagggattattgttagaagtaagctttaattattatttttatgattatggaggtatatttgaattataagtgtattaattatgttatatatgaaatttgtatttttcatatttttatgctggtaacagtggaatgcgacgt

SEQ ID NO: 208980 - DNA, 981 bp, Cannabis indica
gagtagcaactttactttatttttatcattgcaggataaaagaaattccagagttgtttatcgtcggaaggccagacatgacaattgttgctcttggatctgatgttttggacatatttgaagtaaatgatataatgtcatctaaaggctggcatttaaatgcacttcagagacccaataggtgttctctcacacacattattcattctaacatgtttgttaacttaaattaaatggataaaagtatacattttgtatggagcagaaatctgattattttttctctttttgatatttaaaccagcatccatatatgcgtgacccttcaacatgtaccagctgttgaggacttccttggagatttgagggaatcagttaaaacagtaagtggttttttttagacaaaatcaataaataaagggaaatacaatttgtgtctactaaatgatgcatattttaactttatattattgcctgctgcaacaaaaaaaaaaaaaagaaaaagaaagaaacccttctataattgcttatacgcttgtagtaccccattatagaaaagtttcaatagtcagtttgtctggagaaaatattgttatttgtattttgtggtcatgtttgacggcattagatggtgtggaaaatgaaaaatatatcccactaaattcgtgtctgagtttttttttcttaacacagcatagaaattggtattaatttttaaatggtcaaaattggtattaagtcaaaacataagagtacgaaaacaatatattcccataaataagcaccagtcaggcaaacctatccttttcagcactagtatcagccagcttttcacaggaagatggtaattaatttccaggtttattgggtgccatcaatctgagtttaaattgttattttacattttttcaactgattttttcaggtgaaagagaatccgggtccgataaatggcggcctagctcccatatatggtgcagc

SEQ ID NO: 208981 - DNA, 1121 bp, Cannabis indica
aatgatggaaacaagagaaaatgatgcttttttgctccacgtggacatgtttttcaactctctcaacttcaaagttcacagcataatcatgatcaaaatttgactttgctctcctttctaagctctcagtaaaatttatttgtattatattttataaaatcattgtacttaatttaagagtctttttcacataaggagtcttgctcatccaagatcaagcaaaatatgtatgacctcttttactgtttagaacgataaattgaagggttatttattgttgaattgatagatagatttaaaaaactataattatatttaataataaaatattataaagaattcacatacaacacaaattttttgttactgtcaaaaatagtagatcctactaccaattaatattgaaattggaagtaaattaagaggtataattcataaatattaatgtgtaattccaaaaaaacaaatattttttcttaattaaattattatttttttctattttactacttgttatatctttttaaatataaagaaacagttaaaaaaaaataaaagggaaaaaaacagaaaaatacaaaaaagggcaaaaaaattaaaaaattactatgggccggcccattcaacatttatacagcccagaatcaaaaaattataaaaataccacctggtctataccttaagccgcacggaatgaacggagaagatgaacatacctccatcgttcaaatctacaacaaccagaatgaaaccaaaacgagggtaatacaaccatcaattccgacgaaaattgattagaaaagaagaactgcaatgatctaaatagaaaatcacaaaaaaaaaccacaaaaactgggaagaaactgaaattaaacatttgattgcggatctaatcgttcaaaataactccctctagaatcgaaaatctagattcatgcaatgtagatctgtattaaacagatctagagctccccctcgaatccaaaacaaggtatgatatgaatttttttaaaaaactaaatctatgtgatatatagttgcattctagttgatttctagtttacaatgggcaattcagctttttaaaacacaatagcaagatctaattcaaattaaggaac

SEQ ID NO: 208982 - DNA, 1208 bp, Cannabis indica
aattttttagtcaaattttttttttcatagtcatgtaaattatggttatttaagacatcctgcaaaattttaagaaattcggaaaagtttaacacgctgaaaattgcgttcaagcagtgtgttacacgcgtgactattttattttataacgcagtaaaatagactgtttgaacattgttttctatactgtaaattattccgaatttgtcaaaattttgtaggatatcttaaatagctataacgtacatggatatgaaaaaaattaaactaaaaattgttttagatgccaaaacaagtagagtgtgtatcagtacatcccttttaaagggatgtattgtagaatcacccaatctaattttatatagttgtaatctgtccgttgttaattagctggatagtattaaatagattaggagaagaaaatacaaatgttagaagacagttttgtgagtatttttgtattagcagtttcaagatttcaagtttttatcattattattattatttttgctgtaaactaatctcattggcagcttttagaagcttccaaataattccaacacaactgctacttcagctttttgttgaaccccgtatatgaggtgaagagatacgtaatttcttcctttcttgatctaatataattaacaaagttatgtaatacatgtatgtatatattatatttagatacgtcattgttaggttgtaatgtgcatatatactatacagtagtaatacaacacttgccacgtctactaaagtacaagaactaatgacttctttttaatagtttgtctatggatatataatctatatatcagacgatcctttcacaaaaaaaaaaaaaaaagaatacatgtagacaatgagatcgatggaccacaacaattatttatatgatgatgctctttataatccactctcttattcttattatttttattactcttcaattgttgtctttatatgtgtatatatataattgatataatatattagaaaagtgatatttgcatgcacgatggctaggctatatatattttttttttttgtaaaagggctaggctatatctcaacttacattaatattatgacttttatttttattttactagaaatgtaccaccttcatttaatcacaacacatgactttcaccgtgtaatgtcacacgctctctttctatctctgtttatatatatatatatat

SEQ ID NO: 208983 - DNA, 1128 bp, Cannabis indica
ttattattgtttcgtttttttttttttaatgttttttttgggatagatatatataaaataatagagtttggtaattatatatatatatatattaattttttgagaaaaggtaacaataattattaatgagtaaaatttgtatattattatgtgttttgtttcagtatacatacaaatgtctatgtacgtatctgttaaacattaatattctcacgtgggtggtgcgatgcatgacacatgcaaaggtggtttgtttcgtacgtactttttggattgtattttggggcaataatttcaagtatgttgttacaaatttttgaaaatttacaccctaatattaacattcaaataattaaatgatttacttttattcatctttaacggatgaagtttagtccccattgaattttcgattaaataaataaatttaagaaataattagtttttaaaatttaaattttagttatataatctctgtgcattaaaaaattatatattttaaaaaaatcaaacactactacaaaattaaaatgggctttctacgtagatcaacacgaaaatcaaagctcaaaattcatgctataaattagcaagcaaatttaccatcaattttgtgtaaacgcaaacgaaaccctagctaatatataaacctaacactataacctctatactctctaatttctttcttttcatctctaatttctctctgacttcttgccctaactgacctagccttgatgaccccccagctagctgccatgacccctagcgcctacaacccagcggtgacgatttcccacccatgaaagacaggctcgactgacccctaacctcccacacatgatgcagcctcaatggcctcaacgacccccggtcccaaaaaacgcagtgacaatcacaagcccgaaaaatgcagccacaacgggtactccagcccccctttctctttctttctctctcatttgtttgctttaatgaaataattattctataaaattatgaaagatgctcaatggttttttttttagaccaatagtcattattcttcaagatgtatatctatctattatctccatttgttttctatatatatagagagactttggtttccatatatatatatatata

SEQ ID NO: 208984 - DNA, 974 bp, Cannabis indica
aacgcaacgcacaaaacagcccatgtgtgatctttagccaaagccacagaacgcacatggaacatctgccaactttaacatcacaattaattttgatttagtcatttagaggatggggccaaacaggagacacaataaccattggcagatcaaataagtgattgtgaaatttccctaaaaataattgaaattaatgaagatatacaattttttaggtaattacatacaattttaaagtgaagaaagtactaaaatgttatcagttaaataatagaattctaaactaattgctgttctaatataaaaaataaatttagtaaatcctcttctataaagtttggactataaaaatttatcatttaatcgaaatttatattactatatataattaataatttatgaatttacacattagttagggcacatttagaaatactaagtaataattgtttattcaaactatacagtaacttttaaatgcactgaaaaaaaaaaaaaaaactaaagatgcatttggaaagtaatgacccatcttcaagtcgttattgggctttctctcacggactattatggtttccatacacgagtacgtcattgtggctgcttcctgaactgactgactgacatggaccaatataagtgtttccagtatgttttgtcccccgcacgcttcttagaaaaaccagatttcgtaatggactaccagaaaacaagatacatcttgttgatataggtagtatcaatcaatccatttaatctctattcaactatgtagtcccatacctagagttgtcacatttaacctttcccaaacgatgtgggattacacagcttacccggaatttcaccttacagatcacgagactactgacgtcacaaaatgccacctggaaatcagaattggagataattacacagtttagcgtatttatttggccacgcaattacaccgtaattgtataattagaatgcct

SEQ ID NO: 208985 - DNA, 888 bp, Cannabis indica
acatttacactacaaaaaataataaatagtactttttttttgaagaaattccattgatgatcttttgatcatactgctaaagttttatttttctttcaagatgaacatattacttgtccacagtatatagaataactgcatgtaatatagaaattgattaaaaaaattctctttcttcttaagaaaattgaaaattctataaagcacacccttaaaagggatgcaccgataaatctctactctatctgttttagtatccgaaataatttttaagttaattatttttgcatggttatgtaaattatagttattgaagatatcctgcaaaattttcagaaattcgaaaaaatttaacatgccaaaaaactacgttcaaacagtgtgttgcacgcgtaactactttattttgtacgcgtgtaaaatagattgtttgaacattgctttctatattgtaaattattccaaatttctcaaaattttgtaagatatcttaaatagctataacgtacaagaatatgaagaaaaaaaatagactaaaaaattcttctgaatgccgaaacaagtagagagtgcatcagtacatccctttttacggggagcattgtagaatcaccctattgttttctatattgtaaattattccaaatttctcaaaattttgtaagatatcttaaatagctataacgtacatgaatatgaaaaaaaattagactaaaagattcttctggatgccgaaacaagtagagggtgcatcagtacatctcttttaaggaggtgcattgtagaatcaccctatattataaaagttatatgtatacacataaaaatttaactaattgtaatttcaacttctccgtggttcatttcattcaagaagaaaaaagaaaa

SEQ ID NO: 208986 - DNA, 983 bp, Cannabis indica
tcgacactaggcccttagtgtcgtggcccgtgttgtgacattgatatttcttgcacacaggccttaacactagctgggggtgttgaggcattagaccccaaatttttggcagcaaacttcctagtgcaacgactgataatattttgaacataactctttcattattgcttggaattagacgatttaagatgttttggaaggcgaaaagagagatctagaaattttattcagaatatttttcctcaaagtgaatgaatcatagtaagaaattcacttgaagtttcagacttgattttcgatcacgaacggagcgtgttgagcatctaaaatttagaatttttcaccagttttatcctagaactcaaaattctatgataattcatcatatttttgtatcatttaacatgtttattcttattttaaattcacattataaattttaccatttaaacttaaaacaagtagaaaacaagcgtaattctacacaaaatgaatataatcaattgaaacacacctttaaaaaactttataaaatgcacctaaaactagcctattaaactcctccaaacttaacatttacttgccctcgagtaaagtactaacaaatagaaacaacacaatctaaatgaaataagtcaatccatcaaaatatgagtcacaatttttcaagtaacccaaataacatgatttcgtacgaaaaatttcacttataaagttttttccagaatttcaattcaatgtcattattaattcatctcaatatttcattcagttcttgaaaccataattagcacttaactaacagttgaaataatttatacatgtcaaatacaactatcaatccactaacctaatatattccataagcttctaatacttactattcttcactaatatagatatatgcataattaagaatcaaaaagtctttctaggtttgtaatgataggcttaggtataggtagatggaatggtcatttagg

SEQ ID NO: 208987 - DNA, 682 bp, Cannabis indica
caactacgtatataaattcacatgaaacaactgcaagcaactggtattatatatatatatatcaatctctgtggttgtgaaaaatattcgaatataatcatttgtgccaattaaattatagtaaacacacaacacttcagaaattatttaggggatataaaggaatcatcataaataatgttccaacatgatttgattcattttaacaatagtttcaattctcatgcttttacaacagtgttatcaattggcttcaattctaaaggcaaagacaactaaatgtttctctagtaccaaacagaactctactgcattaacaagaaccaaaattgaagataacagctagtcctgaaggtacacagatccatctgtacaacatttaaacacaaacacaaacaacaatacattaagaaatgagaattgcacaagaaaagcctatcgaggcagaaaatcccacaagacattatgcttagttttaacgaggcaaaaatgaaaccagatatagctaagcatacattgcttgctttggtcataaacgttttattaaataagtcttgttccccaaatagtttgaagtttaaagtctgagctttatgaactaacttaactacaactagcaaagccatatttacagtttaatggtgattatgaaaatttcattaaagaggaatttatttcaaca

SEQ ID NO: 208988 - DNA, 610 bp, Cannabis indica
ttttaataataatcgtcgccaattgttttagctactattcaaattactcatttttcccgacagttttaaacagtagctcaatttttttagtgacggtctccgaaaaaattattttcaagaccgtcgcgaattcaaatatttgtagtagtgataccatgatcagttgaatgaatgactcaggaaagttcaatccatgtaacatttcttcaataaagtcccacttcactgtatcataaactttctgcaaatctaacttgattctgcaggtagcttttgtcatcttccttccataatagcgcacaagatcttggtaaatcattatgttgtgcgctatgaagcgaccttgaacaaaccctccttagttttaggctaccaagttaggaagtagacacttaagtcttaagcaaattagtttagtgactactttgtatattacatagcagcacgctatcggtctgtagtccttcacagtgtttgggcatttaagtttaggtccaagagtaagaataatgttattaatttctttcaatacgcagtctgtcttaaggaaagaaataatggcatctgctatctcttccccaatgattttccattttttttgaaaaaaaaa

SEQ ID NO: 208989 - DNA, 674 bp, Cannabis indica
attatgatctcgaaggggggtcacggtcgtattttggtctacaaggggggtcacagttgtattatgatcttgaagggggtcacgtttgtatttttgtctcgaaggggggtaacaatcgtattttagtcttgaaagggggtcacagtcgtattatggtcttgaaggggggtcacagttgtagtttggtctcgaaggagggtcacggtcgtagttttgtctcaagtggggtcacgattgtggtcccaccttgggggtgacatcctgcctaccacatggtggtctcagggtggggaacccacaaatcccaatctcggggtaccttgagattgctcaattttggagtataccctaaacctccaaatagtcgggccaaaacgaccatggttccaagtgacaaagtgacccgaagcaacaatgacaactacacacttcaaattttactaagtgtgtaaagccaaaataatacatgaagtgtatatatataagtccccaagagggatgcaaaaaaaaaaatatctccaacccacgaagccgtgctaagattatcacagagcaatgcaccctaaccccccatgggatggtctcggggtgatacaccttgacccccagatggtggtcatgggggtgatgtaacccccaactttgggccaatcacacattgtcctcattaaaga

SEQ ID NO: 208990 - DNA, 1326 bp, Cannabis indica
atataatcaacttgaaaacaattcctaatacgaacagatataaaaaatgtaaacaattttgtcataacacttttagatcggattataattaaattttattttgacaaaaaatcaattcagggtcctatttgtactattttagaaaatacagggtccattttgtcatttaacaaaacagatggtccaattgataacttttgcaaaacacagggtccaaaatggtatttaccttttttttttttttttgtgcttttctaattttctatattgtccaaaaacatataattagtgtacctttttggtctacaattttctctaatgataaacaacactttctagtttttggaaaagaacagttcaatactcaaagatcattcattatttggttattttttttctcttttttttttttctttttctttttttgaataagtggggtttgtttccatttttagagccaatataatcacaaatagtttttagtataaaatggcataatgagcaccaagtcaaagttctaaacgcaattttttttttatctttgattttttttttaaagccttaatttcaatgtaggcaaaatctaggtaagaaaaatgggttatgttgccaaagtatgactaaacacaggggtgttcattggatcacatccaatatttttaggcctatccagatccgatccaatcatatattggatgttagattttaccatccgatccgatccaattaatttcatcatccaatcgatccaacatccattggatgttggattggatcggttctatccattggatgtatttcatatatatttatttgtttaatttgagtttatctaatattttagacctagtattttttttgatcggatcggatccatccaatattttagatccagtatgtattggattggactggatccatccaatccaagaaaaaaagagtaaaactttaatattaattttcatatatacatatagatttgacgtataacaatataaaatttaattactcatccaaactaaatgaaaatactaattagttcgattggatgttggatgtattggatttttagataccccatccaccatccgatccgatccaattggatatttaaaaataacatccaatccgatccgatcgcaattggatatccaatgtttggcggtcggttgtaattggatcggtcgattctcattggattggattgatttatgcacacccctaactaaacatgtggtcccttaacaccaaaaaagttacaatgcattttgtttatatgaaaatcaaattgccttttattttatccaatgttattattattattat

SEQ ID NO: 208991 - DNA, 1521 bp, Cannabis indica
agaaatataatatcagaactataaacattaatgtatttaaattatagaagtgtatttatttatagttttaaaagcatcaaaaaactaataaaattcagatgtatgccctattttatatacatttatgtaaaatgccctagtttatattatatatttttgaaattctcttatattaaaatgctctattttatagaaattctcttatattatatattttcgaaattctcttatattaaaatgccttatttatattaaaataatgtatacatttatgtaaaatgccctattttatattatatattttcaaaattctcttagaattcttcttggaattttgtgctccttattattgagtaattgcccactcatatcaaagcaatattcaagatagtgtggaagattgtgtagtttttcatatcccgaaggagaatctaagttcagttcttgatcatactctgtaacaaaaagaatcaagggttagagaactgaacaaaatgagtcaataatttctgttgcaatcaatgtacggttttttaatcccttatgtgtttattttgttattttggaaaatccatgttaggttgttagattagtcttaacttaacatacttgaatagtaaataagatcctagttaaacaagtttctaacaaataactatatgcatgatataatgtcgattatgcaattaggaccataacatgatggtcagttttattaactgcatttgaggcacatggtagcaccctaatgactatatgttgacccattaaactatagtccaccacttcttgtattatgagcccaatatatatagagacatttacataaatatagtaataagaaacctagtttacataaatataataagtaaacttaataggaaaaaatatggtatttaaaataaaaaatttaacatatataggatatgtcatttatattactattaaaaatattaaaattccattcatatatttttcttttttaaaaaaataagacaaatgaaactacagtgatcgctagagttgtcactggtgtcagaaaaattaccggagtagcttccggtgttagaaaagtctccagagttgctggcggtgccaaaaaaaatgtcgaaaattggcattgtcaccgaaaaatcattggaaaaatcaccaagaaaccaattttgattatatctaagtaaaatttataattaaaaaacctataaatacagttttgaagcaaccccattacagtaaaacagaagtgctcgaaaagaatacaacaatcaaactactctctccagccacacaagatttttttctctctcctgcgcttcaaattgcttagtttctcatgcgatgaaaatcaatcaccaaagatccttcatcaagaaattggtttcttcatcaagaaactggtttcttggtgatttttcaagcaacaatgccaattctaatgacttttccaacgccgacagcaattctggcaacttttccgataccgacaacaaatttcgatgacttttccagcactagtgacaa

SEQ ID NO: 208992 - DNA, 501 bp, Cannabis indica
gttttgcttctttattaagaaaagtggcgtttcttcattcaacaatattgtcgttttattaagaaaagtgtcgtttttctgcatgaaaaattactgtcgtttattaataaaattgtcgttttcctaaatgtaacaatattgtcgtttatctacagaagtgttgttttaagaaaaaaatgtcgtttttcttctttattaagaaaagtgtcgtttttcttcatgtaacaatattgtcgtttattaagaaacgtgtcgtttttcttcatgcaacaatattgtcgtttattttcagtaaaaagacaatattgtcgtttattaagaaaattgtcgtttttaataaaaaatttcgtttttcagaaaaaaacgtcgtttggtcaagagttccttttttgtttgaattttcacattgtcgtttaacgaatttaatttatgtatataaacattcatccaaatccacaatgagaatcatttagcttctggtgggaaagaagaaatttctgc

SEQ ID NO: 208993 - DNA, 820 bp, Cannabis indica
gaggagtggccaataaaacaaagaagtgaaaactgacaagtgagttgatgatttgtaacaagtaacaagtagtagtaaccaacacaccacaacaaaaggcacaaaaagcataattgatatactctttttcttttttggtatatatatagtgctttataatacttaaagactactctgacaaaagatgttgtcattagttattacagttcacgcggtttgtggggttaaaaaaaaataccaaaagtacaacacaaaaccgcgtatcaacttccatcaaatgatgctctaactctaactctaaactattcattaaactcccataaaattctcataaccagacaaaaatttctctaccttaggttcttcttcccctttcccttcttcttcttcttcttctttcttatcttttcttctttggttttattcaaaaaagaaaaaaaaatggttttacatatattgttactagtcatattgttcattgttggtttatttaatttgtacttctatgttcccaccaagaaaatctatgtttggattcaatccttgttcatctcaactaatagtagtggtagaagtactagtgcttcatcaaaaacttcaattgataaatcattgttatctcccaacaaagagaagaagatggtcaacaacaacaggaaggatgagcttagaaaagtattttccacctttgataagaacagtgatgggttcataacaaagcaagagctgatggaatctttgaggaacataagaattttcatgacagagaaagaggtagaagaaatggtgttaaaattggatgctaatggagatggtttga

SEQ ID NO: 208994 - DNA, 923 bp, Cannabis indica
aaaaaaaaaaagccaattaaaattattttaattgcccggcatgtcatttctgcacctggaagtaaaccagataaggggccaatcataattctagcaacgatagcgagacagtgctgttaaaagtaaaatatgctacatgattttacgtcacctcagtttcatatttattgatataactttggtgcaaaatttagtgtcccagacactggcaatattaatcaagaagtgtttcacttctatttacagcattgatcataatgctatacagtgacaagaggcatagaagcagagcctattgatttacaaaatgctcaacaatataaatatatgtgtgcatgttaatgcattcatagaagttaaaacatataaatgtgttccaaaatataaatcagtatcgtgaatagttattctcactcttcaagcatccaatagctccgcctctgaaaatattcgttatcttctccatgagcatagtagcaatggagcacatcaacgcttccaacctaaaattgcttaaaggatgtcaccactcagatatatatatatccatctatgtaagaaaccaaaataaaaaagaggagaaacaaaaaagagatagaccttccaagtacaactaacaacccaaaataccatattatgattacaaaatgaatttcagttttcttttagtttgagtaatccagcttaatctcagatttgtatctagattggttatataacttgaataaataagaaaaaaaatacagttaaaaattgttttgactttctttggaattggtactcccaggactcaactaactaggcccaaatagctaataaagatcctatgctggtcagtttcttttcgaaaaacataaacccttagtaaggcaattaaataaatcaacaatacaatttaaagaaaccttacctttaatttttca

SEQ ID NO: 208995 - DNA, 242 bp, Cannabis indica
tattctttaataaagcataaaatgatatcaacataattgattgttttttttatttaacatcttatctatattacaaacttttttttttgatgtataatctttcattagagatgatctaagatgggccgtacctttttcttaaaattatgtaacaactttgggtagtgtgacaaaatgaggtaaagcccatggacacctatagtgtgtggctgaggcctagcgaagacatgagtatagcgcaa

SEQ ID NO: 208996 - DNA, 723 bp, Cannabis indica
taattttttttttatgttttgtagtttattcgaagttgattgatgaatgatttgcatattttaacgaggttgatattatttttatttttctattgatttgtagttattattttgttattttatagttgtttttgtgttgttgttctttaggtgtttttataagttttttatgttgtttttacgtgtttttttattatactgttgttatttagtttgtgtgttttttagggtatatattttaagtttattgcagataattttttttgttgtaaagatgtgtatttattttgttctttttatgttttttaagttatttttaagtagtttttggaatatttttttttgaataatcattttatagttattttttattcatgtatattttttatggtgaatatttttaatttattcctaatattttttttttgttgtatgtgtgtgttcttctgtttatgtagatgcatatatttacaatacaatgataagttttttcatttttagttggcacaatgtataataatagatattgagatactaattatattttatccattatattatataccctatttttaaaatcataaaattttattgttttcttattattaatgtaactatttgtataacttctaaaaattaaattgtcattttaaatgttactaacttaaaaaggaagagagggaaaaaaatacttaaagtatgaagatataacaacaaatttca

SEQ ID NO: 208997 - DNA, 992 bp, Cannabis indica
ctatagttaataaatattttgaataccaagccacactagccaccagctagttgtcttgtaatatttatccaatcgtttcattgttcaaaaaaatatttatccaatccattttgtcagaaaaaaataacaaaatagaaaaagaaatcctacggtttgtcggttaatgcaacagctccgcaaaaaatctaaccatacacgtggattccacccatataaagatgcatgttaatttactgtcccatagtagtatgctgccacgtgtacatagacgtggcaaattagtttctttcagatttatcagggtgtctgattatacccacttatcttcctacgtggcatgatattattggttattagactgtatttaccggccgaaggtgtttataatattctattggccaagtttaaaatatctatgtacgtggtcagaaaatggatcagaaaaatgcagtagccaataaagaaaagtgtatttctctggacaaaataataaaatatatgtaccagcatacgtatatgtctacttttattacataaaaaaaataaataaataagagtttactatttctatatttttaacatcgttcatcaattattcacaatttcatattaataaaagttatcttcgactgtactcagaaaaataaaaaaagttatcttcgacctatcactatatatactatgaatgagtgatgtatttttttttttgttttgttagccaactctaaaaaaaggtagcagttaattttttttttttttgagaactggtagtagtaatattaaagcaataaataataacacatcaagtcatttttaaggataattttcactaaaaatcagaaaagaaaaaaaaatattaataagtttgtaaaaaaaaggggcatatcaaaccattttattggttttaactatttttatacattttaggagatcgatgtatatattttccaaaatattcaatatttagtcatataatttcttcctactgctta

SEQ ID NO: 208998 - DNA, 826 bp, Cannabis indica
cgaaaatctgcgttaacactatccattcataaatatcaacatatatataataattacccaacacaatatttaatttatacaattatgaagatagttcttgatactaattgttgggtttatggtccatataagaattagaaaagcgaaagcatatttgattaaaattaatttaatccaaaatgaattataagtccaagaatctcaacataatgtatatagattaaatctagactaatgaaaagagagacaatacattttgtagcctatcaggggattctcactatcattttgtattttatcgaacatccaatccaaaaacttgttgaagtatttacaccacaatcttctaagccagcctcaacactcatgaataaagtgggctattagattctattggatgagtaccattatgtaatcacatataatctcaactcatgagatactgtgataagataaggatggtcaaaaaactcacgccacacttcagcgtgtgtggcgtgtgagtttgtagaagagagagaggcatgcgaagagaaagagagagagtaagagtgaaaagaattcaatcatattttctctctaaaagtatcaatctattctcttattcttaaggttatttgttatactggtatatatcatatatatataaggttataatatttaatttgattgaaattcaaatttaaatatcatataactaattaacaaaaatacaattaaatccttttattttattattatcttttaattaaatagattaataatggaatattttaatggataatgcctattgatgggtacaaaaaattataatgatgtggcaatt

SEQ ID NO: 208999 - DNA, 603 bp, Cannabis indica
atttctttgaagctatgatcatcacacgaccaacatgatcttcaattcatcactgttttgtatttataaaatgttttctacaaatatttcttctcttaatttttgcctccaagctaattaattacttactattaattaataataacgaaatagagaaggttaattataaaattaggattttatttttaatttttagaggtgtctataagaaattttgaatgaaaaatatgaagtatatgaatgattatatgaaagtagaataaactgtaatcgaacatatacacagtataatgaaaaagattaaagtaccttcacttattgattctttgagtttccacacgagcttagaatctataaaagaaaaacaagtttgagttagtgtgggtattcagacttctaagctttatctaattttcctagatggatttactgttttcacagaatgagtagtgaacttaggaccggtaccctatagctaggatacttccatcagtatttgtgtcacattaattgtcagaatattttaacaatttattttagaaattaaattggataactaaatatttattaattaaatggtgaccataattagaatattcttaa

SEQ ID NO: 209000 - DNA, 892 bp, Cannabis indica
cttacgcaaattctccaaaccccaaaccaagcttgatcacaaatgggaagacccatttcgatccttagccgccaagattgacgaatgctgaaaatacttatgcttcaaaacacgacttggtaatgagttaggatcctaaagtaattttcgcattgtcttagctaccatcacttgattaaataactccaaatccttaaatcctaatcctccctttgatttgggtttataaatagtatcccatttcacccattaaattttccttttgttactcttagcaccccacctgaactatagtataattgagcgtaacttatgcaattaaaaaaattataagatagtttggaacagcctgcagaattgacttaatgagaatatcgtgtcctcctgccaaaaagatcttcgcttccacccacgaacccgcttttgaaccttctcacaaatactatcaaattaaaggtcctcttcttgtttttcttaaaaccatcggaagccccaaatacttaccatgagtttccaatgaagtcaagcctaatatacccaatacactggtgcgctccgcttgttgaacattcgggctgaattccaaattgacttattgtccaaaaccacactcataaaaatgaagaactcttcggattgtagctaaatccaatccattagctccaccaaaaagaaaactatcatcagtaaaaaataaatgagacaccctaggcccatactgagaacactgaaaacccatcaattctccactcaattcatcttgtcggagaagagttaaagcgctttagcacaaaacaagagcagatatggcgataacgggcacccttgccgtaaactgctttgtgtttttcctttcgaaataattatagttttaaatttttttatatatata

SEQ ID NO: 209001 - DNA, 962 bp, Cannabis indica
acactcactgatggaactgtttttgattcaagtttcgacagaaatgatccaattcaatttgaacttggctctggccaagtgatcaaaggtgtgtgctgcagtaataacgtattaatgttaacttgttttttgatctgtcatgaataagcattaaatgaatgaatcaatgtattcatgcttttcttctttgtaggatgggaccaaggactgttgggaatgtgtgttggtgaaaagcgaaagttgagaataccagctaaacttggttatgggccgcagggttctccacctactatcccaggtactgatttactttgttacctctttctaaactttcgcgttttctgggttaatgaaatatcaactttgcaaattacatgagaaagtttttagtgaaatattaactttccaaattacatgaggaagttttctgctttgtatcattttcttgtgaaatttggttgcgagggttgtcttgtctgagcatctcaattcgactatctacctactttttaattagctaaagctaaaatagggagtggggttaatttagatgcatctccaacgactttcaagtatttagactctagatttaacaagagaaaccaaaaattgtttagattttagagaattttttttaacttcattccaaccatgctatctatttcagctaatatatattatctatttaaacttctattcatgcaaaaggataagtttgattaaaaatctaataaaaaaaatttagtagaaataacttaatgagcttgtttagtctaactcctttataactctattttggagagtaaatacaaggtggggttagagtgcttatttcattccctattatagctaaaaagctattatagagattagaaagcttttggagataatagggagtgaaatataaatagtaacattccaaccattctttatttctctccaatatagtcatgaaagggcta

SEQ ID NO: 209002 - DNA, 1775 bp, Cannabis indica
  modified_base (7)..(7): a, c, t, g, unknown or other
aaaaatnttaaaaagcataatttagtatatgtcaaagtttagaaagtaaaaaatcctaatttagtcttgatataataggataagatgtataatcttactccctattccatgcaaaagcaaatttttgtgaaggttcttccagcgcgggaaattcccgaagtgtcgatattcatcacgactggtgcacattaaacaaaaaaaaataaaactcccattagtattagtcatgaataaattaagtcgagagaccattataataccaaaatacatgcaatatataagtttcacgagggaggattaataagtataggagagtttttttagtttattttcatataatagtgcatattataattatttagaacttatatatatatatttatggggtgattttataatataattctaaaaaaaagtatattggtgtactttttatttgttttgatattttggaaaattttttagtctaatttttttttaataattgtgtatgttatagttatttaagatatcctataaaattttgaaaaatttagaataatttacaatgtaaaaaataatatttaaaccgtctattatacatgcctataaaataagagttatgcgtgcaacagactgtttgaaccctatttttgacgtgttaaatgttttcaaatctctcaaaatgttgcaggaagccttaaataactacaacgtatgcaaccatacaaaaaactagactaaaatatttttttaaatactgaaacaaataggagtacactgatacaccctttttcaaaaaatgcattataaaattttcctatatatataaattttcataacaaatagtttacatgtccagtaataaaaataaatttcagatattttattaatttttttttatatagatagcatgtaattgtttaaactttatttacgatattataattatttaaaattttctaaaaatttaggtcttaaataattacaatgtacacttacaaaaaactaaataacactgctaaaaaaaaaagaaaaaatgtaccaaaataatctttttagagtttaaagtagaataataataataataaaaataaattattaatttttctaccaaaaaaagtcaacggtagttgacatccctaattatatgttgggtctgcgcccaataattatatgcattttgtttgctttacctttcaaatgaaccaataattttaaaaaaacaaaaaaaaaaacaaataaaataataaataattaaagaaagaaaaaaaaaaacttattgtattatattagaattaaaattattaataaaagagaaaatgctaaaaaaatctaaaaaaaaagatgtcacatattattattggtcgtaaatgttaaatttaatatattttaatttagattaaaaatgtggaatataatatcatggtacctcaaaaaaagaaatggaatcatggtggcgatatatgccaatcttattgttttaaacacaattatgttttaattagatgaatgttaattacaaggccatctttctcaaccttcacgcttgtaacataaatatttgctaaaatattttcttataatttttttttcatagtagtgctttttgtagttacaaaatcattttttaaatttttaaaaaattctaaatagtctatagtattaacaacagaatttttaatatttaagtttaccactcctattcaaaagcttctaatttgtgttttgatctctaaatagtctatacgaaattataactacaacggactattgagaaaaagaaattatttctg

SEQ ID NO: 209003 - DNA, 544 bp, Cannabis indica
aggtattgattcaagatgaccaaagactacaaagataggaaattgttgtggagcaagttctactattaaactctatacaaacaagccaactttaactcactgtagttttgcatatagaagacaagttctactgaataaactactatacaaacaacgaccaactatccacacctcccccaccacacacacacaataataaaaaaaaaaaagtgtcttaccaaaaaggctacagtttttccggtgcctgttttagccttggcaagaacatccttacctagaaaacagaataaaatagaagataatcactttcagaacctggacatcaacaacaatacagatacataaagttagatgaaatgaagacactgatacacctatcattcacaagttactaagtgtagaacaaagatgatcaatgcaataacatgttggcaaggcattcaatatttaaatgtgcaagctggtatcctcgatgcttgatcatgaacgaaacttatactaacaattatcgtaactagaaacaaacctttgagtataagtggaa

SEQ ID NO: 209004 - DNA, 1229 bp, Cannabis indica
atcacttggtgtcccagaggttgctcacatggcacttctagctaacacgctctcgaagaaatctgacagcttatcccctcagtcaagtcttagaaaggcacacaaagaaaagaaaatcaccttttttgggtgagcacccactatttttgacgttcttttccccaacaacagctcatgcctcacctatcactaatcgaccgtgtacggaagacagctcaatgcaacttagtcctcacctacctagaccattagctcaaattatatcagtaaacaattgtattttaccccatcaataagcattttacacttaatgggtctgaatcagtctagcccatcaaggatatatatgcctattaatatgacattatccctccatgtgaagacttagaatttttagacttcaaaaccaaaaaatatatttattggttattaatgtaaatagaataaaatgtgggatcatttaagtaaaatatatttattttgtgtcatattttgtttgatatttggtgtgaatcattagagttgatgcactaaaagtaatagtttcatcacaaaattggtgaaaaattatcccaaaatggtggaactattagagatagtcttaatatatagtgttagattttgattatgcaccaaatcagtgcataactttttcttttcattctagctattcttttaatttattttgaaatataattaacttttttttttgataatatgcataattatatcagaaattagttattcatgtaaataatatagtacgtgaggtctttaaaggaaaatatttttgtagtgtcaaatttagtgtgatataaactgttaacctcaaaaattagcgttgctataattctcggtattagttacctaaagaccaagagataagcaagagatcattcagttagtctactcacccagtgcacattttttaaagtctctacttgcgggtatcgggatgcatccgtacggccccaagaccaatcccgtgaaccatacatggatgcgtgaaagtcgtgtgtgcatgcctaggttagggacttgcatgcgagtccatgtgggggctcacatgggagccatgcatggtgtgtgcggtgtatgtgtgttgcggagtggggggctcgcgatgcgagccgtggcatggtgagtgtgtgcgtgtgttgtgagtctcggggggctcgcatgtgagctgtggtggttatgtgcatggtgttgtcgaatgcatgcatgtg

SEQ ID NO: 209005 - DNA, 577 bp, Cannabis indica
taaaaaaacgaactaaataatcacctgcttaatttttagataaaaaataaaatattgcagcatcacaattaattttaaaaatacttatattctattttatctagtgcttagaagacacaacgctagaaatcgctacaatagattcattcaatctcatagcagagtaatcaactattgtgtaagatacgtagcttgaaaacttgtaacttccaaccactaacaacgatttgatggtgagccatcaaaaaataaagaataaccaacaacaaaacaaaattatttcacacagacaagactaaaacactcaaaacaatttcacagaaataagacgaaaatgttcaaaattatctcacagacggaaaactaaaacaatcaaaaccagcacagtaataaaaatcgaattgcaatagcaaaatataattctgaccaagccacacctaaatccaaaaaaagtcagcagacctgttagagagaaaagacaacctccaataactataaatttaagaacgagaaatcttaattttttttattaacccttaagagagagagagagcttagatacacatagaggagatat

SEQ ID NO: 209006 - DNA, 1087 bp, Cannabis indica
taatgggttggattgctttcatgaaaaatggttgcccatttctatggttctctctgaatgtctgtagaaccaatgatttcctcttctctcaacaacaacaacaacaaaaaagaataatgaatgagacactaaagttacactttacacatttttttttacaaatgtgtaattaattcaactacataattaatgtgcaatttgagttcttaaagagttgcctaatttgagccttaaatgaaaggattatttcacaaaaacataaaaataacaaaaaaaattataaaaatacgatttcatgaaattttaattatttgtatggtttttttgattttatttacagaaaatacggtctttttatgttgtagtcttgctaatttgttgttaattttttattatctgtatgttattttttgttgttattttcatgttacttttatgtagttttcttgttaattttatattgttttcgtgttattttttagaaaactgtaaaaatgtaaaaaaatattctttaaacgtaaaaatgtaattattttacaaaaaatagtgtcttacgtaattattcctaaacgaaatgttaaaatggactttttaaaagaaaaaaaaaatacatttacttcataatttttttttacatttatttggtaaaatcaatgttctaaataaaagtacaatcaaaatatttatatattagggttacaccaataatactataaaatacaattattttttttaaaaaaaaaaatgattgcatattatagtacaattaatgtatttttttacatttttttaaaagactaggatttaggacaatcatattttggaagcaactttcgaaggagttcctcgaacaacatcaggttgtatgtgattacgtcatgcgtgtcacaagtattaccaatgtaaagcaagacaaacaagagagtttgcgaagctacattcaacattttagtgctgaagttactaaggtaaaaaaagtctctaaatatgaactcaagattgttatagccgcaagagtacccccttgaagtagactatgggagaacatgctaaaaatagattttgatggcctagatgacttctacga

SEQ ID NO: 209007 - DNA, 1061 bp, Cannabis indica
taaaatctaataactataaaaaatcatacatgaattcaatttttcaaaataaatttacacagatttttctattagaagaaataaacattgagagatttaccttttgtaaactacatcgacaatgataaatatttgtagtaatcaaacttcatcatcaaatggaaaactattttttatgtgcgacatcttttaacattaaattatataatatctttaataaaataaaaaaaaaaaaagtaatactgaaatgctaatccagaagaactttgttgattgagagagcttgaacaattgtggaagcatctaatagtacaactacattatccactctaataactcttgaaactttgactggtttcatataatggttaacaatatctcgaaccttgatagcagaaagaccaactacaccatctttctacaaagcgttaattcctacgtagcaatggaacatacacatgaataaaaatgagacaatatagtagtaaagatataataaaagtttcataaaaaaaatataaaaaaagttttcataaaaaaaaaatataataaaagtggatatatatatgtatgttaaagtcaaaagcttgaatatatacactataatactaactctgtattttttaaatattatacatatttatataccgactctttgttcttgatcaatggctagtgataatgttaattttccttaatttggttgagatgacgatgattatgatttcttcttcgcaactattgcatttaatttttttgtgattgtcttgaaaataaaaacaatcgacaataaaaagtagggagagagaggttatgaagagatgaaatagatatgggattatatttatagaaatttttttgcatgagttaatttgggatgttaattaaaaaaatttggaagtttagaagttgaaaagagaaaacttatttaacgtttggaattaattggatatacacgtttaaataatttagacaaatagattaaaaaagtcatctaattaatagtataaattaaaatatattgattgtcaattatatgttaatatattcattaatgtcat

SEQ ID NO: 209008 - DNA, 1256 bp, Cannabis indica
gaaggataaataatataacagaagtgacattttggtagttttgctaccaaaaattagtttgtgaagtcaagtgtgataaattatatagttcagatggttatgtcgttaatatctcattatttttattaattataattatagaagtgttagtatatgtgtggtaaaggtgttgatatttggtagatgtcaagtatgtaaatgtaaggtattgtattttatagcgaaaacctatatttctttatagagaaaaacacttttttattaaaaaaaagttgtaataacataaacacatgaataagaaatatgtatgtatgtatttatttatttatttgaaaaaaaaaaagaaaagaaaatctttatatttattttacttcaatgtgaaataaacacatcaatattataccatataatttttacctatgtaagtaaatgaaacaagttattctaattctagtttattaacataatttgaggtgaatccaattataaaagattttaattatttgtaagtaaacacactattatcatctcagatacaaaatcttccccattagaatcttcaaagaagaaagtcaatattgttgttttgttttcaacttttccatacattcttattccccccatttccatgtatagagtctctatatataagtctcacatcaatttgtaaaatggaaaatgacttgaacaaatgatgatattggatgacataaaccttagatttttttttggtcaaaaataaacctgcatcaaaaatgttattcgtattttaatcatcatatcatatctttttttttagtatatgttatgtatagttttcctcatagagcattagtaaggaccacatatattgctggcaccactactaagcagtgtgatcttgttgttactttgactagcctttccagccatttgtagtcatttaatggatatatactctaaccccattttccctaataatggtctacacatattttatatatatatacacatgtatgaattatttagaatctggtggtgatagtaattgactgaactttgggaggcacacacatcttgttcttataaggtaattagtactgaaaacagtcaaattgttttttgataggaacaaaatagtcaaatttaggcccagcaaaaagaaagaaggtgaacatgattcggttttggtaaagatggagaggttggatcctcactgtaatgcttattgtgggggtaagtctacctcatcgcatatatatataatgttccaatct

SEQ ID NO: 209009 - DNA, 192 bp, Cannabis indica
attattattattattatcactagtagtatagttatacttcttggtgagctatattatgttctatattggttttgtaaagaatttcacagttattcaaattattcaaattgaagtaatagctcttatggtggctttggactagtcactttgaataagactttctctctattctattgaatttgaatgtttagc

SEQ ID NO: 209010 - DNA, 777 bp, Cannabis indica
aaagctgtaattttgtacatttaattataatacataacccaattaagtaatctcataattcattttaggtacattcttagctaatctatgtacatagcttagaaaagtatttggaatgataaataataaataaataagaaaccaacttaagcaaaaaaataaaaaagagttaaagaaaaaattaacaactacttcaactttactttttattttgctaattgaaagtgaaattatgaattgctttttcattttaaattataaaaaaaagtcataatttacataaaattttagatttataaatggaggaccctaaattggttgggcttttaatactcggcggcccagtcataggcctacttactttagtcgccacaaagacgagttcaaacgcaaaatgatgagtaatagtaaacccattttataataataataattattattattattattagcggtaaaatttatttgtgaaacttaacattataaatcgatttttttagtgagaacacttttcaaaacgcacttttataaattgttgttaaatgctaaggagaattgtctatgtgtaccccaagtgtacacatgttttgttttaattggtccacccactttttaataattataaaattaaaatattatatattttttaaaaaaattataaaattatatttttttcttctaattctatcgagagtttcatgaataagaatggtaattgtattacgccacaagtgagattggaaatgaatttaagaattttgttagtggtattttctc

SEQ ID NO: 209011 - DNA, 657 bp, Cannabis indica
acctaattcctctttcttttgtcacatataatcttcttattatcacataaattaactaatttgggtaatatgttagtaaacgatcgagtttcgaacactaaaataagtactacaagaaaggagatcttttatcccactttttaagttaacaaaaataaaaataggataaaatatgttattgagatattttattccacttttaaatttgtcgcttcaaatatgtagctaattttttttccaggcaagggcttgtgtttggtagaacgttaaaaaatatatcaaaggtaaaaattgagttcaagactcaatttttatgggatagcctaatgggcttcaaggttttattaaaacccttttattccgatttttagttaaaaatcaagataaaagagtttgcgtgtggaactcttttatcccattttttcatttcacaatgtccagaccacctacccctttcgacccttcttcttcctctgattaaatcctccctcaaacccttttccattgcagttctaacctcaccatcaacgttcgcccctccattaaggtatatatttttcatttgttttaaactcttttacatttgacttactattcttcttttttttggagttttttttttcaggatttttttctgcttgttctttgttttttttt

SEQ ID NO: 209012 - DNA, 1370 bp, Cannabis indica
actgtattaattttcttgtacaaaattagaggattttttttttaaaaaaaaaaaaagaaaaaaatttgaaacgtccgagcccactgatacaaaaatttgtactcgttgattactgggccctaaaccttaactaaattatttaaatctgaaattgttttatgtaataaattggaatcgagtggttgataaataatatataagatacactatttaattataatttgtaagttcaattaattaatccttgctttgcttgtgatattatgtataggaataaaagtatatatatatttgggtaaatttatagtatactctttaaggtttgagtaaattctatatctatttcgatatttaagaaattttttttatattttttttttatgaatgtgtatattgtagttatttgtgtatgttttaattatttaagaatatctgtaaattttattttgaataatgtatagtgctaaaaaagaatgttcaaatattttattgcacgcgtgattattttttcttatatgtgtggtaagtaattatttaaattctattttttaaaattctattttttggcactataaaccttttaactttttaaaaaatttacatacaattttaaataattataacaaacacaaagatgatcaaagaaatggagtaaaattctcctgaatgacgaaacataaacggagtctactaaatcactttttaagagtgtactacatataagaaaagaagtatataaatataattactcctatataatgaatagaaaaatttgtatcataaatattaattttattcattttattgctaataaatacctaatttaagagatttatagcacaaatactaaaaactctatttttaccatttttcgttgatactcgctaacaaaagttagtgtagtggaaacacgtcttttgattattccttaattttttttttatccatttcacctaatttattaaaatgatacacaaaataaattaatatatttaaatcataaaatacaaaaaaaaaaaaaaaaaaaaaaaaaacaaaagaaattccaacctgtggcacagaccctaaaaaggattaaaattcttgctatttcttattttattctaacatcgagtaataaggtcacccatcaatgggtctcatgcaatagccatcgggtgtgcttatccattgctttgccgattgggttggtataggttttcgaactcttctggtgaagcatggggctttgttgtggtagatatgtgcttcctagactgacgaccgactctacagaccaacacaaatgttttcagcatgttttgtccttattcgcacgcgtttttgaaaaaatttatagtcacccatcttgaaattaccccaagtcaaac

SEQ ID NO: 209013 - DNA, 806 bp, Cannabis indica
aaatttaatcaaggtgaacataaggtttttatagtgaattaaatatatattttcttttcttttttctaaaatagggcgacttaaatatttaaatgccaatatttacttaattttatgcttcaaaaattaactatttatatcattaaaattaaagattagatacttaagtgcaacacataaacacttaagtacaaataaatttattaaggatttatgctgtcaacttccctaaaaatataatattagttagttcaacattcatctaaggaataaaaaaacaccaagtccatggacaaaattgttttctcataaataatgagtaagctaatccagctgggacacaaaattttgtatgaaactatcccaaaacagttgaccaaagtagacattttagaaaagatacaatatgagaagaaagtgaataataatgtgtgtgtatagtttagacttttgacatatataactaaaaacgtaaatatcaataagaaagacatgggggagcgtctacttcgagagtagccattttttcaatttgggtatgcttactttatatagatagttaattagctgtttgtttttttatgtaattattttcatatttaaagaaaaaagtggaattacatttctcatttctcaacaagttttgtatagtagagaaacagatgacaaagtcaacgtacacattttctttcagtcctacttttattttcttctctccaccacagatattaagtttaaggatatggatttgtacaacatatatatggtagagaaacatgttaagattacatatgaagtagacaacc

SEQ ID NO: 209014 - DNA, 643 bp, Cannabis indica
atatataggcagctcactaattttatgtaccaaaatgaaaagggaaagatgcaacagcatagctctcttttgtaccagcggtcctgtgagaaataaaatatcaaatgtatcatttaacataatgtatactgtatagtgtcataatttgcagggtggacctgatacgccaacatgatctactcttattagcaagtggcaatggaaatttagcttgtttaatttgaatggattacatgttttatttaatgtatattttacaagttcatgtttgaagtattcagccatgaagttcagtttcattgttatggtctctccaataaatttaagagtggaaggttgtataattccatttttgtttctttatattatgtcatcatcatcatctagccactgaactaatatgtttgtactctagttaacccagaaaagtatatcataataccctaacatctatttgaattcgaggcacacattgaatactatcatgagaaaaaaattgaatttaaaatgttccacgattgtcttattgaagatgatttgtaacggtacatattaagacttaggtaaattctataatgcaccattttctttcaaagagatgtactgatacatctttatccattttagtatttaaaataatttt

SEQ ID NO: 209015 - DNA, 888 bp, Cannabis indica
ttttattttgttttttttatataaatatatcgatatagatataaattttggtaaatttacacaattcacttaaaataaaatcttttcttttacatttttatagttttttacaggttttttacaatttttttttccaaaaaaaaaatgttacatttattttatttttatgttatttttccgtaaggacaacgtgaagataataattttgatttttgtaagaaagaaaaattaaaatctataaaaatatatattaaaaaaatgatagatccataaatataaagtttttgttagttttagctttttaggtatttatgaattaatcctataaatttaagctttgatgatgagaggccattagggcatctccaatgaggttaacaaatacagttgtcccattattccccacctaacacatttcgccaattacaatttttttttgctaattttttttattttaaaattttaaagagcatcggtgcctactttgaaaactttttattatctctctcttctctcttatatagtcagtattatgtggcatataatatacatatatttaattataatttttatttttattttaattatgtatattttttgttatataattaatttttttctaatattatttaatgaacaatatcatcttttattaaaaatatttaatttaagtactatttatagaaaaacataatattatttataattagtttttaattataattttagtttaatcttaatagttttaattttataataattttcaatttttttaaaaatatcttacactttttttttacaaaaataataataataatatattttttttttaactacaataaataatagcatcacaatagtgatttttaagaaatttctattttatta

SEQ ID NO: 209016 - DNA, 533 bp, Cannabis indica
tataccatgtaaattttcctaattatattaaaattttgtcatttttacaaactcaaaaaatattaaaaataaaattactttcgacgactaaaatcaagataatgtgtcaaaatttaataggtaagagtaagacaattaaatttcattatttatatcatttttttcttcattaaactaataatacttttatcttataaacatcacaggcttcaaaaataaaatattttttaaaaaaataaaaataataataaatacatttaaatcataaaaaattcaaaaacacatccaaaacaaactctaattttgtacagcatactaaaatcttttcatcatagatttaagtttaaaattattaaactattacgtgcaaaaagatattttatttgtaaaactatttaaaatttataatataataaattattataatgtttaaatgcaataaacaagtgatttttttttttttttggtaagaaacaagtgattggtcaatcatacatttttgtaaatataagttgggctgggctgggctgggc

SEQ ID NO: 209017 - DNA, 1406 bp, Cannabis indica
ccctattatcttcctaccttcacctacgatggcctcttcctccaacaacccaaaccctatcactgctcttgatgacgaggacagcctggtccacgatttcgagcacatttccatccactctcctactgatgagaactcgttttgcttgtttttcaagctgttatctcccaaatctgctaagccctcttggattgaaaaagccatgtctgaagcttggaccctccgattcccttgccaaatctctgaatatcatcatgggttattcttggcttcatttcaatgcgatggagataggcgtcgtgttcttgaagaacagccatggcattttgataagtttctgatggtcttcacccaccctgatgtgtcacccactcctactcctgagtctattcggtatgttcctttctggattcaagttcacagaatcccatttggtcgtaaaagcccccaactggcccagttcattgctgacgagattgacgatctccttgaaatctatcctctctccttaatgcaaaactttggtccttaccttcgaattcctgtcctccttcacatcactaagcctcttcgcagaggtatgaccatacgtttccgtggaatccctgaaccacgatgggtcagcttcaaatacgagagcctcccgaatttctgctatttctgtggccttgttgaccatacctacaacaaatgttccaaatacccccttcgttgtgacaattttcctcatcttcctcttttggaatacaaagatatcctccgtgcttccccttcttcccctcataaaaagaacccgtttgagctgtctaactctaccccttttgaggagtttttccctcgtatccatcccagaactgatgctcaagatttgcaacaaacggtcgatcaatttctccatgccgactctccccaatccagtcctaatgctcatgtttcggtccagttccctcagcctgttatatctacctctcctttgtctgtcacacaatccagttcacgccctgcaatgttatctttgtcaacctcaatctctgctcctattatgactgacactgtttccacccatactgaaaaagcaaaagggaaagcccttgtgatgtctactccaactaatccttctcgacccagagggggtaaaggaattgtgatcaatgaaccttgcccctgccacttcccctgttattaggccgaccttcacgcgtcatgctacccaagttggagactctatgcgtagcatgcttaagcgcgctagagctattgcttctgatgatgctttggtcccctccatgtctgatgatgaaccaacggcgggtgctgctacgcggccccgccgagaacaatgagtctctgcagttggaatgcttgaggtttagggagccctcgagcattccataatctctccctgc

SEQ ID NO: 209018 - DNA, 1321 bp, Cannabis indica
ttttaaaaaaaaaatcatatatcattatattacaacaaaccatcatataggtacaataccctaatctctatattatacaaaaatcaccttacaagctttcaaaaaccatattctaaatcaagttaatagtttcattggtaagactcttaagaatttaaacttaatattttgcttcactttagaaatcaaaacattcaatgttcacaaagaactatatcaaaatacattattttgactctttttaatggcttttaattctctcattaaccgagagtcaatctacttctaattaacctaaccattctaaaatagcttctaaacattgtttgctataataacattcttaaaaaacaaatagtttgttatctctactttttgtgtatagattaaacaattattatcattatcactatatttaataattttttaatatatatatatatatcttaatcacatctaatcttgataactaattaataatcatttcctctacatcctcaccaaacaagacatcaattttattgaaattaacttttaggagacatattataactaaataataactatataaatttgttttattgaggtttttatttcatttttttttaaaaaaatatatttatataataataaaaaaaatggaatacatcacccacacctaccaaattttatagaaaaatatacaagtaagttataaaattgtaaaatatatatatagtatcatatatataatatataattaaattactacattaattaccatgtattaatatgcatttaattcatcaataataaaattgaaattaagctactttaaaattatttaaccaaaaaaacacaagattttagctacaaatgacaaagcatttacataatgatatacataatcatataatggtttggtgatctaacattacaagtctttattttattttcttttaaaaacaaataaaagataattatcataataataataattaattatggagaatatctagcaacgcaagccaaaatctttaggtgggttaagcttttgaagaaaatagatagttttagcaaatttctccaaactcaaagttgtttctcctttgttttcattctctattatacatatataaataattattatatatatatgtattttttttttgttaattgttgttgttgttacctattgttttccatcaatattaataagtactttcttttttcacatctcaacccataaactttgtttttttcttctttcctttctctaatatacagacacatatgttcttcaatattatattatattaatatatagttataattatatgaa

SEQ ID NO: 209019 - DNA, 606 bp, Cannabis indica
aatagttcgggggaatttttaacgaccaaaaaagttcagggggcacgatttagtacatgtcaaagttcgggggaaaaattactaattacccaaaattttatctattttatagatagttttttcaaattttaccaatttatacattctaaagtgttgaaacttgaaaaaaaaaagaggataattctattacacaaactaacctaacaaacagaaagaaaaaagctatactcaattattttgtttggacaaatgctttactcatctaaattaattgtaataacttaagaaactgaaagagagctttaatcagttaatacagtttggcgcttagtaaggcttggcagcaaacacggcagcaagcaatggctatggcgtcttccctcaacttgtcttcttccccatcactctcccctctcttctcctccaaagcccatctctttttttgtcactctccacctccaaaacaacccatttcttcataattaccaccgttacgccacttctcttaccgttgcatcccgtctcggcttgagcagctcccgtggctctggccctgatcaggtcagagcccaagccccttcctcagaaacagaaccagcggtgccg

SEQ ID NO: 209020 - DNA, 658 bp, Cannabis indica
aaaaaaaaaaagaaaaattgtaagaataaggtggttgactccatatattttaccaatgaagggttaaaactacatttgcacacagttgcactgaaaatagggcacgtcagaggttgaacggctagatgttgtccagctgtcaaatgggccccacatgataatgaccactgacttttaaataatgctgggcccagattttgggagaaaatcagggaagacaactccagccatgtactgggcctgaaaatgactcatcgctaaagagttacgttatggacccaatagtggtagtagtgactgtcaagtggttaaaactttcccatcaaaggtagggccagctcaaactcaccaatgccttatgggcccccactcaactcaactataccttatgggcccattttggatgatcttttcaagtgggccggccttcaattattggcatctttcggctgtacagaagggaaagccgactctgttctcaagctgcctagagtatgtctgctttgcaaagttttctgtcgggttgagaacgaccgttttccagataaagtgggcccattataatgttattaatgggcctaggctttgtaaagtgctgttgattaagcccatttatgaaagcccaatgctcgcttctggtttgagcattacacgtttt

SEQ ID NO: 209021 - DNA, 690 bp, Cannabis indica
tcttttcatcaaaataactttttttaaaaatgagttgtatcatctttaacttttagctgtagttttttttataaattattaaataagctattttttaattgcttaatttttccaaaaattatgccaaagaaacccttaatcatatcattgagtattaatccatgcatgctctataatattgagcattaatccatgctctataatagctataatatcatagctggctttgaatttcaaaatctatgttatgtaactcacattttattacccaaataaatttggtgatcaacaaagttgttacaaatttggtaaatagatttgttcttcatctcaaaatataacattttgatcaaattaaagttgtacaccaaaaattaattgccaacacattttatattattacattattttaatacataatattatactattcatttcacaaaataatataaaatttctctatagagattaaagtatcataacaaaatatttgtaataaatatatttgtaacatttatctaacaatcaaataaatattataataaaatataattatgcatattttatattaattttgaacaataaataggatgctttttattaaaatcatcctgtaaatatgtgtattatgctacactataactaaaatgtactcccatttctcctgatcacccaatcatatataaatat

SEQ ID NO: 209022 - DNA, 914 bp, Cannabis indica
acaatatgaatttgtgaatataagagctagagaaatatgcaaaaatcattcatctgttcaagaattagagatataaacagaaatcaacaagagtttgagcacagcaaccgatcaaaaacatcaagtataaacagaaacaaatcacccaccaacaatttcaatggcttcaaaatcataaatacccaaacattttaaggttagaaccatcactcaatagcagaaaatcaaactctttgagaacctattatgttatcacgctagctttggacgaatctaatgataattttagcatacctgaagaaaacaaggagtggagactggagactggaagccaccgatgcttgaggaaaaatgtctatggacgagtgaagaagacggtttcagaaaaaggaacaaagagaagtagaattatttgtttggcataaatttaagggaaaatcattgaagtatattttttaagagctactataataaattgttttaatgccacattttaaaaattattaatgtctttttttaattttatttaatagtattataactataatttagaaacatctatagtaagagcactcaaggaagataaaaataattagttgaaaaccaaatacaatacaattgaagaacttttatatttggaccaaaatagaacacaagcaaagataaaactaattggttgcacttaaaataaagatctaaagtttatcatgaaatgagctgctattgagtcaactctaatgatagtatcagtagcaagaaaataacattaaaactctactttcccaaataaagagaggaaataaagaatttactttaagttcagaatcaaacagaatttactttaatccattatggaattaatactctatgggcaacagggcaagtaataggtcgaacatcacaagacttgaaaa

SEQ ID NO: 209023 - DNA, 599 bp, Cannabis indica
tatactaaattaatttaataataggtattacgtgatatataaatacaataaatatattaatttaattatttatatatcaatatatgtataattaacttatttctaaaataagtcaaatattttgttttgcatgttgtttaaggtgagatatttttattttattttaatagaaaaaatagaaaaattagatatatattttttgcaaaattaaatattcatgcttaattatattattaaaacggcatgtaatttttctattacaaaatgaattagaaaacgttaaaaaatcataactcaagctataaaatgttctcaagatattttgcatagtacgagtaaagaaatatagtgctttttacaaaaaaatacttaattttgggtaaaagtttacaattttactgttatacaaattttttaacaaaaatattgtcattttataaaacaatcgcaaaacaataaaatagaataattaaaataataatggaacaactaaaaaacaaccgtaaaacaacaatgaaaattttctcattaatatctctttatcaacttttgataaaacttcaaaatatagtgtgcctcacaaatttctctctctctct

SEQ ID NO: 209024 - DNA, 1273 bp, Cannabis indica
gagagagagagagactcaaaaattgcttgagagaaaaggaaaactttttataactcagtttttttatttatgtttggttgacaaaattgttgtgtatagattcaaatccttaaccttacttttatatattatgtctcttctaggtttcaggtaagtataaaatgggttattcaggaaaatacaatgggccttgaatcactcccttggcaaacacctttataggtccaatgggtttgatttttgttattttatttcattcaataaaacttttctatcttttttctaaactactattttcctgttctaattatttaaatgctaattttatctatttaataattataaataattatcaaccaaaattactatttaaatatatttattaattaggctcacaaagtatcttaattaataaataaaaccctctctgttgacattcgatttgctcaactgacagcggagccttatttattattgacaatcaccacgtgtaaattataaaagcaaataatgaagttgacacgtcaatttatagaggttcggcctccttatttactgagaaatgacctactctcctttttattgtattaattttggagataatactacacagattacatgcttttactttataatttctagctatggctctctttgaattttataatggtgagaactaatttatgatatattctgaacaagtaagatgggaaaatagacttagtgtctaatgactgaggaataacgtgtgagagagaaagtatgagagtgctctagggcttgagggacatagaattcagcccccctttcactttgccctaatgccctttatatagtttagggcttacaaaagatccatatttaaataagttaatctctctcaaaaatagggaaaatactcttttatcatgtatttatgatacaaaaataaccaattattatccctaaaaagataggaagataatctgaggttgaatccctacttttgtgggttgttggagctgtctcgtaactgaaattaagttgcgatccatccaaaaagatagtcgttgaccccaccattcaatcgagcttcctttgatgctctttatttgtgctggatggccttgcctttgcttgagacctggtcggcacatatgctccattggtcagccaaggtatatatggtccgactagacgtccttggttggccatttccttcaacttggtcttactcgattacttggaatccttgttgattgatgtgttaatacatgatgactttgcttattct

SEQ ID NO: 209025 - DNA, 528 bp, Cannabis indica
gcacaacactccaagttttgttgtcaatgagagcctttagttcataattcatggcatgtacccatttttcaaattgaatagcttcttggtatgtttgaggttctctcatggttgcaactgcaaaataaaagatttatatggatcagagatattggaataggaaataaaattagaaagattgtgtggagtggaagatttatcctgaattgaggaataacactcgaaatctctgagataggatggaggtttagtggctcgggttgattttcttgtaggattggaagcaggatcatgtgtttgtgtactggaagcaggtctggtgtttgatgtattatgtctagtagtggtgtttgagttgtctgtgttgtgtattgcatcagaagcaatattggtggtcaagtcaggtgtttcctgctctgagtgatcctgtggaggcatagaaatattggtgttttgttctgtggggtagtcacaaacatcagtatcgttaatcacagtactaggtaagacaacagtagaaaaaggatc

SEQ ID NO: 209026 - DNA, 709 bp, Cannabis indica
caaaatattctctcccttattttttttaagacatattcaaaagttgtctttgagagatatccaataacaaaatatatggttttgtttcgataatgagatggttatgctgtttgaggatgtcatagttttattatctaaatttctgaggacagttttatctcatttgtcccacaaagataacactgcggtctatgaattggctaaacatgcccttaggctagacaatgagttatgctggtttgaagaggttccagctccaattgttgaagtcttcccgggaatgtcctaatgtgattctgatcaggtttttcaaaaaaaattaaataaattttcatagatatagaaaaattatgtaaatatttggtatttatggcatggcaatgtgaacaaaatgtgtgattaagttatctattaaaaaccatatttctcttttcttatattgagttatgctaggttagttgatggtcactctactaatttacacaattttaatttttggttctctatgtggagagtgactctggtcttaagtcttcctaaatttgtaggctaagtaagctggtgtgcttagtgttgtgttcttgtcgagtgctgatcttgtgagtttgctttctttgtaagcatgatcaaagaaatagaaaagattatttcgttaacaggtggtctaaatgtagaagtggaagatgagtgggaatctaatgaacaggtg

SEQ ID NO: 209027 - DNA, 1120 bp, Cannabis indica
gaagcatgatagaaggactgcagcacttgacacacacgacttgatctgtcatttgtcatcaataattaagttgagtcaactcctccaaactctaactacaactcattggagtgatgtaaaatgtgtactaaggtacctaaaaggaacaatgtaccatggtcttcatatcaaatactttatttaactgtctttaacaggttactcatacgcggattgggcatattgtcctgatgatcgcagaagtgtagccggatatagtgtgtatttgggagacactctagtatcctagtcttaaaaaaaataagcagttatttcatactttagcatagaattagagtatatatagagccttggctaatgtggctgctgaaatatctagatccaagcaactgaatgaacttaattttcttatgcctcatacgtataacttggtgtgacaatgtgggagtcattgctcttgaaactaaaatagtatatcaggatgaacaaacacattgaactatatgtgcattttttttcgtgataagcctcgacgacgaatacatacctttccatgatcaaacagttgattgtttaaccaaaagtctctcacatcatcaatttcattttttaattgacaagcttggattggttgagaccccttctagcttgagagagattgttagaaaataaaatgtattggtcctcatcattagtaccatactctacccacacctaattactgaatgattctggtgtgattgcctcatgattctacgtggtcccactgtaacaaattctaatattaccgttagaatattttcttataatgattgtaataatcgtaccattgtttgtaatgattgtatgagatgtaatatttctagaatattctttgtattgtttcccttgatataagtacaagcaaagttagcgtctgtactgtaaggctgagtatttcattattgagcttttatttctttcttttggttttcttttaccttcagtcttgcccagggcaaggtatattcttgccttataattctgagatacaattaaaagcttatgcagactcaaattggggcagcatgtcaagatacttgaagatttatatcgaaatattgtgtttttcttggacaat

SEQ ID NO: 209028 - DNA, 788 bp, Cannabis indica
tgggaggctgaatggaatcaacttcggcaacaatggtctctcaatcaagcgctcctcgcaaaacaagtttggagaatgttgtgaaatcccacttccctttgtgggcaagtcctcaaagcctgctacttccctaacaacgacctcctttctgcgaattgtggtcgaaaggcttcaacaatttggcgaagtcttatctggggaaaggagatcatcaagaagggttttaggtggaggattggtgatggagaggaagtaagagtccttgaagatccctggttaccaagaccgagaagtttcaaagtgtttgataagccccaccttcctcccgaactgcgtgtttcagaattgaagctgggttctggcctttggaatgaagaatttataaaaaacattttcaacaatgatgatgctaacctagttcttcaaatcccttgtggagacagccccatgcctgaccgtattctttggcactattttaggaatggtgaatacaatgttagaagtggctagaagctggcaattgaagaaaagatcattgcaaaggcatccaacatggcagccacagaactttggtggtcatccctatggaagttgaaagtgcccccaaaaattaagatgttcttatggaaagcttgtcacaattggcttccaacgataacgctctttcttataggggttgaaaattaacaagcactgtaacagatgcaagagggggaaaataaaagacacgactcactcgatatggggctgccattccattgctaactattggaagacggctggcatgt

SEQ ID NO: 209029 - DNA, 1917 bp, Cannabis indica
tgctttgtaggcctcatacactttttagtcgtttgtttcaggcacgatattatgcggggaagaacttcttgagtgcagaattgggaagtaatcccagtttagtatggcgtagtatctttgaaacaatggacatggttagaatgggggctcgcaggcaggttggaaatgggtctgaaattaatattattttagatcattggcttccatgtgatgagaatccgagaatcagttcgagtcatcctgctcttttaaatcataatgttgatgctcttatggttactgaatgtttagcctgggacgtggacttggtgcgtgatctgtttaatacaagggatgctcaactcattttgagtattcccttaaattcaagtcgtattgatgatgtttggttctggtcttttgagagctcaggaaatttttcagtaaaaagtatgtatcgacatttgcaacaaagaaaggaagatgatttgcagctggtggggtctgatttctggggtaagttatggcgacttaaagttcctccgaaggtgaaagatttattgtggagaacagcatcaaattgtttaccaaccaaatccatgcttcggtatagacatgtcaatattgatactatttgccctgtgtgctcttccaataatgaaacaatattgcatcgactggtggagtgttcttttgctcaggcttgttgggtcaatacgggaataggtgttgatttggagtacgttggtactttcacaggttggattgaggcttgctttcaaacttttgagggggatcaaagaaagattatagtcatgacttgtttggaagggaaaaagtgctagtgtggcgactgtcattgtcttggcttcgagtatgttggaacaatggagtaaagcacaagacaaagattacgttcctactactgcatttttgacagcagccgatggtgcactttcttggcaaaaaccagcaacaggggaggtcgaaattaataccgatgcagctcttttctctaatcctaataggtatagttttgcttgtgttgctagggatgcttcgggtcatgtattggaagcaatttcttgctgtaaacccggtactgtaactccagaattagctgaggctatgggtgtgagggaggcattaagttggctcaaaaagaaaggttggaatcgggttaccattgaatctgattgtcttactgtgattcaagctctgcgtagtccacttcctatgttttcatattttgggggtgtaatttccgattgtaagacgttgttggaaggtgttagtgatgtgtctattttatttgttaaacgatctgctaatggtgttgctcatgctgttgctcgagcttcatcttatgtcgctgatcgtgtttttaggagtaatgattttactcctgatgttcgtgatgtaatcatgaaagaagtttattaataaagcttcctttattttcaaaaaaaataaaaaaggcattttaatttggagtcatatacaatttaatttaataacgagtattattgggcactccgcactcgtggtgcttaagtgtgttcgtgttatattggtgtcccgactcattttttattcgtgtaatttttttaatcttaatccgtaaataattttattgtatttgtgttagactttcactagttttactattaaagttggagtaatagagaaaatataaatttatgtgccattcaaaaatttatatacaattatgttgggggatcaatccaagtctatcatcaaaagaatatgtaagagttgttttaaatatatgtattatatctactttattagtatgaggcagaaaatgcccaaaaacaaaaaccaagaagattatatagtttttttatatatataataaaaaattttaaaaatatttcaaaaattttctttttaaaagaaaatttaaactaaaaaata

SEQ ID NO: 209030 - DNA, 784 bp, Cannabis indica
gaaagggctcatctttatgagtatagaataactggatatttcatctatgcttgcattgttgcagctcttggaggctctctttttggctatgatcttggtgtttcaggttactcttttgttgattttctctgtaaatcttataacttgagcctgttctttgatctgcgtttttgatgaaataaactttatgagatcaaagtatactgctcttttttcatctttgaaatgctagctgttcattacaaaattcattatatcctttttcatgatgtatattatttgaaaacccagaaatgattatatgacctctaatttccatgagaatagtaaaatgtaacttgtgagtacagtacaaataggccttgtttggtgaaatgattaacaagattggtttgaattcttcacttaaacctttctcttttagactttactgtcctggttttgaaatttgttggagatagctaataatttaatagctcatttttgtccataatatcaagtatttttccaaatgctaaaaaagtcaatcatgtgctgcttgctgcctcacctaacaataatgacgtcttttaatgatttcatttatccatgaaaacaaacgagaaaattcaaactaaaactagtcccataatactgtttgcttactaattctcaggattaaagtaacaaaacttacacttttcctttagttttacactactgcaacaaactaacaatgatacttttttatggtaaatttaggtggagtgacttccatggacgatttcttgaaagagtttttccc

SEQ ID NO: 209031 - DNA, 622 bp, Cannabis indica
caaatatagtcttagttgtactgaaattccctagaatgtaagttggtgacaatgtctttatgaattatgatatttgttgaataagaaaaaaatccattttcagtttgggctatattgcccattttcccttatttttttcctcttttagaatctctacatttaatttaagttcaacaattaattattggattatgatgtgtcatatgcaacttttttgttttttgacaaattatttcatagatgcttttttataaaattatcttaaacatactgctttcttgtgaatatatgcagataaaaatttattaaacaggtattttattgagaagaaatgttaaagaatacaggtagtgtataataatttttcttatatgtcaatatctgatttaactcatataatttaatataataatttttaaaaaaatattactaaacaatatccaacaagtctagaaataatagatagtaatactttattgagaagaagtactaaaaagtgtcactttttttttttcgatattttactattatttagtaaaaataatttttaaaaaatataactaattagtaattataaaacatcactgtaaaaattattggacactattaatgtcaaataaga

SEQ ID NO: 209032 - DNA, 1172 bp, Cannabis indica
gaatagggatttgaggtaagaaaattacattcgtaccacctagcatgtcaagataagctaagattattatcgcttgtgatttgattattatctataataaagatacgataattattgttttgcaaaaaagattcattactttaaattgagactgttgttaggtttcttacttatcggtcatctcattaggtaacggtagtgacattagatgcttggttaggcttatcaaggttgcctcattaggcaacaacagaaaagggttactttatgaagtaacaaatataacttgtcttattagacagatatttgtgtagtttagattgttatacatatatgattatttgtacggtttatctgtgattgtttggaattatctgtatggttagcatgtgattattgcttttacttttcttgttgggtctttgtgactcacatgtgctttgtggtgtaggtaagggtaagggtaaattagggcagccatgagtcagcagtcttctctagaaaatgtacatatcgacctatctggcttgcagagtcgagttgtcacggggatggttttggcgctgtatttgtatagtattttggatacatttgtattaaacttattgtaagactttcgtaacagggatccccaaaactaaatatttaccggtgtaaccttttccatttaagtttatttaacttgcgaattttaattaaaccgttaatttattattctaaactaatttataaaagcgcacaggtggcgtccttagaggttagggcattacatctactgtaatgaactaacattgaagacagtagggattattggactaaacctgtcgaaagcatgattaagattaatgtagatggtgcaacttttgaagctaataatgtgtttgatactagtttcattgctcgggactatcatggctctttgattgaagctttttctacatatccccttggtggttgtcaactcgctatagcagaaacggtaagcatgaaagaggccttcaactggataaaaaagaaaagcttatcaaatgtggtagtggagattgattatgttgttactgttcaggctctccataactctgttgagttgctttctatatttggtctctttgctcaggatgaaagtgcaaattgttactttctttcttaaataatgttaatgtttgtcattt

SEQ ID NO: 209033 - DNA, 501 bp, Cannabis indica
atttgaccatcagaacaacaaaagccattactttctctagtaaatttttttgcattacaatgcctatacactgatgccattggcaatacataaacttcttttggtacattttgtaagttaattgcatagtttaggaaagtttgtttgttttttttgttaagcgtattcttgttattttcattgttacttaaatttgtattactctctttttccaaatctccaacaaatcctaacataaagaatttatgaaagaaattactacaattaataataaataacgaaatgcattattttttagtgataactatttacctctttcaacaaagtatcatgtctgcatacacacgtgtttgatgtacttcctgcataataaaaattttaaattgagtaacttaaaattcctaagttattagaagaaaaaaaatctataagatgatgatgtaatatattcttaccgattttcactcataatatttctctggtggtccgatttttatcatg

SEQ ID NO: 209034 - DNA, 702 bp, Cannabis indica
tgtaaaccctaacatttatatatctattcattgcacctaattaaaattgaaactgattgaaataataagaaagagataaagagatttttaatacttgcactagaaaaaattagtgtgagaaaatgtgagatagcgaacatatatattcaagagagaaagctgcgacaagagtaaaggattcaccgacgcaacttggcggagcaagtcgccgaagaattgtttggagcgaattactggagcaagtcatccatttaacagtgaccagagcacaagaacgtcgatggcggaagcctccattgctgagaagatctgaacctaatcgaagaaagaggagggaaatggtgaatgtattgtggatgggcctattattcatgtactacttaatttatgattgggcttaaactagggagtatttaaaagcccactccaaacagaacttatttggaattatgtctgcgttttttgttttctttttaaaaaacgagaatactttttcatttagcttataatgatgtgttatggaagcatgttgtagtgcctccacgacagctgaatttcgggtataacaataccatatttagaaaacatatagattacactcaataaagaagtatcaacacaagcagtattttacgaggataatattacttgcatcgtctaatttaaaggaggcatattaaaggagatataattaaaacacat

SEQ ID NO: 209035 - DNA, 972 bp, Cannabis indica
ccaaacctagccatctcataaatttattgttgttgtggtgttggctggttaaaatttaggtggagatttgttagcatgcacctcccgagaaaggtttaggccaacgataagtacttcatattctaccttgttgttggatgctttgaacccaaacttggttgctctgtgcaggggtttcccccatgtgtgatgagagtaatcctagctctggacaactaatcagtagatgatccgcccacgtgtaattttcaaattggcttatcttcaatgctttcttctagtggggtgctttttcctgctcctttttttggctcggtattgtcttttgagttgcttgcctccttgcctgtgcactcagccacaaaatttgccaaagcttgtccttttactgctatgcgagattgataggttattttatactatcctgactcaatttcccacttgagcagctaaccagatgtatatggcttctgcaaaacatggcgtaaaggttggtcggtgtaaatttgaactggatgagcttggaagtagggccttgacttctttgtggctaagatcaagcagtttgttaacatttcaattagggggtacctactttcaaccctaactagtcttttgctgatttagtagattggatgttgaacaatattattttctctgatcagtacgacacttacagcatgctcagtgactgtaaggtagatttctagctattttttgtctagaggttttgagaggatgggaggttctacgagttgcttttttatctcttaaaaagtgttctcacattcatttgtccacttaaatttcttgttacctcgaaggatgttgaagaaaggaacacacctgtttgttaattttgagacaaatatgcttagtcggctatccggccaggtaggctttgcacttctttcacctttgttggaaactccatatctaggagggcttgaattttctctagattagcttcta

SEQ ID NO: 209036 - DNA, 1037 bp, Cannabis indica
ttttaaattgaaaaaaaaaaagagcactgattgtgttgaagaagagtacatgtgcattattagtttaatgattaaacacaaataataaattttgctatgggcgtggatatggggtggcacacacttgcctagagttttcgagtctttgaccaaagacctaaaaaaggtgaggatctttagtgagagaccatgatgatgacaaccatgcaaatacagaaaaatacaaaacagcaggaactttcatggtaatgacaatgaccaacttttttttatgagatcaaacatacattcatggatcaaaatcaaatgatatagcaagcaaatatatatgagatattgtctggccattgataattcttttccccttttattttttaatgaaaattctttcttagcacataaaataataataataaatctaacacataagttgatttttttttttttcttttgtatagatcggattctcttcatacttgtctgatacttagaatctatatattatctctattgttaatgtcgttttgccgggttggtgaccttcactgttccctttgccaactatgtttgctcccatagaccaattctccacatttccctcagatttaagataaggaaagtagtaagtattatatataagtctgactcaaaataattcatatatatttgaggatagaatatttgactcatactctactctaagctaatgccatttcttactgtttagcccttcaattttaatttaataatagttttcaattttaatagtgtttattatgttcattgtatatgtgtagttttaaggcttcaattagtgttatgtttaccactggtgtagctggcctcatggttgaggaagctctgcagaagagcacgcttggttagttccgtcattgatttttcaaagttaagagataccacactaagggctatagttttttgtctaaataaaattatgtttgttttgtatgtaatgtaatgtagaatgatagtagtaaaatataagcaatgctaggatgcggccgggtagaggtcgt

SEQ ID NO: 209037 - DNA, 666 bp, Cannabis indica
agctaattgtctaaccaaacttatatctaactctaagtttcctctacttaggaccaaactcaatgttgtttctcaaactacattgagtttgaaagagctgtcaagggtatagatggtttaagtggttaggggttagttaatcgagttgttgattagttgtaacttactcttctgttagttagttttctattatttccattactgtatacataaaattgtattgtactttctctcaagtaataacaaaattcattttctctttctgtctttcttcgattcaaaaatggtcatcttctttttaaccatcacttaagaaatcaatgttacaaaaaatagcctagagaacacaaccactgcccctacggaagatataacttttatacttatattatttttggcaatctggagatgcagtggtctagtggagaacttaatgtgcaaccttcacgtggagaaaaatcattccacgaccataaaacaacaaacaaaccaaacaaaagagtgagcaaaagcctcaaacttccaactaaaaatccaaaatggactaaaatatgagacatcagtcaacgagcaaatgataagagttatgaaaaaatcaactaaatcgtaacaagtaaaaataataaccataataacatttaaggaataaaatagtagggaataatt

SEQ ID NO: 209038 - DNA, 587 bp, Cannabis indica
atatatatatatatatagccaaacaacacttgcagagaagggtacatagtacgaataaagagattacacataggaaaggaatattgccctgaatacaatcaggaataacataaagttgttaggacaaatgattaggcaatcaacttagttacttagggagattctctcactcaatcctgctctgctctaccacctcagtagtgaattccaaattctctaacacaagacagtaatattgtcgaggtgcaagacccccttgctagattaactcgatctgtattctcttatgtattcttctattgttgaagattgaataaagtttaaccaaaattaagatagttcttcccaggaattaatcaccacaaaaaggtgataaacctcgttaaaacttatcactattttattcagtttattctgcatttattttctattttatgttattatttgatttagctattctagcactttagttcatattttatttaattgatttgattcttgataagtgttaattcacacgtccctgaagggactttgaatagaaaatacattgtaatacaaattctcttattcacaaaaagttaaaa

SEQ ID NO: 209039 - DNA, 1453 bp, Cannabis indica
ccacacactagctaagtctgttaccaattttagacgggttcatttgtggactgatgcttgtcctagatttattagtgcttctgtaacagctgatttgatttaaataacatgctttactttaaaaaaaaaaacttaatcctatatataacattgtctatagtgtcccaatattagtgtgacactatagactacaccaaaatattttattaattttaatatttaataatatatttataagtaaatttttgtatttatattatttgtgtttatttataatataataaaaaaatatataatttagtataattttagtgttgtaattagaataaaaaaaataaatgttaaaattttattatttgtgctgatttaacactaaatttaatatttaccattagaaatgtcctatgaggccgacgaaggaaacatgttagtataaaatacatattatatatacaaataattagcagaaatgatagagattccaagtttaatatatttaattatgatatatatatatatatagtatagttgcatgcattaattatataaaaatatatagttgcttgcttacttacttacacacctaacaaaaagcacttgaacaaagattcctctaattcaatttcaaacttcttcaactcatattgtataatattatgagtcaattatacgaaaccacaattaatgttgataacgaaagctattagaactaagaatcatacaacaaaaaaattaaaagacacatgagtatgtgacacaatttttgtcttttgttttgtgtttttcattgggttcgttagggttaggtgacattgatttgattgtgataattatgacttataataatataatgactcttattaatatttagatggtgttattgatttttaatgtgaatggggattaagtagtgaacattctatctacagctttttttagtgaataataattttagagactgagataagtacggcttaatacattaaccttaaaatggttgcaagttgaggtccttcccacacaagaagaactatgaccatctttatacataccttctattgcaatgatatgtgagtgatcttattactaagggtaactctaatcttatcacgaagggtaacataataacactattatgtgatttgagttaccttttgtgatgataagattagagtcccctttcgtgataagatcactcaaatatcgttgtagaataaaatgtgagtagggatattatacctacaattatattatattaattgaaatgaatactatgaaatttcattacatgataatgtaccgaaagctaccccaaccaaagtttttggctttgggctttgcttcacaaatatgttaggcatcttttaatttcaaatgatgtcgtttttttttatgaccttttagttaaaataatgtcgtttttcctttttatttttttgtttggtttactaac

SEQ ID NO: 209040 - DNA, 627 bp, Cannabis indica
atagagatcttttctattttttagttgaaattataattcaattatttatcatataattatactatagcgagtcattttcgaaaattttaaattataattcaatacgggtttttatttattttattcacaaatgcagttaatttttcatatttttaacttgttcagaaactttcgaaattgataagatgtctgttaaaatacatacgtttaatttgtatcagctgagtatgctaagctacctctcattcaaccctatttgtaccctggaaatcacgactttaaatatggggtgaattttgcatcagcaggatctggtgctctgcctgaaactagacaaggaattgtaagtaaatataaacattttcttttaacaaatatgacatgggagacctgcaataataattcatgtcacaaaattaagggtaatgttctaattattattaatttcattatgtttgatcaggtgatcgatctcaaaactcaacttggttatttcaagaacgttagcaatcagcttaagcagcaaatggggtatgcaaattccaagactctgctttcaaaagcagtttacatcttcagtgttgggagcaatgattacttattccctttcgatactaacaccacagt

SEQ ID NO: 209041 - DNA, 780 bp, Cannabis indica
aatagaaaaattctacaatgaaacgatacacttttatttgttttgttatccgaaatacgtttttagttaattttttttatagttacgtacgttataattatttaagatattctgtaaaatttaaaaaaatttaacatccaaaaataatatccaaatagtttgctacaagtgtgattaatttatttaaaaaaaaacaaaagagaatgctctaagctagtaagcccaacaaaatttttctccaaagttttttttttttattcacataagttaaaaagagcgtactgcccatgttcatgctctgtggcagtttttcagttattttcatggttaatttgaatttccaactccccatgttcatctcgatcccccactacccttgaattcctgatctctattgtataattctgtgtctatttcttgtttatatctaccaatgaatcctcttttgaacaaaatgaagtccactatgactttatctgataatgaaagcaccgttttggccattactgaagatggcactgatattgaaattccagaggaatttattttgattgcccgtgtacttacaacaaggaaggtctggttatctactttccaacgacagatggctgagcattgggatggaaggtttaaggttaatatcaaagaacatcattctgacttgttcttattgtgttttcggctgtgagggagatcgaatcagagctttagaaaaagagccgtggcacttccaaaataaccaacattatcctctttgatccatcattatatcttactatt

SEQ ID NO: 209042 - DNA, 809 bp, Cannabis indica
  modified_base (801)..(802): a, c, t, g, unknown or other
gtcgagtgacttatttaagggctttaccgagtgacttctcaaggattttggccgagtgacttaaaggaccttgttagagtgacttcttgaggaccttggtaaaagtgacttctcaaaggacgttagctgagtgacatctcgagtaccttggcctaatgaattcttgaggaccttggccaagtgacttctcgagcaccttggctgggtgacttctcaaggaccttcatcgagtgacttctcaaaggggttggacgagtgacttctcgaggatcttatttattgaaccttggaaattacaagttccagtttcctgggttaacaccgagggcctagaaactgagctgagtgttacgttgacctggtcctcgacccaacgcccgagttgacaatcaactaggagtgctagtttcaatcactcaaatgccaattctactctagatcttctctgtagaattttcaaaaatggggtacgagttcttgtccttaagttcaagaaccttggaagtgtcaaaatgacatctcaaaagctctaaaataagcccccacaccttggtgtacaaatagcctggtgcattgggttttgcttattcaattctgatctcgtctcaaccgtttgtctattttttcacaattaataagatccatgaagtctgaatactcaaattcacaatttcatatttttcacttttcctacaaggtgatttactcaaaaactgagtagttttgagtctcctatttctccataacaacatcatctcctagaactagtgaccaactttctagaacacaaaattagaactnnaaaaaaa

SEQ ID NO: 209043 - DNA, 953 bp, Cannabis indica
aactcatcattctgttctctggatatagatgggcggataccattcagaaccgagcccaaattgatacccgaagaacgaaacaaatcatgaaagtagcttgtgataacactttgaaggcccgattcccagtttacccaaacgccgttgttgtcttggagctgtgtaatactattatttctcttcctagagcttgcaacagagtgaaagtatttactatttttatcgccggaatttaaccaaaactgtttcgatctttgcttccaaaaaacctctcgttgagccaaaacttcagcaagcttatctttaccttccttgtgttgttgaatagacattggatcacggccccattttgtgtttcggatttggcttttacattgattaattcgatgacggaagtttccagttatttcgcgaccccacttcccaagagcatccccacactttgtgattttatcttgaatatccgtgagtcccgagttcaaccagcagccctctataatctgtttgcataaaggttcgcgaatccacgcgttctcaaaacgaaaagaatgatgattgattggagggaagatacctttgaaaaccagaagtataggacagtggtcagaggttgagaactccaagttatagagaatcggttgagagaacaatgacaaccattcactcgtaaccagtgttttatccaacctttcctcgatccagtcaatgctatttctccctttttcccaagtaaacggataaccaacgagaggctactcagtcaaattgcaatctcccaaagctttgttgaagccttcgatcaaacggtcaggatactttctaccccctctcttctctgtttgagagcccagattattcatatctcccataagacaccaaggaaggctactattgtttttgatggaacggaggagattccatgttaaatgtctcaactctcgttttggctcccc

SEQ ID NO: 209044 - DNA, 1525 bp, Cannabis indica
ttttttgtggagatgagagctgatacaagccttctttaagctactcctttgagaagagccttccttgttaccttgtccttaagcacacaacaatcatgataaaattcaatgagtaaatcattatcggcagcaagtttggaaacactgatgagatttttagctatattaggaacatgaagcatttcatttaaacacaacagccttccacaatcagtttgtaaataaccaacaccaatatgagaaatggataatttattaccattaccaactgtaacagtctccttaccaccatattcctgtttttggctcatgtttgctgcatcagatgttatatgattgcttgccccactgtcagcgaaccaagcatcactatcaacaatttcaggtgtggctatgaaagcattcggatttgctttgaactgggtctgattagttccttgatctgcaccagaatagctttcatcgtatctataatagcaaatcgcagcagaatggccaaacttaccacacacttggcatgttggtttgtttccatttgtacgtcctcgaccacgagatctgcctccatgacctcctcgattaccattggttctgccaccaccatgtcctgagttggagttgttaaagaatcctctgcctcgaccagggatatgtggtttggtggccatattagcttgagggttggcagcaggtgggttcaggattttgcttgtgttggttaaggtttgaaggcgttcaatcttgctgtcaaaactcagcaagatatcttgaagttcttgccaggttgtcttgggcctagcttcaatctgaactactatagagatgtattcagcatctagcccagacagaacgtttgcaacgagatgggattccggatatggatctcctgctaacgccaaaatatcggaccagttttcttttgccgcaggtactcggccatggtagcagacccctttcttgtagtttggattagagttctgaactcatccattttagctcttgaataggctccatagagactttcaagagcacgccacaaaccagcagctgttgtggctcccataaactcggttgcgatggattcactcatcgaactgtatagccatcccatgagcagttggtcgttgatgatccactgctcgaattctggaattattcgaatgactggaatttcagacccatcttctccagtagttgtacctgtaggaagaaactcattaggacagattttggtaccattcaaaaaaccatctaaacgatgacctctaacaatggtggaaaccattgttttccaaagggtataattatttctgtcaagtttgagagagaagggttgatttagtgtgctgaaatgttgtggatatgagatggggagctgagaaggtgatgcctcgtgtatgctagcattatttcccattacagcagagctatttccttggaagcttgctgtatgagttgctgcaggagtttggtcaccatcatttgaatcagccatggggcttttggctctgataccaagataaaa

SEQ ID NO: 209045 - DNA, 550 bp, Cannabis indica
ttgtaatttttttgttgattattaaagatgaacgggatttgttagtgagacatcctaacatgttgggatcactaacaaatcctacaacctatataatgtgagtaagaggctcatgtaggaatcttcttctcttctagaccttctcttttggacctacttgacgacagccaagaataccatacttattccttcatcttaatttttcattgagtccaccatactcaatcgacattaaaacctcaaacaccattgataaacatccattttttataccttattggtttattgttctcaagaaccttacaaccaccaactctaatcagatttatgaatattgagtcttccatgagtctcatgttcgtaagtcttgattaagatttcacctagaaatcttctgctgtatttttattttgtttaatattaatattagtatttttgttattgttattttatattttcaaatatgttcgtattttaaatcaaatattattttgtaatacaatttaatttgaggattaaaatataacattattttttaaaataaaataaa

SEQ ID NO: 209046 - DNA, 722 bp, Cannabis indica
ataccatttatttttataaaaaatgtctaaaaaaatattttttttctaaggcccaaattaactcaaggccggccatgtttcatagaaaacttacaatactccaatcgactctctaatccatcttttaaaatataccatgaaaatttcactttttttattgcctcaaacttttatattacatcatatatcaacttctttaaaataaattaacgaaactctattttttcttcaaattttggtatattttattcatttgaaatatataatattaatatatacacatatctatatatacaaaaatattaagaataaaaataattaatataatatgtttagaataatatgtaataaatttttagtttcaaatattttaaaatttctctactttagagtatctgacgtggttgtttttaaatctatttggaaaaaaaaaacctctaatatatattgatgggaaattatactagaagcacccttatacttataaaaggaaacaaaagaaatataaaatattttatttcttttatatagataaaagatctaaccaaaattaaaaaacgagaaattaatctcacaataactataaataaattataaaataactaaaaataaccagaaaattaatcttataacaactattatacaacaataaataatctatataaaaacaacgatttataatttttactgaagatgtattactgtaaataaaaaaaagttca

SEQ ID NO: 209047 - DNA, 873 bp, Cannabis indica
tataattgtgaaggccctctaccgacgtaaatttttttgaaatccctaaacccccaaaagttagattcttgcatgttcacttcatctcaattcagacttgcgcaaaaaggtttgacaattttgacagcgaccccctctcgtcacttcgtcttgatcctcttctttttgtcttcttcctgtctatcggcgacctagccccagccccaaacccaaccccaatccgaccttcttgtctcttcttcctcttcttcttaatcaggcagcgcaaccaccaccttctcctctcttcacgtaagtctttccctctctttctctccatctctctctttctcaactagcaagcctgccgcctaaaaatgtttatttatatatatatttttatatatttaaatataaataaatttttatttatttatttattcatattaataaatattttaatttatatttcttaacttatttagataaaaaaaattaattattttttatataaattattttaatttaatttattatccgtaaaatatattatttaagtaagtaagtattatgtgtatgtgtatgtgtatgttatgtaaaatttaattagttatgttaatttagttattttgctttaggtaagaaaattagttatgcagaaaagttacgcatatctcaagcgctgaaatattacatttcaaccaggagatcatgtttttctgcatgtgtgtcaccaataaagggaatcaggcgttttgggaagaaaggtaaattaagtcctaggtttataggacctttcgaaatacttgaaaatattggacaagttgcatactgattagccttgccactagcgttgtcaactgtgcacaacgtattttatgtctcaatgttgag

SEQ ID NO: 209048 - DNA, 1695 bp, Cannabis indica
aggagaaatctaagaaaaaaagaaacaagcaaaaattaaagaaaagggaatttctatttatttattattatttagagaattatactctgtgtttcaaaattatatactctaataatatggactcatggagtatgtaaattttaactacaaaatcacgtaaatatctagtgttgtgattataattaaatctaaagtaattattaggtacaaaactataaatttaattaacaaaaatctgtgttaatagtaatataaataaaaattaaaaaaattaatatatattacttataataaaaatatcataataaatataataataatatagcttaaaatattatacttaatgataatatctctttaacaataattttattatgtcattaatgataatttacatgacaattatcatcaaaaatgactttttttgtttataataacagtttccaacaatttttttttttgaaaaaagtaattttatataagtttgtatgacattagaaatcaaatgtcataaatattttgtcgtgaaaaatattttttgttatagtgtatacaatttattattactcttatctcattatgtcaaatacacttaacaatctgagtaaattgtcttaaaatctttttcgctatttagatggaggaatatcatcaacaataagattttaaaatttggagcttatactcttttgatgtgaggaatggattttagaattatattattagcttcacattctttactaatttcatcttcacttgcaataatgggcattagtggaattcaaatttttagaccaggtatcatatgttgtttcatggtcagaagaaaaaaaaaaaaaaaagtctgagtattttatgtagaaaaatcaaattcctctattaagttatttgattgacaaatctttgcagaatgaaaacttattgttgtctctgaaccatgagttgtttgggttcgttctccgatgaggtcaatggtgtccttacagagaaacttaaaaagggaaggctaagaagtttttgatattgtagaaaattttcatgatgttaatgttgtatttctttcaaaaagaggttattgttaaaatatcagaggatatgaccctaatagattgtttggaaccataatgtcaaaggcaaaagaaaggggcacataggtcatatgtccccctcaactttttataaattaaattttatatataaattttgaatagtttacattttattcttataaaactaatatttatttatatctttacgtatttttacttttttccccataaatttttatatttttttgatccttataaaatttatattttactcattttttaaataataaaaaaatatttttggtaagtctcgagtacaccccgaaaaaggttaatctggtagatctcctacctattttggcattctcaaaagataattttgtccaattgttttcttcataatcatgtgttataatgagtcagagaacataatattcttgtggagaaatagaaaagggaggctaagaagtttttaacattgtagaaaattatcatgatgttgattatgttgtattaattccaaaatggttatttgttaagattctagagattttgactctagtaggttgtttggcaccatgatgttaaagggcaaagggaatggggagccgataaatgtgtccccctttttatttatttaattatt

SEQ ID NO: 209049 - DNA, 604 bp, Cannabis indica
aaattataattaacactcctctcaaatcaaatacctttaatgtagacaacatattaaaaattaaaataatgacaaacttagaaaaatctattaaaagaaagatttctcatcatcaatgaccttataaagaggttatattaaaaaattatacttgctcaaagcaagacactatattttagtattttttttatttactaatgttgaattagtagtacactacatacaagaaagaattgcacatcagtggtacttagcactatttaataatattattttatacgagacctaatatttaattataccaataatcaataactatataacacttataaaagtactagatcctaataatatctttcagcatttcttttcaagaaactatatcttgatttgcttttctagcttatggagttctacctttattatttttaacatattacttaaaaacaggcctaagaatatatgggcataagttaagggctctcagaaatatatatatatatatatatataaaaatagttaaaaaaaattagttatgagagtctaacctatgatattcagtaatatgtcatacatctcatccaactaaattatgaatatttat

SEQ ID NO: 209050 - DNA, 505 bp, Cannabis indica
acccagatctataagattaataattaatatggatcagttggaggatagagtagtactagattaagatctggatatatattaacggaggtttaagatattactcaacaagagcttattcttggcgggaccccttggctgtggcagggcagcgaaagaagtagtagaagtagacttagctggtttcccatttccctttggttggcctatagaagaagatgtcatcatcatgtggccgctgctctgccctttctcactaatcctcttttccatttcccttttttctttctttctttcttttttctcttcttgaattgaaagaggaaagatgcgagagtgagagtgagagtaagagtcggaaagggaaagagagaaattaatattattattgattactaaaagcatgttacggataagaacaacgtcatcttctgggacccattactatgtcacgagtgacgttaatttgtagtggaattcgataaagtctcttaatttatcacacatt

SEQ ID NO: 209051 - DNA, 735 bp, Cannabis indica
gtgcctggagcatctaattttggaggttcagttcctagtgtcacctctagctatccaactttgaacagccaacaactgccacctccacctccaggtccacttccacctccacctccctttacgcccccaggtccacctcccggtcctcctccaggtccaccaccttatgcttcatcttggaggcctgagtccagttcatctgaattccctcctgttcaggtttgaattttcttttccagagtataggaggaaaatcacacaccattatgtgttagttcatgtcttgtttattcaattatttgcttcgtatacgtattagatctttaatattgacatcttatgagcagtcatgatgattgcgatgagtgttgtaaaatatcattacatcttgaataaagtatgtgtgcccatatcatagaagaactacacatgcgtaattttcatttgtcagagcagctacgcattgttggtatagatgcaactagtcgctattttttgaatctttcttcttgttattattgttaattattccctgtccacttctcgtacaaattggtcggactgcaaaaccaattgtagtttggttttgctctaataggtttcaactgatatttcttcattaggattgttcatcaagaatcaagaccaatgaccaaaaactctttttctcttttattctccacacacgcacacacgcacacaagcgtgcgcacacacacatatgcctatgcaatg

SEQ ID NO: 209052 - DNA, 795 bp, Cannabis indica
cttttaaaaaatgtgtattaaaattgttttagtttctatttttaaaatatgaattaaaattttaaaaactgtcaatattaaaatttgaatgacaattgttgattgaaatttttaataactaattaaataaatgaagatttagagcaagaaaagaaaagagaatatgaagactatggattttacatggataggcgttaatgagccttagttcacgagtcagagatagagaagatgaatgttctctctcttaaatttagtagcattttggcttaataccaataaaagagaaaaacaaagaatccttttatatgtgacctcattgtcatatttataggcattcatcgagtttatttttttatttgtctaaatgcttcattgacaaaaggaaatatattgatggacataaataaaatagtagttgctggtacatgcttgtcttgttttatcttttcacttagaaagacttcctaacatatcacatcagcattattgggagttttatgaactagtgggtgcaccatcatttttctttgttgacaaaaatagagacaacaataatcatgacgctctattttttaaataaaatataataatacttgagccaaaatttggtcaaacttttatttaatatatttgagccaattttagtacaaataagtgcaaaaaaaaagagaaaaaattagccgccaccttagggtatttttatatagttgaggatattataatcttccattttaaaaatatataattctaattgtcatttaagaagatcgaattgataatttttataaaaca

SEQ ID NO: 209053 - DNA, 818 bp, Cannabis indica
attattataagttacaaccaataactatcgagtggtctattttgtggctagacgctctcgattttactctgatcgtagcatttttgaggataatgttcgggctgatcttcatgaccatacttgtatttagaatgctaatttcaatgaagttgatatttattttacaaaaaaaaaatatatatatatataaatagagaaattgaattaaaaatactgttgtttaaatttataactaatagtattgttaggaattagagttagggatgatacatttttatattatcattaaatagaaaaattagaaaacactacattttttttttttaaaaaaaagaaaattaaaaagagaagatatcacctcgcctttttaatatcacaattatagatatacaataacttaattcttattcatgatttcgttattggtgttaaactcgatgatgtaaatatagtagatagagttactcacattgttggatataaaaagcccaaaaggatattttacttgagctaccaaaaatgggagtctttgatgaaatcttgtcggggaggccataagctttgtgcttggagtcgtggtggactacatcgaagacaaaatgtatactgaaagaaagtgttagcattaaagaacttctccaattaaaaaaatgataaagatggtttgattggttcaaagaagaaaaaaataatacatactataaacatataaacaaacactaaacaaaatagtaataaaaactacgaatttatattttaaaagatataacaatttacaaactattacatattgcacatcccaatatatatatatatat

SEQ ID NO: 209054 - DNA, 1522 bp, Cannabis indica
agagagagagagagagagaacattaggtggctgtttattaggtttagaaagtttaagtttaatatatatggtagggtttttgtggtgtaaatgggcttgggcttattttgcgatttgggtttagagaaaataaggtcttcagcgtcggtttataaaagttgaaagaagtatattgtgagtgtttataaatgatgcgtatagtaatactcgagttttataaacgacgcaaataaacatcagtaaatttttaattttttttctcttcggttatgttattaacatctaatatataacagtcacaaataatatttttttagtgtcaattccaaaaactcgcataaataaatggcctactattcacgtcggtcaacgaaatgaatagtagccttgaccgacgtgaatagtataatttatagtagtgaatgtgcaacttcattgactgcgaaatttggggccaaggaaatagttgcacaactagaaaacaacctggatagagaggtagaaatccctgattatgacaaactactaatcacagatcctcaacatcctgaaatagaagaagcacaaatatacaaggacgaagaagtgttataaagtgtgcttagtttatatgcaattagaaataacttccaacacaagttcaaaaagtcttgcgcaaaacatacaaattttgttgcttggattcaaaatgcaaatgggcactaattgcatcaagaaacagaccaaccaagtctttcataatccgtaaatatgccagaaaggtgatacacacttgtgatctcaacataagacttgcaaacaagcgacaggctacaacaaagttgactagaaactacatcaggccaaggttcactaatataaaaataactcaaacacatcaagacatcagaggagaaatgataattatggcataaaaatgaactacatgaaatcatagagaagtaaagagcacgcacaggaagaattacacaaaaaagcaaaaaaatcatacagctgccaagttttttgcacatgctgccgaaaactaatctaggaaccatggtacacatacaaactgaagaagataaaagcttcatgtactcatttgtagcactagatgcttcaataaaaggatggaacaagtgcaaacccctaatcatggttgatggaactttcctaaaatcaacatttgaaggaacattgctctcagcctagacacaagatgcaaatggacatatttatcccttagcattctctgttgtggattcagaaaataacaactcatggaaagcatatagggtcgagaagaacagtgcttgatctgaaccaatcgatttataaaccacttgaggctagctcaagtggccctaaagaggtataagagggtgtgtgtgtggaggatcctagttagaatcccaaattgtacaatatataaaagcttaaacaaaaaaaaaaaaacaaaaaaaaaaacaaaaaaaccaatacaatactataataattgtagaagcacagtacacttatcctatttcgtaaccgttcatac

SEQ ID NO: 209055 - DNA, 1109 bp, Cannabis indica
attttctcagaccatagccttgtattcacaattcactatcacgtgtagtctactacttctacttgcttatttgtttatttatttttttccttaagaaaaaaaaaccaataaaaatacagtgataaaaaaatagtatttattcttattgtacggccgtaaagtttataataaagttaattctagtatctagattgatattattttaatagattttcgtatattataatgtttgattaaagtaacttcatattccaagatgaccgtccattatattcaaccatccaagaataaaaaataaaaatcatttaaataaaatttgttacaattacaaaactcaaagccacgtgacaatgcagtttgggggaagagctcagcattaacaagatgttatataaataattaaaattcagtatatattttgatctaattagaacatgaaataatgacaaaatttgaattttgatgcatgtaaatacttaataattgggttcaatagtcaaactaaggacaatctgaatatttcaataattgacttttaagcgattttgcagcatgggataccataccagtgaagactagagtaaaattccataagtattatattagttaaaaaataaataaataaataaaatagtgataatattaatgtaatatatattggctgaaatttgcagacaaataattatttttttaattcgaatatgcattgcatgcagtgtatcggtttctatttttcctttattattaataacaacaatgatgaattcatgtcaagtttcgtttcatgcatgaatacaggaatcattatctaaatttgtgtacagtatgattatattgaattatgttttttttttattttttgaaatggtatattggattatgtataaaataaataaataaataaaaataaaagagatttttatgatgaataatgatgatgagggtgtttgttacattgtcttttgggctgtttggctattttagagtgtagatagagaaaaagagtatggataatggaacagttattgtctccaaaaatatatatatatatttattgacaattttatatatatgtaaaggataaccacacttacacttacacctaaaaa

SEQ ID NO: 209056 - DNA, 545 bp, Cannabis indica
cacaaccatagtcaaaccacccaccatcatcaaatactgctctatcaacattaactttgattttgagaaaatttagtgtcgtctaatgctcaagcgcaaccctacaagattcaaggttggtaaccatagacatcctttgagcattactccatttttcaaagcttagtttaggtaacaaagcaacatcttcaatactcaaaaatttatcattccaaaccagttgattccaatgatgccaaatagaccaacacaccataaaggcctcaatcacctccactttactacaagacctcaaaccttcttcaaaccaacttggaaaaagcatagcactcgcacctactgcacctaccgcagcaacccaagaagccctctagtaattttgagcaaatggacaccttaccaagatatataacattgtctcaggcgttcattttcaaatagggcagttagaatcaataggcacatgctttcccgtcaattggaaacatgtaggaaggttattagaataagctctccatagaaaatttagtacttttggcggtaat

SEQ ID NO: 209057 - DNA, 672 bp, Cannabis indica
tataaatttccatctctaattctaataaacccagaatgaagagagacacaaacattaataaaattaaagagagataaggacagagacgaaaggagcattttccgcctgattgacatctctaaacttgctagattcaataagttgaccaattaagtagtataattatcccgtttatttaaaacaaattctaattaagaaaaagctatgtaccttaattagtaaaataaaaatataattaagtcaatataaatatggtaaaaaaaagacaaaataattattgtacgacgtcttcctcgcaaggtccttttcacaattccgggaatagggagaacactctctttcttcattaattttatttatctattttatattttgttccttaaaattgtggttgaatagagcttttaataaattaaggagtagaagagctcaaaagtgtttgtggcgccgactggttcacattattacctgtattagaaggcatatatattgctatcagtgctgcctatcaccttctcaacatatcgcattacaattggctagcgatacttcttaaaaattattatattaaattatatgggactcgatatttaattggactaataacaatataaaacataagaaaggtacctttaacaattctctatcactaactatgtatatatttttttg

SEQ ID NO: 209058 - DNA, 527 bp, Cannabis indica
tataatatataaaaaaaaattaacaattaaaattaaacaaacttaagccgagaaactgattataaagtactattctttcacaagtacataggaggaatacaatattacctttctatccgttagagtattttatccttactacacttagttctttataaatgaaacttttgttctccattgcaactaaagtgagatctcattcatttaaaatccttgaactaagctaaaagaaaatcaccattttatttccatttaaggagaccatatatttttatatttatgataaacacgtccactcaattaaactatcagtagggtaagctagtaacgaatagaccaaagaacttaataatctaattatttataatacttatcactcataattaaggttgaattgatctacggtcaaggtaagtgatctgactaaattagctagctaacggtacatcttgctatctaactttagctcataatcggtctagtttggtataatcaatacacctaatcttatctactttatcaaagtc

SEQ ID NO: 209059 - DNA, 908 bp, Cannabis indica
gcagttattgcaattctttttcaatagattgcaaaaacataactaatgctttgagggatgaccaagtgtgttatagtgtgttttgagatctcttgtctcagttgagggatcttctttcttcccttccaaacgtctctcttcgccatatttgtcggacaatgaacactattgctcatgacatggcaaagaaggctcttaagttgtctgaagtaacttgctggatcggtgatgaagcttgttctatcagctcctccttttagtctcagctgcctcctaacccctaaaaagaaaagattacattacacaacaattcaaccaagactctttttctcactatatggacgaaactcactctctttcctctctctagaattttcgtctcaagtattgagaagaattggccataccaacttaagtgtttcaaaggccaatttggaagattatgaaaacaacaacttggattctttgctaacatcaaaagacaaaatgttaagcactcaaaagagtggagtcaatatataatttcgttgcatgattataaataatctttaaactctgtttaatgttaaatctattaaaaacatatattctaggctaatttatataattccatgttgtaatctagaaaacaaataaacatgaaaataaaaagatcctatactataattcccagagtactattatgccacacacaagtaaaatgaaagtatatatcctgccacacacgcaaattttactcttatattttgatattttttttcttttaaaaatcatttatttgagactagtcataaattacggtcctccaccaaaaataaaaataaaaaatagtcaaaagtgaaaggttagaatcgatgaaccaaaaaagaaaacaagaaagaaatagatgtatttttttttacacaatt

SEQ ID NO: 209060 - DNA, 759 bp, Cannabis indica
agatcacatcagatttctgataagtcagtatgtcacatgcaattctgatcaatggtgtctagctggtacaataatttgtatacctcgccatcaagatgaggagcatctcctagaagtattgaaaatgaagatccaccactattaggatcagcatgtctattcaaaagaaaagacaaaaagaactagagttagttcaccagttgaagaacagagttgtagatacctacataagttcaaactgaagtgtatgtacaaacagatagaagcttaaagaatatggagaatttccagtcaaatattttaaggacttctatggtgcacttttttgtatttttggcacctagatgattataattcaaatatgtttatatgatagagtatattattttattttggacctcttgcaaattttcgaattttgacattgtatattattcaaaatttacaagtgtctaaaataactgagactgttgtataaaaaaaattgcaattataactactcatatattgaaagcaggattgagatgcaccagtgcaccccttttggtggtgcacaatttaaagatttatatatataaatatagaattttatatcttacctatatatataattgcctatctaacctttttttgttgtgcatttaacttctgttatgtttttaacagaatatacttataaaattgttaactttaacggaatcaattattattaaaggtaacatcagaacagtcatatcattcacttttttataaaaaact

SEQ ID NO: 209061 - DNA, 623 bp, Cannabis indica
aacatattttcttagtcaaccaccacaaattacatttatcctcactaaaaaataagtaaaatatcaaaaaataaaataaaaataaattaattattaaaagtctaaaaataaatacaaccgacaacatcacccccaacgagcctccaccacaacctacccacactcgaatcacctactgtcgatagtgttatagtgtgaatttttgcctagaatacgagtatagtcttgtaaatagctggcacatggacctagttcctggtagaaaaagatgacgtgtcaacaaatagctccaatagagctaacattgcttgatgtaaacttgcgagaagatgcgatggagacagggtctagtcacatgttatgccccgcatagtcaaaagaatgagctagctggatcaagaggagttcatgttgcttccgcatatactgattatatgtaagtgtattgacacatttttttcggtttatatctgatttgaatttatagagagctccatgtctatttttatgaatctgaaaaaataaaattaggagaatttattttctagaatttgaattataattcatggttgaatttttgtttcaaaccagttttttgtataattttgcatcaatcggcaatt

SEQ ID NO: 209062 - DNA, 543 bp, Cannabis indica
tttggtcataaaataagcctacaattaatcaaaaatttatcttaaaacaacttttctgtcttccgaatcattatgataaaagaatcaactcgtgtatataactaaaagatcaacaagaaaacaagttaattatacaaaaatatccaaacactatcatttatatggaaacacaaatcaaaacccatacgtaacacaatgaaattattaatttttgtatagccacacaaaacaaagttgcaaacaatacaaagaaaaagaaaactcctaccttgaaaagcgaaaaaaaaaatcaatttgatcaagcaggtagaatccaatgatgcaaacaccaacacaaaatagaaacccaaataataagaacaagaatgaaaacagagaaaccttcctaaaatagaatagagaataataaggaaaataaggtgtagcgtaataccttgatggggcttctgaagcaggagaactaagaaatgaaatagtagaattggggttgcgaaaagaggtagcagcatgggtgctcaggaatggagcagaagaaaaggagat

SEQ ID NO: 209063 - DNA, 1076 bp, Cannabis indica
tacaatgaatgtccatatagttattctgaaattgatatttttttaccaagtttttcgaaaactaattataataaaatattaagctaatgaaaataagattaaaaagaaaatgagatataatttttacgtagttagagtgttaacttgttttagtccataaagtagtgttataagaatttagctatggacattttacaactctttaatgtactttctggttgtgaaccaaaagattctgagccctttgcatgaaggcataatgccatatctataggcacgtctgcttaatgggtcagatggattcagaccccatgagggttttgtacaataaagctcactaatgggtaacttatattatttattattataatttgaacaattaggtcgagtggataaggcccaattccaagttccagtctgtcatacgatatagtactgttgacaatgacaggttgaggctcaagctatcgttttgacaaaggaacgttagagtactgggtgatcctaaaaaataattatatttttgtcatgtccttttcataggtctggcagaggagacaactcgccaaattccttaggatttgtatcagagatatgccacataagtagcgttttggaaggctagatccttccggatgatccttcaacttctgctcttggataacctttaagggtatccactcccaatattccttctatcccttaggttttaatccagagtttgaattattttttcgggcactcagaagatttgaattatatccgaacatgtcatttgaattattttttcggttgatgggcccggtaccttagtgggcctccacaagggaccatgtgtcactctttcaaaaatgtggataagagaaatttatagttatttttcataatagccattaatgagtaatatatataaattatatataatgtccatttatttatgccaaatcgatcaatactagtctctctctagtaaaaaaatatttatacatagaaataagcatcaaaacattagctttataaaggattaaaatattaaatccaacataatgagcaaactaaggagagatcatggagcc

SEQ ID NO: 209064 - DNA, 831 bp, Cannabis indica
taccccaaacataatattttaatattttgataactggtaaaatatataatattaatggatactatttatttgttacacaaattcattttccaattaattaatgtcaaatattttgattggcaaaatactcacaaaatttcactcatatattagtgtctggagacctactagagtcacgtaatcgcgtcaaaatatatagattaattatgtattttattttcattaattacgtttaaataaagacagtgtgatataaatttttcttaaaaataatgtgtatcatttgtcatattgtttaaatgtatgctgatatgatttttttcaacattatatactaataaaacaaagcaaaaatattaatataagattatggttagtttaatgtaatgaaaattgttatgtaatcaaaattactattataatatttgattttcttttaaaagtgttgtaatgagataataaggtaatgataattatattataccatggaatttttattttattggagaagttatataatgagaattacatcacaaaaataaactgactcaaatactatttttatataagaataaaaattaaaatatagggataatttagaaattttttaatttttaaaatttttttccaaaaaaaaataaatatcgtaatcaattctaattactactctcatttcaccaaactaaatatcatttaagctcgtataattttccctatattatttactaataagaaaataaggaaaaaaaattaaaaaaaatagcaaacaaaattgaaaaaccaaacaaaacataaaagaaaaaatattggcaaaaaaatgtacaaatgaaa

SEQ ID NO: 209065 - DNA, 715 bp, Cannabis indica
ttttaaaaaaaaatacctatagtaacgtgccaggtatgacaggatatgctttagtcattcttcacgtgactctataattcagtatttttaataaataaaaaaattagaaaattatggataatactttttagtgacattttatatttttagtgactcatattatgatagactaacactaaaagttaagtctatttatgcgggtcactaaatagttaagaataattttagtgacccacacaaaagtgagggtcactatatagtgtcgctaaaagtctaaattatagtagtgtattcacatctcacttttgccaaagcggtgacgagtttgaatatttctatcaaatattattcctgagacgagttatttagtgttcatttaataatatacggcttgggctgattcatattcaagtcatgtatacgtgtcagcttctcattattagccaaaattcaggtatcacttataatataaaatatagtaactttagagaaaaataaattttaagaaatgggaaccccaaaaaatcccataaataaatttaagatttttaaaaacaatatcactagaaaagttatcggagcagccattctcgcagaaaaatcactgaaatttttattgaagacaaaaaagtcggtagggttatgactgctgcacataaaagttactagaaaagttgtcagacttttcatcgctgctaacaaagtcgtcggagat

SEQ ID NO: 209066 - DNA, 1374 bp, Cannabis indica
cccaaatagtgactacttagaatatggtttataaatatttaaataatggtggtagctcataagataagaataaacttgcatccagttcaatactgaacaacattaaattcttattttgatcgaataaaaagttgctaaaatagtgtctattttagaagagctcactactgtgtttaactgttgatatctttgcatcctgaccaatacgtgaaactgtatatcatttgtttaaaaaccttgaaaaattccaaatatgcttgtttttagtatgttttccatatcttccatatttgattatgtgtttacaattttctgaatatatgtgattagaatttatattgaacataacattgttttctattattcattatgtagcaccaattttgattattcattgttggtctaacttagcttgttatatttaatgggacaatccccaatagattgtcatccgttatacaacataatagtgttagatctcgtaagataagtattttgtaaatgcaaaatttagctgacacatccccaatagatgacaacttagactagtgtttactataccgaaacaatggagaattttaatcaaaattgttctttgaatattctctagatgacaacttagactagtgtttactataatcatacataattggactagatgaattatgatcattagcttttgatgttctctattttctttcaggaaagttagtgatgctgatgaatatattccaaatattctattcaagaaacagtgattatcttcaattttttaagaattgaatatccttcttacagtgctactaaaacatcgattgaacataagcttaaggttatagttctgaaattgatatcaagcaatctgcaagctaaacttagggttgtaatagtattttaatggggtttcatgaattcatcaccaacttattgaatatcatttagtgtcataaaccgactggtaacaactatttgggtgtgtgatttcaaaatgtgactcctaccacgtaaaagagagttgtgggttcaatttgtgatataacttgtttctatcaagaaagtaccttgttagaaactttataggcttgatagtctaaaaagtgatttctacctttcttcttctacaagtgtttgtggtagggaaaaataagtttttggacattggtataatatcttgttcaagttttagtgattcttctattatacacttgcagtgtatgtgatgttaagattgctctcacatctctattttatatgtgttatatcttgtggtttacatgttgtttataacttggtgttgtaatattctcttcatttctatattttctattttatgtgtattattataatagaattgtaacattatttaatctacta

SEQ ID NO: 209067 - DNA, 912 bp, Cannabis indica
atttgtacaattaaatatgtataattcaactaatttagtggccaataatttattttatttttttataccggtagtcaatttttcatggtaaaagcctaaaaaatcatgaaatgaaatttattacaaatttgttgtttttattttttcaataaagtaatttattgtaagggttttatagctagtacaacaagctagtgtgacacatgttatattagaatcacagaaaaaaaaaatacaaataaaaaaaacatatgataagagtagtaaaggaggttcagaaaagtagactataatccaaataagtagatctgacgtgtgatactccagcttcgtgtttcgttttcttcttccctgtattgttcctttcactctctctgtcgctcactgcattaatcagactcttctctcctcagtcttcagtttctgctcacatcagactcagaccctcctttaatgccactactcttctttcctatcaatctccttgtttattattattatatatttcattactcaactatatacccctctctctctctctctctttaatttctttcttccccagttccgagttttaaaactaaattggcttaactttttttttctaaagctttgaccagttgatgacttcatggtgtgacatgatatgatatgaatttcatgtcatcaaacaccatgaattccttgtttaatctttgggttattatgcttctccatcttcttctctctccttgctcttctctgtctcggtcacactcacacattccaccaatttcttcttcacgcaaggtaatatatatatatatataaaaaacacccttttacgtaactttatagtatttttcttttttgggttctggttgtattgatacagaattaggaattcctaggtgttgttggttgaggttgagg

SEQ ID NO: 209068 - DNA, 853 bp, Cannabis indica
cagatgcatcatcagaagtgatgctggttgaggcttaatgagcattgaattttccttttcttgttttttcttgtctctatagctagggtaaatccgtggatgaagaagcattgtcaaaaaaatgttctggttttccaaaatttgagcaagaaggatgatggtttcttggcacgcgaatgattagcagaagaggacggacgcacagaagaggccaatgtagacacctctgaagatccaagagttctttgatgctcctcttgaacaatcatagaaaacactctagataggttagtgataggttcattgagcaaggtttgagctcaaacagatgtatacgactcatttaaaccagtcaagaatcgtaaaacttgattctggttgtagtaatctagaaacattttcatggcaccacaagcgcaggttgtgttgggttgaaattctttcaatgcatcctatagcgatttcaattttctaaaatatgaggtgacagaattatcaccttgttgcaaacgagtgagttgagttcgcagttgaaagatgcgaagaccgtattcctcattaaatcttttagcaagataaggccacatatcagtagtaagatcgaagtacataatactttgagcgatcttagtcgagacaaaattaacgagtcaggacatgaccatattattgcaacgaagccaagagtttaggagagaattatcagcagcacgtcaaggaagagatctaacgatgaaggatttcttgttctttgcagcaagaccattgttatgttgcgcttccaagattgataattcacaccattgaggattgagaaaactaggatgaggtcagggtgatcactagagctaag

SEQ ID NO: 209069 - DNA, 936 bp, Cannabis indica
ttaagtccacagaagttataagtatagctagatgtatagtaattattttaaatttttctatcaacattcaagacgctgctctagcatgatttcttaatttagtgttggttctttacccaaacatgtgaggttgaaaaattatttcgtggtgtttggttggaggtaatgaaatagaatagaatagaaaggaaataatttttatttcattcatttacttaatttattttaaagtattgaaatgtgattcatattctagttatgtttttcactcctttcaatcaaaggccacataatggggtggtttattgttatgtgattttgagttggagagagtagaattgaagagagtagacttagatggaaacccaagtgttgtagaggattaacattactaacattttaatttaaaaagtggatattatactattaattttggtatagttaagttatcttatagatattatagaggtgaagaattcaaatcctaacaaaattatctttgctcaccaaaaaaaaaaaaaataaaaaaatgggacctacttgaaaatacaaatccttcagttattaaaattcaatttaagcttcacatttctattaccatcaagtctaaatctaatatcaaatacccacaaggagatgggtatattaacgaatttattttaattaaagaatttcttaattaagaatttgtgagtagaattaaaatggatagtaatataaaattctagtgtacaaaagggtttatattgcccactaaaattctttggcactcactacattccaatctaaaaaattacaccaaacataaggtaaaactcatatatctcacttatcccaaaactttcccccataactaacatccccttatagctttttggggtgttcaatatttactttcttatcatcaccacaaatatatacaacatatatatatat

SEQ ID NO: 209070 - DNA, 696 bp, Cannabis indica
ttattttaatttattgttcgagatataaaacaaaataatttattttattttgttgctagttatgtaaaaaaaaatatttttctataaatattaaaaaatttaatattgaaaattaactaattcaaaataatcgatctaatatgcacttttatatatgattggattagatttgagctattatacggattagattggattcaaaatataaaatccgcacttagtgcatatcgaatgcactatgagcaaaatagtgcatattggattggatgaacgtactcctaggttctgggctctgggctccaaacctcgggctcaagctcaggctctgagctctgaaccccgaccaccaactctaaatccaaacttgaacctagccctagacttgaaccaggatctagatctcgatcccaaatacaaaacttgacttggacctagaaactaacttgaaacttgacttggacctagaaactaacttgaatcccgaacccacaattagacttggatttgaaacctcacccggtaaccccaaacggctgaactaataatataaaattaattttgatttagcatcatattaaagttacaacaattattttaaagaaataaacggaatgcaattgcataggaagatttgcaataattgaaaaaattttgtttttcaaaacataaaaatctgatttcaaaaaaaaaaataac

SEQ ID NO: 209071 - DNA, 789 bp, Cannabis indica
aaattttatgctgaaatatattaataggattataattccacttattatctgattaacccatgatataaatataaaccctaattatttaccattatgcttattgggatattacacatctcctccatctttcctaaattttttggtgtcttcatcattgttatagaaagggtttttcttcatctaaatttatctcttctaaaaaactagtttaggtctcatctctctctcctctttaaaatatttttcctgaaacttagaattgagtcctttgtgcttattagagtcaatcctcacgcgtcgttcatgaatattttgagatgaatcgccttttgatcatatcccttagtcttttaacatactcacaagtatgtcgatcaatgaatttgcaagctcttaaagaactcattatctaccattttcaatgacttgtccttttatattctatacttattcttgttttatcctttactctgtgcttcccaaggtagacttttatttttgttagttgttcctataaaatagtggcaagaatagtcatacaatgtccaaaactattgccaaaagtcaaaattaccataaccataaatgacatcgcaaaacatatcgcacaacatctaaaaaatcacaaaaattgccaaaccctaattcagaccaatacctttcatttatcttaatcataatacatagctaattatcaattatcgcaaattacttagtaaatatcgcaaattgttaaaaacctaaaaaattgaacgtgttaaaatctagctaataaccatataaaaacac

SEQ ID NO: 209072 - DNA, 572 bp, Cannabis indica
cataattactaaaaattttgagtttaataatatttttataaaattgtaatttttttttatttttttattagtacaaactcaattttaaatttatttaaaaaaaaattaaaaataataaatattacatatttttgttcagattaaataatattgaatctggatcttatatgtaccttatttaaaataataacagaatctgtactgatgagactagaaaaaaattatatttttataaatattaaatacttatgctgttaaaaaaattattaaatttatgccacttacaatccaaaactttaaataaatataacactatttacccttacctaaacattataaaacttttatataaatataaatatatatatgcttagtgaaggtcatattcagctaggcccatggcattatatgccctaatttgataactactcctattaaaagtagcatataattcgattaaagggaactttcttagggcataactatattaaaatttaaacgaataagaaatgtttatatattctcactaaagattctggtacacacggctgtttctatagatctcatattta

SEQ ID NO: 209073 - DNA, 622 bp, Cannabis indica
ctcttataatttttccatatattatgtaatttttactattgattgagaatctgcgtttactaattctagtgtgggctcaaaggctcgtgtcttcgttattttattattattaatttttaaatgttgaccatgtcctaattgttaattgtttgattgaatgggaaggtcaatgatgacattgatgatcaaatgtgtatgttgagttggtgtagggattggtaatcaaattccgatagtggtatcatagtcaaaagtttagtagcgctaagatagtgggttgcatttggtgatatgtgagacaagtcctcaatgtgatcacctcgcgattgaatatctatatgatgctttgtatcgaaagtctacttgatattgtggtggttaggcagcgtttttcattgatgattatgatggtacaagatggagatcggtatttaggacttgtgtcaaaagtcttcttgataaagttgatagtcaggcggtgaattctattggtgttagcagtagcacaaggtgatttcactagaggggagacaacgaatacttggtccttagcttgagggatgattgttgggctatcaatttaagtctcacaatgaaataatagacaagaattgtcttgaat

SEQ ID NO: 209074 - DNA, 717 bp, Cannabis indica
tgaaatattaaataatttattaattaaaaagtaaccgataccaaaataaccgatccaatccgcactattgcagattggattcgattggatttaaactcttatacggatcggattggactccaaaaatatgaaatccgcacttagtgcggattgaatgttgtttgaaccaaaaaagtgcggattggatcggatgaacacccctaattcaaatattattatttctaaatatattacataatgctctttatattttactttattttttgaaagcacatataacactcgtttttttttctttttctttttaataaggcacatttttttaacaagatcaatgaactcttctttattagtatattctcaaattattttgttttgttataagtttaaaataaagagtgactattgttgcactccataattatataaagccaccccattcattatataatttattcctaatacttcgattcactccttctgaagatcaagttgctgattgcctcaccaaatctcttgttgcctctcgttttcaggagttacgaaccaaattcacggtgcttcccagcccatgagtttgaggggggatattaaaccataaaagaattaatattcatttcttgtgtattatttgcgtggtgccatgtgtccctcaatgtgttttttctttactataaatatccttgtactgtgtacccactactacaaaaacaccct

SEQ ID NO: 209075 - DNA, 978 bp, Cannabis indica
ggtagataactaactacttaaaataggaagattacaagaaatggacaaacgacccaaaagttactttatatttgatcaaatatagttgtttacattgtgaaataaaaatgtaagcaaacacaattatattaagttcgaaacgaaaaagtacaaggcatttaagataagagaaaatccaagttggttcacaaacttgtctttacaaaaatgccactaggggcaaaccattaagtcgtcttcctaaacaaaaaatacaaggagggttgataagctcagagaaagaccgtctacacgtaaaaggtctcgacctctgcatagacctcattctccacatcagaagatcccatttcctgcaaccgagacctcattcccagcctcaggaaatttctcaataccagagaatggctagtacaaaggtctgcttgtgcaagcttgggtcttgggcttgttgggttctttagtggaatccaagaccacgccaactaggactacctttttactggattccttgtcaacccgaggaggacctcaaaactctctctcaaaaatctatgtccgttcctgtggagacagagataaaagatcaatggagcaacacaaaaaaataaaataaaatataataatccagatcaaaccaccattcgggagggaagataattactctcaaaaaactcttgtgaggatctcctgtaacgattaactatatcttcttggtttgtattgatcgaaagctcctcagtcttggaatccttggtttccaatttaaattgagaattgaggttcttgggagcgtgcagagaaggaaaatggttagtgtattttggtgttacgaatttggacgggtaagtttctgaacttggatggaacatcttagcaagagaatgacaatccaatctcaagatgaaactcaccaaataactagaagtttgtggaatatgccaagcttaagccaccattttatactcaaagtccagtaac

SEQ ID NO: 209076 - DNA, 819 bp, Cannabis indica
tcacaataactcaactgggtccgtccctggacatgcttcatcttttcaagatttccatccaggaaggatgcttcacatttggagagatctatccaaagctaatgaggagattttattacaatgagtttgttaagcctattatgtcataattcacttaacaacttagttgttgcagccattgactttgggagtcatatcctaaatctacaaatatcaccatcctaatctttagaagaaataaaatacagaagataattttgagagtgagattaagaaatatagaggtatagagaaaaaaagagattggattttggtgtttgtatgaaaaagtttcttgggtaagagtatgagagataaacactttcatagaatcctaacaaagaatcgttctcaattgtattgtactcttgttctttctcaatcaataaagactattcaatggagtttcaaaattggagtagagtcataaatcacatcaatttataggacttcaaccggtataattactgttgttgtttttttattttttttattttcattaatctgctctactctattttatcttcgatttttgaaatacgattttgttaattttgttatcgctaattgtttgttgatatattttaagttgaaatttattagaattttataagtgtgtggttaaagtacattaagtttccatttcaattaactaatttacaatgaactgtattattttttcacatattaactgtttctaatgaatttataggaaatataattcttacgtaaacccatcatatccatcttcgtagatacattttagaagtgaattatcat

SEQ ID NO: 209077 - DNA, 882 bp, Cannabis indica
tacataaatatgtaaatggaaggttagtttgcatatatttagtaaaaaaatttaatagaacgaaatatgtcatttaaaatgaaaaacataacatatataggatatgccacttgtattatcataaaaaattattaaaatctccttcatatttttgtaaaaaaaaaattagaaacaaatgagagtaccgtgatcgttagagttgctatcggcgactagaaagtcatcagaattgtcgctagtgccaaaaaagtcattgaagtcttgaaaagtcactggaattggcattatcaaaaatatacaattgtaatgaaacaatatgtatttataaaattagaaaggggacttagctacataactctagttggattgttcctgctcatcaaagacttcagttaaataaaaaagcacatactgcttcacttagactttacacacatatatgctaagcccattaactattaataaccaataatatgaactaacacaacaaagaactatccaattaactcaaattttaataaaactaataaaattaaatgtaagtccaaataaaaagtctaacaggatataggtcgaaacatgcatttttctataggtcacgagtcttacttgtccaagatttacatattaggtgcaaataaccacattgcagaacctagttgggggtgttgcgctcctcacttcttgagggtaaatctaggagcaagaaggtgtgggaaaattatgtctaaatgtgcgaaaacaaattatctaaactttaaacaatcaaacaattatcaatgacaagattatcaaatcgtaaacaacaatcgacaagaaaataggggcaaacagagtatgtaaaaaactagaaacagcaaaatggagaaaataaagaaatca

SEQ ID NO: 209078 - DNA, 668 bp, Cannabis indica
aaaaaacaaaattacaattttttaaaatttttcaactatcaagaacatgtcgataacatattgataatatctaaacttaatgaccctcaccaaaacctgtcgataacttatcgagaattttttgataaataatcaagaacatacatcgttttcatttttttcgaccaacaccaccagatcggaaaacaccataaccaccattcaaaacttaccaaaaatttagaaaaatccatcaaaactaagtgtaaatcaacacaaaaattgaacaatcattctaaatcaaccatgaaagattaaaaatttaactaataatcctttttagtaacaataccttcgcgtgggcagacgaacgggctggaaggacgacaggcggaggatcagactcgacgatcggcggagggaacgggtttgaacggttgggacggttcttttgcatggctggaaacggacgagtcttcgggcgactgaaaagggacagacggctaagatgggtcttcgcgcaggtggagtgagggaccggacaagtgattggactgaagagacaaagctagacgagaccgactgtggtttttttttttttgcgtaagaattggaggcgctgaaatgattaggttaaagagagagagagagagagagagagagagagagagagagagagagagagagag

SEQ ID NO: 209079 - DNA, 965 bp, Cannabis indica
atttcgtgttgtttctatagtaaactagtaaaatagtaaaaaaaataaaaaaaaaaaaaattaaacttaaaaatgtaattattccttttttatctcattgttgtctttgtagaatattctagtcattaaatatatttaatttagaattttgttacaaccgtaattttattattatttattagattttttttttagaaatgatatatttataccttttaaaaaaataaaatatttatatggtaataactgtattattttatggactcttctaggcgatttaaaaaaaaatattcttataattcgtctaccctttcctctgaggcaattatcgtcactttgggttttacttcaattttttccagtttttttttttcccatttttcccactttcttcttcgatctcaacttctccttgttctccatttcatggatccctttatccataaacaaacatgaatctttaaatgactcttaaccgatgatgaaagatcagtgtttgctattgtggataatgactcttcaaatgttaatgctcatcaagaatatgctctgtttgcaaggatagttacccagaaaaaggtttggctttcaacattgcaacgtcaaatggtagagcattgggatggtcatcttaaagtgaacaccaaggagcaccattctggtctcttcttagtatgttttggttgtgaaggtgatcggcttagagcattggaaaaagaatcttggcattttcaaaaccatcatattgtcgtccattctccatctgcaatgcaaaatgtcactcatgaggccatgattttctctctgttttaggtgcaagcttataggcttccatttctttgtaaatcaaggtcattggctaaagctttggggaattgttgggtgagttcttggctgtccatgatgactccttaaacgaaggatggggacctttgctaagattcaaagttcacctcgacatcact

SEQ ID NO: 209080 - DNA, 560 bp, Cannabis indica
atatatatgtaatatatatgtataataaaggcaaaatgacacaaggaaacttgtggagtaatggatatgtttattaccttaactgtcttgattgtggtgatggtattatgggtgaatgcatatatataaatagtttgtttgttttttagagacaaattcttgctctgccatccagagtccagtctagtggtacaattgtagctcattacagtcttgcactcttggactcaagcatccttccacctcagcctccagagcagctaagactgtaggcacatgccaccagcctgggtaatttttttttttaatttatgtagagacaaggtcttactatgttgcccaggctggtctcaaattcctggcctcaagcaatccgcccacctccactttccaaagtgctgggatcacaggattgagccactgtgtccaaccttgcttttatatttctgatggtaagaatgcttaacataaaaatctatctactaccaaaattgtaagtgcacaatatcatattgttaaaccatgtgcactatggtgtgcggtagctctctgcaacttcg

SEQ ID NO: 209081 - DNA, 484 bp, Cannabis indica
ttaattgacaaaagtagaaatcctagaattgaacagtgatatatagcttagagagacagagtaagtgaaggtaatttttttgaatttatagttgggagaaatatatataccaaaaaggatgatgatcagctggatgatatgagtagttgaaaaacatctgagcagagttgtgtcagtcaatctaattgtctgtcatcggaaggaaaaattaaaaaaaaaaaaaaaaaaaaaataacttactctttatttagggtttgagagaggctttcatatggcacatgtcagactcaatctctgctaaacctcacccactgaaaatgataatgtaaattaaagacaggtgggcttcaatattgtagcctcacaaataaaaagatattatgtcccattattattattattattatttatttgaaaataagtgattaaaaaaatgacagtttagagtagttctgcccatttaataatgagaaatgcagatttt

SEQ ID NO: 209082 - DNA, 520 bp, Cannabis indica
gattgaagcgttaatgaattttagttcatgagttactcttattggaggtgttaataacctttagtaaattctctctcactttttaatggatttttgctttaagtatagaaagtaaatttttttacaatgaaggtgttgctctatttataagcatggacacccttaggccttgattagctaggaccatttaattaagaagcttggtttgaaatattttgccctctcatgaggttaatacaatggtaaataagataagccctatagttgggctcaagtaaggagtctcaattgggtggtaggtagaaaataatgtggcttgatatgaccggtgcatatataagttgttactttttgtatgaagaaaaagatatcaaaagggagagtgggtgtgcaagtccttttagatacacgcgcaaaatggctttttcaagtgtatggttttttggaagatcatttttgtaataagtgaccttttccaccagaatatcgctcttatcttctcgcggatgcttaggcttct

SEQ ID NO: 209083 - DNA, 708 bp, Cannabis indica
ttttttttttaaactttatttttttttcttttgagtagcttttgacttttcttttatttgttgttttactttttctaaaacatattgcttatgctgtaaaattaaactactcaaaaatttctttttcatcttaaacttttaaaattattctcatattgaaatacataaaatcttttaggtgattctacaatgcacccccttaaaagggatgtactaatgcacatctacttgttttggtaaccaaaaaatatttttagtcgaattctttttcatattcatgtacgttatagctatttaagatatcttacaaaattttgagaaattcgtaataatttacaatatagaaaataatgttcaaagagtctatttaacatgcgtataaaataaaatagtcacgcgtgcaacatactgtttgaacgcaattttcgccgtgttaaactttttctaaatttttaaaatttttgcatggtactttaaataactgtaatttacatgatcattagaaaaaaatttaactaaaaattatttcggatactaaagtggatagagatacatcagtgcatcccttttaagggggtacgttatagaatttcctaaatcattttatttttaatctcaaatttttctaaaactccccatttaaaactaaaataacacattttaaatgagactttttcaagaaaccatgtagaaataataattaaaaaa

SEQ ID NO: 209084 - DNA, 867 bp, Cannabis indica
atcaactacaaagtacgtaaaaagaagaacagcacggccacattagcatacgacaaacgtaccccaaccaaccagtgatagagattattgggtatagactttaacagacatgttcactcacccactttacatatatatatatatatatatacactatacatgatctcacttttctatctttgaaaccttatacttcaagatatatatatatataatatctatatatatatcatgcatccatgcacgcatgcatataaatatatatactatttatatagactacgtttcaacaagggattggtctcagctacaataaaagtttatggcacttgacttatttttgccctcattattccactttgaaagatgttaatattagtcatgtaacttaatatcagctggttccacactttttgatttgataaataacataaaaaatataacatatatacttttattagtacaattcaatatcgggtcttagatattttgatttaataaataacataaaaaattaactacttacaacgcatcatatcgatatgttgatgtgtattttaaggtacctaataacaatattcttcgtctttaatttcaacgcacgagaaattatataatataattttattttatatataattagtgtatattgtaattataatataaatgttttactaatattaattatttacctataaatctaaaaagaaaagagtttaaaaaattagttgtacatacatttttataagaaaaaataatttattaaagcaaagagcaaaagatccaataataatcatttagtatgataacttaaataataagttttacactacatataaattttttgtaactcagatatcaatattc

SEQ ID NO: 209085 - DNA, 515 bp, Cannabis indica
tgctgcattatatgattatgaacataaagatgttgattcttgatcaactttacgtaattaatgtatgtgatgttttattttttaatttatttatagtttttcttcttcttttttctttctctagtgtggctaatggaggtaatagtggccatgaatggttgagatacaagaaattgaattgatttctataatcagatatattgcccatgaatgtcttagggactaagttggaggtctagctgctactccacaagttgaagccgaaaacagggttatttgacattaaaatactaagttggtaataattccattattatgtaactttgtattgaattgttgaaagtttatattgattattgaattttttaaatcaagttttatgttcatatttcacctattgtggacttaaaaaataatgaatagataaagttattcaactgtttggatttaaaagaggataaatgtatataatatttaccattgttatatagaatctccttgagatgtaccatttg

SEQ ID NO: 209086 - DNA, 662 bp, Cannabis indica
gtctttgcaagtacatcaatatgatttattaccactattgttattttgcactttatagtgaatgtacgtgaactaataatcgtatgatacaaaatattttagagcattgtttttaggtataggtactagtggtatctagtactactatgaagtgacacattagcggtaggggtgcccatcgagtgggttttttcagattttcgagttgagtgtatagagttagcatacctaacccgtccgtttgtgtaattgctgagtttttgagttttgggtgcgggtggattttgattaggtttcgggttggttggccttttttttaaaaaaatatcattttttatacatttttcataaaaaaacaataacaatgaaaagaaaaaaataatagaagaagaaataaaatgatatatattatttagaattaggttttttttttcgttttaagaaaaaaataaaataataaataattatatatatccgggtttagagtggcttcaggtgtaattcgattttttgggtgttaaattattgaaacccgaatctgatccagtagataattgggtgtaacttgaatccggcatataatttttaaaaactgttttttgggtttcgggttaggtgagtaggttttttagtgtaaatgtgacaccctaactagtggcaca

SEQ ID NO: 209087 - DNA, 641 bp, Cannabis indica
aaaaaaaaaaaaataccaaaatgacttttcaactctccgattttcacttggaagaaagcttgtgctttctaatttatgaatacatagaaaataaatctgtggcagatgttttgttctgtaagtactcaattactaatccttcttaattaatttacctaatatactaatttcacttatatttatattcctacataatggattatatatatcacatgtataataatttactgattgtataccaaaacaagaaaatcacactcgactaggatactgaattcaatatatgtctagggatagcaaatggtttggagtatcatgtgcataatggatcgtattacaaattacaatcatttccatttagttgaatttatcaatacagtaacattctcaaaatcccaaaacaaaaatcaaatttttgaacaactacacacctcattcaaagtaaaaagtacctccatttcatctataaaaaactaaactttacgaccaagtatgaattacagtatttttcatatttaatcaaatctatcaattcaatacattctaaaattccaaaacaaaattaaatttctagatatctacacatctcattcactattaaaggacctcagttttcattcatcaaaccgatcatgacaaaa

SEQ ID NO: 209088 - DNA, 588 bp, Cannabis indica
tattgttcctactttgtcaaatgcaagaaaccgagaaattggtggatcttcaccaatttacttcaatcgcaatcttttaatacatatgaatgatcacaagtatcttctgtagaagcaataggtcctaggagctatcagaggaaattgagtccaaacttttattcaagaatcgagttctcttgtgaaatacgtgacagatgaatattgagctgctcgcaatctcaatcctgccttttcagagtgcaaacttcaggataaactccttgtatcttggcttctatcctccatgactgagagcttgctcaccagaatgctatggtggaacactactagttagatctgggattacactaggaatatacttcaccttataagtatctgcaaaaattctagtgattcgaaccaagcttcaaaacttgaagaaggatcgctcaccctcaataattatcttctcaaggtcaaacaaatagttaatctagttgcatttgttggaaaagttcttagtatcagggttcatgtggcaaccacgtttaatggatgtctattctagatagacatggctttgcctgattaaaactaaagttgaga

SEQ ID NO: 209089 - DNA, 624 bp, Cannabis indica
ctttgttatgtatttgtttgcttctttatcttgttaatccctggtgttcaattttgaccaaatcgttattgaagttggccgcttatgcaagaccttaacagatcaaggatatactactgcttaacaaggtggtgtcagggaggcactcaagaagctcaatgaggttggggagcataaggaggcacttaatgacaaggttttctcagagaaggcactacgggaataggattagagggcggttgaggaagccaggaatgcactgaagatggcccaaacggatctgcacaatgctcaagaagagaacaaggggcttcaagccaaaatgtaaaatttgagaaactccatcaaaccgatcttcagactgctgccaatatgtttgtggagcttaaggagatttatgacttttaggataaggctaactaggaggctaccaaactggctaagtaggctcttctacctccagtcacttatgaatgttgcgtgaagcgttatgaagacggagtctttatgtgctggaggccaacaagtttgagcccaagctaactttttagcataatcctaaagtgttctagcctgattctgggagaaaccagaacttagatgccaagttagtcgagaagttgg

SEQ ID NO: 209090 - DNA, 872 bp, Cannabis indica
ccttagaacttaaggaaacagaggtacaagcctatagaatagatcctcaagtaaggtcgtaaaatggccattattttaagttacaaattaactataaattttatttttactattattttcaaaatggctgcccatagcatgcttcttccactagtaataaataaaagtatcaaatggatatgggttaacatacacaagatgttttttttaaaaaaaaaatttcggtataaatatttaagtttaactcctacttgtaaattaataattaaatttaatttttaacggtaataatacttaaattatatttctggaactctgtaggtacttggctgttaaatgttaagttattattcacgtgtcattttcttattggtatatttaaaaaattaaaatttaatgacttaaaccactcaaggattgccacgtgacaatttacttaatacttaacatctagatacttacagaatagtgtggtcattataaaataagtaatgtctgagatattcaaaaaatcatatgggttatgggtaaaagcccacttagtgcttttacaccaacttgagtagtttttaatctcccattgagagttagctctattaagagagttgatcaccaccttagaatcattttcaatgataacaaaattgtatcatttctcggctgccatctccagagctaaagaacaagaaaggcctcgctacaaagtgcgtccgtaaagtctgatctcgtcgtgccacccatatcaccacactctaatgatctttatcaacaacaccaatacacgtgtacccattaaaaaaaacgtagatggtcatataacacataaaagaatttatattaacaattagaggcgggatgatgaaaaaacacaa

SEQ ID NO: 209091 - DNA, 944 bp, Cannabis indica
gatggttaatttgttataattatgagatttatatatataactataaatgcttgcctttttatgagtggcttgagcttgtgattggagcaaaaatgaaaataagaaaaatggtaataagaagagaagaagaaacaacaacactaccatgtggtgcctatttttttttcttttgaaaggaaaatattgaattgggtgataattagatctttggtttcttcttcatttttatggtcaaaataatgtagcatatctacattatttcataattaattaataatatatataccttattttattttataataattattccccaactttcatgtttctttggcaacttgattccctcactttttttattttattcttttaaagttcaaagtgactatatgtatatctttttaaataataaaacatctttaattatgaaaaattaattattagatttttttttttgaataaattactttaaattaatagtagtgattactgattaattaataacctctccatagtttcctcaccttctctctcattgcttatctcactcatacccaaaacttattaattttacgagcattgttattactagtggtgcccaacaccttctataggtaatgcttcacgattggtcaacaagattacttaaaagttatttttctgagttatatgagactcgatcgatatttaatataataatatagtatgacatgggagagtgttgaacattaataatatattttaacaattctataattttactaaatctaaaacttgaaaactttatgatagaggtatatgaaaaaatatatttatatatatataaatgtactaatgttgagaagaagtgatttttttaataattttttcacaaatattaaagatcattgataagaaataatcacatagaaaactatacatatataataaactaattattgaag

SEQ ID NO: 209092 - DNA, 1116 bp, Cannabis indica
gctttaagaagctcaattatatgacagttccactttctattagttgttcttttcctttggtggatttgagataatggtatgacttgttttaaaaatatttcccactttgtcaaacaatattgggtgagacttgatttaaatttaattaaagagagacggcagagtccaaatttgtattgccatccatctgttgttttagtatgtttattatattaataaaataaattaagggtcaaatacgaatgagaaacaaaacattgatcttaatatttgaatttgtctttcccttcttcattaaatataaatatagaaaagatttgttcaattacttgattatgaaatgatttttaatgaacacttgaattaatgttgaaaaaaaatgttggaaaaggttaacataaaacggcttaaaagacaaataatgaagaggttggcggtatgaagggtcaaccgtagatagaagagaaaggtgaaacttggtatggaacatggcacatgacagctgctgagatgggatctcacggggatggggtcctctatagtctctactctatcccaacgtgtatacgtactccatgtagttttagttatatataggcatgtgtacacttaccccgtataatgtatatgtactccatgtagtttgagtatttaatagatttataattatttattaatatgataaataagaattttaaaaaaattattccactatgtaaactattgagattatattatctaattatttattataataataattaattaattatatttaacataaaataaaactttatttattagtaaaattgaaaagttctacaaaacagtttaaaattagaatttattaaataatatacttaaaataaaaattaattacaaaactaccttaacaaatcttaattacaataatatacttctacgtcatcaaaaaatacatcaattccaaactattatgactgaaaaattaatctcgaattttgcccttttttttttttacgtttttaaaaaaacaacatttgaatttcttatgatgttgataagaaactaatgagttactttacatattaaagaaaaaatcatttcatatgagataatttgagatacaatttagtt

SEQ ID NO: 209093 - DNA, 1290 bp, Cannabis indica
ctctttttttataaatttgacatataagtgttcaatacttcaacccaaaaaagtgacgtgggctttctaataatcaggagaaagcccatatcaatactactgggtgtcattaacggcctatcaatacccaactgtccaatactaaagagtgttaaaaatttacacatagatacattttatataaattatttacaattttaaaagttaatataaccaaatgcttcaaaaaaaaaaatcatgtctaaggtatatataaaacaagtaaacagatggcattttgagtagggttgtttataaattttttaaactatattattaagtaaacaataaaattatatcaaataatttcaagcaagtttttactttttatgtataatttaaaaaatatatatttattaaaaaaaattaataaatctgtataaataacttcaaagaaatcatacaatttcttatgtaaaaaagaaaatacacaagaagatcttcaaaacaagtgtcattgctgtatttaacttgtagtcaacattacatttaaaattaatgttattactctatctcacttataatcatcattaataatttttagtaaattttttatgtacataaaataaattaaataataataatataaaaataatataaattattatttatgtagataatttattattttattaaaagattatttaaaaattagaaaaactaaggaaataaatagagaaaattggaataattttagaatattacatcacctgtctcaattttttatagatactaggtaaaaacttgtgctacgcacgaacggatccctacgaaagttagagtacgcaattgcaccgctaaaaaataataaaaaaactataaacatatattttaattaataggaaaatttagcagcaaaagttcccaaaaacgttcaagtttgacacatataagtccccaacctccaaaaatagcggtaacagtcctcaaggtcatgtttttaatttgtccgttagtgctaattttaactaagtcgtttactttctttaaaattactaagtgtcgaatatattattggtccaaattattatttaaattttaaaaaataaaaaataaaaataaataaataaataatttcttttttttcttttttctttttcttttttttttcttttttcttttcttttctttcttcttcttctcatgccgaaacccaactccaaaccagcaccaccaccaccaacccccttccgaccaccgtccacggtcccctgcccattcacctagcccttcgactagtcccatcgaccc

SEQ ID NO: 209094 - DNA, 754 bp, Cannabis indica
agagagagagagagagattttggttctgatgttgagtccctctctagataggataggaattcttttataggttctttggattggaagggagttgaatagagcaactgatttaactactgatggcattcggtaaactgattggttatgtcatattttagcttaggaaatttaattaatatatattcaaaagacaatttataacttcagtaacaataattagaataaataggatttatccttgaattatgattcttatagaatattgtcttttaaattttttgtttattgtaaaaatttccattgaattataaaagttgttgcaaatgtctccttgcagttacattctggtcatttatttaaataatttgttgatatatcacttacgtaacattaatctagtctaatttaagattctagtcaaaaaataattacataattaacgatctacttataaattatgagaatatatgtgtatttttagagttattgtatgtatgtttaatgtgaataaactaaattttaagtagtttaaaattattaaataagctcttgtagcataattgtacttgtaattcataacccatatgcaaagcaaattgttataaaaaaatgagaagaatgtaattggaaagagatatttccaactgaagaaaaaaaattgaaagcaaaaaattctatttattctaatgaataataataataataattacgtaattgacatttctccaaaccctgtaaaaaaacaaaacttgaa

SEQ ID NO: 209095 - DNA, 838 bp, Cannabis indica
taggaaattttttgggcagcttgggactcaaatacctctatcgcagtggatattaacccaaaccctaatccgagtcaaattaatccaaaccctagtttgaacctcacccgaataatgcaacatgttgtgctttaaccgttttttttttttttggaaccatggaaatcatttatttattaactttcagtaagtacaatagatttaagagcagccgaagcattaagctcagtaaaattataatctgacataacacaagattctcgagcaaaagaatacaaaaggttcaacatgtatcgttttattataaattactttatactcaaaaaaatgtaggtacctacttaattttctttagtgtgtgtgtattaggtacgtatttgtagacaattctacttattaattaatcaattaataattttgattatcataataaagttttaaagggtttatgaccatatattaataatttattcagttgaaaatatacagtttggtatcacaatcaatcaatataattaagcttaacgtgtaattttacgaagctatatatagcttgttgaaaatcgtacttaaattaatataatgcaaaacttgtcttaattaattatatgcttctgaaatttagtggaagtttggaaaaaaaatatttttggatctttatttaaaataaatgtggtatttttaaaattgtaaaaaacaatatataatttaaagggaaaataaattttgggcctttgggttaggtaggtaggccctagacacaagactagctcacctatacttagggttgggcctgctaaaaaataaacatataaaatcacctcatatattacttttt

SEQ ID NO: 209096 - DNA, 806 bp, Cannabis indica
tggggactaaatccagctcaatcgataatactactgtggtcctgattataatgaatatgaataaattgagaaaattattgtatactcattttataatggatacaaaaaagatttgatccacttcaaattttctcggcggtttcgcttaatttctataagttattttttagctttttgaattaaaaagagaaatttataaaaaatattataatttgggttaaattttatgaaaatattgctatacagtttttttttttaatatactatcttttttataaaacaatagtggaatacaaaatataaacaattaaatcaggaacaacaaaagaaatttaatacaatacacattttaaaaaaattccaccctataataataaaaaaaaagtaaaaaaatttaatgtgatatggaaaatctaattaaaaaagttttttgtgtttggataaaaaatattctttcaaaataatttttgagaaactatttttaaaattaaaataatttacataatttctaatttactgacaaaaatcatttttatagtattaaaacatttttttttcgttagcaagtatttaaacactttaaaaattgcttttcattaattttttttattataatagttattcaaataagataaaattaatactaatattatatttttagtttatatttttttttagaaaaattaatgtttattaaataaaactagaaattagatcttatgatcattacaaaagatattaagggtatagtatatttttagttataagtaaaattaaaatctaaacgaggtctaatttgttgtagt

SEQ ID NO: 209097 - DNA, 1062 bp, Cannabis indica
ataaagcaattttaactttttaaacttaatttattgtttgaatttatatatcatatttattttatttgttttaaaaaaatattgggagctttaggtgcatccaaaaaaaaaagcaacctctactagcattcaaaaaatattttattctattccggtgttcgcggtagggatagttcgagttgtaatatttttttcaaactaaaccgcatatgcatttttttttttaaatttctcaaactgtaaccgtatcgcgagatcttaaaattgcaaaagttacaccacaaaaatacagtatagtgcaatgcagtttgaatagtttatactatcatcattatcgaatattataatagaaatttaaaaatcaaaaataataaaaaaaaataacatagatactaatcatcaagttaatatattgaattgtctctaaaaaaaaataataaaatgtatacatatattacatatatttgttcttatagaaaaaaagaacaaaaatcatattgtaaaaatttataactttgtaatatatagtgcggtgcggtttgaaccgcaattattaaattcaaaaccgcaaactgcaccgcgcggtttggaaaaaatactaactgcaaccgcaccacaaaggatttcaaactgtttttttatgcggtgtggtgcggtacgggcagtttgtacggtgtgagcagtttgatgaacacctctatttttaatggcctttctatatatagttatttaaaacattttataaatttttaaaaaattgagaatagtttataatataaaaactagtgttgaaacaatttattatatacacatataaaataaaaacttcttaagttcagaaagaatgtgtttgcagctgccctctcttgcctggtgtatacactttggagaccttgaaatgttagcttgtgggagaatacaaaagcagatgcagaagtgttattcaagggaataggctgttacacaaagaattagcatatgttggccaaagaaagtcagtccagaggacaccagctggttttaaaacttgtaatctgagttgtatgtatgagtttaaagtaa

SEQ ID NO: 209098 - DNA, 546 bp, Cannabis indica
gcagcaagtcctacaaaaactagaggcatccggagggctcctcaaatgggcaatggagttaagccaatttgacctacactacattccacacatttccataaaagggcaggcgttagcagacttcatcacggagtgcaatgaagttgaagctaccgcaaacattcccacaccaccagtcccggcgtggaaggtatttgtggatggtgcctccaacgagaacgggtccagagtaggggttggaatgatatccccgaacagacttcgactccaggcagccctacggttcaaattctcagcttctaacaacgaggccgaatacgaagccctgatagcagggctgagattagcaaaaaccatgggggccaagagagaagaagtctacagcgattcgcaactggtagtaaaccaggtgtggcgagaatatcaaacgcgtggagaaaggatggctgcatatgtggccatagtccgggagctgctccacgagttcatggactacaaagtagaaagaatccctagggagaaaaacgctcacgcagactgtcttgc

SEQ ID NO: 209099 - DNA, 1326 bp, Cannabis indica
caacttggacaacttataacgatgtttgtcccgcatatcactaggaagatcgggatctttacaaaaggctttataaagctttctttcgtctcaattcatatttagccgcgagcaatctacgtttgtgatctcgtatatttcgtttctccgacatcttactgagtttccccctcatctttttgcaaaaagccgctccacggtggtaaagtctcatcttgtgtgttggccgaagttacaatagtcacattgaaccctcgaatatgttcgaaaatctcgaaatgatcttccagttccggggagaattcgcaaaactccgtttccatcgagaattgaatggagttttcccgtatttcgaccggagaatctaacagagacattactgtcgagattctgaccgaaaaattagacattccatgccctcggagagtgctttgtcgtgctaggtcactgacatatcctttgtctttatttgaccccaagaatggattggatcgaaacgactttcctgtcgaacccctttctgtctgtatgaatttctgaccgcgcggaatctccatagccaattttccatttttgattatgaaatcatagggtgcctttggtactactcttatttcacacgatccaggaacttccataacgttggcgtgattcggtttgagcaacggatcctgacgtgatacatcttcgtaatgaaaatagagtggaaacatgagttggcttttacagtatctatagaatgagcactgtgaactatctgcttcaaaaagatagttgtaagaatgaaacttcaaccttcgatcggaatacggatgagatcaaaaaggccagttgcttacttgcgaagaagggggcaaaggattgcaatagcttcggttagagcaaagccaaaaatggcataaccaaataattgtttagccaatgatggatttcgcgccacggaatggatcaaagaactgaagacgtttccaataccgacagcagctcccctcccgctcagtccagtccgggaatcctcttcgtgatttccaagaagtgacaaagaaacaatagaagaaaggagtgtaggattggtatgggtcacgcgcgggctcccccagctcccaactcatctggagaatgaattgggcccctgtgttgatgatctactagttgattcaagatccgggtgattaaccccatttaactagtgccgaaataggtcgggaatccgaaatgacggcacagcacaagccgccatacctccggaggctctgctttgccgcagatccactctggtttcgtcccgaacctctccttgacccatcctcttttattctgattgtg

SEQ ID NO: 209100 - DNA, 640 bp, Cannabis indica
ctgatttttaatgattcataacatttgcattacaggtgcataaacattttactaacagttatttcgtctgatgcaaccttcggccaaccacccagcaaccttcatctgatgcaacctttggccaaccaccctacaactatcgtcttattgaaaccttcacctgatgcaaccaccgcgcaaccacacagccaccaccctgcaaccaacgtctgattgtgtaaatgatagtgtaagaggtattttggtaattaaaatcacataaaaggtatatatatattgtccacacttatggaggtatttatgtaaataaagtgtcaatttatattttccatgtaatgattctttttttttttttaatttttcatgataattgaattatcaactttgctaatatttgaaaagataagtgcatgtttaattcttaatttctcatctcaaccactctagaacttgtttgataatcatttgaggtgaaatgaatacattacacatgattttgagatatgatttcggtgattttgttggatcgattgaacctttcaagcctaccctatttgtgaattccctagtgttacccaatttgagcctaaatgttaaaatcttgttttccttttgaccatatacaataacctttgagcct

SEQ ID NO: 209101 - DNA, 1371 bp, Cannabis indica
gcttaagtgacttggaccaatctagctattctgggtcaactagaatgttatgttcctgcctcaaaccaccgagccacaaacccgaagaaagggatgtgtgcctgttcgggtgctcattccaaacaaggggcaatgctgcctttacacccgtactttaggaaggtggtagacttcttccttctttgtccgatccaatttaccccaagggcatcaagtatctgtctgccctgttcgtcctctacgccacccaaaaatggggtacgccttctccgaacgaggttagctggtttcttgacttgaagtctaatcccaagcaaggtaggtcggaatacttccatttttctcagccagacttcaagtagttgactggcaccggggacaaggccgtgagcaaaattgggaattttgttgatgagtattacatggtggaaggcatgggcaccacctatactcagttcccgcagatccctatatattaccatcaacccttcatactagctcttagggatagagctcaaaggatcgctcaactgccgaatgatgcccgaaatatcactttgttgacctcggaggccaactttgtggagtacgagctttatccaaaggatttcattcccgagcctgtgaaggagaagaagaggaaatccagtgctgatcgggctgagggagctcatcaagagaatgaacccattcaactgaagtgtgaggctaagttgaagggaggtgcgggagccaagcagtatgctcaggagcattttgagcaggaagatcaggttgaggatgagcaagagactccgcgcaaaaggaagaagaaactttcggccgggcacaggcctgtcgaacatatgattgagatcagggagcccagtttacatgttcgaccatccacttctctagtaggataggggagaaccatgttactttcatttcgtgaagacatgtctcaaaaaatgcttgaggctctaaaaagagagttggaggaagttcaggcttatctcctccagccaagaggtccaaaggcgatgggacaaccccatctagggagaagacaccagccgaaatggtcattgacctctctgaggaacaaactgttgtggaccctcctgtctcgaaaatgaataagtccaagtacactcgaggaggtagctcggataggccagagcaatcaaagggcagatccgagctgatcaaggcacctgccccaccttctgtgctacacccggagaccaaaagaagtaaggacatgctcattcactatgtgactcgatcgatccctgaggcgaatgagcagctggctagggcagacaatgacctttccctagagttggtgatgggaggagccctgaaagagtttgcaagggtaagtctttc

SEQ ID NO: 209102 - DNA, 464 bp, Cannabis indica
ttgtactggtctcgccactggcctcctcagaggttttgcgtgcaaggcacacaggggataaaaaacaaaggcttagccaaaggaatagaagaaaaactgagaggttctgccaagaagcatctagaaagaaacgctgtatgccttctataatatcttgcaagaagcgtctgtggcgactagaaatttcctctttgtgggttttcactaagtgttccctaatttttgcatcatttatctctaatttgcattttggtcttgaaattcttgatttgtatggaatggcaagttcagtaggatactctatttctaaatcttttggacaataaaattttgaaccagattgggacattactgcaaggagaaaccaatcccaatttgtggaaaaatttatcaaaccagaagttggtaaattggagaatcttgaaaacctacgttctgtccaaaccctaatatttacccaaata

SEQ ID NO: 209103 - DNA, 929 bp, Cannabis indica
acacgaggcattattaaatctttgacgaaattaaagtttacaaatttctgcaacattagatcagatgacaactccctcctaataaaattatggataagacaacatgcaataattatacataattgttcacaaggtttatcatacatacaacataatgatatcagtgaacgcatttgcaaattttaacatgcagagcacatcatcataaaaatattgctcacaaggtaaatacatattgttatgaactaataacaaccagaagcacatcaacaagtagactaaaccagcggagaaggaccagataacagagtaaaacaaatgcagcataactcaatgaaataagcagtaaaaatggcagtatacgcagagcaaaaatggcagtaaaaattatataaatttatttcctgtcccttaaaaagtaatctttgagacgaacatgaagacaaaacaattgtaataattttgtactgatcagtacgaaacaactcaaataaaaggtatataaatttgtatatatcatatgtcaaagaaggtattactgagatgagcattgtgatttgcagagctagttatatatagagatggaaatcttatgatttaaagagctaaaaattcaaaacaacaaatattgccctctgtttcaagatgctaaacagcggccagtgaccatgttcacaaaagctaaagtgatggagctttaaacagttattcattggaccaacttttgcacaattacaacattcaaaactagggaaattttcatagtaatgctagaagtataaaaagtgcatgacagatcttgatgttgatgatgttgccatgttcaaaagagaacacaatttcacaattaaactaaattatgacactttcctcttggcctgctcttgaaccccacaaacaaatccttacactctcacaaagtggctata

SEQ ID NO: 209104 - DNA, 6321 bp, Cannabis indica
ttaaccatagataatctcttaaccatcccatcaaataagtggaagactcattaaactgtgaaacgttaccctgccataatgtgatgtgcttccaatgccaataaaaagtaacccatccaatggtatttaacatccagaaaaccgccaaataaaaagcatcccaagccgaaatatcacaagtaccgcctcgtcccggaccatcacaaggaaaactgtaaccaaaatcctttttatctggcattaacttggaaccacgtgcatctaaagccccttttactaagatcaatgtagttgtatgtaaacctagagcaatagcatgatgaaccaagaagtctccaggtcctattgttaagaatagtgagttactattttcattaatagcatttaaccaacctggcaaccatatgcttcgacccgcattgaacgctggaccattcgttgaagataaaagtacatcgaacccatatgaagttttaccatgagcagattgtatccattgggcaaatataggttcgatcaagatttgtttttccggagtaccaaaagcaagcatgacatcattatgaacataaagtcccaaagtatggaaccctagaaagaggcttgcccaacttaaatgggatatgatagcttctttatggtctaacattcttgccaatacattatcctcattttgttccggattgtaatctctaataaaaaatatagctccatgagcaaaagctcctgtcataatgaatcctgcaatgtattggtgatgagtatataaagcagcttgagtagtaaagtcttgtgctatgaatgcataagcaggtaaagagtacatgtgttgagcaaccaaggaagtaataacccccaaagaggctagagcaagacctaattgaaaatgaattgaattattgattgtgtcataaagacctttatgtccacgtcccaatcgcccccccggaggaatatgtgcttctaaaagattttttatactgtgcccaatcccgaaattcgttctatacatatgaccagcaataagaaaaataaatgcaatagctaaatgatgatgagcaatatcagtcagccataaactttgcgtttgtggatggaatcccccgagaagagttagaatagaagttcctgctccttgggaggtgccaaataaatgactacttgaatcagggttttgagcataaagattccactgacctgtaaaaagtgggcctaatccttggggatgcggcaatacgtctaagaaattattccatcgaacggattcccccctggatccaggaatagcgacatgaactaaatgtcctgtccaagccaaggagcttactccgaatagtcctgacaaatgatgattaagacgagattcggcatttttaaaccacgaaacgctcggtttccatttcggttgtaggtgtaaccaacccgctactaaagatatgaccgaaagaaataataaaaaaagagctccattatacagatctccattagtacgtaaaccgattgtataccaccactgataaacacccgaataggcgatattcactgggccaagagcaccccctcgagtaaaagcttccacagctggttggccaaaatgaggatcccaaattgcatgagcaataggtcttacatgtaaaggatcttgtacccatgcctcaaagtttccttgccaagctacatgaaacagatttcctgaagtccacaaaaaaattattgctaattgcccaaaatgagaggcaaaaatattctgataaagacgttcttcagtaatatcatcatgactctcgaagtcatgtgcggtagcaataccaaaccaaatacgacgagtagtggggtcctgagctaagccttggctaaaccttggaaatcgtaatgccataatgcctttcaaatcctcctagccattatcctactgcaataattcttgctaagaagaatgcccatgttgtggcaattccacccagaaggtaatgggttactcctacagcacgtccttggacaatgctcaaggctctaggctgagtagcaggagcaacctttaatttattatgagcccaaacgatggattcaataagttcttgccaataaccacgcccgctgaagagaaacattagactaaaagcccatacaaaatgggcacctaggaaaaaaaggccatatgcagataatgaagaaccataggactgaattacctgggatgcctgtgcccataagaaatcgcgaagccacccattaatagtagtggaactctgcgcaaagtttcctcccgtgatatgagttaccaccccttgatcacttatactaccccaaacgtctgactgcattttccaactgaaatggaatattacgactgaaattgaattatacatccagaatagccctaagaagacatgatcccaagcggatacttgacatgtcccccctcttccaggtccatcacaagggaaacgaaaaccaagatttgctttatctggtatcaaacgcgagctacgagcaaatagaacacctttcagaagtatcaataccgtcacatgaatcgtaaatgcatgaatgtgatggaccaaaaaatctgcggttcctaatggaataggtaacaaagcaactttgccgcccacagccactaaatcaccacctccccaagtcaaactggtacttgttgttgcaccaggggctgttgcgccaggtgctaaagtatgggtgttttgtatccattgagcaaagacgggttgtaattgtatagcggtatctgaaaacatatcttggggacgccctaaagcgctcatagtatcattatgaatatacaaaccaaaactgtgaaagcctaaaaatatacatacccagttgagatgtgatatgattgcatcgcgatgcctaaggacacgatctaatagatcattgtatcgagtggttggatcatagtctcttaccataaaaatggctgcatgcgcagcagcaccaactataagaaatccaccaatccacatgtgatgtgtgaacaatgaaagttgtgtgccatagtcagtggctagatatggataagggggcatcgaatacatatgatgagctacaacaatggttaaagagcccagcatagctaagttaagagataattgagcatgccatgacgttgttaggatctcatataggcctttatggccctgaccggtaaatggacctttatgagcctctaaaatatcttttatgccatgaccaatgccccagttggtcctatacatgtgacccgctaccagaaaaagaattgcaatagctaaatgatggtgtgcaatatcggtcagccagagacccccagttactggatctaatcctccacgaaaagtaagaaattccgcatattttgaccaattcaaggtgaaaaatggggttgctccctcagcaaaactgggataaagttgagccaaaagatcacgattcaagataaattcatgaggaagtggaatctctttaggatctactccagcatttagaaattgattaatcggtaaagatacatgtacttgatgtcccgcccaagaaagagacccaagtccaagtagtcctgctaaatggtgattcaacatagattctacatcttggaaccaagccaattttggagcagctttgtgataatgaaaccaaccggcaaaaagcattaaggctgcaaaaaccaatgcaccaattgcagtacaatagagttgtaattcactagttattccagacgctcgccaaagctgaaaaaaaccagaggttatttgtattcctcggaaacccccgcctacatcgccattcaatatttcttgacccactattggccaaaccacctgagcgctaggtccaatgtgagtaggatcgcttagccatgcttcataattggaaaaacgagcaccgtggaaatacataccactcagccaaagaaaaatgatggagagttgaccgaaatgggcactaaatacttttcgagagatctcctccaaatcactggtatggctatcgaaatcgtgagcatcggcgtgtaggttccagatccaagtggtagtatcaggccccttagctattgttcttgagaaatgacccggtctggcccattcctcaaaagaagtttttacgggatccctatctaccaaaattttcacttctggttccggcgaacgaataatcattgagtcctcctctttccggacaacacatacaaagagacccgccaatagttaagtaattagtgaacctctgagagatatttagacgttgttttttatcttctatctcccatctatctattttctttagttattcactagagcaattatgatctggaagtcgatccggggcaagtgttcggatctattatgacatagtcgtgaggcgcttaacggacctttttaatcttataaaactttattctgttctgggttttgaattgatgccgatttctttttgggtaacctagtgtattcatatctcaattcgaagttcctacaggtagctactttatgttttactaagagacatcccagtgttgattgctatttagtcattcgaaggtctcttttattttttattagttttaatagcagaaaagaaatatattctctattttatctgtatatcgtttatccctacgaaataccagacgaaatagaacgattttagaagggatataatgaaattttgtaattggttctttccatagaaacgatccttttatttgattgatagagacaacaatcaattaattataacaaatatatgattataacaaatagaaaaaaatccgaaactaaataatattctatttagttataataataaaaaaaataataaaaaagtgttcttattcgaaacgccttgtaatcttcaaccaattctgcgcttcaatataattaccaggagtaagcgctagagcttgtttccaatattcggcagcttgatcgaaccaagcctccgcaatttctgaatctccttgccgaatggcttgttctccccggtcggaataggcggataaattccttcccttagaaccgtacttgagagtttccgacctcatacggctcagcagtcaagttcttttggtgtccctttatcaaattgaatgggatttttcatggatttatcccattttttttttctagagttaaccaaaagaaagaggttatgagtttcaaacttgaattttgcttactaatttagtcaataatttaatcagttttctcttttctcccaccttcataaagtataggcatttccactatcattagagttttataaaaaggtaactatctcggtttcatatataaatttatatagaatccttgaaaaagactttcctttataattcttaaaattataagaaggaaaaggcttactatctttgggatctgatgctacaccgctgctcaataccttaggggatccactctattacataagttgattcctaacttttatgtcatatcatgacataaataagcagttcttattgtatcggcccaaaacctcgcgaattgatctttacggtgcttcctctatcaattagatcttttatccatagaataaagtatctaggcatacctatttcttcagattcatttttcaaattctatgaagtttatttctttgctacagctgataaaaatcgttgttttagacgatacatatgtagaaaacctatattttttttttttcgagtatttattaatggattcactcttttttttcttttcactttttatttctatagtggagatagtcgcacgtaatgacagatcacggccatattattaaaagcttgtggtaagaatggatttcgctctagggcacgaaaataatattccaaagctttcgtatgttctccgtttcttgtgtggataaggcctatgttatagagtatataacttcgatcatagggatcaatttctagtcgcatagcttcataataattctgtaaagcttctgcataatttccttcggattgagccgacatccgttacggtcgtcattcgattcaatgaatctccgtttcagaaccgtacatgagattttcatctcatacggctcctcctttatgtacataataaaaataatacatggaatccaaaaaatggaaatattctcattataaactgagcggggctagtgtttttacaagaaatctctagccaaccttcttggaaaagatctttctttaacatcaagtatgttagtactagataaaaaaagggtgactccagcaatttctttgtcttaaacgcctcttaattttcaggaattagtcacttcaacagtcttcgatgattatacgggtatccaaaacacgaacgagatgga

SEQ ID NO: 209105 - DNA, 979 bp, Cannabis indica
tttttttgaaaaattattttttctaataaaaaatgaattggtaatgtactcgtgttttctttttcaatggggacggaagatttataggttttcttcttcaatggttatgagaaaaatagtatggcatgtaaggatattgaagatttgtaagattttttattttgtctattagaagaatcatctgccaaataaggtataagccctaaattagcaatcatttttagtttagcttattataattatttttatagttaaagaatgacaccaggatgtgatctaatagtggagaaacatttgtgatatcaactcgatgctcaccaagtagggtagtttctgtgattagccatttcactagtaatttagttaatacgattggtttggggggtttattaagtttaagaaaatgtttgagtggttggttgaaaattcattagttgaaaatttcgatgaatgtagtagttgtttgaaattgtatggaagtttatttgaattgaatagtgaattattttcgtatattattggagttcatgacgatggagaacacctaatggattcaaaattttacaatgttaaaagagatttgatactaataagtacgctagaggagaagttaaagtgtaatggaaagattgatatggattttgtaacttaatttgtactttttgttatcagtgtgtttttaatgcctaacacaatggtttatgtcgctcgggagtatgaagttctattgactcaaaaatttagatagagatttttaagtcatacttactcactagattggcgagaatgaaatatttgttaagtataaataaaatgagatacgatacaataattgatagtagttcactccctgtattgcaatagtagtggagctacgtctacttcgagtttttattctcacgagatggtattacaaaataatggtttaagtgtttcaactctaatttatagaaagagaattagagagagatgctctgac

SEQ ID NO: 209106 - DNA, 629 bp, Cannabis indica
cgcgtttttagtttcatgtatctaaatatatatagtcgttattgtaatgatcaattagatttgccggtttgcaacctgtttcactcatatttaaacacatcacttccaaattatttgctaatttgctatgattcatcggtcaaatatttattattattattaattaattatagatgaccattaaaaaaaatttagtctaaattttttatattcgtataaattataattatcaaatatattttgaaaaatttagaataatttatcatataaaaaatagtatccaaacaatctatttcatatgcgtataaaatcaaatagttatcgtgcaatacactgtttgaactctacttttgactgataggaaacggagtcgtcttcgagacaggacaagtctccaaactaggattggctaatacatttcatgaaaataagaaagaatacatgagaattgtttatatatgattcaaaaaccagtagaaacaaaattaacaaaataactacatttagttgatctttagccatacttcagcgttgctccatcattacgaaattccggagccatctcggctgcatacgaactcagctcactcgctcaggaccctctcgaacgactcctgggacaacatctc

SEQ ID NO: 209107 - DNA, 844 bp, Cannabis indica
gctgggaaaggtagtgtgtctccgtgtaatacaagaaaatcaagaaataagaacactacacatggaaatggagcactgaacaaaacaaccggaagagggtttgtagccagaagctagggtggaatcgaaagagggttcgtagacaaaacctagtgctaagccggaagataactgtgacagtgagtagtcccgtgattcgtaaggggaaacaccgtgtaagttgtgcaatcccacatcgcctagggaaggtcaagtgtcatgactctgaggctgtgaaggtatgggactatacaattgaagaaggtttaaatggattgatttgtactacctatatcaacaaggtgcatcttgtttttcggtagcccatcgcgaaagaactccacagttaagcgtgcttggcttggagaaattttaggatgggtgacctcctgggaagttttcccaagaagcatgcgagtgaggacaaagcacgctaaaaatactcgtgttggtctgtggggtcagtcatcaatccaggaagcagccagagtggcgtactcgtgtataagagccattcattccgtgggtgtaaggacccaatggaggcttgaagcagagatgttacaataacgtagaacaaaaatatgttgcaaaaagattcggacaggcaggtctggaaggatatcatttggccctaggatagagacaagagagagattcatcctctagcaaggtttaaaaaagcagacttgatatatttgcactagcagtggtagaacagactaaaatcaaagagccctgaagctaaaaagaggtaagttttatgtggaaacaagtctccagaccatggataaggaattggatt

SEQ ID NO: 209108 - DNA, 733 bp, Cannabis indica
aaaaaatccagatgctgtaagtgaggaagagtgaaagtgttttcccaatgatgattgacaaaacaccaatcaattctttccttgagagagttcacaacatgccgattcttagaccaagtaaaaatatcaccaaaacaaggaagatcagttaagtgacaatgatcaagtgcttgtctaaaagcttccatctgagagtcattacgaagtgagccaccgagtttatgatcatgcgacaaaatttcattaaaatcaccaatagcaagccaaggaagaagaggggcagtgtccgcaagtcgttttaaaagcaaccaagaaagtggacgattacaaacttcaggagcgccataaaagcctgtaaagtggaacacgggttgctgatcaaaagacaaatagcagtcgaaataagttggaccatagtgaagcaatgtaacatcaacatgatcgttccataacaacattaatccccctttgagaccaattcgaggagcttcaagaccattagaaaaattaagagattgtttcaaccgagataaagaattctgtgagagttttgtttccattaaaaacaaaacatggggagattgctgctgcaccagcaatcgtaaatgcctgaatgaactcgggttccccaaaccccgagcattccaactaacaattttcatggcgaggagcggggttgcatagcaacctccgcagagtagtcaaaacaatcagcagaatcctcagcaaagga

SEQ ID NO: 209109 - DNA, 692 bp, Cannabis indica
tccattggggtgaaatttattgctgatggattcagaattgtgattttaagtgttacacataacttgatagagtattgaaatagcttcaattcaagttgaatcacatcaatcagatcaatattaagtgagttatggctattttttaggagacagttcatgacctggtgcccaggttgacatccagcacctaggttgacatttggacgctgggtaagtgtataaacatccaagggatataattttagatgcctaagtgatattttgacatcacttagtctatttttgtgttctgacaaagctgatcaccagttcttagagatgttgttgttctgcggaaaggagagactcgaaactctttatttttcgagtgagtttcccatgttcgaaacgagaaatacaaatttgtgaattttacttctctgagttcatggatcttacttattgtgaaaaactagatagacggttgaaacgagatcagaatcggataagcagaacctagtgcaccaggccatttgtcaacttgggcgttgggtactcattcccgagctcttgggatcttattttgatacttctaaggttcttgaactagaggaaaaggtctcttaccctgtttttgacaattttagattcattggacgaattagatttatcatttgagcaatcaaagcggcgcaccaagttgattgtcaact

SEQ ID NO: 209110 - DNA, 825 bp, Cannabis indica
ttcatgttgaccagactgatgagctgagagtatcattgatatatggaaaaaaaaaaaaaaaaaaactcaaccaattgtattcgtctaaaataagtttgtatgtaatttaattgtgcacatatcattactatttgaatataggaagaaaacgtcacgagtcttctttttacctctcattctgtatgttacaataacctctagctagcacaacaaaaatatatctaaaagaaatacttttattctatatttcacgagggaaaaaagaaaactatacacgatgaataacatctgccaaacaaccccttaattctaaagtaaagacatagggcttttcttatttaacatgactttatttcaaagaatggagattttacgctaacatatcgattttccatggttaggcgataattgtcgcttcatttagagctccagagctgactgtaagagagcaacgtaaaacatgagaattaactttactgaacttgttcaaatgtgggtaagaaacaaataacaatgttaagtcattatacaagaacaatatttctgcatttcaagggttataagatgtcaaacttactgtattgacgagcctcagagcggcgggccttgtaaattttcgggcgaaaagaaagcaaggagctggttttcctctgctagtacaccattctcttcggtattcagtctcgtagtagatgttatctatctcctgaaaacaaacaagtgttatttttgtatgcttttatactcttctgtgatgaaaattgcactgccataatcaatcaaatctaaaaaatgtatgtatgcagcagtctaagctagaggtgg

SEQ ID NO: 209111 - DNA, 687 bp, Cannabis indica
tacatgttccagaaaccaaagtgcgctgagtcaatgcttgagtcagtgggagactaagggatttcaagtcactggttcagtctgtgatgtcatgaccccatcacagcgtcaacacctaataagtaaggtcttctctttgtttgatggaaagctcaacatccttgtaagtcacatatatctaactattttttttttgtatttattttgtttattgtacatcttaaaattccacaaatcaaattcaattcaatttaatgtgcaatccaatattataattagattgattatctaatatttattaaggttaattagtaatttttttccctgaacttcgacatgtactaaattatgtcctttgaatttttttgagtgttaaaaatttttcccgaactattgagattgttaaatttaaggacttttatctaatttcattcaattttactgtttcgtgattgtttatatactaaaccatgtttcctagactttgatatctactatcatgccctaaaaccatgtcctaaaactttgatatgtattaaatcatgtcccttgaactttcatccatgttagaatctttttactaaaattagacaaacgtccttaaacttaacaatctcaatagttggggggaatttttaactatcaaaaaagtttagggaatacgattgaaatttttacatgaaaaat

SEQ ID NO: 209112 - DNA, 1654 bp, Cannabis indica
tgaagcggggatgttataggtgacttcccacacttcatcgtgctttatggctccaacttagtgctttaattcttttctggtggttcccccaatatggggcccaccagagatcatggctactctcccattgggtcttggtggaagaccaaggacctgctgagggattgctcccccggggggtacaacgggtgctggtgccactggtacaccacctagcttcccttgaggtaacgggcctcctactagaactgggttgagatggggtagccagttcttaatccattcaaaaaatgacctaatcagattaagtttttaatctcgtccttcaagttcttgcactcattggtgctatggccaatgtcgttgtggtattcgcatctcttgttgggatcccttcgcgaactgctcctatacatgggaggaggctttcggtagtgtgtatttttccttgtgacaaaatatactcgctcctgcatgtccgtgagctccgtgttgcttatactccgtctggttgcgaccttttaacaacctcttgctctgagagctcggaggaggtcctgtcaggcttgcggtaggagcggattgagatggagcttgtccactcatccccgaggggttgttcataggattcccaaactgcgatgatgcgggagccaaggttaggctctgattatatcctggagtagtggagaattgtatgccgctcatttgaggagtggtttggggcatagctcccgagagctgagctccgggtatatatcctcacattccgattggatagtatgcccgtaggccactatttgggcttcttccaaattgatgtactttttaaccctcttctggaaatcttaaagattggctgctccctcctattgtaattcgttccataatggggtccccgtgtggatcccaccttggagaagtgcaagctgttgtccgtcatccaccttcttggtttttgaagcttcctctttgaacctttttataaagttcttcaaggtttctgcgggcaattgctttatgttagtcagagcactgacttcaagattaatttttctcgctacgacaaattgtctccggaagctgacttgcaacttgttccagcagtccactgatcctggatccaactttttgaaccattcctcaacggaaccacttaatgttagcggaaagcaaagacacttggcatcattgcttaccctcatgagtgtcatcacccgattgaaacgggataaatgatcactagggtctgagtctctggtatatgcttccttttcggacatcttaaagttcttggggagttctgcctccagtatgcgtcgggcgcaagactctcggtcctcgcaatcagaatctgagtcgtcccttttttgccttcgagagactcgagctatgtctttgcacagccttgccagctcagccaggattccttcatttagtgttcccgcggagaccgctggtgcatgttgctttttgtttaggtgatctcgtacatcactgtgtttttcgttgattttttgtcttaagtcaacgggagggtatctctggtttttccttcctctctctctgggctcctggtgcacggatacgctcttttggtcctctcaattctgcgggccaagactcgctctagggagcttgcccctctgcgaac

SEQ ID NO: 209113 - DNA, 985 bp, Cannabis indica
atttaatggtaaatttataaattgctaatagaatcgaaacaattagaatttaaatagacatcttttttcattcattaatcgaaatagttttgttaccgtagtaacttacatttatgaaagctattatatgatctaattcaatctttagctaaatttaaacaaaataattgcacttataaaaagaaattatactttcaaaggtggccacccaacctgagtacttaatcattgcatcaaaacctttgggtggggtcgcctagaaggccatctacttaaaagtaaatgctctagttttttgtacttaaagtggtcatccacctggtacattcactgataatattttctcaaatgttccctattccaataccttggtactagaacaagcttcatgtttttgtcataccgcccaatcttgcatgcccctgactctaaaactttgactacctgatacagtccttcctaatttggtctgagcacaccgttgtgctatcttttgtgttcaggaatacccttctgaggaccatatctcccacaaaaaaattttgtgccatcacttgcttgttgaagtactgagccaccttttgttgataggctactaactttgtttgctgaggcttgtttttcttcaatttcgtaaagtaatttgctaggagggcatgtttagcttcttgatcataggtcaatcttctgtggacggaggttctagttctacgggcaacatagcttcataaccataggccatagagaatggagtttgtctagttgcctttttttcagttgtgcggtatgaccataatacttttggtagttcctccaaccagttccctttagcttcttcaaatcattttttcaaagtgtctttgagtgtcctattgactgccctatagattgctttgacctgaacattttattgaggatgtgccactgtagagaaactttttatgcttccatggttcgtgcaaaaatctgtgaacaattggctgtc

SEQ ID NO: 209114 - DNA, 598 bp, Cannabis indica
tcctgtcatcatcttcatctaaattctgttatatttttaattcttcaaatattgcttgtttttgtttcagaagatcattatataacagactcaggtggagtagagggttccaaaaaacaatcattttcatcattaagtatttttatacgtatacttttttttatatattatttatttttgtgacaaaataaactttcgtgattcattaatcaataatcaattgatagctaccaaaattaagtttaattaagagagaaatggaattccaaaattattagtttttgtttgaagagaaaaatctcaatatattttttttttgtagaagatcatatgaaaatgctaatggatttgaatgagataggtgatatgaatttcgagaaaaatgataagaaagaagatgaggatgatgacatgattgtgagaactgcccaaattcatgagcctcatccaactccaactcggccaactctaactcatcatctttttccttattaccaacacccttcttctgaggttaataatgaatacaatcattacggacctatgcttaagcagcagcagcggcagacatggattaatcaatttattagccaaagta

SEQ ID NO: 209115 - DNA, 885 bp, Cannabis indica
gaattgttaaaaggtactattagtgtctagcatcttttgcggtgtcataccgctattggtgtaattaagtataaagtctcatataacttaagaaaataatttttagttaatatcgctaattaatcatgagatactacttatagaaaatgttgggtaccactgatacttaatagcaataattaggaaatatctaataaaatctagaaaattgagcaatcctccatgggggagggggagggggagggcagagatgcagaacagaagtaaggaaaaggaaatctatcatgggtcccaatagctgagttagattgaaccaataggatagtgccacgcaaggagtgtcattcgtatcacacaaatgtgagagcaccaacatattaggaggagataagatgcccaaaccaaaacaaacaaagaagctgtcccaaattgataacgaaatggagttaggagtgaacagcttgcttcaggaccacctttttatttaaataaataaaaacaaaacacatattttgttttcttaaaaaaaaaaactcactaattagatatactaaaatatatcattatttatttaatattatattattattggtacaattatatattaagttctgcatatataacttaaaataatttttaaaaaatattaataattaatcgtaaataaatcgttaattctgaatagtatcaaacaccactcatacttagtagcatacaacactacgtgtacaatgtgcctccaatgtggtggaccttataagctttgctttattttggcacatcatctatttcttctttaaatgtggtccgttgtttagggccttctaacaaatacaaaattgactaaaacaaaaatgaataatatcacaaccttgtcttttttgg

SEQ ID NO: 209116 - DNA, 764 bp, Cannabis indica
tgacaagagaccatgaaatgatcagcaccattgctcctattccaatagggatacttattggtgacaacctcaacatagtcattcacaactctaaacagacgatctctgttgtaatcagctttggaacggataggattgtaaataaattggactatattagatacactcaggggcagaaaaaatgtgtgtgcctcctcaatatttgtagccctgaaagggctcttttcactctctatttcatccatgaattgtccttctatggcatatatgttgttcactggtgccatatggaatattgggggctctccttccttgtagctccacactttaaacctcttcaccatctctatgtgactcctgattttgttcaaaaatatttactataagtaacaataccacaaatttatctatcataagagaaattagtattgcttactgatgaaaagcatatgaatttttgtatatagatcctcttgggacaaagctctcagctttctctgatttataagttttagagacaatggcttcacgaatagctgctcgagccataaccaaaccatgctcaagtttatccaaattactctgcctctgcgatgaaaaaaaaaagaaagaaaactttgctggtttaaaatttacaccaaaaggaaagaaacaaaaagagacagaaaagagtgtactcactttttggagatcagctatgtttggataatcagggcttgaaaggaaagtgtctagagaaagtactctggctgagttgtatagtt

SEQ ID NO: 209117 - DNA, 581 bp, Cannabis indica
ggatgtactgatgtaccctttaattgttttggcatccagaagatttttttagtctaattttttttatattcatatatattatagctatttaaggtatcctacaaaattttaagaaattcggaataatttacaatatagaaaataatgtttaaacagtctattttacacgcgtgcaacacactatttgaaagcattttcggcgtgttgaacttttctaaatttcttaaaattttacaagatgtcttaaataactataatttacatgaccatgagaaaaaatttggatactaaaacggataaaaatttattggtgcatcaattttccaatttaacaaactctccatttggcaaaggtttttttttcctttgacttatatgcacccctaaaaaggatgcactgatgtatccctattttattcggtatctaggaaaattatttttagtctaattttttcttatagtcgtatactttatagttatttaagacattttccaacattttaagtaatttgaaataatttataatatagaaatcagtgttaaatttatacgcgaatgttctaaaattttttaaaaaaata

SEQ ID NO: 209118 - DNA, 644 bp, Cannabis indica
aaggatttcaaacaaatctttctgatcctctccatatttttaattgaatagtcatcacgtcttcctttgagctgcttcaaagtcagtttggcctctttaattcttgaattaaaatcactagtgtaatgttgccccaactactcaaagcatcaccacacatcttgattttattttggacatccagccacatctctctctcccaaacatctttgaccacttgaaagcataatgactctcgtaaccaagcattctcaaatttgaattttttttcggaccaatcacattctttacaatagtcggctcaaggtaaatagggcaatgatccgaggaagagaaatttagattataaagcttcgaagaattaaaaatttccagctaatgtttcgaaactagggccctgtcaagcctaacttccacccatctaggtgtaccacgacatttttcccaggtaaaagggtgtctaaccaactccttttcagtcaactcacactcaaaaagcacctggttgaagccttggattaagctagatgggtaaggtcttccaccatgtttgtcttcttagcttgtaacattgtttatgtctctaataattgcccacggccaatgagtgtcttcagcttgatgcttgatgagcctccatgtgt

SEQ ID NO: 209119 - DNA, 513 bp, Cannabis indica
taaaattagtaactttgaaatatatagtgtggtgtggtttcaaccgtaataattaaatttaaaatcgcaaaccgcattaaaatgcgcagtttggcaaaaatacaaaatacaaccgcactgtaaataatttcaaactatattttttatgcggtgtgtgcagtttgatgaatataaattttagctttataagtgatgtgatacataaaattaatattttaaaaaagttaatttagatttttttctcttaactttgacatgcactaaattataccatctgaacttttcagttcgtcaaaaattttcatcgaactattaagattgttagatttaaggatatttgtccaattttaataaagaaaatctaaaatttcaaaaaaaaaaataaagaaaatctaacgtgaataaaaatttaagaagcacaatttgatacatgttaaagttccatgacataatttagtagatatcaaagttcgaaaaagtaaaatttagtaaatgacaatcgccacattagca

SEQ ID NO: 209120 - DNA, 630 bp, Cannabis indica
ataatattataaacattaattaatataataatctatttatggtaattagtttaatcattaatgatttatattatttaatgattaaaatgtatgattttatgtaataaattttgaaaatgtataaatttttcaaataattttcttttacacattttttgtaataattttatttttgttgtgaaaaaaagcctaaaaagaaatagttgtttaccaacattaaactataatattaatattatatggtagtttgtgtaataaaaaaaataattgtttatattatttagtgattgtaataaaaaatagttgtttgcaaggcgtggaccgttagccaggtgagatggtgctttatcatgaaccctcagagggtcacatgcttgtcaactctactccccaggttggcagcgtgcggtgctttagacttcagccacttgaagctcctaaccatcttgtaggaatgggaccacgtccctacaagggtggtcggagtgagcaccatccatatgactagggagtacggcccacgctagatgcaacccaactactttgccccacttggttacaggcccacgtgactggacccggcgataggattgtataaagtaatcaatataaacatattaaaaaagttat

SEQ ID NO: 209121 - DNA, 1193 bp, Cannabis indica
ggcccaccatgcgacactaaaaacaagtcttcgcccgtcacttaccctgatgatgcttcttgcgattgggacactcttgatatgatctaaatatagacccccggccttttcgaccacctctgtttccctaaaactttctattacttcacggtgctccagaagcttcagccttttgtttatgatctgggttaccactgtcggtccccttgttgacattaccacccatagtagggtttgatgtcatgagagaatcctttgcagcttgctctttaactacatgctactctgcctcttcgataattaagaataacttgacaactttttttcataaggtatcgtgatcggtggtaattttcaagtcccgactgatagtggcattcattcccctcacatacttttgttttcgagtgaaatctgttggtaccaggtcaccaacaaacttagatagctaattgagtaccagggtatactcggccatagtcttcttcctttagtcaacttcacaaaatcttccatatgtgaagttcttacggtaatgttgtaaaatttttcctcaaatagactcttaaactcttcccaagacatggtattaacgtctcaagtctgacccacaatgttcgactggacgcgggcatgatcttgtaacataaatgcagcacaattcactcatactgtccccgtcacccccatgttatctaggatgcgggtaatagtactcatccactgctgagtcttaataatatcagttcctcctagaaatgttggaggttgcagcttcacaaaatgctcaaacaccgaatcttgatgtgatagaaaaaatcacgggttacccaccactagaataggagctggtggcaatacttgttcaaccggagctgtcggtgctggttgctaatcaacgcaattcatcttcttgacgaagtatgatacttcacattttgagaaacattttctgccagtcggtaggcagattagcattaccaacccacgcattatctcctgaattttatggaggtgcaggcggtgccgatggattggcttggtcaataccagactctacatgctcgccctttggtctagatgattgtgaagggtccattttcacaaacaatcctaaaatcaacaaccttgacgagttaggcaccaatactacacttacgcacttattctcttaaaccctaactcaaccattt

SEQ ID NO: 209122 - DNA, 706 bp, Cannabis indica
aattttcagttttgtgaaaattatagtttttttctcataaaaagttgttttatgtaaaaaaaatcaaaaaggaaaaaaaaaaaaaagagattaaaaattaggaattacattattctttacttaacattcaattaactagataaataatcaattacctttttaggcttatactttcaaaactttttttttaaaaaaaaaaatccatcaaatagtttttttgaaataaaattactttggcaaaagtaatataaaaatccacaaaatatttgattttactttaaatatgatatatatatatatatatattatgtacatagtttgagcaagaaagaaactatacatatataccatcatcagtggaatgttacataaagaaatatggagtatcaatgaactcaataaaagagttgtcaattactggaaataaatcaatgaagatattttattaggccaaccgatgtaccttttcctatcttagttcgtattcttaattttactaaggtatattagaatatttctaattaaggaaataaaataatattattgattctgataaatgaatattttatattcattgaatctggacagaatcaattacgtaatattctatatatggtcagattttctatattcatttacctgtatttgtatttccttgaattaattgtcatatattctgtacaattaatgtgtcgatagatactgt

SEQ ID NO: 209123 - DNA, 703 bp, Cannabis indica
gacagtgtttcaccaattagtttttgtaatgcagattcttctaccacagtgctcttcgatggtttccagcctatgggttagttattatcttgtttagtgtttatttattatttcattttaatttaatagtgtaattttctgctggtcacactggctatctgagggtcacaatatatgtatatgtagtggttacatttataaaatgtcaaattcgcattgtgcaaatagcaaaactaccattgactgtccatttcatttttagagacctctgatatctttgtgttgttagaccatacaatttcccagcgcttctcctgcagactcattattatgtttttgcattttctctagtatgtttcttctcgtaactagttttatttttgccaggctaagaacaattgatgcggttataattactcattctcatgctgatgcaatcggaggtctctggcatgcatactttctattcttgagataactaataaattagtgatgatatgataaaaaattcatttcaatatctataattttcctgtcatattcaaattgggaagttcaaccctttcgtttatttgtatccaggtcttgatgacctgcgtgattggacaaacaatgtccagccatctattccaatttatgtggcccagcgcgattttgaggtccattctttgttttttaattactttcttgcaagaactataac

SEQ ID NO: 209124 - DNA, 679 bp, Cannabis indica
cgcaaaacaagaagatatatatttttcaaattcccgtcgattttgaagagacgcaaactataaaataaaacaaataagtcagatctgaaaaataagccacacccctgccaccaccctaaacctagctgagccacgcccaacaaacccaactgagactcaccccaacaattgaactccaaacccattcttttagctaccccaacctaggcgaggctggaaaaaaaccagtaagatgtgagagagagtgtactaacccaaaaaaatgtaattttgtttaattagacatattttattaaatatgtagttatataggtcttagagtaaggttataatcttactaatgctaattatgagataattagtaacttttgagaaaaataataattaaatgagcgtaatttattaattactgagattttattggaacatgtgggtattatatatactatttttgaaataaaatattttgggttcggggaccgtggaaactcgatgaattggccaagaatgtcacgatggtaatcaggggcggaaccaggactaaatcattggggtggccaactattaaaaaattatattttgaacaatttttttttatatattacacatcacaaaagttatttataagagcttactatcatataaattacattatcacatagtctattataattagtaa

SEQ ID NO: 209125 - DNA, 646 bp, Cannabis indica
aatggaggcctgaagcggggacactacaagcttttgttgaagtaatccatcgactacttcaacaaattggacaagcatctttggttgcattctcttcataaaataagcaacaatcatgctcaaacacatgaattgactcatagcctaaccctaatttttttagtctctttttagcctcgtaatacgttgatagaattttatttcctgtcggaaaatcaagatttaacaatttcaataactcatcaaatacgctaataggaatttttccacaaactttcaaatgcaataactttgctagcaagttaagtgaagaaattcaatggcgtccaggatacaatttagcttcaatctcttcaaataactcatcataatactaaaaagagccagggttagtttgaagttctttagttgttggtcgaataaaatcttcaacaacgagaatcatctcgtcatcttcatcatctaaaactggctcaacaacttcatttcgtacaacttctgtttcttgctctccgtggtaaatccacttttgataaccattatcaaaaccccaatcaaatatatgggcttctacaatatgtaaaggctcaaatcgggtatttaattatctaacacatagacaactaatttttccatcagaattttt

SEQ ID NO: 209126 - DNA, 1307 bp, Cannabis indica
ggtatttgactcatgtacttcctttcagcatctgttgttggagcttgagaaatggacaatttgaaatgttgtgctaatggtgttgataaagctttagagttgatcattccaaacttgtcaagtacttttttgagatagtttctttgagacaaaataaccttatgaggcctttctcttctgatgtaaatacctagtattctctttgttgtccctaggtccttcatttcaaattccttgcacatgagctacttgagcttgtcaatcttagatctttccttttcaacaaccagtatgtcatcaacatacagtagcaggtagaacttgttgcaaaatacattcaggggtcatatttactcttaatgtagccaatcttgttcatgtattcatcaaacttcaagttccattgtcttggagcttgtttaagaccatatagggattttttcaagagacaaacctcatctttgtctttgctttcaaaatctttagataactgcatgtagatctcttcttctagattaccatgtaggaaggttgttcttacatctatttgatccacctcaagatcaaatttggcatccttacacaaaatcattcttattgaggcttgtttaactactggtgagaaaatttcattgaaatctacacccttttgctgagggaaacccttagctaccaatcttcccttaaacctctttgtaccatccttggaatcaccttccttttctctgaaaatccatttacagccaataaccctttttccagcaagcttcttaaccacaatccaagtattgttcttcttaagtgaattcatttcttcctaaattgcttgtaaccaagctttaccattcttaccatttacagcttcaaaataacttgaagggactgagctgtcaatctcatctgcaacagtgagtgcaaaggctataaacttagcatgtcctagtctatcgggtggccttttttctcttctatctctatctcttgccagctgatagttgttgagatcatcttgatcatcatcagatttgtcttgactttcttcaacctgcttttcttgtgtctgatttgagtcattacttggctccacctgcttgaattagtgtcttttgtagagatagttttagtttgatttgttgtcactttcatggccatctcatcttccctgaacaacacatccctacttatgatacatttcttaaaactaggttcgagacaccataacttatacccattgatcccatcggggtaatctaggaatagacacttaatggctctaggttagagttgtcttgtcttatgtgagcata

SEQ ID NO: 209127 - DNA, 1167 bp, Cannabis indica
taattagaaaatttattaggttaaaaatttataaattaaaaacttattaatttattggaaaaaaattcatttaaattagttaaaatgttacacaaattgttaacttaaaaaaattagataattgaaaagataataaaagatgtgacagaaaaaactatgtttatgactaataggttaaattcatcaattaagttaagttttgataaattaaaaagaccataatttaaatgaaaattttttgaattaaaataacattcaacttttaatagagtggaaactttgaaattaaaaaatagcataaaataatattgaattaataataaaattaataaaagtacataggtggtacataaaatagcataagacattataagataccataagacattttaatatagcataaaatgaaattcttatccagaattgatttctttagttacaaaccaaagataggatagaacaattttgtttgtattatcacatagtgataatttatttcacacacacatttttccttagacccgtttggagaggctgagtcagtaaggactcttaaatacacttctccaaattatccaggaatttttatgtccacatggatagtttgggcttgttttatacctatagtgtgatttattgctcatttaaatatttttttgttaaagatttcggtacatcatctcgttgcatgttcttgtaagttggcatacttggtaatagtttgcttacttatgagaactgtagggaggtgctgccgaaattttgaaaaaaaaaaaaaacgcaatcttaagagaatagattgcactatatgaatattacaaaccataatgcgataggttctttacccttttagaaatagagtgacaaggtggagtaggacatttttttaactttaatttcaattttctgtttttatattgtgtagcaatatgctgagcgacagaagctcgatgacttcaaacaaacgatctatacagttttgtaggggtgtggatgagtttgttggagttgctcgaatgcaaataaattctcccagagttacacgatgcccttgcatgagatgtttgaatgtgaactttgagactcccaataatattagagtacatctgtttgtgcatggcatccaacgatcgtacgcgacccgatattttcatgggagtcgttcac

SEQ ID NO: 209128 - DNA, 1079 bp, Cannabis indica
atgtgtggaatgaagatcatgaggaatgggacaaattgaaatatgtattggaatgcggatcaaaaggtgcttcggtggttgtcactactcgttcgaaaaaggttgcattcattatgggaacaacactaacgcatcactacttgactggtttatcagacaatgactgttggttattattcaagcaacgtgcatttggtaaccacagagaagagcgacctaaccttgtgaatatcggaaaagagatagtgaagaagtgcaagggagttccattagcagcaaaagctttaggaggcttaatgtgtttcaaaagtgaagaggaggaggtgtggctttctgttatgcgtagtgagctttggaatttaccagaggataaagcttccatcttgcctgctttgaagttaagctactttcatcttccagtagagcagagacgatgtttctcttattgtgctatatttccaaaggatcacaaaataataaagacaatgttaattcaccttcggatggcaaatgggttgatttcttcaaagccagaacttgaacttgaggtggaagacgttggaaatgagatgattaatgatttatgttggagatcatttcttgatgagggcacaatgatgggttttgacggaagtatctactatttcaagatgcatgatttatttcatgatctagctcaatctataatgggtaacaaatgtcgtagtgtggaggttaatgatgatactcatcctatcaacttgtcagaaagagttcgtcacttgacatgcacttttagtggattagggtcattttctaacataccaagtactaaatccttaaggacaatcatgacattatcaaatgattcaatcgcttgtgataattattggaatttttgctcattacgagcgtttgataggagctatgttgttattcataaagcgtctatatcatcattggtcagtaatttgaaacatgtacgctatttgaatctctcacatactagtattgaagtcctccctgattctatttgtttgctacaccatttgttgactttaaacctaagcttttgttatgaacttcgtaagctacccaaa

SEQ ID NO: 209129 - DNA, 710 bp, Cannabis indica
aagattctccaggaccccccactgccctttttgtttcagtcgagtcgattccaattcccagttcctcttcgagtgtttcagagctggtaaatattggaagcacactactttctcctccttctattctactaataaatactgtgataataaagaattcctcttacgtagttatgaaactttcaacaaagaacagttggcaatattatttggtatttgatgggctatttggaatcatcgaaataagtctatttttcaaaatggaaagcctgactataaggagatagagcctgttactgtttcttacttgcaggattataaggaaactcaatcaaagtttatgctctaacctcacaacaaccctcaagttcagactgcaagcaagctgattgaagaaggccttctttcacaaccgattttttacaaactaagtgtgaatgttacagtaagaagtgatgatattcttcatggttatggatctattattcaagattctgctgatagagttatagctggtttccactatttagcaatctcaggactgccacctatttttgctgaagctgtggcacttcaccgtgctcttatttggtgccaggcagttcgttttcctatcaggctggtagttaccaactgtcaagtcctcgcataaaaaataaacaagaaagctagagatcgattagccttgacggatttggtgtggaagatcatag

SEQ ID NO: 209130 - DNA, 994 bp, Cannabis indica
aaagattccataagcaagcacctccagtgttcttgggaggtccagatgtgatgaaggctgagcagtggctcacagtgatagaaataattctaaatttcatgggggtcattggaaatgatcgagtgacctgtgccacttttcaattccaggaagacactcctgtgtggtgggaattggtgtccctcacccgagacgtcactgttatgacctaggaagagtttcgagatttattcaatgccaagtattacaatgcgatagtccgtagtgccaagcagaaagaatgcactgagttggtgcagactgagggtatgtcagttaccgagtacacaacaaagtttgaccgtctggccaagctagcctcgagtattgtgcctatagaccttagcaagaaagagaaatagctggcagttctgaatttgaaaattaaacatgacctggtgattactacaaatgaggcgacatcttatgcggagatggtcgaaaaaggctctacgagccgagggtgcggtatagtttctccaggagccctgagtgactccgagtggttgtgggacccccactcttcctactcctgtttatggtagggatggtggtgattccaccactgatcagaagagaaaggctaacccagcatctggtggctcgggacagagtaaaaggttccatgggaaccaagccagaggtggacgacaggattactcttaccctgagtgcccatgttgtaagaaacatcatctggtgagtgcaagtggaagacatgctctaagtgcggcatggtgggacctttcaagaaatatttccctcagacaaagaaagaagagcagaagccagaggcaaaacccgtacctacgcaggtgtttgccatcactcaagctgatgctccagctagtccttctatggtgacaggtcagcttcctgtcaacaacttcttttatactatgttatttaactttagagctacacattcatacgtggcaacacgagtaattgatca

SEQ ID NO: 209131 - DNA, 593 bp, Cannabis indica
gggctgattgttgctcaattgagaccacaatcagcgccggccataggggcgcaacctgggcgatgtgaaaacaaaatacactgtatggccttgtgagcctgttcaacccttatccaatatttgattccctttggaactctgtatggcatttcttagggtgattctatcgtagtcaaataatcaacttaagactcaacatgcgtctaagttcttacacttggaacccgtattttgctgatttccagttttgtacgatggaactatttggctagtacccttaggtatagttgaactagtgtcttgtctaaatcttgtcactttgtctggttgctcacctccccttgtcttttatatgcagatgatccgaagtgactgttggggaggtgacaactgaatacacgaagatttactcagtcttctttttgaagaccaccacccaactaatttttctagtagttcctcgagtgatctcgaggtcagcagtagttcttcagaacttgaggtccagcatcactactatttagagcgaaaaggcagtgaattgtacgatcgacttgtctgggaactaaattaagggtggagttagttcctcc

SEQ ID NO: 209132 - DNA, 572 bp, Cannabis indica
taagtacaaacatgaataaatactcaatcaagaaagaaaaaatagcaattaacattaagtcatggcataaaatcaatcaacattcatcatctccttaaattagagtttagtttataacatccatcatcaaatttaaaatagaaattaacatagaaatcaagagtttaagaaagaactagttggtgattgcgctctagatcgccacaatatcttcttctcctccctctttcacttttcgggtccaacttctgatgatttttgttctaaaacacgagtcccttaaataaaaattagggttgttacctcttgatggaaaagattcaaaactatccaaaattctcgtgttttgcccatagtcgcgactacataaagcctagtcgcgaccataggcaaaataaaaaatccatgctttctgccaaacctcatagccgcgaccatagtcgagaccatagaatagggtcgcgactatggatgtggtggttgcgactattgaaggtttttttgtcagcttcagcagatttatctgcagaatgccccgtctttttaataattgatagaatttgagctctaat

SEQ ID NO: 209133 - DNA, 616 bp, Cannabis indica
ttaaagacacatttgtcaacataatggcctagtttgtcacaattggtgcatgaaggtgaaggcttctttgagcgtgatggattgttggatgagaaaggacgaacagaagatgccaaagtagataaatctcaagagccaagagtcatttgatgatcttcttgaacaatcgtggaaaatatccaagacaagttcgtgatgggctcattgaggagaatctgagcttgagttgaagcgtactacttgtttagactagtcaagaactataagaaaaaaatttattgcaccacaagtgtagcttgtattgggttggaattccttcaatttgttcaaattgatttcaattttgtgaagtaagaggtgacagattgatcaccttgctgcaaacgggtgaattgagtttgtagctgaaagatgcgaggttcattaccctcattgaatctttcttgaagatcatgtcacataacggtggcaagatcaaaatacatgatgctttgagcaattaattttagaagaaacataatttactagccaagacatgaccatattattacaagaaattcaagaattgagaagatgattactaactgttgattgaggaagggaatcaatgaacaca

SEQ ID NO: 209134 - DNA, 674 bp, Cannabis indica
tgaaatgcagaaatatttattccacaacaagactgatccacaggattcacttccgttgaaattcaagcctatctatttaatcaaacatacaattaccgtgtatttaaaagtattcagtcatctttcttctctttcttcaataacagccattatcacaaaattccctactcattcattttctcgaggaaaaatccttgcatctcccttaatatctagccattgagaaacataaatggtttgatgaatgatatttgatgcctatttggaatgaaaaccacatttgaaaatttaatactactatcaatgtagcctttagatactaaagggaccaggagaaccaaccaatctagctgcaaaaaagagacaaatttctaccatacacaagtaactattcatgttatctcaaaaaaaaaaaaaaaaaaaaaaaatgtaaactaattcatacatgtttcaggcgagacaaggacaagatttctaacccaaaactctggtaggtataaataatataaagacttaccaagcttttacattcctttaccatatttctacttctagagctgctccacatccccaaaaatcaacaacaccttctatttcagcaataaaggcgagtcaaactgatttatcatcttgtaattgttgtatcactgaagtaagctgtaatggccttcatc

SEQ ID NO: 209135 - DNA, 879 bp, Cannabis indica
accgtttttaattaatactcgaacgtatgcgactttagaccacgcatattgatcgtttatttttcttgaataccatatgaacttgcgggttctctagtgttacttgcatataaggtctttggaccacttaaaatctcttagggtaatttatatggtaaaacacctgcgatcatacaggtcgcatatggagcattgacatactgacaacatagaactcttgggttcaagatgagttgtcacatacattagtcattcgaaccagacatagatgtggtctttatatgggtacgtacatgagggacacttggtcatcacataaaatcgttatacacacgacttgtgctaactcttaatcttgcttctattttacaatggtgagcatgcgattagacctagtctatgtcacaccttctcatcgcaagttcttatcatgcgaggatagttctattggagcagttattggcatgtcatcattttctaattggagattgggtatatatgtcaagtatatacgagattgtactcgtatttctttacaaaaaaaattcacactataacaaattttaattattatattatatatatttttatttatttaattgtattatattatgagagatacatatttttttttgtttgatgttactattggtggaataatagctactgagcccgtcgataatactatgtcaaattgtaattggacaatacgtgtagcggcgggacctgtcactattaatcaataatacccacatggtaatattaccctaatattgggggcaatagtaaccgatttcaccagtaataactaaaggagccaattttgttcttattactgactgattgcaccccactgttaatgctaattgttgtactagt

SEQ ID NO: 209136 - DNA, 1077 bp, Cannabis indica
gcgttttaattgttaaggttactttaggtttgtcgaatgaaattttgaaatttaatacaaaaaaaaaaaaaaaaaaattaaattagaatcaatccttaaaatattattttcttttaaaataactcatagcgcaaaaatcccttctaaggtagaaatataataaggggagaattgaatattttgaattttatctataccttgttagttttacagttcatgaatttattttattgaatattttttttttgcgcgcagcaaaaagatgtcttccaataatgactcagcttcaatcaaagagagtgaatgtaaatcctatttgtccggtctgttctatggctcctgaaaccattgagcactctctcttatcttgtctagttgcagcagcggtatgggatcgggtgggtattggtacggtaatgcagcaggacgtctcgtttatggactggtgtatgcaccaatttgttttgcttgattcggataactcaagcttgctggtggccttgtgttgggcaatttggaatgctagaaataataaagtttggcaaaacaaagtgatgggggtcgaaagcattgtggcgtctactaccttaatcaatggcgggttgctcaaaattcgaacaatgtgctactgttcactagtttcatttccggggatggggcggagcaatgggtgtgttccaagcggtaatagtattaaggttaatatagatgcggctgtgtttaatgataactttgcctatggggtgttgggtttgtggcgagagattccaacaacttttttgtagagggtggttcaaagttcttccatggttcgatttctcttgtggtggccgaagcaattggggtccaggaggcgttgagttggatcaaagatcattcgtggctcggtgtagttttagaaacagattgtctttcggttgtgcaagctatccgtagctctgtggttatgctttccttgtttggcaaagttgttagtcattgcaaggatttacttagtactttgcgtaatatttctttttattttgtaaaacgatcagcaaatgtagcagtttgcaagggtctttatatctcaccctg

SEQ ID NO: 209137 - DNA, 660 bp, Cannabis indica
ttcagcaacctaattttgcgaaaggaccctccaaaatcaaaatcttttgtgcgtgtgtgtgtgtttgagatacaaaattacaaattgccaatcctcgttagctctatctctcttacttttttcaacttttttaatcttaagtttaaaaaagcactgtagtgctgtttagtgaaaatctgaatcagtgcacacaaaaatggcttgacaaatcatcggtagagaagagaggagacctaataataataatagaaataaaaataataataaaataaaaattgctgcagccgtggagacacgagggcttgttgttgttgttgtagtagatacaatatatatatgataatgagcagtaaattacactatatactttttttatattgttcttttttatttttaccttcttttttaaagtctatcatttttaattctttttgtaaacattgtaccaatttggctcctatcacttcaagatactctctatgtgactctcttatgtcagagtattttgggtacaaaacatataaatagaggtatgtttttcaattaaatataaaattagagataaatttgattaattgattaataaaagtggtatttttcaacccaacacgagaggtcatgtagctagacacaatatgagggctgtatgatccactacag

SEQ ID NO: 209138 - DNA, 597 bp, Cannabis indica
atgtaccctatatatttatataatagagagtctcatattgccaatgtgtggaaagataatagaatatataagaggaatgggctactcctcccattgccaattggttttttttttacttattcctcaaattctaacatggtatcagagcaaaacaaacaaacaaacaaaaatctctaacgactatccaacccccaaaaaaataaaccgatcgaaaaatttatccaagagccaaagtcaaaaaaagccacttgtgattcggggatatagtgagccaaaaataaaaaagagccaccaaaaatccaaaaataccgatccaaaaagtagagcaaaaagagcaacttgtgatcagggatagtgagctaaaaaagagccgcttatgatcgagttgtccaagatggtgagcaagtaaaatagctaccatcttgaggggggatgttagagagtcccacattgccaatgtgtggaaagataatagaatatataagaggaatgagctactcctcccattgccaattggttttgggatggaacctcattcatcttattcctcaaattctaacaaagatatataactaaagttaaaagtgtctctctttc

SEQ ID NO: 209139 - DNA, 683 bp, Cannabis indica
atatctcctaattgttctccgattttcatatatcctatggagatcaggcattattgaattttttcacgaacaaaataacaatcaatctcaatgtgcttagttcgctcgtggaacacaagatttgaggtaatatgaagagaaacttgattatcacaccataattttgttggaattgaagtcttaaacttgaatttagttaaaagttgataaatccatattatctcacacaaaattgtaccatagctatatattctgattcagcactcgatctagacacaacattttatttattactcttctaagaaatcagattgctcccaacaaatacacaataacctggatggatcgtctatctatcttggagcctgcctaatctgcatcagaggaacactcaatccgagtgtgtccatgatccttgtaaactatacctcattttggtgctcttttcaactaacataaaatttgatctaatactgcccaatggtgaattgttggagaagacataaactaactaacgacactactgaaaatgaaatatctggacgagtcacagttagataatataactttccaaccaatatgcgatatttctcaggatcttcaaatggttcctcatcacgtgtaagctgctgataggtctaccttatcaattcagatcagagaagaaaacaaatgaaaagaaa

SEQ ID NO: 209140 - DNA, 905 bp, Cannabis indica
gcatgaaatcctgagcttcatggtcgcctatctgatgtataatgaaatcaaaatgcatccaccaaaccaagaacatacaagtttctgaacatatatgggtctgtattgttataaggttatgtcgttgggtctgaagaacgctagatctacttaccagagactggtaaataaaatgtttaaaaatcaaattggacgaaatatggaggtacatgtggatgatatgttcgcaaatccaaaaagttggggggcacatagaagatctagatgaatgcttcaaaatcctcagaaaatacaacataaaactcgatcccttaaaatgttcctttggggtcagcttgagtaagtttgttggttttattgtcaatggtcggggtatagaagctaatccagagaaaatacaagccctcctgcatatgaaatctccagcaaagacaaaataagtccaaagctttactggtctaatagccacattcattagattcgtttcgaagtcaacaaacaagtgtgtacctttcttcaaaatccttctatgtaacaaaaagtttgaatgcacggaggaatgcgagaacgctttcaagaaataaaagaaaacttgcaaaacctcccgtactctcaaaacccctagacgaagaagtattaggagtatacttagttgtcacagaatatgttgtaagcaccgtgctgataagagaagagaacaacgtctagcatccagtctactaaattagaaaaagacttgttgaagcataaggacaatatcccttaattgagaagctcacttatagcataatcttagaaacaaggaagttaaggccttatttccaggctcaccatgttcgggtatacaccgaccaaccattacgctaagtactacaaaaacccaacgcctctcggtggttactcaa

SEQ ID NO: 209141 - DNA, 658 bp, Cannabis indica
tcgacacctcagtaggttcttcagaaatatcatcaaaatccgccttcgacccaaggtccctctcacaattgtcccaaggaaagtctctaacaacatccgggtgacgtctaacgattttgttaggacgggtgcagagtgaagcggagccctcaaatttcctcttcttgaaaggagtggtacgctcattagtttccgacgatggcttcactccaatatcaccgccaattttcttaatttcatacaaatccaacttcccaaaatgcttacgatcaaaaagtaattcttcttgggctttaagaaaatgagataaagctctctcctcatcatcttggttcacggctccactagcaaaaatctcatgtgaattatttttattcaccaaatctaccaattcactcccattcccacgtggcccatcattaccctcaaaactctccttaccaattaaatccttaatgacaatcggcctcactaaattagtggacccatcagtccatttatgttccatctcattaataaccagatctgggcccccaacaaacatagaggcccaattattattagtcccatgtggccccactacaccaatagagttagtgacaggcccaataaaagccaacggcccaatctcatgatgaccatgatccaccacaatggg

SEQ ID NO: 209142 - DNA, 532 bp, Cannabis indica
cccaagaatcttcttcatttataaaagattcttcatacaaattctaaactcaatctctatcgtttctcgctacctctcaatctcaatctttaacttcaaagtcacctctcaaaactcgtacctccaaaatgataagtgttggtggttgttattcatgtttctgagcaagggacatgtggcataattagagaagaagatttgttaacctcccaaattagcatagacgaccataaagatttcttgcggagatgtcttgctaatctgggaggagttttacagatacttgatggagagagtcatccactacaataatttggtcttttagtgacactatttagtgacccacacaaaaggtttgggtcactaaagagttaggagtgatttttagtgacatgcacaattagattctaaatattcaatgttagtctcttttaatgcgcctcactaaaaatatagaggttcactaaagagtaaaatcaatttttttctaatttttattaatttgaaaaatactagttttagtcacgtgtca

SEQ ID NO: 209143 - DNA, 689 bp, Cannabis indica
ataggatagttgaaacgtttttatggactgtgggagttaaatttgagccacagtttagatattgccgaaaaatgctcacaaagatgggtcaattggtaacctcaatggacgatatatttgacgtgtatggtacgcttgatgagctaagcctctttcaagacgcattggaaaggtagtttggttaattaataattagtgtgtacatatgagtaacaggattattataggataccattactttttacaggtagcaacttacaattaattaatgatatttctctaaaagtaagttatgagtaaatattattttgcatactgtgttttacaaaagttattaattgaaccgagtataatttttcaaatttaattttttaatataactaacgttaagacaatttctaacatgaacagatacagaaaatataactagttttgtcataacatctttacattagattattattaagttttattttgacaaaaaatcagttcagggtcctatttagtacaattttgaaaaatacaagatcattttattattaacaaaacagatgatctaattggtaatttttagcaaaacacaaaggtttcaaaaatggtatttaccccaaaaagttatacttcttaagtcatttctagaggtgtattttagcaattctctataaaaaaaaaaaaacgtctaaaaaagt

SEQ ID NO: 209144 - DNA, 941 bp, Cannabis indica
cagtcaatagatgcttctattgtccctgcaatctctcccattgctcagatgccctccactgcagcttcagtttctgcaccagaaccaccattatctgcccccatactccctcctgcatcagctcctatccctgttaacagtcatcctatgacaacaagagctaaagcaggtattaccaaacccaaagctttccttaccagtaccattcctcatagttacaaagctgcacttgcagatccagtgtggaacaatgcaatgagtaatgaggtagttgcccttaaaaagaaaaaaacttggataatggttccattacctcctgggaggaaagctatcacttgcaaatgggtctatagaaagaaagaaaatcctgatggcacagtgtctaaattcaaagctagacttgtagcaagagggtttcttcaacaatatggttatgatttcaaagaaaccttcagtccagtggtgaaatttgctacaatcaagattgttctcactgttgctttgttctacaaatggtctataaggcaacttgatgtaaataatgctttcttaaatggggatttagaggaagaggtgtatatgactcaaccccctgggtttgaggacaaagaaaatccccatttagtgtgcaaacttcaaaaagctatatatggcctaaggcaagctccaagggcctggtttgataagctcaaggccacacttactacatttggttttctctgtgctcgagcagacaactccttgttctatagacatacagccgatcattccacatttgtgcttgtttatgtggatgatatactggttacaggtagttctaatgaagctgtcacatccttaattacaaatctcaactccatgtttgctctaaaagatcttggttttctcagttatttcctaggcattgaagtaactcactcatccgagggattacatctatg

SEQ ID NO: 209145 - DNA, 924 bp, Cannabis indica
ttgtgcttgcacagatggatctattgctatgggcactcggttgaatggtcttccttggggaggctaaaaattctaaagagataggggctggctggccaaaccctagccgaccattctcgagtattggagttggcttaggccgaccaggcttacacccaattcatatgcttggctagccaaacctacattgtgtagggctggcaccccaatactcctccatggccaaccaaacatccaaagagcagggtctgaccgcccgtgatgcttccttggccggcaaagagtgaattgggtagagtctagcagcccgtgactccacggtcaactgatgttggctatgtgtttattgggggtagatcacagcaattgatggagtttggtgtatttggatgcttgaagtgatcggtttctcttctcaaataaccattgggtgtttccacccactctcaatcatcatcggtcgaagatcgatcttggggaacctcgctccccttagggaggaaatgatgtaccctggccagccattagaactgctgttaatggctggtcggtcagtggctacacaatgggtgttgctattgagccagatatccctggctggccccacgatctagttgttttcgccgtttaacctttgagcaaaggtttgtcctccctttggaaagggaagatatgtcctagttcctgaggcacttggcggcagtcttctttaaagtgaatccaaaaggagatcctggcctcttctgtcggttgtcggattgaactgtctcattagattgcttgccttgcgattgcgacgatctaattctgcttggtgagatggaagggtgtactcctagtcatccatccatctcagcaatgtgcgtctctattgagcgaatgaatcacaatcagcagcacttggttctttagtaaggcctacac

SEQ ID NO: 209146 - DNA, 1073 bp, Cannabis indica
ctcgagatgaagctgcatatatgggggaatccggaactctgcggatccccacttcagaaaaaatgtccaggtgaagaagaagaacctactacttctaagcttggtggacacctagaaaatgaagatgcatttataagtaaaggatttttcatcagcttagcagttggatttatggttggattttggggaatctgttgcactttaatcttcaagaaatcttggagatatgcatttttcaacctcttgaatgatgtagaagattggacgtacgtaaatgcacaagtaataaggcgaaaatactacaattgataaaaaattgtcaggtaaaacatactattcttttattgatatatttttctgttgtttttttttgaacaagatatattttttctgttgaattacttatatcaagcaatatttttctattgaagagtgttctttggcaggagatacatccttcatttggagagagtagcacttgttgtggacttttcttcataaataagttgtaaagttaaaactatattgagctatttgttgtgtggaattatagcttatttgttgtctggtttgggtatttaaagactgtaattgcttggcacaacgtgtattattctatcttactttgcacaaactcattctctgtattgtttacttagattgtgtcaaacaatatgttttattcataatattatgtctatgtttcttttccaactctacaatacaaaatgaatgatatttagatattactaataacaattaacaaaaacagaatgtccaaaagattcaaactgataaaaaaaaataagaacttaaggagggcatctcaagttctcaaccaaaaaagtaaaataattaaagagttcacaaaatcatctttcttgtgggaagaaggcccaaatttggttttttaattttatggaagtccaaatttggttgatgattactccttatccttgacaatgatgctgttgttgtagctaaattagtcatcaaatttgtttgggtgggtagtgagaaagaaatgcagtacttgttcttggaatttcgtttgcatcctgaattttgattgg

SEQ ID NO: 209147 - DNA, 580 bp, Cannabis indica
aacgggtattggagcgggtataggggtgaatttaggtatgagggtgggggaacaattctcgcacccatcccgccccgtttacatccctacgccttaaaatgtgtgatcacttttttttaataattttttattttgattctataaataataaattcacgttaatattaatatataaaaacttaaatttaatatataatattgttgaaataaaattgtagatgaaaaattataataaaattcaaataatctaataattaaatataaatttaatgatccttacacccatctccacaaagaaaaaaaaaacctcctagctaacaccagatttctttaacacactgcatcaattaaaaataaaaacacaaatttgctgcatttatctaaataaatataaaaaaaaaagggaccaaagataatccttttttgtattttaatttgtatgtagattatcgatgtcttgaaaaattggtgatgatcaggaatgcttgccatttattaaatctaaaatgttaaatattcttctgtaataaatacctggttttacctaactaatgtcctgacagttagaagaggcagttag

SEQ ID NO: 209148 - DNA, 543 bp, Cannabis indica
atgcaactagtgctactctggtacgtgaggaagaagggctacaacatcctgtctactacattagcaagtgtctcattggggccaagacaaggtatcctcccattgagaagctagcctagtgcttggtcttggcctcgagaaagctaaggccatacttccaagctcacacagtcaaggtgttaatagaccaaccacctagacaagttctaatgaaccagaagtatcagggcacctaatcaagtgggcagttaaactaggtcagtttaagatcacctaacaacctcgaacagtaatcaagggacagatattagcagatttcattgctgaatgtactggccttgaacatgatttgtgaagaccaggtccacaagtcttggactgcaactcaggaggacactagaccttcttggaaactatagatggctcctccaacgagcatggttctagtactggactcatcttggttactctagagggatttcaaactcacattgctttgaagttttagttcaccacaaccaataatgaagcggagtatgaggc

SEQ ID NO: 209149 - DNA, 1108 bp, Cannabis indica
tatttattttttgccatgtgtcattcatccgaaaatacaaataacaataactaattaacataatcacaaataaatattaacatatatagataaccattaaaagtttataaaaagttataattaaaaggcataacaaaaattacgtgctttttcccttttatttgatgtatataaaaaataaaaaatattaatttatagaataatgaaaaaaaaaatctaattcaactctgatatattttaaatatattgaatttaaattaaatttgagtttgtatcatatttaaatttatgggcttttttattttaacacttcataacagttttttttttgtatttttttcggaattctacatagaaactcttattgcaactagcgctgcaacctaaatcgcaacaaagaatcgtatagaaatctctattgcaactagcgctgctatcactttagaaatccaaaccgtaaatttttttttaaaaaaaaaagttaaaaaacagtatatgaagtaattccccttaaatttaaccatattttattaaatttaatttttatcgtattttccaaaacaaaaaatcacattattaatttttattgttaagtttaataaaaatataactaaaaaattgttaaaacaaaaattttccttaaataatcacttattatatacaaagataaagttatccaagaaaaaaaaaaacggattatttcacaaaaacataaaaattacaaaaatacagtttcacggaattttaaatatttttacgatttttttaattttatttacagaaaatacggtctttttatgttgtaatcttgttaatttgttgttgattttttgttatatgtatgttatttttggttgttattttcatgttacttttatgtagttttcttgttgattttatgttgttttcgtgttatttgttggaaaatcgtaaaaatgtaaaaaaaaaaaaaaaccaattactgtaaacgtaaaaactaataattattttacaaaaaactaggtgtcttacgtaattattctaaaaaaactaatatattaatagttgtggtaaaatgatttagataccattgtagagagagttaggttaggtgccattgctatctcta

SEQ ID NO: 209150 - DNA, 572 bp, Cannabis indica
tatgagtagaaaatttacatttacaatgagagctacaaaaatcaatttgcttttgttgctctttcattatcaatatgcagtgaggaattttgaataaattaacacatgttagacttcggagattttcgaaagaaagtcaatgagatagacaattcattttacctgagcagaattttgtataacatcagtttgattttcttaacttaatttgttttaatcattcgacgtgagatttctacgaggaagtctcctgctttatctatgggagcaagctgtttcaatgtttgtaaaatcccaagtaagcgtcgtataaaaaatctcgacaacgttgacggtcctcccatttttgggagttcctccatttccggtggtctcatattccattgtctttggtagcggcttcgctgcatttacctattcggccggccatgagacgaacatttgttatttttaattatttttctttataaattttattatggggcttgagtttgactctttagctattgaattactgtgctttatagatgaatgaagctccctagattaaacatttcatcctttcactaatg

SEQ ID NO: 209151 - DNA, 791 bp, Cannabis indica
cccgcctatgcccagggccgagcatgctaatatgtatgctgattataattttataatctaacaccttaaatattaatttttttaatacgataattttttttgacgcagtgattagaatcactcatgaatttacgatgcagatatccacaaaccgcgcaagaaactcctcgaaccaagatagctcatcgtctaaccgaaggccatacttaaccatgaaactgcagcgagcaacatgagacaaaatgcccctgaaaatttagacaataaagttataacgtcctcaaacaacacaccaaaatggctagagcttcaacttgtaacatcgaaaactacacgccaactcgttaacatatcaaactgctccaccaaatatctacaaaataaaagataaagaaaagtgaattacccttaatgatgatattaaaaactaattaaaaatcttaatagtaaaaagatgacaactctcaaataaattatatttaacaacttatgagcaaagtctctgtaacagtaggccctccacaaaatcgacctacaaaagaacaataaaactctattaccacacaatttaataaaaaaaatatgtaatgcgaataaagattgtaaactcaattcatataataatatcaagacttaaaacacttatctgtcaaatctcaaaagtcgtttgcggaagccatgaataccaaatatgaaaccttctcttacctattgactatactacaaatctaccctaaataattagggacaagccataaagatggaacaaaagccatagaaggcatccaaac

SEQ ID NO: 209152 - DNA, 917 bp, Cannabis indica
gcataaaacccaacaaataccacatcagatatcccaactgatgttacttccgcttctacagcagctcccatggcggcacctcgacgcacagccaacagaaccagatctcacaatcctactgatgctcacgacgatcactctccaagaaccgaagatcaccacatccctcaaaggcaatctcactctcttctcgatcgccatgctaatgaagatgcctctagccctttcttcctcagctccggtgaccatccaggtctcgttctggtatccaccgtactcactggaatcaattaccagtcgtggaaaaggggaatcaccatggctctggcagtgaagaacaaaatcgcattcattgatgcctcgctcccaaagcctgaatctggtaactcccttctcccttcttggcttcgttgtaacaatatggtcatgtcttggcttgtgaattccgtctctgctgaaatcgctcaaagtataatgtactttgacctagctactgatatgtggcatgatttagctgaaagatttaatgagggtaatgcccctcgaatctttcaacttcaaacgcaactcactcggttgcaacaaggtgatcattccgtcacctcatatttcaccaaattgaaatccttatgggatgagctgaaagagtttcagccgaataccacttgcacttgtggtgctatgaaggtttttcttgatttttacaatcaaaacaagttcttcaatttcttactgggcttaacgaatcatatgcttcagaccgcgcccaaatacttctcaataaacctttaccaaatctctctcgagtctttgctatgatcgttcaagaagaacgtcaacgaactcttggttcatctgaacaccccccctggcctcctctgtccgtcccccatccaataacccaccaagaaacaaaa

SEQ ID NO: 209153 - DNA, 772 bp, Cannabis indica
ccatcacgcaataaagtgtgtagtttcgacaaagagagttgttgcgttgctggggtagacgaccctgccaacttcaccatcttgccgttccattcaaattccatagtaagggccttatggtcatgaagacaaggacccaatgtttgcagccactgcataccaagtacaacatccaatccccatattggtaaaacaaagagatctaccacaaacttatgtccctgtaaactcaattccacccccgaacatacttgtgagcaccataatgaattcccattacccatatagaccttaaacttcttagtgtcagccgtaggcagacccaaacgatgagctaaattttcctgtatgaagttgttattactccctgtatcaatgagtacttccagagattctgagttgtgttgtgcaataatccgaaaaatacgagggttgctagtattcgacaaggcattcaagctaacctcctctgttatggtttctagtatctcggaatttgtctctgtatggacagcagtatctatctcctcttcttcctgagcacaaagaattaacacacggtttttgcacttatgacccgcgctgaatttctcatcacatgtaaaacacaatcccttttcccttttgtccttcaattcagcaggtgaaaggtgtttaactggcagatttgggttatgtagcttgggtgacgtagaaggagctgtcaccttggataatggacttgtaggtgttgttggggaagtggtcactgctgagtatggttgggagattc

SEQ ID NO: 209154 - DNA, 512 bp, Cannabis indica
ctagttttttgaataaataaactaatttcttgatgaaagatctttggtgagttgctctgaccgatcgtcaccggatgggtaaaaaaaaattaaaaactcgtgtattaattttacttctatataattaaaactagttttctggtgaagaaactaattttttaatgaaaattattttctggatgaagaaatcaatttattgataaaaaaaccaatttcttgataaaagatctttggtgagcaatttatctaaaaattaaatttacatatacatggcataacaaataccataaaatagtttaaaaactaaaaaaaaaaatgtcataaacaatgactaaactttaaaactgtcatatttaagtaagaaaaaaattaaaagtcatattaagtgcaaattcttcttgtagatttctttctcttcttttttcttctgccactatatcacacttttatagtttttttctttttaacatttgacattagtatatggaaagtgattttttctttcttttttc

SEQ ID NO: 209155 - DNA, 815 bp, Cannabis indica
tatgaggcggtgacgtgacaatactaaaatagttttatttctactctagttaattttcttctttttttttctacattttttaatcacattaaatattaattaattcaataactaaataaaaaacttttaaaaaaaaaaaaccaaccttctaccttatacattatatattctatttttttaaaattaaatttttaattttgctcccttaaacttttcttctttttcttttttttttttaaaatatataaattaatgatatttttttaatgaatatcttgttttgctttgctccattaatattttcttcttttcttttttttttttaaaaaaaaaattaaaattaatgatattttttattaaatatctcattttacttggtacacggttttgctttgtatctcattttgataaatagttagttcgccttattttttcttttttgaaattaaaatttttaaaaataatatattttttggctttttttttaattatttactaaaatctatatcctaaactatttctcttaaattaataattcactttactacttactttctctcttcttctctcatgatggagtatttttttcttaccgacttgagtattcttttcttaccaacttaaatactgatgcagatagttggagcataaagattagagtttgtagaatgtgtgagtctcttaatactaagaagaatagagaattgataagtcttaatatgatttttattaatgagaaggtgattactattttattcatattttttctctattatttttaatcatttatgtcaattattaaaatatgtctacta

SEQ ID NO: 209156 - DNA, 795 bp, Cannabis indica
gtacgtatcaattctcttattctattgtcaagggaactgtttcaaaccatacaatgatctattaagctgccacactaatttaactcctttcccttccacttgaaaccatggttgcttcatgtagatctcttcatccaggaacccatttagaaaagtaatcttgacatcaagctgttcaacttcaaactccagatgtgcctctaaggatagcatcaaccttattgtcttgtactttaccacaagtgagaagattttcgtgtagtctataccttccacctgagtaaaacccttagccactaacttggctttaaacctcactggttcattctcattgattctctctttcaccttaagaatccatttgcactacacaatcttcttgttctctagcttcgggacaactacccaagtcttattcttccagagtgaatccatctcctcatccatggcttgaagccatttagacttgtttccacctgaaactgcctcttcatagcttctgggttgttcaatttcagtttgttgaactaccgctagcgcaaatgctattatgtctgctttcgtgaacctaattggaggatgaatctctctctgagttctatcatgagccaactgataaccttccagacttgtctgtctgaaccctttctattacctatgtttggtcttcattatcttgttcttccggctccacaacaacttttgtttgtgcattatcttccggttccacactatcttttgcccgtggaccttctttcaggagcttcattctatactccatttccatacttgtag

SEQ ID NO: 209157 - DNA, 661 bp, Cannabis indica
tgacccttttagatgtcgttcggggcaaacgatatgttgtctcttaaaaacgacatgtcgtacggtccaccaaaaaaaaagcaggcgcgtgcatagcccattttgggcccttttttcattatttgttccattttttagttttctatcatttttttaagcacaatactaatacatcaattttattcatattttggttattaattttagtattgtggattaaatttttgtgaattttttcttaacaattagtgcttattttcttacctatcgtaaaattaagcatggaaaattgtttggtaatgaggaacatttaaatattaatttatttagatattgtatcttcctccaaaataagattaagatccttaaaagtaattaattatcctatcgataataattgcttgctaaggatgcttaatatggtgaagaaaatttattagatattatgaatcacaatttatctattctttcaatagtaaattaatgtatttgattgtaatatttaatagatctttcttacctgtgtatgagttctactttattaatttatctaagaactctagcatatatgatgatcatttgttattttgcaatcatttatttatgagaaaaagagcacaaatgatatgagtttgttctaacatgcatttaatggttattg

SEQ ID NO: 209158 - DNA, 574 bp, Cannabis indica
aaagcttcttccagacgctgtccgcaccagtaaccggccattcaccgtgatcgttgcaacatttgtacgcactacgaactgagtaaataccggttgtttcttcagaccaggaccagcgatcctccatactagagtcacacaactgaatggataaaattaaagctttatcatgaggattaaaaatatcattgattatctccaaatcccaatcttttcgatccatctgcattaggctgtcaaccgttcttccttcaagactagggtgaaaagtggtaacaaatttgttatccaaaccaggtagccaagggtctgccataataaaggtagatttcccatcacctatagaccttgaaacacccatctgaagcagagatttggcctccaagacactacgccaaatgaaactcgggttcggacccaattcagccgataagaaattgccccgtggaaaatatctagctctgtacacctttgccaccaggaattttcattagttagcagcctccacccttgcttccccaaaaaagctagattatagtcccgaagatttcgaaaaccaagccctccagcatcc

SEQ ID NO: 209159 - DNA, 565 bp, Cannabis indica
tgaattacgatttaagttactatatggttgctataaaatgcaagaaaaaaaataaaaacattttgaaatgtaaaataaaaaaatcaccatttgtttttagataaaaattatttgcttaaatgtataagggctcttttatcgctgggaaaatgttagcgaagagttctatgcatgttcatgagcttacttaattataagggagaaaaaagagaaatgttagcaccttttatgtgtcaatatctattagtccaactaagtatcggattccatataatttaatataataatttttttttttcatctctctgattatctctattttagttaacacagatttttgttatggttttgtagttaaaatctacataatccaccagtccaccttattatgaatgataatctaaatatagagtattattgtctcaataaatataatatgtagccttttttcttaaatttgccgtctcttttatcttgaattttgctttatttataggtgtatagggtgaccccgtgacaatctacatactctatggtttggcaaagtatgctctacggttagacg

SEQ ID NO: 209160 - DNA, 573 bp, Cannabis indica
ccgatggattgaaggagcttgacatggataattatgatgatgaagatgatggtattttgtatattcactactcttgtttctccatttttttagccatatgtaaatttatctgaaaaacgaaacatggttggtggactcagggattgaactatttaccaaaggccttggagacctttactatccaagtaatgaagttgatccatatttcaaggataaagatgtaagcgtaactttttcaaaatgtgtctgcttacttatatagctttctctaatggaggagggctcttgtttattcttatatttatattttctctgaaggagtgatgaggagttcttgaagaatcttgtaggagtttgtactatcaaaccaaactaggagttctagttattagtttgttgcacgaaataggtggatgatggcgaatacaactaagaggcgatgtagttactagttctagctcaatatatatttttgtttcctgtatctttcttattgtcacttcgtcattgtaattaactttttcttgtttaaattaaggtttgggttagtgtgaggaacctggtgatggtgaa

SEQ ID NO: 209161 - DNA, 525 bp, Cannabis indica
ccaaaccaatagaacaagggctgcagcaggcccacaagcaaggtaagtaggtccattaccggccgggccggctccggaccgaaaagacctaacggagtaattaatccctgatctcggatcggagatgctaacggggcgggaatcgaagtgggagacctctctaccgcctgtgtctatctcctgtcaagtatgctccccagacatagactacgtccagggtagtactcttggaaagatagaatatcaccgcgtgaacataacattaagttacgaatgtaactcccgaagtaaggcggagaactgttgttcattagagcgccggagtgcggaggttgttcccatcattgaagtcagagtgtgggactgagccttccgaatgataaagacaaaaaagtgcttagtttcgttggaaaaaccaacgctcatattgactttctctcgccctacttctaaggatagatagaaaaggttggagagactttctgaaattctctcctttctaaagctgcgcaaggcggccccccc

SEQ ID NO: 209162 - DNA, 700 bp, Cannabis indica
gtttcagttgttgttaatgtcaatgtttgtagtagaagattcacaatactgttctttgtacttttttatttggtgttgtctttgcttatatagttggtgtttattaaatattaatgtggttttattattgtgtaagaaatactttgagacatatgtattatttacaatattcattatatatatatatttagattatattaatttataataagtgaaattatattaatgtaaatttaaaattaaataattatataatatttgaaaaatgaattactatttctatagtatatactgtataaaagttaataatttatttttttaattatatatataaaaataatttaataacatttgtataaatgttagtaatatagtgtagtaataatttaaaaatgtcactataattatttaaaatattagaaataataatttaatgacattttcataaatgtgagtaatataatttagtaacaacattaaaatgttactaaaatcatttatatataaaaaataaacatataaaatattttttagtaacattttcaaatgttattaaagtgtattatttaataacattttagtttatatcacatgggcatatcctacattttttacaaatgttacaaaaactatgaatgtgaataaaagtgtataatagtaacatttctaggtgttactaaatatcatttttgttgtagtg

SEQ ID NO: 209163 - DNA, 665 bp, Cannabis indica
agatatgtaagatatacacatgattcattttgaagattacagtaataccaaagttgatcagtgaaaactgatgaaagtggttctctccattgcataataaagatatactccaagtcctaattgttaagatagagaggatgaacttgtgttagtactcatgtattacaaaaactactagttatgatgaagatagcattatatatatatgtaaatccaagcaaatctcaagagagcataagttcatcaaccatttatttatttatatctctaatttttgaacaattaagaaaaactctgtgacagaatcattgagatgtttctgagagaaagaagaagagacttttccatgaataagacagctcttgattttgttgcagtgagagtaatcaccaagcctatactcctccttataacccatgtcagagacaactcttccaccacctttgttagaaacaactaaggcaaaaatagtgaaagagaaatgagtagaaacataacaaccatcagaaactctgccccaataattaattccagcaaccatcagaaaaaccccaagaacaattacagaaagaaacttctcacactcgctatccccttgccaaacctccgaaattttcccaataaaatatatatatacctgcaaataataaaagatattatacagt

SEQ ID NO: 209164 - DNA, 2368 bp, Cannabis indica
gttggttaattcctttttaatgagggtaatatttaattggttacctatagcagaacccttagttgggggtttgggtttcccggattagggttttggcgtgttgtttacccgtttacgtaaatgtgactagggcatccatccaacacgaggctttctgttcaattcgaccaactcacttgaattcagaatcgaggtaagaatagcatagaacatattatatatgtaaatgtatgtatgtgtgatatatatgcatgcttgttgtgattcgtacactaccaacactagtacggtagtggtattgagtgcattggtatagtgtacaatgtctaaggaatacattatggtgttaccaacactattatgggtaggtacagagtgcatgtggtacagcacttagcggtactcggggtacgcttcataccctaccaacactagtacagtggcagtactgagtgcatgtgctacagtggtccagtggtcgtatcttagttaagaacattcttagtcatctaataagccttgcggataggtgtatgggtggctagatgcaagttagcaatatagtatctattatatgtttttcttaatgagtctattggctcacagtttcttctttcatgtgtaggttgagaaaaggcagaagctgaactagagtgagttctgatttcgaatgatgattgtttatgtcgagagaacacagcttggagtgttcggtctcgggacatcttggattttattctgtagttgctgagcgaccagtttataaatgtattttgataatgtttgtaaaagtttaaagtatggaatctcggtctatgtaaataaatatatataagttaataaaatttagagtttatcaaagttttaatttagcacaatttttaaggaaaacccctttgattagcaaaggtggtatgtaattggaaaatcacggtaacgcgcctaagtatcaactcgttacatttttagtatcagagccgccaagtttgtctaccgaagatcgtcaagacatgtacaatcatcatcagagaaaagttcaactcaagttcagtaagcctttgcttgtttagtaatgtatgtaattagaaaagcatgttacggagcaaaatagtttataattatttatttgaatgcattgccctaaactgataagttcggtagtaagattacaacttaaatcgttgcctgaccaggctgacttatgaatcgacaggtttgtcctgtagaatggacacctggtgcaatatggagagtcaaagaaacatggttaaggctagtaatggttggagagagtggaatccaagttgtcccgtagccaaggtggaagccattggagggcttctagcaggagtgatgattatccaccacatgctccgttagatttggagcaaaggttcgtagagatggaagctttgattcaacgacgtgatgaggagattcagaggttaaaacaacaagggtgtaagagtagtcctaattccaaccttagtaactagcgtgcccccagttgtttggccagatgttggggctcctttgtcaacacttaagagcgtgttgcaaccatcttgaaagtaactatcttgagttgtagctctcaatgaaagaaccaaaatattgacttagaaatcttgacaaagatttttaagccacacttgctcactagattgatgagaatgaaatatttgttacgtataaatagagagacagcaatttattgtagttcactccttgtatctcgacagtaatggagctacatctacttcgagtttttattctcacgagatggaattatagaaaaatggctaagtgtttatgctctaatttttagagagagaaactagagagagatgctctgacctttatggctacttgtttgaatatgaaaaatgagctagaagagctctccttttatatgtgaaggaggtccttgaaaataggaacaaaacaatccaaaaatatgaagaaaaaaaataaattggctatttttgaccgtatatgatgatctaatggagaaaattaacctctgaggttgatcgtcaatttttagagcgcaggtcctgacggcgggacccactctaggtaagttgtggtttatttttgtaactctcttaggatgaaatttgaagtcaataacttcaaaattgcgattgaaatgttagacattacttgatagatcattaaaataacttcgaaacaaaagttgaattttgtcaatcaaatcaatattgagtgatttatggccattttactaaaagttattctagacctagcgcctaggttgacatcccagcgcctagtttgacatattgcgtcaacccagacactaggtgagtgggaatacatcccggggatgtattttttgatgcct

SEQ ID NO: 209165 - DNA, 478 bp, Cannabis indica
aaaaataattaatttttttcttcttttttccgtttccgtttcccttctcctttttttttcctttctttctttttctagaaatcctaactactttctcccgctctatctctctcgattgagccacaactgaaatctatttgcaccattgatcccaaaccccaaccaccacctgcaaacccaaacttcacccactgctagtgaccccaacaacctatgataaccttgacgaaatgagtgacctgtaaagagagagagagagaacaagttcgaatataatcaaatcttaaaaaatgatttaagaaaaaaaaaagaaacacaaccaaatagggtctcatcttcggctctgccaactatagagctgaggacggctttaacaaccacccacggcaaaattctcccacgaccgtcgacctacataggagagagagagaagagagagagagagagagagagagagagagagagagagagagagaag

SEQ ID NO: 209166 - DNA, 636 bp, Cannabis indica
aactccattagggtatgtatgttagcttgtatatgttgtggtgaattttacttagaatgccctattttgatgctatgaattaatctatatgagttatatgaagtttgagtgatttggtaatgtttgtaggtgtgtaaaattgacatttttgaatttttcaagcccatttgctgtgaccaaaagtatggtcgtcgtggcgaggcttgaacccgaaacacaggaatgcccctggccaatctcgaagcgacgatcattgatctagtcgtggcgaccccacatcgatagtgtaattttacttgttttgtttcagacaggacttttaactatgaatcttgatttaaacgttatttatatcattgaaaagctcattttaagccctattacatggtccagtgttggagccctaattatgaattattcataaatgttattttgagattaatcctattgtgtgaaacccaagaattgtgactataaataccagcacttggtaaagatcatatttggattgagatttctccgcatgcactaaaaattaggtactccgcatgcactaaaaattaggtaagatggaaaacctaagcacatagagtatagcacagtggcgcaattatatatattatttgattactattg

SEQ ID NO: 209167 - DNA, 595 bp, Cannabis indica
gatcattgaatggtgcacggggtaaagtgccatcaatgaaaggagttttatttttgatagtgatattaatcgaacccactcgtttctaagactgaaaattatcttgactagtcaaaaggaacgaggaaatgatatttggttgatctccagttcccaagtgataacgatcatcttgagaaggttgatcgtaaaaggcgcgagataggccttgattagaaagaaagctagagttatcagtataagccacatggctcgaagttccaagaaagggattgttaccattaaagaacggcgtggggtgtggttgggtcggagctatggtggtgccagaaaaaaaatgatgccagtgaagggactgtctgaaccgaggccagagtggatgaggaaaatggcggaagcatggttgtttgaatttgtgacgctatggaggttgatgccagagtagaggagtaaccaaatggttcggtggaatggtgttcaaacggtctcgaaatggggagatcggcgacgggataagagctgattactccagtaggggatggatcgaacatgaaggaggaagcaccatacagattcgagattgagttttcaagag

SEQ ID NO: 209168 - DNA, 823 bp, Cannabis indica
atatagtttacaaacctaacagatgtgtagccttaaatttccctaattcacaagaaatgaaacctaaactgcaaaattcataaattgaaaagcacgagcatgtatacataattcaaataaatagagtcaaggagaaattgagagattactcacgaatcgcttttcgaagaaaaccttaccagctatgattgaaagaaggcatataatagagaatcaattagagaaaattaaggttcctaaccctgaatgccatagctgaaacaatgagatagaaagctagaaagagacaaatattgaagcaaagctactgaatgagcattgagctcttgaaggagaagaggaaggactcgtattgagctattgaccgaagacaaagtatgacagaacaattaatcctttcaaaaaaaaaaaacaaattaactagtaaacaaagggcaaattgaccagtcaacaaaagacaaaattataaatacctaattttacaaagggcaaaaacgtcttcacaactatcacctcgttaccacacttttataatagtaagaaagatatatatggtttgaataaattaaattaaaatttaaaaaaaatatataacaattgatataaattcattgaaaactcattgtatgattttaaaattgatgtcattactgtatctgatttgtagttgctattatatttaaagtcattattatcatcgtacctcacttttagttgttactaaattcaaagtcatcattaccgtatctcacttgtagttattgatatattttataataggtttgaatataaatctataaaaaactctttatataatttcaaa

SEQ ID NO: 209169 - DNA, 781 bp, Cannabis indica
agtcagtctaccacccctggatagaaatgaggattttcatccatcaagccttttagcacatttttccaagacaggtgcccaaaacaactttttcttaggcgagccacctaagggcattccaagatatgtcataggccaattccctacttcacatccaatctgattagcacacaaggccaccacactttcgttcatagagatacccagcacttgacttttattcatgtttacttttaatcctgaaatagcacaaaatgcctcaacaattcttaccagtacatgaagtgaggcctcatcatcggcaaaaagaagcgtgtcatccgcaaattgcagatgactaacttgaatcttatccttgcccactaaaaatcccgagaaaatacttgaattcacagcttggtcgatcatccttccaagtacatctaccactaacgtaaaaagaaaaggtgagagtgggtcaccttgtctaaggcctcgagatcctttgaagtttccccttgttcttccattcaccaataatgagaatgatgttgacgatatacatcctctaatccatttcctccatgtttccccaaatcctttctttgtcaaaaccagatctaagaaatcccattctactctgtcataagctttctcgaaatcaatcttgaataccaacccactcttaccgcgacatcgataatcttccactgcctcattagccactaacacagaatctagaattttccgcccttctacaaaagccgattgtgttactgaaatcgtttcccccaataaacct

SEQ ID NO: 209170 - DNA, 856 bp, Cannabis indica
tcaacctcagcgctgggcctagtaccatgtgttaacttaggcgttaggtccaatttaaggcctcttggaagttccgttttctccctaaaagtagttgaatcttaatctttatgaatacagagaaaattcccaaaagacttttcggaaaaactcctcaaaatcggcctaagctgacaaaatgtcaccttgggtgttgggccaacaccaggtgtcaacctgagcactagtcccttgttttggcgcccaggttggcctacttcttcctaaaagtacttatttccccatttttatgaagacaacgaagatgcataagttagattttcagtttgatgcttgcaagtggcccaggttggcaaattgtcgacttgggcactaggtgctcaaaaatgaaagttctctgaatgtgattatgatgcctcaaatattatggtatatctagttcatgtcccaatgtaaattttaacctattttcactaagatggtcccgaaaactaaaaccctagttggtttgtcaacatggacgctaggtgaaatcctaggcactcaggctgacttctgaggtgttgtttcgtgtgttttcatatcccagggcctagacttggatgcttcatgtctttgtggtacattatactgaaagatggtgagttggaaacaacttttcaggatccaaatacccattctggagttcctagagtcaaacattgatgtccacatcatcagagaagtttttctaagttaacagtgtcactcaaactatcaaacaagtaaggtatgtttctaacttaaaacaagaatcttttatcaattgacatgtctcataatcatagatattcagttagaattgaaaattgtacac

SEQ ID NO: 209171 - DNA, 790 bp, Cannabis indica
tgcgtgccataatgtctaaattcgggtttccaagccgatgggtggatttgattatggattgtgttacttcagctgagtatgctttcttggtaaatggtaggcctcggggttgtgtggtgccttcgaggggattgagacaagggtgtcccctttctccttatttgtttctattttgtgctgaggcgctttcgatgctccttcaaaaggctgagataaatggggagttactggggtttaggtgctctcggtctggccctcgtgtgtctcacttgttctttgctgatgatagtttgatttttggtagagctaatggtagggaggcggaggcgattcgtcggattcttcagtgttatgagagggcctctgggcaacaagtcaactttgataagtctgcaattacattcagtccgaatgttcagcaagcagaccgtgctagtgtattgggtatattaggcttggggtcagtggctactcatgataagtatttgggtttgccgacagtcattgggaagaataagaagcgtacgtttgccagtatttgtgacaaggtccagaagcgggtgcgtggatggaaacggagtttcttttcagctgggggtcgtgagattcttattaaggcggtgttgcaagcggtgccgaattatcttatgagtatgtttcaactaccagtggcaacttgtgataagctgcgttcaatcattctccagttttggtggggcactaagggtgataagaagaagattgcatgggtaaaatgggatgatgtttgtcaaccaaaagtgaaaggggg

SEQ ID NO: 209172 - DNA, 1015 bp, Cannabis indica
ttttcaaaattggcagttgtttgcagttctcgctaattcacgtggtgtcacgtagctcagaatatctatttgcatccatacaaatagcatgtttctttgcttttctacttaaaaagatatcacttttttagttgcctttatatccgttcattaattcatgttcacatgcagatcttaaatgaaagtgagtagaatgttggctttagcaattcataaaaagcattgctattaagcaccagtagtgcttagcactttctcgatatatcgtattgtgattggctagagatactttttaaaagctattatatttaattatatgggattcgatacttagttagaccaataacgatattgatacataggagagtgttaggtactactggtgtcttttagcatttgttattcataaaatcaattgaatttcttactttatcatgccatttattagcttttaaaaagtaaggtaagagaggtcaaaactcgaaatatctaaatcccatttgaggatggagattaaatgatgaggcatgacaacatactaactccacgtgatttggtgtactaaaatcaaagtgtgtttgacttcataagattcttgatgtttgtaggtttagataggatatcacattcatagttaagactcacgagtgttacgaggtaacgtcttcacaaacgtttgattgaaaatgtaagatttaagatatggagttgtatttggattttggacaaatctaagagtggatggagaaacttgcgtttctttctccaagttccaaccacatattttaacaacaaagagtaatatcattttaaagtgagcttccataaaaagaaaatttaattttcgtatcaatcttattttaaacacataattaaagtttaaataatttataatgtcacaattgaaattttaaaaaattattctccacacctatatatatctcttattactgtgactatcaaacagaaatcattagtttattcgtttatatttttatgttcccgttaaaattaa

SEQ ID NO: 209173 - DNA, 571 bp, Cannabis indica
atagggcttatccaaattatgtttgtaaactagaatagacactctatggtttgaagcaggctccgagagcatggtaggataagattgctgagttcttagtggagagcaattatgtcatggcacatgcagattcaagcttattcatcaaaataaaagaagcagagatcgtagttgttcttgtatatgttgatgaccttatcattactggtgatgataaagcagagattcgtcaaacaaaggagaacttgtcagtttgctttcaaatgaaggagcttggataattgaaacattttcttggattagaagtcgactggactgaggaaggtttatttttctttgtcagcaaaagtatgctaaagacttattgcaaaggtttggaatgctcgagtgcaagcccatctcaacacctatggaagctaatgctaagctatgtgcttatgctgggaaggacttgctagatagagcaatgtatcagcaacttgtaggtagtctaggctaccttacattaactcgactagatatttcttatgcagtgggagtagtgagctgatatatgcaacatccaaagaag

SEQ ID NO: 209174 - DNA, 783 bp, Cannabis indica
tgcctttgaaacaggctctgcccctggtgccaagtcaattaagaaatctatttcttcctgtggcggcaatctcggtaactcctcgagaaagacctcgagatattctcttactaccttgacatcctcagcctaactgttttgggtatattgaagtaaaaaacaactgctaaaaatcgtacacattcattgcttaataaatctttagcctttgaaactaaaatggccaggatccgagaaccttgaacggactcgacatatagaaatggattttcaccctccgactgaaaagttaccattttccgtttacaatcaatattggccaaatacttggacaaaaaatccatccaaattatagtatggaactctgttaactccaactccactagattgacacttaactccctattctcaattctaactagcatagatctaatctaccttttagagataaccagttctctgctaggtagtagggtttgaaatcctatctaattaaaatcacaaggcatatccaaattattaattaccctcaatgtctcatatgaatgtgtagccctagagtcaagcaatacaatatagtaggagttgttgacaagaatctgacctgttatcaccgaaagactggctgcaacatgcttgcataatggtaaacacctgagcatgtatgcattttccctcttatttctgctcttcctatttcataaaaggacagtctttcttgagatacctaaccatgccacattgaaaacatgccttcccttgaaccaattaagtgaactcttt

SEQ ID NO: 209175 - DNA, 503 bp, Cannabis indica
gaggccttctatctcatctttaagctgacgtcactcttccgttgtatgcccaatatctccatggtattcacatcgtctggttgggtcccttttacgtctcgcgtgtttcatgggctttagtttattgaaaacgacctcatattcatgcgcaaggtagatactttcccgagtttcattaagcttggtatagatagtataaatgggtacgtatttgtcgtgtttcttttgtttcttatctttggacgacctcttagagttgtctttcctatttgaccttgaagcttccgactcgaattcttcaatagaattacatcctgattgtcatcctggctccccgacttggtgtctcctgaatttattctccaactcgtctattcgcaaatggattgattccccttgctttggaccaagttgttggcgaagatcaggttttttctggttcaagcgttctcgtaggttcgattggccatgacagttggcagatcttgtttcacccatagact

SEQ ID NO: 209176 - DNA, 840 bp, Cannabis indica
ctttggttttcaccttaactaacttgtcaaagtttttaccaaagtacttttcaccccagatacgtgcttgggtgtaattattaggactcttgggatcagtttttcctaaatcaaggtccctataattgagatacgccattcttggattttgggacacataaggcgtcatgaaattataaacacttcaaacccagtttatatgcttttcattatcttcttgcttctcccaggtagctgcgtatcaaacttcgtacatgattccagctcgatgagggaaaggaattgttgattctgagatcttgtccattataccaccgtaagggtacaatacatacaccccaactcctacatcttcttcatacaatttctccaaaattttgacaattgcagtttctggaattggtttcttaacgtagtctaacttaactgagaaagctactttctgcccagctgatctatcaagcaaaatttccttttgaaaattagtagtgttataatttacaacaccactgtagaagatggtagtatcaatccagctcaattctttgcaatcagtttttttaatacccaactcaggaaagctcttgttcatcaagttgactagactatctactccaccatggaaaatgcaagagaagtaaccgtgtactgtagtcttattctttccttgattatctataatattcctggttatgaagtgagtcatgagtaataaatctttgtcatacttgtaagcaatattttgccatttattaaataacttgacaagcccatgtatctccatattccttttaacactgaatatagtagcccttgatgggacagcaaccagtctaattt

SEQ ID NO: 209177 - DNA, 623 bp, Cannabis indica
aataaaaaaataataatttatttaattgattaatcacaaaattaatttatgtcacgtgattaaaattgttacaatataaatcaaaaactatattttagctatgtaaatttaaaaataaaaaaaataaagtttaaatcattactattgtatctaacttgtagttatcactatgttcaaaatcatttttatcactgtatctcacttgtagtcgtcattacattcaaagctattatcatcagtattgcatctcacttgtagtcgccactatcaaactcgctgtaattactatatctcacttatagttgtcactatattcaaattcattatcatcaccctatttcacttttagtcttcattacatttacagtcacaattctcagtaccacatctcacttatagttgctactacatttaatattgatgtcattagcaaagaatattatcaaaatcaatagaagaaagaaattaataaaatcgtttaaattaattttttgattatatatataaatattaaaataaataagatattttactttcataatatatttaggacgcacatttatttatttaaacaaatatataatttaacaaaatacttaaataaaaatttgattaaaaacaaa

SEQ ID NO: 209178 - DNA, 608 bp, Cannabis indica
aatagtcttcaaattgcaattctgacattatcaacccttttgcattctaattgtaaaataaatagtattgttatttgacattttaaagtattcaatgctacaataatatctaattctataatttattagcaattttttatattatttattaaattaaaatgtttaagattcaatattaaaatatactaatatgtgtagtacttgacacgtttaacttaagtgcaccttagcatttctaacaaattcccaattactcacatagggagatttaataaagtaataaaagtaaaagatggtttggtaattgatgaataaagtttgaacctttagtaaaagtacaaaagaatatagtataattggtcccaaaagtaggcttggcccacaaaaccaaaacttaaaatagtccatttgctcactcactcattagccacaaaacatatataggattaggtccaatccaaagaagacccaacatttgaatgttattaattaatgattccacatatgttttaatttgacaatgcaagcaagcaaagcattgattccaataccattcaacaatatttcttgcttcattcccattcttttcattatattcccaaaccctt

SEQ ID NO: 209179 - DNA, 730 bp, Cannabis indica
aaaaaaaaaaaactgaccaaattagaaccttttgttgagaatggcacttaggtattgaagcatttcagctcgatttctcaggtctacatattatttaattgtgatttcagttatatttctggtttgaaattattcataatatgcttggttcaatattttaccatgtttttttttcttgatggcagtgatatattatccgtttctgaacgttacagactcaagttttgagtttctcgtactaatggcatcttcttcttcaactctgctgcttccattaggtaaaacccactttctattttgacttgaattattcatatatcccatttcctactttttttgttacattctgtacaaattcaatttgtgtattaggtaaaagcccatttgatagctctcaagggatttgtagtaggaaattttcaagtggggttgtgagatgttctaatttggaactcaaggcttcaaattgcgatgaaattaagctaagtaagagaagaagggaagtgattggattgatgcttggagcttcaagtctgtttgttgagtcatttgcagccaatggagctgggttgcctcctgaggacaagcctaagctctgtgatgttgcttgtgaaaaggagcttgaaaatgtatggtgagattacctacccctttatctgtaaacaattttttttgggtattgttttactatatttgatatgtttaccacttaggcagaccaaattaggag

SEQ ID NO: 209180 - DNA, 920 bp, Cannabis indica
cataaaacccaacagtaacatattcaacactcccaaaactggaatgcatttggctagacatataacctacatttaacatcatattctcaattatataaaaactaatgcagaaaaaataaatctataagaaattggagcattttcctattttattaaccttaaccatttgttaatttcaactataatcaataaaacaatacacaagttttcatccttatatcaccgcagcacacaaattttctcagaacttacttcactatagatgaatatataagatattcaaactcttctgtaaggagggttatagtgtattcctttaataattcaaagtcgtggcagagaagattaaaaatgtgttaagcaaaatgactgtgaactagatcaacaaacatatgatttgcctcttcagtatgtattacatcctatagcaagattctaagaaaacttacaaatcgtttacttatctctaagtccaagattatcaagcaaatcttgtacctcaacttcactctcaatctgcacaaagtggaaaaacctttaaaatttaacaccataaatagcaaagcaattattttcaaataagaaaaacattccagtgtccatagaaatccaaagctaaagcgggcttgaataatttatgtacaaaaccaatctaccattgaattggctcattcatcccatatcaaacctaactagcttagatacccatttattcatttctaagcctagcactaactagctactcctactactgctgacaagtgaaaaataggttctttttgtgaaaggtaggtttgattggtatggttacatttcaccaacacacatataagaaaatcttgttccaccatggcatataatctcaatggtgacataacataagagtggctttcttcaaatttttgttgtggagagaacca

SEQ ID NO: 209181 - DNA, 714 bp, Cannabis indica
aatgctcataatcaaatttctatccctcttcacaaatatatcatcaagtagctctaagtcctaagatctctcacccacaagaccttgatgttctgaaataatgaaggggttactaaccattggcagccacggataaaggaggacactaacagatgagccagtaccaattgatcgccttgcaccattcctaactagagcttgggcttaccaaatactacaccaaataaaacttggattctgtccgagctcaacttgtaaaaaagaaccatttgggtaataccgggctttataaatccttttcactaacgtatctttttttgtgagtaaccgccggccttgttttcccaaaaaagataagttgtaatcacggagattgcaaaatcctaacccaccagcatgcttatgttgacaaaggcgcttccaactaaaccaactaactcccttgcttgtagagttggattgggctttccacaaaaattttgccaccataccttcaaggctagcacaaatgtccttagtcaaaaggaacacactcatagcataacttggaagagcttaagcaacctacttaatcaacacttccttacccgctttggataaaaacttagtttcccaactaaaaatatattgcctcattttttcttttaggaaacaaagtattgcattctttttcctccccataatgcaaggtaagcccaagtataagctatcttc

SEQ ID NO: 209182 - DNA, 651 bp, Cannabis indica
actacaacattcgagatggataccgtttgatacgcccaaaaaataaagatttaaatggattaatgtggtacggaatagatttaattgtccaaaatatgctgttatttcttggttgactgttcaaaattggctaaaaactttagatagactactcaaatttaatatagtgcatgactcgacttgtctgttatatggtttagaagctgaaaatataaaccacttattttttaattgtaatgtgattatgacatgtttaagggcatatatggaatgggtggaatggtacacttgttctagcactcttgttgcgatttatataactcggtccaaaatgagtaaatttagaatgagttgtttttcaacaattttggcttctttcgtgtaccatttgtggagaactcagaatgaagttttgtgatcttaaaaattaacaagattaattatttttgtaaaaagaatcattgaaattgttaaaagtagaattctattaatttggcctaaatatgttagtaggagagatagaatttggtttgaaaatcttatgttaaagtaaggttttggtatagattttcagactttttaaaggtgtcgttagtttgtaaattagtttggtttattgtaatacacttttaattgttgggattttatgcc

SEQ ID NO: 209183 - DNA, 623 bp, Cannabis indica
aaatgtaaattcgtttaagtacatggtgcgagtacccttgtaccgcataaataaataaaaaaagatagagtttaacacaagcaaatactaagggaaaagtcaagcacttggagcagtaggagcagacccatctgcgactttgttgacggcttcattcttgacttcttcagcatccgcaacctcagcctcctcgagaagattccctccatcaccttgagtttgtgtgggcaacatggcgcgaaaagcctcagccatttcagcggcttctgctccgaggattgaaaactcaaagtctggaattttggagagagtggtgtatatgtagtccgagaccgcctggtcatactgccttttcccattctccttctcgacctccaaatcgcgagacatctccccgatcttcgtctgagcgttcttggcctcgagctcgacttgctccttggccttgcgaagttcctcgagctctttgtccttagaagtcacatcttgtttcagcttcttaatgtcttcctgaagctgagcattgtgtctcttcgtgatttcaacctccttggatccagtaacgaaagccctcgagaacatggcaatgaattgcgaagctaacttcgcggagcgaggcagca

SEQ ID NO: 209184 - DNA, 594 bp, Cannabis indica
atatttgggaacacaaaggcagccttctataaactgccgaaatggaagcaagacatgcagaagaagaagttcgatctcttttgagactgaatttactaaaatcgagtgcgttttctgctccttttgcatcctaacttaggggtgcttcattcattttgataaaataatatttctttgttgggtagttgtggttttttttaattggtacgcaatgccttgccttgatttccatattagcttcttcttttataattttcctttgatgaacatggtacttacctggttagattgattcggtattgattgtgatgccgccgagagtgattttgttttcattttagtatttttttttccccttgtaactgctgctgcctcttgtaatggtcaaaatatggtagagttctaaaggcagtaataggcagaggtataattctttcatttggtcattgtgtattacatatatatatattgtggttatttgactattattacttatctctttattttttggtcctgtggaaaagggtgtatatgtatcgcttttgaactttgtttaagaattaagatacaggaaatgagaaactgtttgtgttt

SEQ ID NO: 209185 - DNA, 1044 bp, Cannabis indica
gttcctcttttattttgctagcaatttgttcaacagaatttcttaaaattttgcagaaagtcttcaataagtataatttatatgaccatgagaaaatatttaactaaaaaattatttcagatactaaaacagataaaaatgtatcggtatcccttttgagggaatcccaagcttatgtttatgtaaaaatattagttttttttagtcatgtagaaaagagaggagagaatcaaaagctaataagctattggcgttgttgttgtgagctttgaaacttataatggctgtgtctctgagtctctatcaaactacatatcttcctcgattgcttactcgccatcaaaatcagaagacacccacttcgagatttcttcaattccgatgctccatcgacccaattaagaagacgacaaccacccttagaacttgcaagaattgcaaaacccagttcgacatttcactcaatcaccctcgagcttgtcgtttccatacttctcattttggtggtattcctccttcactcttcactcttatctatcttctatctcttcaaattagttggatagaaactgcattgggattgaagggtctgccttagttaatcatgggttgggttctgaattgatcatcatctgggtaataactataaatttcatgctaagtagattcctgtattaattggtttttttttttttttttggggttatactttgtttatggatactagtttgtcaaattgttaaagttgagatttttcctttttgttcctattttgacttcaccaaaagcaaagatatttgagtatttctcactttttgaattgggaaagaaacaagcttgtattaatgtgagaaaagagtacaaagggaaaggagatcagaattgatctcacaagtcacaacaaccacatcaaccagaaacatagatgaagtaacattttagctagaaaaacttcaccattctatattaaggtctagaaaagatagctccttaaaatcttaaagactttataaaccaagattgcaacccaatattcaatcttct

SEQ ID NO: 209186 - DNA, 581 bp, Cannabis indica
tgccttagtttctataaatgataataatgaaagaggatcttctttatcaactccttttattttcgccaacttatatatcttctccttttttcctgcaccaataacatattttgatgctttgagaattagatatattatgatttgattaagaaaaaaaagtggtactttgattaaggtaagaacttaccaactggtattgttgctaactcgaaccccatatggatggtctagtagtgaggaggagggggtgatgagtagacgtactcatggtggtgtggaggaggaggagacttgtacttgtacactggagtaggtgggtggtatggcttcttgactggtggtggtggtgacttgtatttgtaaactggggtgggtggtggtggtgatttgtacttgtacactggagtgggtgggtggtatggcttcttgactggtggtggtggtgatttgtatttgtaaactggggtgggtggtggtggtgatttgtacttgtacactggagtgggtggtgggggagacttgtacttgtacactgggattggtggtggtggtgacttatacttgtagactggagtgggtgg

SEQ ID NO: 209187 - DNA, 803 bp, Cannabis indica
ttttttctctaaaaaattggaaaaaaaacagctaattatgtgtaaaataataattagtagaaaagtaaaattataccctaaacttccttaccacttgatgaccaatgatttatagctaaaaattgtttttttaaattacgtgagattcgatatttaattactttaataattatattaaaagtgttagacactgttagtgttttttaaaacatctccaatgatagtattttttaaaaatgcgaaaatttacatatcatttaaaaatataatattttattttatctctctactacatcatttttagcactcttacttctaaaattaatttaatgtatagcactcttaaaaaatgctataattataaactcacacattatatttaatatatattctaattttaagctataattataataattttttagttttaattttttattcgaaaaaatgaatagctagcatcaatgctacaacatagtatgcatgcaaatttctaaaatgatattcttttctctttaatggtataacatctcaatagtttatcacataacatatcctctaaaatttttactattagaaatgctgttagcatttccctttgtattttcctgggtgtggcaaaaccattataaaaatgtcctaatttggagtatttatattaggtatgtaaattagaagtttttatattatttacaaatgagacataatattaaattgaatagggatatgtgatgctttgacagtgacacctttaagatggggccatcatttatcaaatatgctatacttttttttttgacgcg

SEQ ID NO: 209188 - DNA, 761 bp, Cannabis indica
tcccccatccaggtccaagtccttggtcccggtctgagttagggactcagtcggggttcaagtcctggtccaagtctgggtttcggttcctatctcaatatgtatccagatctaggtttgattctcagtccaggctcgggtccgagtcccgagttccgatctgggtctaggttttgaggcccaagtctaggtcccaaatgtaggtcaaggtcctaggtcctgatctgggtccattcaggtgtgggtccttctcccagattcaatttcgattcagtgtctaggttcgggtttcggtctgggtcttggttggggtatgaatccttgtccgagtctaggtctgggtttgggtccagttctagatcccggtctgggtctgggttcaggttaggtcaaagttcgggtcatgggtgcgggtccaggtcttggtctgggtttgggtctcggtccaaatcaaggtctcgagtttcaatctcggtctacggcttctttgggtttgagtccaggttcttgtccagatccctatctaggtccgagtttgggtttgggatcgggtcccaggtttaggtcctagtctgggttctggtctaggtctcagtcccgttctggttcatgaatgtgtttgggcccgagttttggtctcggtttgggtctagggctaggtctgagtatggttctaggtttgggttcgggtattggtcttgcagttctttttcagtttccagtttcgggtcctaaatttttgtcagggtctgggtttgggt

SEQ ID NO: 209189 - DNA, 838 bp, Cannabis indica
tgcagtattggtcatacgaggccatcttgaagttcggcaacgagtatgcagtgaggaagtcgcatcgctttccaagaatggtgaactgggagagtgatcagattatttgctagaaatgtaagtttgttacgctttatgtttaattcatgttaatttccatatattatattaatatatttgttttatttttcagttgacagtttactccatgttatgtccccggccgaatgagattgagtttgtgagttacatcactgggggtcagccgcctttatttgttgacttggaggaacttgtgttgggtgaggatgggcaaccaacacaggatgctttgcgaagccaggccgaaaagcttgcctccacattggaagaacgagcggacgcaacccgaatatttagagactctacaccacctccaccgtctccaccacgtgcaccgtctgcagttccagatgagtctggtgttgacccatctgcagcatcagttccagatgagtctggtgttgacccatctgcagcatcacaggatcctcctgttccctcgtcagcttctattccaagcacctcagaggctcgcgatgcattataccctaccattttggcaaggttggagactgtggagaaggggcagattgctttgagggaagggcagaccgctctgctaagaggacaaacaacgattatggataagttgaagaccataatgaggctcctgcaagatcctggaaggtcggcagcagattcacagtcacagccacagtcacagccacagccacaaccagaagaagaggctcagtcaccggaacttgaaatcattctcccaaatgattacagactg

SEQ ID NO: 209190 - DNA, 529 bp, Cannabis indica
acatatgtatactttaaattttccatcaagtatatctgttcacttcgagtagtagtaatacattgtgtttaattataccacatatttcttgtcaatgtttttttacaatttgaccatttgtccttgatttctctagctgttagtgtaatttaatccatactcctttcttgtcttcgagttgccttgtttgtcttttattgctatttatggtgttgaattttaaaagtttttccactttgtgcagactgatagtgaagttaaggtacaagatctgcttgataatcttggacttagagataagcaacaatttgtaagttttcttagaattattaaaggattacactataacctttcctatagaagagtttgaatgtcttatatattcatccatagtgaagtaagttctgagaaaatttgtgttgtgcggtgatataaggatgggaacttttgtattgttttattgattatagttgaaattaacaaatggttaaggttaataatataggggaaatgctgtctaattttttat

SEQ ID NO: 209191 - DNA, 897 bp, Cannabis indica
taataaaactgcaataaattaaaatgatacccgagatttatagtagttcacccccatgtcgcaatgctaatggggctgcatctacttttatttttattaattggatccgacacaccagagttatgttctcaagagtgtgtggactataatacaataatagatttcttagtaaaatttatattgagacttatgaacacaaggctcatgggaaacttaatattcacaaatctgataaatatggtggttgtaaggttcttaggaataataaactaataaagtataaaaaatgaatgagtatcaatgtgtttgaggtcttggtgtcgactgagtatggtggactcaataaaaagatgagagtaagtatgtcgttcttggctgccttcaagtaggtctcaaagaaaggtttcagaaaaaaggatcccgtacttcagcctcttacttctcattatataggctatagggtttgttagtaatcccccacatgtcggggtgtcttactaacaaatcttgtatatcatcttttttaatgaataaaaaattacaagaaaagtaaatatctataaaaatctccttgtttctaggccaaaatcccataaacattaggaaaatggttattttcagcagtaagggccaactcaactacctgagcatatggttgaacaacccctagttgcttagctgccacaagcacatctccagcaatgtgttctttcaagcctcgaataaatttttcttttctagcagccttagtggccacctaatcaaaagccagcttacccaaccagtcaaacttagtcgcatagtctgtcacaatcatgccaccctgaaccaactgtataaattcttccaccttagcagcggggatagattcatagtagtatttttcatagaacaaga

SEQ ID NO: 209192 - DNA, 1156 bp, Cannabis indica
atcctctgttcttgtatattcttgttgatagatattctctcttgtcgatattagtgattgcagtgatgcatttagcatttgctagttcgtgcaagctctaaggtctgaatatttttcatcaatggaggtttttgacgaaggagttgctctgcgattagtcgacagagaatcgcaaatagttgtatgatattttttttgttgtttgattatgttctgattgaggtaatgaaccaatggttgctaatttgatgaaggtttaagctcagaagatctcatcaatggaggttatcgataatggtgttttctgcatttggcgatggagatttgcgactgtcgaagaattttttaggttttttggttcgaatgaactttaaaatgaaacttgaggaatttatatgttctttgtagattgtgaatcacgcgcttgattcctgctttttaggattaccagttgatttagtttgaaggttcccttgaagaagatgatgacgtgtcacgtcattttgtgtttgttttatatttaacgttatttttgtaaaaaatttcctaatatagtatattcctaaaaaaatcccaaaacaatatcctataagtttaggaattttcagtaaagtaattcatagaaggaaatcgccaaaacaataaccaccttgtctaattctaaacaaaaataatgtaaagagtgtttcaaaaaaccaacaataaaacaaataaatgacaataagcgaatttatggcaaagattagtggcttacaagttttggagtttttttgaagcgtttgaggtttctaactggtaatcttcggtgacaagagtctggaatataacaagaacgaggataagaaaaaatggtgttggtcacacgaaggaagaaagtcaaggacaagctgggcatgcaaaagcttcgtgagtaaaaagggttttttactgtatggtttatttttcgaatgaggtgaagaagagggcaatgataaaaatccttgctatatataatggaaataggagaactattaatcaggcatcaatttgaatcaaatgactaggattcaatcttgataaagcgaatgaatagttgaaaagtccgtcagttgaaaagacacacaatttaattttctcgagaagataaaattgccaagaaagtactcattgttgaaag

SEQ ID NO: 209193 - DNA, 576 bp, Cannabis indica
gattaaccttatttgtgaaatcctaaaaatgtgtgactaaaattatcggcgcttgctgaagaatacccaagaatttggaatctccacatacttagattatcaggtaagacagtaaactatcacatacagtttagcgtaatggcacttatgtatgttattatgtgtacgttatgtgagaaatcgggattagggttataccctaaatttagcagttatgtgatctagggttattactttagaatttaagtgattatgaatataataatgtgttgcatacattgatataaagaattatgcgcttaaggcataattagattagactcggtaatcaaaactgagataaaccattctaaggccttattataaatagacgtgtgagcgtaacacgtaggtctatgtcaaatagacaataggtacagtggcatcaatatttatgtgatttttaattaatattcatattattatttatactgtcttgctaggccttggctcacgggtgctctatagtgtaggaaagggtaagttaattgtttatcagtcatgaggtcgaggacttttgcggtgtattatacatgt

SEQ ID NO: 209194 - DNA, 562 bp, Cannabis indica
atttgttccttagttgtttatcagtataacttctctttgcttgtgcacaaagctcctcctttatacgcttccacgattgctttgtaaaagttgtagtattcctatttcccttcacaacttcttcttccataagttcaataaaaatttcttcatgtttttcaggccaaacagaagcttcgctattatcaataataaccacctcactatctgttcctgccatctattcaatctacatgtaattacaaaaataatcctaaaatttatatagaaaataataataaaattaatttaaaaagttacaaactaatgaaaactaatgaatcataattaccctacaatcaataatacagtgaacaaatgtcaaaaatctcattaatgttcaataatacaatgaacaaacacagctacaacacatatacatttacattaataaataaagaagaaaaaacacacatatacataaaaaggccactctatcttcttcacaatctccacatccttcattttaatgagagcaaagtaataagacaactatgggactttataaattcttcgactagtt

SEQ ID NO: 209195 - DNA, 602 bp, Cannabis indica
ctacttttctgttaaatcctatccaaacatagagtatttccggcataaatacttgatgttttaagtttcatacacttatataccacatgttttttcttttgacggattaaatacttaaagttacaaacgtatggtatttatgccgcaaatatccctaataaaaattgtatttttttttaggttttgaaaaaataataataagggtactttgggtaaagtgggaagttaatagaattgttttgtacaaaataattaagagggtttttttttttttgaaataggagtttttttatgtatatttagtgaaatttccatttaaaaactaaaacagaacagattttacattttaaatttttactcacatactcggattttagatccggaactatacctgaacccggacccagatgggttcatatcatggtatggtgttaaaatattaatttttttagtaagaaaaaatcaaaaaatagttttaaaaaatttgtgctaaatactatttgacaaaaaactattttatattcatactttacttttgagaatacaattttaaaaactaaaaactcaatcaaacaggacaaagactcgagcattgacttata

SEQ ID NO: 209196 - DNA, 750 bp, Cannabis indica
cgaaacccctctctctctcttttcttcttctaaatttcgaaccttagtgatagagtaagtgcccacacacagcaagtggtaactcaatcatagattggaagactgtgaaggatcaaacacaaagagaaggacattcgggctcagatcttgataatactctgcgacagaaaggatacaagggttagagatctgagtggaaggagacattaattccgctgcatcaatgtaaggttttcttaactttatatgtgtttattttatcgttttagaaagttcatatttagggtgttaaacaacatacttgtgagtagatctaagatcctggtaaaataatttccaacagttgagacgcttgccaatccttaatgttggagagacacgcagattgtttattaagaaagggttgcaaaggaggaaaggggaataggaaggaaggcagcaagagtcacgaaccaaggttgaaaaggaaggatcattgagccaaaaattctcgagatgaaaccgagattgtttttgatgcttggaatgagtgtcctctaattggagtttcaagactctgtgatcagagccatagaaccccaaatgagagagagaggcatggggaaaaagacttttccaagtagagaaattgtacaccagtcaaggcgctcaaggatggtaccatggcgccaggtgaacttattcccaaaatggtggagagggatcatattacgtgtatgcagaaagtcatgaaagtggtgcatggcatga

SEQ ID NO: 209197 - DNA, 639 bp, Cannabis indica
aaatggttttctaaagctggcaatgaaactttaatcaaggctatccttcaagctattccctcatatgctatggcttgtttttgtctccccactataatttgtaaggaaattgagtccattgtgtggggctcttctcctgatcgcacctctgttcattggaaaaattggcgagcggtttgtcaatcaaatttaagggagggttgggctttaggtctctagttcactttaatcaagccatgctaccaagcaagcatggagaatttttaaaagccctaattctttgcttagtctcaaacttaaagctagatattttcctcatacttccattcttgatgttgtcagtggtcatagtcctttggggtagagatcttctaaagaagggtctcatttggaagattggaaatgggcaaagaattcagacaattaaagatcgttggttgcctaactttgctctcaagcatactggcttgctaaaccctcttccttcccctcacttatccctttttatctctccttcaagtgcttgggatttggatagtctgaaatgttactttgatgatttcatcatcgatagcatataggacattcttattgctggacatagttatagtgatgatcttatttgggggaaagatagta

SEQ ID NO: 209198 - DNA, 614 bp, Cannabis indica
gtggaggcaccacacctgcaagtatcgacatcccgaccaagagcgcacacaaccactaccccactaactcaggaccacctgacaccagacaaaggtacaaggcgcaagaccaccacctgcaacttacaaactgtaggtcatggatgttaccatgtcccttgggaccactaatataccccaggctattagagcctataaatacccctcttcaagatgtgagatggggttggaaaatcattataaagcttcactccaagaaataaaatcatttctcttcctccattgttgctctgaacaactctttaagtttttgaatcttcatattttcgtcttcattctaagtcttatgcttgagttttgattttccgaccttaagttagttgacaagttttcaccgttaatagtttggcgtcgtttgtgggaatgacaagctcaagtcatgttgtttccttacttaccgatgctgtaagatgcctagacgctctgggcatcttcagggcatcaagattcatctagataacactcaactgatcacctccaaaaaagaagccaccaacacccatggttgaagaaagttggccagaaaaagctaagtacctcaaacaagaggagag

SEQ ID NO: 209199 - DNA, 738 bp, Cannabis indica
gacccagtgtatcgccctggggagctccggttctctttgtgaaaaagaaagatggttccctcagaatgtgtattgattatcgggaactaaacaagctgacgattaagaacaagtacccgttgcccaggatcgacgatttgttcgatcagcttcagggaaagacagtgttttcgaaaattgatttgcgatctggttatcatcaattgagaattcgagaggaggacatacctaagactgcttttagaaccagatatgggcactatgagtttctggtaatgtcattcggattgactaatgctcctgcggcctttatggatcttatgaatagttaaatttatgtattaattttttaattgagtaatgttattttttttttttttgagaaatttacggccaaatacctttatatattttaattgttaaatacttaacccttaaactttatttttttggtggtaataccccttatttttatttttaagaaatttggcttatgctcttactaatggtaataaactcatgtattaaaaatatatattaacatgtaatagttataaagaaataagtacttgaaattaaaatctcatctctcattgcttccattaatgttagtgttaacacgatttttcattaactaataaataaatcttaattgacaattaaataatattgaaagataattgtaaataataaacaaaatttttacttagttttaaagttaaatcttcatagtacacg

SEQ ID NO: 209200 - DNA, 770 bp, Cannabis indica
tacctatataaacatccaataccatctctttaatactcaatactcacaacaaacaaacatctttcaaaccttttgaggaggtctcaaatatctctcaaaaattaagtgttttggtgttcctttttaagtactgaaaaatggtcaatttttggcctcatttagcatgtgctttggcactatgctttgtaatagccactaccaatgtggctgcaagtgatgactataagccttacacttatactacatctcctcctccatcacactacaactatccacaacatcctaaatatcactttaagttaccatatgtctacaagtcaccaccgccaccttatgtttacaactctccaccgccaccatcaccatcgccacctcctccttatgtgtacaagtctcctccccaccttcaccatccccgccaccaccttatgtatataaatctccccctccaccttctccatccccaccacctccttatatgtacaaatctccaccccaccttctccatcaccaccaccgccttacatttataagtctccaccaccgccatcaccatccccaccaccaccatatgtttacaagtctccacccccaccttcaccttccccaccaccaccatatgtttacaagtcaccacctccaccttcaccatcaccaccaccaccttatgtctacaagtctccaccccctccttcaccatcacctccaccgccatatgtttacaagtccccaccaccgccatcaccttcaccaccaccaccatatgttta

SEQ ID NO: 209201 - DNA, 582 bp, Cannabis indica
aaaattagacgtgggttgaaaatgggtcgacactaaataaaacgggtcaaacacgacacgacacgcttaacatgaatttgacacgtttgacacgttttttttttaatataataaaataaatttttattaatattaatataattatataaaaatatatatttagtgatttaatattaagttaaaaaattttaaatttaattttctttaacataaaattaaaaatattttaaaatttttaatttttattatatattaacaaattatatatataaatgtacaaagttttttaatggaatctaaattcattatttttctctacaactccagcttcaataatagcaaaacaggttacagtgagtcgatacgaacatgacacgatttttacgggtcgggttagagttaagaaaattagacacgagtcaaaacacgggtcgacacgcctgacacgaaatatagaagcatgtcatatataatatgacacgaaaacgacacgatgatacgttttgccacccctatatgagagcaaaaacaatctaatgagtatccgatccaaaaacaaaagactgatagaaaaaaaaaaaa

SEQ ID NO: 209202 - DNA, 828 bp, Cannabis indica
aagacttatgggaaattcctattaagcaggttatgagttggtacttcaaaaagcttcttaagcttaaaagtttgacagatgaaggtaccttgaatcttattgacaacaagggaaaattcaaggcaaataattctataaatcatttactgtggcgaccaaatctgtgtatgctagagcattttggaataaactgttagtgccaaagtttagattcatcttattgtaggccctcaacaatcggtcttaaatagggatcacatgagcaagtttatgaatatttcctctagcttatgttcggtgtgcgagagagaaatagaacatcacaatcatgtgttcgtggactgtatctacaccggaaatgttgtagcaaaaattggaaaatggctgggcgggtttcaatggccgagggatttcaaggagctgattgattggggttctaagacaaagcgaggcttgaagttctatgtcacaattatgatgtctttgcagcaggaatctatatgattttgtgtaatagaaactactacatttttgaattgtattgtaagtctgttatgacaattggtagggaaattaaaattgctgtcagagctagaataatctagcttaacgaggctaaaggtatgaaaagggttaagtatatattaagtattatagagggctgataagggttggtagttgtagccttagtttgcattttgttgtatctttgctctgtttttgaataaaagtattcctattgttcaaaaaaaaaaaaaaaccttcttatattgattacatcaatgcactacaactaagaattctttaaatataattctatgttgtcaa

SEQ ID NO: 209203 - DNA, 630 bp, Cannabis indica
aaagaacactgataccacgtatagttttcttgtgtcatgtttttaaattctacactatttacttttgtttttatttttcttctacaaatttatgttctactgtaacaagatttcatcctattactgcagatcgtaacaattgtgtttttaattactggaatttaaaaaatatattggcatttgcaaaatacagattttaattggtatcaaagcgggacactaaactcttcgtgtgatcctttaatattttattctgttttctatggaacattcattttttgcagaatggggttccatttcttgtccactgcttcttaatgattctaattatccttattggaaggttagaatgagagctttcatcaactaacatagataagaaagacaaagagaggaagaataactcttacaagacgataacaaacaggtttgttaaaaattgtgatttattaaaactttacttaattacccttaaattgaaagtaaataactttttacataaaccgggatcccatatttaaaatatttataatcataataaaaaatatatgatacaaaagttgtcgcctagtgaccattcaaactatagcttgttgtcccagagattgtatgctctaggcctaactgcct

SEQ ID NO: 209204 - DNA, 550 bp, Cannabis indica
gtgttctctctctgaataaaattcgtgcccctgaatagtaagatgagtccactatttataaggattaattacatcaaattgatgttcctaaatcaataaaaaataaaatagaaaatgagtttatttttttttataattatgataagcaaaaaggaaactaggcggttgcccttcttctctaatgatacaaatctatcacgttaatttagggatagtgtcgtgacttgtaagcttaaggatatataagatatatctttaaaattgtccaactcgcactccctggtcgatacatacgagccatctgcttgatggaagttggtcggatgtctatgcgtattttgctcagatgttgcaactctatttgtgagcttgagtatcaatcttccctatgcggctcattatgagtaggattgcccgtctaggtaataaaatgtgttccacatgtcacctaatcgatgccacatcgttgtgtaaaaatttggataataataaataaacttgatttttcatcaaaaaatcttaatttatttaaagtatttaataaattttt

SEQ ID NO: 209205 - DNA, 644 bp, Cannabis indica
atgttgagaatcatcgtgctaagtaggagcaacgaagggctaatctgtcccgacgtatttgggaagcttatcgctctagtcgtggaacaactttcctaaggcgagcttttaagctagaaagagagatacctcgtcggtcaactgtccatgtgggaaataacactcaaggggaaactctcaatgcatgcaacacttctaccatgcctggtagttgtgcaaacactctttacactacaggttcttaggctcctcggagggaagcaaactttgagtgagattttgaaagagctaaaactcgggtgcgacaaccaatgggtcctccacttgatgttgagcgaccacgtgctcctccttcgtaatgttctccttgccggtcgaatgacaccaagcctcgtgacgctacaaagggaaaagacttgcgactgatactgaaggatgaagaccaagactatactttgaaattagaggttatgaatttcaaagagtaaagactaacgacccacttcacactcataagtactttcgagatgataggggtgagttatgtcggtactttgctcgcgaccctgacaaccagtagtacgagtatttcgctcatgtgcatggagaagaattgaacctaagcaatcaattcaactctcttc

SEQ ID NO: 209206 - DNA, 582 bp, Cannabis indica
tatttattttatataaaatataggaaaattatataatgcatccccttaaaataggtatattgatgcacccctatctattttagcatccgaaataattttttggtcaaattttttctcatagtcatgtacgttatagttatttaagatatcctgcaaaattttaagaaattcaaaaagtttaacacgccgaaaaatgcgttcaaacagtgtgttgcactcgtgactattttattttatacgcttgtaaaatagattgtttgaatattattttctataatgtaaattattccgaatttctcaaaattttgtaggatatcttaaatagatataacgtacatgaatatgaaaaaaaattagactaaatttttttctgaatgccgaaacaaattaagggtgtatcagtacatcccttttaaaggggtgcattgtagaatcaccctaaaatatatatctgtactatgttttttaactttttcctttttaaagaatattaagagtaatttttaaagattatttaaatttatttttttaataatagaatattatttgacgcggtgggaatatattttgaagagttggatg

SEQ ID NO: 209207 - DNA, 682 bp, Cannabis indica
accaccttccgtataattcgtaattgactatttacctaaaacttggttttaaattatttcatgtttttagttttagctcgttgacttgcaatcttactattttgatagcggtctcgaaaggaccaactcctactcccaagatggctgagcgacgcaagctcctgctaggtcttccatatggtctatgctcggctgagttccttttgaacgaggttaacccgaggtccgtgggcctcctcgctgagatcgagtatactagtgattataaatatcctaagtatgcatcgtgacagtaggttccgatcccaactgacgaggaaactcaggattatgcagttcgggcgcactacctccagaacacagtccctcgggaagccaaagaaggagcatcctgaagtaatcaatgtgattggtcaccaacagtgcttagggctgagcgtactacattagtgtcttttcgagatagccgttataatttctacacctggaataccctcctcatagattgcattttacataggtttgatagttggtacccagaattccatgtccaaattagttgtactgactcctactatgggatagccgagcagtatgggaccatgttggataggttaggacatatacattcgagctgggatttagaaccgattaactcttacgacatatttaggatcacagg

SEQ ID NO: 209208 - DNA, 502 bp, Cannabis indica
atgtcttatgtcgatcgcgggtacacagaaatcttcggacttgctagggttatgagtctcgctcccgttagttggatgaaactataggaagtttaatcgtagcgcgcgagatggtcatctcgcattcttgttcttcgagccgattcgaattttatacttagtttgcttactgtaagctaaggtatgtgttactcttctccagtgcctcgctattctcctttagcgacatatggtgtctcgttaatacactaagtacccgttcgttcattgattcctcgcctaagaccttacagtcagcgggttacaaatatactctgatacttacgcaattaatgagttattccataaaagatattgcatcgattcacattctttttttccttgacacgtgtcctccagccgaatttcaggtataacaacagttaatattattcatctcaaattctcaaaatgttgaagtagaacaatataacaatgtatttttagagatattttaaatttg

SEQ ID NO: 209209 - DNA, 609 bp, Cannabis indica
gtctcaccatttccttcaaaaccccaataagcttagtctcgatctcaaatagaatctttttttttttgaaaatatataataccaaattagtgtatatagatataactatttatttgtaaattggaaaaattttacatctcaaatttggtcatcaaaaaaacaatattatttgaaaaatgacttttattgttgctcactataatttaagctacatagtaatccaaggagtaaaaaaaaaaatggactaacttccacactcgttctctactttcttcttcttttgtttcttcaacaacttgggcctgggcttcatgggcttaagaaaactagcctgtaatctaaccatttccctcaaaaccccaataagcccagcttcaatctcaggcccattgggctcaagaaccctgagaatcctggccacagcttccatggtactcacacacccaccaaacggctccttcctcagaatcagatcagaatcgtaaatactcccaccaatctcattctcatcgaaatccaagcaaaccctcttcgcgaatttacccaaatacccttcgctggcgctgaccatctccttggcgtgcttccacgtggcatcgaacacgatca

SEQ ID NO: 209210 - DNA, 895 bp, Cannabis indica
agaaaggcaaaggatttaacttttggacctgttggatccactgcttctagcgatgctgaaaaattcttcaaatactactggtgttggacaatttgctggtacagttcaaccatttcgatcaaagttcaattgcacacattgtggcatgaatggacacactatagatcgttgttttagattgattggatatccacctgggcataaactccatggaaaatttccaaaccgaaatgccaaaggaaatccaaataagcttggttcagcatctactaattttactggtgtagatgatgagaagacagaaaatacttctggagaaaatgatctggtgtccagcttgtctaatgttcagtgtcaaaaactcatggccctccttgctcagaaagctgcagagaagacaaccacttctgttcctgatgagcagccagttgtgtcacatttccttggtaagaattttcgtgttcatagttccaaatggatcattgatacaggtgctacacaccatgtgtgccctgatatcaacttattctctaaaacttacaaggattccaatcttaaaactgtcttgttaccaactggtttgcatgtcaaaatttcttgtgttggaactgttgttttatctaataaccttgtccttgaaaatgtcctatatgtgcctaacttccaatgcaatctgttatctgttgattcattaacagctacagctaattgcacttttattttcactcatgacaattgctttattcaggaaaatgtcaagaacgagatgattgggatgggtgaaaaatgtggcagcctctattacttgaattctaatcattttcatgattctattcctgtgttttcttcattttctgatactaaaataacacatgataccatttggcactataga

SEQ ID NO: 209211 - DNA, 596 bp, Cannabis indica
gagtggatttcaaacagggcatccattgggcttgagtttatgaatttttttaccggaatatttaatggatcggataatggccaagtactcaactgttctcacctatttcaagagcggattcaggaggaagaaaaagaggaactagtaaaatgcccatccccagaagaaattaagaatactctttttggcatgggaaaccataaagcccctggcccggacgggatgtcggtgctcttctttaaacattactggaatacggtcggggttgactcttgtaatgctgtgtctgacttttttgttaccggtaatatgcataggggtatcaactctacaaatatagttcttatccctaaaatcccaaacccaactagacccaatcacttccggcccatctccctttgcaatgtgctgtataaagtcatatctaagatcattgcaaataggattaaacctattcttcctgcaatcatctgccctacccaagctgcatttgtgcctggtaggaatattcaggacaacaatgttattgtgcaggagattatccactcgtttaaaagaaagaagggcaaggagggtctgtttgctattaagattga

SEQ ID NO: 209212 - DNA, 700 bp, Cannabis indica
gattttggttgttgtagttgctggtggtgtttattattgttttcagaggataaattatgtttagaaatgttgaaataagcttgttttgatggctgttaatagatttaacaaccttttgagttttagaactcaaacttggagctttaatggtgattttagattctgagatcgggtagttgttctattgcttggaaaatatttattggggtataatatgcaggtctggaaggtttggtaaggtttggagtcggtttgtttgaactttgaacttgtttggattttctagggaaaaccgagtaaccggtttttgcaagtgggattcccaacaaattcaggttgtcgattcgtgttagtttcaggtttctggttggttaattccctgctagtttagggtattgccattttaagttgcagtagataggtttttggtttagaacctaagtcccggatgtgatttagcgtgtcacttatccatgttgtgattgatgtgatttaggagcctataaatcgccgagcagttgttccactcaggttgaccggcacacatgaagtcgaagttgaggtaagattagtataatgtcatgcatatgttattacatgtttagcatacatgttatttatggctattagattacattgatagcaataatagtataataagagttgtactgattatcgataaatgtatgttggcagaaat

SEQ ID NO: 209213 - DNA, 630 bp, Cannabis indica
ggctctcccaacaaattcccaattgatacaatggaaaatccatattcagtctacttgtcataagtgcggggaggaagcggagacaccgaaacatgctttggtgctttgttcattgctgatttcgatgtggcaaaggttatagatgtggaatcaattgtgtcggcttaggtttggcttgttatcatagttattggtttggttgtttgatgagcttgatcaagatgcttttgcttttttagatatggtatgttggtggctgtggcatgatcgaaattcagttttgtttggtaaaaagcaattgaggtcggaggtcataggtgatttggcgagagtctctttagaagagtttcaaggggctggtacggttggtgtgggttaggaattatggccctcttattgctgctattggtgcgtttactggtgcaccgggtgcgactgttgctactagtgcagtttttgtgcggttggtgcagctgctgctaatggtgcggttggttcaagtaatgagtttctgggtagtggagctggtgcggggcaagggtgggtaagtaggggtgagagggtgagggggagggttgctggtgcttgcagaagatggcagcctcctgttgatggcaactttgtgttgtc

SEQ ID NO: 209214 - DNA, 1087 bp, Cannabis indica
caacttcgcatttctcatttctagcacgagaaactcacttggaaataaagagttttaagtatctcatttccgcagaataacaacatctccgagaactagtgaccagcttcgccagaacacatatatagactaagtgatgtcacaatatcactcaggcatcttaaagtacatctcttggtcgtttttacacttacttagcgtccaggttgacatcatatgtcaacataggtgttgggtcatgaactaccttcaacaaaacagtcataactcactcaatatttatctgattgacgcaattcaatttgtattttgaagccgatttaatgctctatcaagtcatgtctcacacttcaatcgtaattctgaagatatcggcatcaaatttcaccacaagtgagttacgaaaataagctctgagttacctgtaacgggtcccgccaggttctaaaaaatagtcattaccaccaagagctaatttttattgtttgatcattatctacgatgaaaaaatatctaatttgtatttttttttccctatttttgtgggtctcattcacctataaaaggggagctttcttagctaatttttcacattcaaaaaactgtctacaaggccagaacatctctctctagtttatctctctcaaaattagagtttaaacacttagcattttctataattctcttgagaaataaaaactcaaagtagatatagttccattaatatcgctttatggagagtgaacaactataaattttatgtgtttctaaattatttacttaaatttattaatcatctcaccatgttgaccacttttcaacgttaacaatatataatataccatcaaacttactaagttaactagtttttttagttcccagcaccttttcagcaagttttggaagtctctcttttatatcattttcatattgtgaaagagataatactatattgcatattatcattagctacattagtattttccgaaataaattctcatgtttggtggcttacctaattgtctggggctttttgatgacgtttttgttaaaaaggaatatatatatatatatatatatattaatt

SEQ ID NO: 209215 - DNA, 634 bp, Cannabis indica
tataattaattatttagtggcatacatatcaacggttagattttaatttatgtctcttagctagctaatgaaacaatctaaaccgtgtaaaaatgaatgattgttttagttagatcctagaaaaattacacataaaaactgatcaaattttcgtaataataattcatgattagtgggtacttattaaaagtatatccatgtaattattaaaaaaatatatagagacttctctagagagtaaaagtacggcaaaactccatatttatatattttatatagtgtagtataaatttataatctttattgaaaaaaaaggcgcaaaagttgatgttattagtatagcaatggtctaaggtgctcgatagccatatatattaatagagcattgctatagccatcttaatatccaacactactattaagttttataattaattagtaatttcttatattgtttattaaataaaaatgtaatgccctaatagcaaggtgcttgccacgttaagatttctctttgtatttttcatattaatatatcatattgactcaatttaccatgatttgtgctcgagtatgtgatcatcatattttcactctcataaaccctctaaatagtgtagaagtcatcatacgt

SEQ ID NO: 209216 - DNA, 751 bp, Cannabis indica
tgatgcccataaattttagaattctagtaatcacaattagcaacttctcggctttcctaacatcgagaccttctagaaaaattggaggtgcctgcttgcgggacctttcatacagttgttccattctgttcactgcagctgctagtcctacctgcatagtaggggcaggaggtacttgcactactggagcagggattgcaggagcaccctgctgtctcaggcgttagatctcttcatcttgctctttcattttggcttgtatttctgtaaacctattttcccattcttgggcagcctgtggcgggttaacatcaccttgagtaaatgtaacaccctaactattttaggcatgttaacataatttttaacttactgtgcagcgcgttgctaatcaacgaggttatcgaaaatcgtaattaattaagattttgattatttaattaaaaacataaaatagcatacatataaaattttgggattccatttacaaaagcatttacaaaagtttcactgtacatatgcaaaactctgtcgcctagagactatacaaaataaggcctgatgtcacaaagatcatacgttctaggcctaatcgccccaacatgaacaatcttcatttgctcgctctcacggctgctcggccttagccttgcccttacctacacatggaaatagcattgtgagtcaacatactacataagaaaagcataaaatacaacataacagtgtatcccgggttataatcaggtgc

SEQ ID NO: 209217 - DNA, 1135 bp, Cannabis indica
agggcaaggctaaggccgagcaaccgtgagggcgaacagatgaagattgcacatgtccgggcggttaggcctggagcgtacgatctttgggacatcagggcttttactgtatagtcgccaggcgacaaacttttcaatatgaatattaaatttttgtaaatgtattttgtaaacgagatcccgagattttacaaatgtattactttatgttcctaattaaataagaaaaatttaattaatcacgtttttcattaatctcgttgattagacacgagctgcacagtacgtttaaaatcacgctaacatgcctaataagttagggtgttacactaacattgcaattcaacttaatccaatcatgtggagatggattccaagcctcctttaagcacagagcaagggaaaggaaaacgaagtatgtaaatctacaaaagaagtacaaatagagtcaatacacttcttcacatcaaattggactattattgtgtaccttatcattacggatcctccagatggtgtcaacaacaatcgaagcataaaggaagatattcccctcaggaattcccctatgtttgaggtcccaaatgaatttgacccattcccacatgcgaataccgatatcacaaacaggataaataccccacggagacgcccgccaaaagtgaaaagccacatcgcaagcaagaaataagtgttctaaagattcctccctcatcccacagagagaacagctcgtatcttcaatataaaatctattcctgatcacagaccgaacaaggagcgcactggacaggatactccaccaaagtacttaatggggctctagaattctactgttctagagcttgttccaaagtgacggcgctatctcacagtgaggagccctttccagcgttgagcaaggtaggcagatttactcgagaactggccattactctcaagattctaaacccacttatcattgccctgatcagagggagtacccccttttaagattgcaggcacagtgtcttgattaaagaggctgtacaacttttgcccaaccatcattggaagctaagagatcggcaactttgcatcgttcattggtgggaccaccattaggtttcgagataaaatctttgatatgagggat

SEQ ID NO: 209218 - DNA, 864 bp, Cannabis indica
aaggttcaacatcatggagaacaatactgaagtaaaaaaaggcttggtcaaattcattagctcttactagtaacccatacccaaaaaaccaactacatatcaaatgttacctctggtttagatattgagcagtgttcttcaaatcgaagctcgatcatcaacaacctagcaagagctacaggggatcctccttgcttttcacaacaagatggagtgacttcagaacttgagtctcaacagcaacaataaatctacacatcaccctatttaaccaaatgcaaatctggccaatcaatcatttccaaacaatagaggaggaggaaaaaattcctaatcaaatcaagggaatcaccatcaacatcaaaatcagtcaagaggtggttgaggtaactacaaccgtggtggtggcagcgatggaagaggatgtggtggtcgttcaaatggacctaaaccaacctctcaagtttgtggccgttatggccattctgctactatttgctatcacagatacgatcaagcttatatcgggtcagatccaaaacttggtggccaaataagttagaaacaaaaccagccaccagcagcctacactgcttcaatagaagttgtggatagtgaggcttggtgtttcaaaaaacttgttgcgatattttgcacacgcaagtgtacgtaccgtttcaagtagtagactcaccaggagtgaggtcgatcccacagggagtgtagttaagtacgttaaaattaaacttttacttctatttggttaaataaaagaatagaaaagaatgaaaaataagaaaactagtaagaagcaatgattaaagaaaattgaaagttaataaaaactagggcttcgatttcaat

SEQ ID NO: 209219 - DNA, 645 bp, Cannabis indica
cacataacaaataacaaccacacgacacaactgtcaaaactgaactggaaagattagcaaaagcaaacagaagagagagagtgtgtgtgattgtacggacatgagatcattcatggctgccactggaactggaacgattccagcttcgtcttcttcacatattctcttctcttccatttctcaacggcgccactatcctcttcttccctgggggaacccaacccacagtacggccccaacttccgccgcctctttccgataccgaacgacgccgaggcctgcggcggtggtgactccgccgacgacagagacgactgatgttggaagcaaaaggagcgaaaaacgtgagttctaccctatcgaacatcttacgacgtggcttttgaagcacgaacaaagcggtgacatcgacgccgagctcaccatcgttctatccagcatctccttggcttgcaaacagatcgcttcgctgcttcagaggtctagcattactaacctcaccggtgctcatggaaccattaacatccaaggcgaagatcagaagaagctcgatgttatctctaatgaggtacgcacttgtcattatttttactcctaattttattttttagtatatgcaaacttatgcgaatagtctttgaattt

SEQ ID NO: 209220 - DNA, 616 bp, Cannabis indica
aaaaaattgagtatatattttgtgtccacaatcagctataacaattaaaataaattcaagcaaaaaaaaacaattaaaataataaaaaaaaaatccttgtcttctttgaacgtacgggtacacaagaatttaatatatatatttgtattattctcattaattttctgtgatcggaaacactactatccatcgatattttttttagagcaccgtcgattttttggcttactagttttttttttttttttaagaaaaaaaaaaaccgtttagcagtactataaaaacttagtttgtcataataaacttcaaagtgagtattaattacttaaaaaatgcagtttttcttaacttttcatctttttttattgagtactggtattgaaaacaagtggtagcactttctgtatatattgtcttgtaattaattagttatatactacttaaaaattattatattaattatataggacctctctttatttgaaccaataagaatattaacaagtaaaaaagttaccacacaccactaataccttttatcttttttctctatgtattaatttttttttaggaaaataaaaaacgaatttaagtagacaaaatggctttcgatact

SEQ ID NO: 209221 - DNA, 678 bp, Cannabis indica
taggtcgaaaaggtttgatatttggtcaatgattgatgaaatagtttgattttaaatgtcggtgcattgctgatactgatgcttttactcaatttcacttgggttgaggctatattgctacgtattatggagttcctgattaaattaatttgagatcaatgctataagagtttggaaaaaatcctccatttgctggatctacaagcataggcacttgcttttatgttttatctttgagcatctaggaagattgcttgtgtatcttttgtatgtgcacattttttcttgttattagtactcagtaggttctctacttgtgttttcattgggaagtgaactattttattgtttagctttttgtagtatgcttttgtattgtatactcaaagtgacatgtttaaagaaagtacaaagtattaggtacacactgcattgaacgtttttttctcattttcttaagcgcgagtaatgcttgatgtaaatgagatgatttattgtttagcttgctaagaatgttctttttctatctttcttgtcttaaactgatcttggaatttaactgcatatgtttttataggatcctgagtattatgttctcaaggaagatacatctccctgcatctttggtgctattgacaagcagagatggtcttatgcatgtgcaaagcaacttattga

SEQ ID NO: 209222 - DNA, 558 bp, Cannabis indica
agatgggcttggaggctgggccgaaagaagggaaggctgataatggtagtcaagagaaagaagctgtgtcaaaaaatggtttacaggtgggctctggttaccaggcccaccaattattatgagcattttgtcttggaattgccatgggcttgggaacccatgggctttacaattccttaaggatttagtaatccaaaagaagcccaattatgttttcctttgtgagactctttgccgtagagaccaaatggaaagagctcgagctgctcttgggtttgaaggtttgattgttgtagatgttaatgggagaagtgggggacttgctttgctttggcgttttgatgaggaggtttctttgttgggattttcctcttcttttattgatgtggaggttaaagtggagggtaaacctccatggaggttcactgggatgtatgggcagccgaatagaggacggaggcaggaaacttgggacttgctgcgtgatttgaagcagcgatcttctcttccatggtgcgtgatgggcgacctcaataatgttgtttcccatgatgataa

SEQ ID NO: 209223 - DNA, 938 bp, Cannabis indica
ttttttgaaaaaagtcacattttataaaaatcataacaatgaaaattccacttaaagttaagaagcagctgccaaacattaattattggggcttatcttggctaccacgaacattaattacttggggctctcactttttagatctaagcataaggatgcggattttaatttgatccttgacaacctgatctcgaagctgcatggttggaagttgaggttactttcaaaagctggtcgtgctacccttatcaaatccgtgggactggccatgccagtctacactatgcaaacaaccaaactctccaaaaaacttgcttccagaattgatggtatgatcagggatttttggtggggttgtgagcaaggtaatcgtggtttgtgcttgaaggtttgggaccactatgccttcccaaatcaagaggtggactcagttttcgtaaatccttggaattgaaccaggctttgttggcaaaatgaggatgggcccttcttactgatgaatagactctttgttgcagggtgttaagagctaaatacttgaagagtaagccatttctggaggccacctataaaaattctgactcttggttttaagaaaatgtggtcaaatctaaagcgattctcaggaaaggggcgtgcaaattatcttgaatgggaagatacgaatgtttgacagatccttgggttgttcatggtaaagagttctatctgagacccgttaattcttgttttgaaagggcggttaaggtggcagatctgcttaattttaatggggactgaggcattgccaggctcaagtccttgtttgaccctgagactatttaccaacatcctaaaagggggtaggcctagtggccagggaagtgacagatggatctggactaaggaagtgagcggtaaattcactacaaagtctgcttatttggtgcaggcttacg

SEQ ID NO: 209224 - DNA, 842 bp, Cannabis indica
agtggtattttgagatttgaacgagaaatcggagcatccaagcttcagtcatggctttctctatccaagaaggtttcacagatttaggagacaacaacttaaagaacaaacagaaagagttggaatcattgggtgagtgtagggagatgtgatcgaaatcatgaacaagactctcttcatcatctagggcagtaagaggaatggggtttcgagaagaggacgccatgaaaaccacagaagaaggaaggaatttggaaggagaaagaggaaatggttgtggggagagacattgcaagtagatatataaataagcactagagtgaacaagcaatagaagaagatacctggagaagaaagggcgcctcgaagagtgaatcggtctctgagccacctcttcaattcctgctagggctgtctgaacttggagaagataggcaatgatgatcttggggtttaaactgaagagataccaaatgacggttggtttatctctgagatttcgacatgagaagaggaagagatggatagattgcaggaacattaaatgcgaaagtgatggtgctgccaaaattaagtgtaggtgtgagagagaaagagtattaaaagctatttgagctcgagaaattaggggggggtttcataatgattagggtgacgtctggagtaatatatgcaatagccaaagagagggtaattgattgcaacagatcgatctggagaagaggaatctgaactagattagcttggaaaggaagaaaaacaagaaacccttgctaagattgaaccagagcaatgcctataggaagcttcaagaagaagaattcttgctatttattgttcct

SEQ ID NO: 209225 - DNA, 908 bp, Cannabis indica
gaggccaaggacaaacgcgaggtcggccgaaaactccaagaagaacttgatatggccaatttgaaccttgagggagccgagggcgatgataaggaaaggtgcaacaatgttgcaaactgattcatttacaaagcctggctggctaaccctgacatggacttgagctcttgggtgaaggtgccgaggaggttttggcttattgtgagaaaactaaaaaagaagaggaagagggctccaaggaggaagaagaagatccatccaggtctcccactatgtagacttggtttttaatttgtgtttgttttttttaagaaaaatgcccttttagacgagacaatagttattcttattggcattttatttttttgtaaggacacggtttgcattattggatggccaactttgctttatatgcatctatctttctcttattaatgcctcgtaccttatacttgaattaactatattttttcattgcattctaatttcacaaatcaacgtttatattttgatccaatttaaggtactttgagaaagcatttccactattgtcgcttttcctttgatacacttaggtagttattaatctactatgtatatgtgcgagcagttatattcttcatatgcttttcgattcccgagcagttatagtctgccttattatacgcgagtagtttactatctaccaaatattatgtgagcatttttaaatctaccatatataacttaaaattaaacttaacatactttgaataattcaacttataaactattttctatatttttgatttgctcatatgaaagttaggccccctattcatatttaaggttaagtattattttttctaggtcattttctgtgtcctcgttttataatactcaacctgaacaatgtgagtcgataaata

SEQ ID NO: 209226 - DNA, 2553 bp, Cannabis indica
aggggtacgatacgtcttcaaccctccttcccaaactttgaaggacggcttggattctatcctactcctcgtgatgctttccctttgatctttttaaacgaagcctaagcttgaatttttataccacttcagccttccttctcagaagccaaagcttgttacataaaaattcaacatgactctcgcatgcacgttgcttttcgggcgggaaagatcaattggagtacgatacgtcttcaaccctccttcccggacttgtaaggactacttgaagtctatctttctcctgatgatgctttccctttcatcttttcaagcgaagtctgagcttgagtttttatgcaactttagccttctttcctggaagtcgaagcttgttacataaaaattcaacatgattttaattcgcatgcacattatttttcgtgaaagaaagatcactgggggtacaatacgtcttaaccctccttctcggacttggaaggactgtttgaagtctatcctactccttctgatgacttctcccttgatcctttcaagggaggtttaggtttgaatttttaggaaactttaaccttcattcccggaagccaaagttcttaggaatattttaccatgatctagatttattaacaagtatgttgaattaaaatcctaaatatgaatatctctaaaataatgaaattaaacatgtaagagtttaaaaaaccttacattgattgcagcagaatatattgactccttctgctcagatctctaacccttttcctttttttcgcaaagtattatcaagatttaagccatgatctctttctctccttcagatttggttaccactgtcttccacactatgattgagtacttgacttgctatgtgtgggtatggcactctatcactaagggtcgactatgaagaaaaatgaaggaggcttgaaatcactatagaaggtgactctcatctactagttgtgtgacagagaaaagtaggtttgatttggttgaaggtaaaatttcagttatgttggatgagatgagagcatcatgtttcttttatagtgtttcagttaaggctaggtttgaattatatagattaaaaaagaataaaatgttgggcaaaaatcactagaatggctggccactaaaggaccactttctagttacaattttgctactttatttcaaccacttattcttctttcaataataccatattttccaattcaatcctataaatgccaaaattatttatttaataattataattaattaccaaataaaattgtcatttatattatgcattaattagaccatacaaagtctcttaattaataaattaaccccacaatccatttttttcacaattaagcccttgcttagtgaacatgcataataagacatagtataattttagaattataattgattaattaaaaccaattaactgagtctgcaagaagcattatctcaactagtgaggggaccatgggcctatataaccgagcttccaataagtagatctaaaatttatagaataaatttctaaacttattaattctgtcttgtgccactatagatttagagaattaaattacactctcaattatataaaatgctctatatgtaccaatatatagatacgttatgattatctattgttataattcgaatagccaaagatcctcaatcgatgatttacatcaaaaaggaacaaatttaccattctacccatcaatgtattttatccttaaaataattagctacctatagatgatatttcagtaaactaataaattattgaaatgaggtcttaatcaattttttctatttagccaagctcgaaggaaatcatcgtttcacttctaagtacttatagaagctatagattccatatctatgattagcgcttccactcaattgaactaccatgcatgttcccaagatgtaaatatctgccagaaccatttgttagcttccatgaacacctctaagaacataaataatacaactaagttgaacctagaaatatcaggattaagatatatagacctaagatcaaccagtgatattgacatagaaagatataatagtaagtttaagatatcttgtccaagttcaatatcggtccaatctaatttatactccatacattcgacactggtaaactttgccaatgctctggaaaggacataacacttatctaaggtgtaagtataccttatcgttgattatcatatcagtctaaatccagtgaattgacaaatcatgagacttaaacttttaaacatgtatgatgagtccatatttgtcttataaatataatcaatttatgtattaatatttttaaattgattctttaaattattgattagtgtgattttaatttgttaggctattttgaagactattcatgcatttagagtcttttggagggattttagcatattttggtggaaaatagtggaagtcggcgagctcgattatagaaggcggaactttattgcaaattcaaacgaacttataggcagaactggactttgagctcaacatgaaagt

SEQ ID NO: 209227 - DNA, 826 bp, Cannabis indica
aggccttcaaagtaaataagcatatcttatctctactaacatgcgtattcacttattaattacaaagaaatatatatagtaaaatctttataaagtgttacgttacagtctagattaaaataacttttctataatcataaaaataactaataatgggattgtttgaattatgatagagaacttttttacaagttcaacactatcatgaatttaatcctaatcaacaaagaaatttgaagttttcatgattaattttgttcaaatttgttaagttaaaatatacaaatgaattagaaaaagaaactttatttgtttgtagataattatttatcaatatttatcgaaattgtatcatcacaatgtgatctaagttagaatgcaagtagggatctaagttagagcgttggtgtaaatagaatattggattgtttatttttactataatggtatatttatttatgggattaaggaatgaaaattaagaatgaaatttattactttaaaaaataagaataattatgtgagtctcaaactcatttggaattgagaaatgggattagtaattccattccttctttttgttttgttttgttttttttttttgttaaaaaaaaaataattacaaagaagaaggtagggctgaacatttaaatccgaaaacccgcccacctgctaccaaaaaagccgaaaaattaaaaacccgtaaattcgggtcgggtccaacctgaaaataggccacacgagtatcgggtttgggttttaaaaacacacacaatattcatcgggttataatccaaaacccacataactaaaagtatatatatat

SEQ ID NO: 209228 - DNA, 774 bp, Cannabis indica
cggcctgcacaaggaaaaacttaagattcaagccaagtaaagaggcttaaagaagagtgtcaaggaagacttacccaggtgaattccttcaagactcctcccatcaccagctccagagaagagtcgttgtcagcaccggccagttgctcactaacctcaggaaacaaccggttcatatagttggcgagcacctcttcacccttcttggcctttggaagcaccgacaaaggtggagtaggggctcgcatctgctcgggtccactcttagtcagctcagacccactcctcggttgttcaggtttgtccgaactccctcctcgagacttcttggactttgcaacttttggagtacaggggtttgcaactgctagctcctcagaaagatcaatgacctcctcgacgtgcgtcttttccttggaagaagacccctcactatcattacacttcttggctggaggagatgcgctagaacttctgccaattctcctcttcagagcgtcaagcatcttctgagacatgtctgcacggaataaaaacacaatggttagagaaaacagacatcataaacataaggcataatagtcaagaagcttaaaaataagatgaagtaatatgcaaggtgattgcccaaacaagcctcaaaagtccatcatcacctgacatgcctcttattttgaacataatagctttcccttttctaagcacaggagaaggcagccgagcaggcgagatgggctccccaatgcgaaaagcatgttcaataggcctgggcgg

SEQ ID NO: 209229 - DNA, 539 bp, Cannabis indica
aataattaattaaataaaataatgattgggtttatttattataccgtataataaagttttgaacataagtttttgaaatagaattttcacgtatctattttgaaaagcctaaaaaagtttttatcaatttttttttctctctatcacaaaaagaaattgttcttactcatgtgttgagataaaaataagagcttcatatatactttgttctagtggcccacactactctttgtgtatggtggatcgatccagaagactacagtgtgagtttccaataaacctaaaatgatacatatggtaatattcttttcatctatttactttagttcaatatatgtaaatattgtgatcttaggcatatggtacaatgataatcaaaaataactctttcgccgcgtacctaatttagtaccgtaaaaccaacaattagtaccacagatgggatgacttttctcgaatgagataccacggatgagatgacttagctcgaaagggatgacatatctcgaatgagatgatgacatatcttagttaatcaa

SEQ ID NO: 209230 - DNA, 965 bp, Cannabis indica
aaaaaaatttaattataatataattatatcgtaaattgggatcccgagtttaaaatcattattgaaaatacaaatattatatataaagttacacactatattttttttacgaactacagggcaactacaaaataccactcaaaatgttgaaagaccaaaccgtcctggttgcactgccgcaatatgtacaatccttgccaagctccaactcactgctcctccagcttagctttacccttacctacacagggtagaaaactgatgagtcgacagactcagtaagatatgcacaacatatatataaataatgcaacaccgactttatgcttaagccgtctcgagcccatttactaggctcaccaaataattaagaacgttcttaacggaagtacgaccactgtaccatatgcactagagaaccaactccgtacttgtgttaatagtgccactattgtacctctgggagttactgagtgttgtaccacatgtacgacgtaccccctggtactcgtgttggcaacactataattgccctaaaaccctacactgtactaatacccttaaaactacattttcgttagtgttagtagtgtaaacaattaataacattcatacattcacatatatatatatatatactttatgctatctcacctcatttccgtgctaaggtgtgccggtcagcctgagtggaattggaactcgacgttttacagggccctatatcaacatttgtaactctagtgagagacatgctatttggggacttaaaataaaaactagaaatattactatcaatgaataggatggcaataccctaaagatcacaaaaatagaaaaaactagggttggcaaaactgccccaactgatagaccggttccctaaccggaattctagttcgtggggtttcttggggactatttggtccactggttgctataggttccccttaaccggtagacca

SEQ ID NO: 209231 - DNA, 679 bp, Cannabis indica
aaccaagattcgggacctgaacccgaacttggacctagacaaggacctagaatcggacttggatgggggacctagactagggacctttgccctggaacccagacccaaatctaaatgcaggactcaaacctgaaccaggacctaacctggacccacaaatctgaagttggacccagacccaaactcgaaacctgcccccaacccaaactaggacaggaacttggacacgagcccatatcaagacaaaacccgaaccaggaaccgaacccaaaattgatcccgaacttgggacctagacccaaaatcagacccaaacctagacctgcacccggacccgaactcgaacccagactgggatcggatcccaggacgtagacctagaactaaacccagactcagatcgagatcgaaacttgggactcagactcgaacctagaactagaccgagggcccaaaccacaactcggagcccgattccgacctagaccgagatctagacccgaacccaaactcagaccaggactcgaaccctaacccgaactcaaaccctgacccaaactcgaacccaaactcgaactcggaatcgcaactagaactgaaccgaaccaggactaggaccaggaccaggaccaagacctagactcgaacccaaccctaaattaaaaccagaccgagatcc

SEQ ID NO: 209232 - DNA, 1081 bp, Cannabis indica
tctactaggacttctatttattaggtaacaagaggtatatagagcttctccccagtaattcttaggcaaaccagaatcgagtaggacacatcttaccttgttcagaagtgtcctattcattctttcagcaaccccattctgttgaggatttttaacaacagttctatgtcttctaatacctgtttctacacataactcatcaaacttatcattaataaactcaaggccattatcagttctcaaggatttaacccttttatcagtttgattctcaacaaatattttctaatttctgaacttgttaagacaatcatttttctgtttaagtaaggaaacccatacctttctgctgtaatcatctatgacagagaggaagtattgatttcctcctggtgttttcaccctacttgcaccccaaagatcagcatgaaggtactccagaactttctttgctctgtaattgcttcttgaaaatttaattttgtgttgtttgccctgtacacaaatttcacaaaagggtaagtttgcatgagtataatttgacaatataccttgtttagatagctccactaatccttgctcactgatatgactcaatctggcatgccaaagcttggaatcgatttttcctttggtgactgcaagagcttgttcaggggtcatagtttgtccatatagaaagtacaaaccatatttcttgatgcctttcatgacaagtaaagacactttagtaattctcatagtccatttaccagtcttgtactcgaacccttcatcatcaagaataccaagagaaatcaaatttctcttcagatcaggaatgtgcctaacatttctgagtgttttgatagtgccatcataggttctgatggaaatggtgccaataccaataacttgacatttgtggtcattccacatcatgacttttccaccatcaatttgagagtagtcaatgaaccaatccttatttggactcaatggtatgtacagccattgtcaagaatccattcatcatcgtccctctgatctgaacttgtgtatgcatctcctatctttggatctttactttgttccttgataa

SEQ ID NO: 209233 - DNA, 522 bp, Cannabis indica
aaatctaaaaattcccatcacacgaacaagttaccactttctcaggttcaaagtgagaaccggctacaacttttcttagcttgagagaagtgaggattactagactttttatataaatacatatatattagttattttttcaccatactaaaattttaaattttttatttttttactgtgaggcagcatttttttcaaaaatactatatttttttcaaaaatattgtactgggtactgtattaagttttcatggttgtttctcagttgttccactattgtgtttaattgttctgttttgtgttttacaattgttttattaaaagatagtattttgtaaataatttcgtgtaacagtaaaattgtaaatttttgcctaaaatccaatatttttgtaaaaaaccactatattttaagaatctagagcaatctacagccgtgttcttattgctctatgtggatgatatgctcatcatgagcaaagataaatctgtgatcaaaagtatcaaagccaagttcaaaag

SEQ ID NO: 209234 - DNA, 752 bp, Cannabis indica
tttttttaaaaaaaaagttatatattgagacacatgttcccttccctagagaatgttcatcaactactcttcagtcctatttctcagttcatcccttctagctctcgtctccgtttgtgtccctttctatgaggtttccctacttttgtaagttttcttactatcatcttatttcctgtcttgcattttgtcttttgtttcccttgcttctcttgtccagtctcgttgctctgtgtctcccttttgtcgtgtccatcttcatccttctctgttttctcttgtttctttgtgcatcttttgttgtgtcccgtgctattggaaggggtttggtgtggggttggtgagttttggagtgtggtggtttggggccttgtgatgtgtgggtagatggtgttttatttttggtggctttgtcttttattgtctggttttatggagttagttaatgccaacaactcccctcctaaaggtaaattcttttcttgtaatgaagcatatgtcacttttgttccttgtgcttcctctgtcaaggctttgtctactttttgcctgtttgggagagtggtggtccccatgattatagatgaagccacgaccattgagtttgtcgataaaacttggcacaaaccagcgactatggtggctttaactgaggaatccaataactcaaactgttttgagttttgtttcgacctcactgaggatagaagttgggccttagttaatggtccttggtgcattagaggttgctc

SEQ ID NO: 209235 - DNA, 610 bp, Cannabis indica
tttcgaacccagtggccgcagcccgatttttggtcgccacgaccaaaacctagcagagagccatcccattttcccaattttgttttggccataacttttgactctggactacatttcagacgttctttatatcattggaaagctcgttttgagctttatattttatctataattggaatgcaaattatgtgatgatgtgaagttgaattttgggattaaccctatttgtgaaatctcggaaatgtgtgactagtagtactagtgcctatttaggaacacgcggaggtttggaatctccacatacttgggatactaggtaagatagtagttagcacgtagaattaagtgttgtggagctcatgtttgatattatgcttgtgattaagagagaaactgggattagggttattatcctaaaatgagcagttatacgatctagggttattactctaatgtttaactgattttgaatgcaatactatgttgtatatgttgagataaagaattatgcgagtaaggcatagttaggttagactcggtaatcagaaccgagataaaccaatctaagaccttattgtaaataaatatgtgagtgcaacacgtaagtcta

SEQ ID NO: 209236 - DNA, 671 bp, Cannabis indica
ataaagttattttggaagagaaacctatctttaatctcacttgaataattttaaagatcacttgaattataattctattttgatgagatttgaagttatttaagactttgtgtgtctttgtaaaagtaataattcaaatcttatagtgtatagaatcggataaaaaaaatatttgagagaaatatattgcaacgaagatataatatggcgtgcattgtctttccatatttcttgtcacgtaattgatattggaaattatgttttatcattaaatttggatctttctctcatcaaattgaatgtgccctcattttctttacttgtgagcacaaggtacaatacacattttagatttgacctttctatatgtgtattaatgtgtactttgtttagtaatagcatatatgttatattacaatacactgtttgttgaaatttattctttcctcatctttgatccagtataaagattataatggcacatgtatttctctaattttaagtccagtagtgacttttgagtataaatatatacagataatgtatatattatacattttaatgtaaaatcgtcagtaaaataatgacatgattagagttgggtttggtcgttggtcctttgtccagtaccacttgaattcttttttcctcttgaaatttgatttcatgcc

SEQ ID NO: 209237 - DNA, 443 bp, Cannabis indica
gattgagtgataacttgaggtaagccatcaacctcctaatttgaagatttcttgagttgcaagtttgaccttggtatgtatttttttagaattattggttgttagggttagaatggtttgtgaatccgtttctaagttcttgttgagttggaattgagttctagtagctggttagggtgttttcgtgtggtgaatgaacaagtttgagtttgaaaactcaaacttgggtcattaatggcatgtttaaattttgtgtatatttcttactgttattgcttggaaaacatcatatgaggttggtacaggtgttctggaaggtttggcatggtttggacacgaatcgcacagttttaagcttattgggttactggtgcaaccggttaaccatatcagaggccagtttttctgaaattgtttgatttgtcgattcatttttatttttc

SEQ ID NO: 209238 - DNA, 567 bp, Cannabis indica
gaaggttattctaaatcataagatcaaaatagagaaacagagagtgaaagggagaagagagatagaagaaaagcgaattaatgtagtattttctcattaccaactcttgaggaatacaatttatatagagaatataaagagtatagagaaacaagaaccaccacttaacaacctagcagaaaagactctaactaactaactgaaactatatagttagttgtttatcacaattgtcactaacttcctcaacagtagctgatatgccttgtgattgtaatttggttcttctacaaaaaaaataataataataattcggttcttgttatattttttaccaaacaaatttccaaccctttgcttgagggtatacttatagtatttataggctaggatttgggttcgggtatatccgtgacccgctagggtttgcatgttaatttggcacactaatggggtaaatataagaaatatgttgactgggggcccataaatcgaggttagcccatgaggctaaggtgatccgtacacttggagaccacacattaatcctagacagatgtcatgcat

SEQ ID NO: 209239 - DNA, 533 bp, Cannabis indica
atatatatattaatgattagatatgaatacgttacttcattatataatacatataatctcaatgtatatatacattatgttatagaatatgaagcttccatatggacgttctccaacagcttttatatatatattgttttgaaatgaatgtataggaaaattggttcacatgtaatctaattaattgccaccaacaaatatatcatatcatatatatatatataacaacatgcgtatatatcttactactaccctaccatgtaaaacgaataagtcttgtttatataaaatattaataaattaattaataaatattaattcttttgtttttgtatttgtgtaattagtggttacaactcatatatacatgtactaggtaggagttacgtgccgagacacgtaaatattagttttaggtaaagtttaagtttggtatgatcatacgaatgatttgttttattaaagtaatatttgtgctattataattagttatccaaataaatttgagtatatatattattcaagaatcaaac

SEQ ID NO: 209240 - DNA, 1207 bp, Cannabis indica
ttaacaacctgacttagtgtgtgacagtagccttgcgaattgaggctcatgtagaagggaatgagaggaagaacacaagcagaggaaaaggaaatgactgaaagttgactaagaagaatcaaggacagtggtcccaaggacaagaatttagtgggggtagcactagtagtggctcatatggaaagactcgtagtggaccgtacgggtgtttcagttgtggttaacaaggtcataagaagaaagattgcccacaacaacaataaagatttcaagtatctcacggaggacccatagggagctatgtagagtctactctttttcatggacagcccaggaataaccagtctcagtcttcatcctacggttttacaccctaatcgggccagtagtctcaatatcaacatcaatttaggccacaaggttcagggtttacaaggtttccaaactcctgctcctatagtgggagtcaaaaagggtacaatcaaggtggagggtctggtgcaagtacaatccatcctagttaaggaaagggaaatgcaaaagcaatgtcatccattcaagcctacgctcttgaggttgatgatgtacagggcggtgctgactagggagttgttgatggtatggttcttatctcgcactcttgggctcatgtgttgtttgatactggtgcatcacattcctttatatctttaatgtttgctagtatgttgggtttaagttgggaaaattttagccctacgttgcatttgagtgtacctatgggaggccacggtgaggtatccaccatatgtaggtcagtttgtattgtgttcgagggacacaagttgtctataaacttattagtgttgcctataggacaattggatgtaagtcttggtatggattggttgtctaaataccaagctattgtggattgttcacataaaagagtgactcttttaacccctagtggtgatttcattgtttaccgagccaacatgagcgcagtaagacaaaatcctatcttaaggtcatgtttaactagaaagagaaacttagagtgttatgggaatctatttgcgatcgaggatgagtctagggatttagactagttctgttggataacagtggttagtagttttctggatgtgtttccagaggatttaccagggttaccacctgatagggagattgagttttacatcgatttgattctcggagctcaacc

SEQ ID NO: 209241 - DNA, 643 bp, Cannabis indica
tccatctgtttcaacactaaagaggaggaagagaagggagaaacaacttactaaagaggctaggaagagggggaaggttcaagttcccagcgtcggggttgattgtcgtgaagaagtctaaaattatattttacattaacctattgtaataaaaactagttttagataccttttggatatttgatgtataagtaccttttggtgatcttttgatcaatgccccaagcacaaataggaccttaatttatatttggctcaatatgaattgtataggtgcattttggtgatcttttgatcaatgcaccaagcacgcaaacagtgtattttgctaatctatagatgccttttggggatcttttgatcaatgcaccaacaaccatttgaataaaaattatattttgcaaatgcttcattgttcatttaaattaccaagttttccattacattctaatactatagtagcaatcaaaaaagtcagtacatttttatgaaataaacatatcattacagggtatccttaaattacatggaacaatatccttaaaaaaagtacattttggggttaactgttacacatttaaaaattaaggtagtttagcctcataatatctccttacattaaacaacactcaagacattaacc

SEQ ID NO: 209242 - DNA, 757 bp, Cannabis indica
ccaacttctggtggggcatagctaacggtaaacacaaacttcactggaagagttggaagtcactgtgtaactctaaaagtataggaggcttaggctttcgatctctcaagcctttcaatcaagcgatgcttgccaagcaggcttggagaattcacaccaatcagtcgccacttcttactcagctctttaaggccaagtactttcctagaacctctttcttagactcctctctgggccattatccctcgtatgtttggcgtagtattcattggggcaaatcccttctcaaatcgggcctttgcaaaagaattggaaacggggctaacaccagcatctttgatccgtggattcccaaccatcgaatttttccctctcaagtcccaccttccctgacccatgtatccaccctccttctccccaacggggattggaatattccccttcttcgagcctacttccagcaggacactgttaatgacattctgtccctccctccccctgatccctccaaacctgacacctacttctggcagcactccacttctggtcattactcggttaggacagcgtaccatgttgctaaacaagccattaaccgggttcaaccttcttcctcaaacacagaaaccctcacccgttggtggaaatccctctggcgtctcccaatacctcctaaaattagacatttcatttacagactggctcaacactcccttcccactactaacaatctttacaataggcattgtattagttc

SEQ ID NO: 209243 - DNA, 611 bp, Cannabis indica
gattccctcttattgtatgatgcaaacttatatattccacattctaatcgaatttcgttgaagcttcaagtgcttgaactcctttcgatcttcttgaagagtgctcgcttccttccgagacaagacttgaaaagcaatctcccaaaagcttgtagaaccttctccaaaaggtagtaatattgttgttcttcttttgtagacttgaatacaaactcaaaacaatacaaaatacatataaacaaagtaagagacgaacacactattctctacataataaagactctattttctaaagatatgtatataattcaaagtgtatgaaagagatacatgacctagctgctataaggtgtatttataatcactatccaccttattaacagctcatacacagtctgaacaagaccacaactcactagaaaactccctaaaatagatctttaatcagcctaagaatttttgtttctatacctacagaatcgtgagcagtaagtgcgacttcacttttatagaaaaggaatgtcttgcttcagttttcttcacaaaaaatttgatcaaatattttaagaaactcacaaaggatcaaatatacacaattggatatatataga

SEQ ID NO: 209244 - DNA, 1413 bp, Cannabis indica
tgatttatttttttgtactattagaatatttttttttcatcgaatttgttgttacaactttattctttcaattttttttgtactattacaatgtatgatcaactggaatttatctaggattacatgatatattgcaaatctactccactttaaaaaaaattcaaataactgattaaagttgtctatggacaatgtaaagtcaaaaactgaacatttctcgtcaaaaaagaaaattaaagtagcaattgtaaatgagatttaactcataaaacaacattaagcgacatgcaagactgactatataacgactcacattatgtaggcatgtattataaacgagacacgaagataccttgagaagataatacttaacctaaaatatgaatagaaggcctaactattgatataggcaatcaaaaaatgtacaaattaattcataaaatgaattattcaaactatgtttaagttttcttactaagttataaatggcattgttgaagggtaaacgagatttccttcgagcttcgctaaacgagattaaatgatagagtactcattttagtaattatattagtttactaaaatatcatttacaaggagctaagcattttaaggataaaatacattgaagggtagaacggtaaatttatccatactcgtaggttatccatagaggatcattgattatttggattaaaacaatggataattaatagcgtatctatatttggaacatatagaacgttctatataatcaagagtgcaattctaaatatatagtgaagtcaggaggaattaataagatagagaatttacttggtaaattctaaaactacttattggaagcttgattatataggcacatggtccctgcactagttgagataatattagcttgtagacttgattaattggttttaattaaccaattagaattctaaattaaataatattttatttatgaattttcactaagcaaatgacttaattgagaagaaaagagattttaggatttattaacaaaagagactttgtaaggtctaattaataaataagttaaatgataattttatttgataattaattataattattaaataaatagatttgacatttataggactgaaattaaaatatgacatttgtgaaagtaaagataagttattaaataaaaaggtaaatagtggcataagtacccatagttttaagtttgtaagcggcataaacccaatatttatttttagcggcataagtacccaatatttgtaaaagtataattttcttccagttttgtcagtcaaactctgtttggaatttattaaaagaatatttgaaagtaactgatactatatatttctatctagacccaatgatctagaacttgggccttatatgtgctttgtttaagacaat

SEQ ID NO: 209245 - DNA, 1004 bp, Cannabis indica
gcttcgattagcgaaagacaaagtaatcttatttatgtaatcttcttgtttcatattgtaaaaatactagtctaaggtgtcatcaattgatgaacagttagatgtcgcatatacaatacttatctttcgagatcttacactattatgtatgtctaatggtgaaaatccattagggatttatctcattagaaaaacaaacatgttagaccaacaatgaagattcgaaattaaactacaacttaataacagaaaataacatggttcaatataaattcatcgacaattaacttcgaaagttaaaatttaaactaaaactaattaagtacgaacgtaaagggtaaaggtaagtacgtaacgttaggtaaaagtaaaaaacttaaaaacctaaaaaactaacttttaaccaaaaacctaaacgtagtaattactacgtaggttcccggttttacccgggtttacggaacgaaaggtacgtaaacgaaacgtacttactactacctaccttagttaagtaaagtaaggttaggtttcgtacgacgtcctactacttaaaactaaaatagatcaaacattctagcaaccttttattcgatcaagatgtgaatccgcgttgtcccgtttaggcgagagtcaaggctattctatcttatgagcttccaccattgtttcatattcttgcaagtcttatacagtcgccaccattagggtgatcataaactatataaaaaacttacaagattacttatctttcgagattaaacggtgctaacttgctaatgaacgttcctccattagggaggattactcactaaaacaatagctatgtaaaaccaacaatggagatcgaatatccttataataaagctcattatttaatgaagggttgtattttcttctaatatttattttaatccatttattttaaatatatatttatttaattaaaatttccaatttagaatgaaaaattccaaatataaattttaatttaatatttataaatc

SEQ ID NO: 209246 - DNA, 558 bp, Cannabis indica
aaaattagtagttttgtgattcacaagtaaatttaaaggtctaatgagtagcattggcaaacaaaatgcatatgaaattgcaaccaaagaatgaatcaatttaaaaatagtcagctcaccttgaatagtgaatgcaatgtcatatgcaggagggttgagaagaagatctctaacatatctgaaacaataaaagaataacaaataaggaagcaaaacattgttgtgctcaacagaaaaaagaggtgggtaaaaaaaacagatacaatgtgagagcttttggaaaatgtttaacatactattcgagctatagtgaccttttcaacaataccattcttaaagagaggaacatgaataatgaatactcacatcagtggtagacctgtacaatttgatggaagtaacaccttcaacaaacaaggtattccctcggtcggaatggcacctgagagaacaaaaccattaggattgtttgacacattattttatcaggattcttaaatgtgtatatgtggtacgttatgaaacaaaccaccaatctgagtcgctgttccaagggtc

SEQ ID NO: 209247 - DNA, 519 bp, Cannabis indica
tgaaagaactttcgagggtaagtattttctgacatctttttttttattcttctttgattaattcagatttttaatgtcttttttttgcaaagactagtttgaagatggcataagcatattcccgagctaaatcgattactgctaagaaccttgccatttccgacacaatgcgaacggaagtagacttggccaaaaaggatgccgaggacacacgggttcaacttggggctgtgcggatagagctgggagaggtgaacaagaaacttctagtggctgagattaaagttaccgagctgaccaacgaactgcaggatacgccatcaaccgaacagcttaaggctgatattgcttctttatctcgtgaagtgaccagtctccaagatgaaagagagggtctttggacccttcttcgtaggctggaggatgaaaagaaggccatggaggaggaactcaaagctgaggttaataaccaaaagtccgaggtggcgaggctcgaagagaaggtgaatgccttagaga

SEQ ID NO: 209248 - DNA, 667 bp, Cannabis indica
  modified_base (653)..(653): a, c, t, g, unknown or other
aacgcacgttcaaaaactagtatatatatatatcaagacacttaagtgaagttaattagccaaccaacctaacttggcatcatttgtacaagcatgtttatttacttatttttgagaaaaaacaacaaacttttactcttaattttaaagctaaataataaataaataaaataattttggacccaaatttgtgaacgaaattttagacaattgaccaactatcataacttgaaatctattcaacatatcattactaaaaattttagcttccagcggctctggaattatcctaggggtttatcccttctagtcgggtttcaatctccagtttgcaatctggtttaaacttctaatctaattccctcaccttttctatttctttccctccttccttttctcctgcattaattgcttctgccctctcatcctctcctaaccatcctttccaccatttattatttttcagagcgacaaagaggatcttttggatttgcatttaattttggctgctaatcctcttttatcaagtttcttctctctgcaggctcctttctctggctgttattaaccctgaaatcccatcatccttttaattaccgtcgttctctcttcctcgggctctgtcagtgtttaattccccttcctggtgctgngctatgtttaggct

SEQ ID NO: 209249 - DNA, 710 bp, Cannabis indica
cccgggactcagaccgagtttagcactaggacccaaacccagactaggatggagccctaaacctagactgggactagagcccaattttcaagaccaggacctaggacctcagactcggacatgggacctgggaaacaaaccgtgacttagatgggggacgttggacccgaaaacctagggcccgtacgaaccgggaccgatatcaaaaacttgaccccagactcgagagataggacccaaccttggtcccgaaacccaagaactgcctaccgggacacaaccccgaacccagacccaaacccaaacttgagactcagcccgggaatcaggacccgaactggaacaagactgggatcccaagaccgagatccaaatcaagacctgaggcttcgacctcacctgtagtcagtgtttaaatctaggacccagacccagatccgtaccaagacctggacttgcacccggatctggactcgatctcagacgtggaataagaatcggaccaggactgggacaagaacccagacctaggaccataatcggacccaaacctaaacccaaactcagaccaaaacccataccggaacttggccctagacttggacctgtcacttgggacctaaaccaagatcgggacttggaccaagaccgcgactggacccaaacccagaccccaaaaccggggctggacccaggacccaagaatcaaa

SEQ ID NO: 209250 - DNA, 1167 bp, Cannabis indica
tctcgatctaactttcggtttcatagaaagaatctcccaacatgctttaccatgacacgaaatcttgtgcttgtcgaaaaatctccttgcttcttcacaagtatctgcaaacactatgttccaattccccaaaaccggtgccaacatgtctgatttttcgattagaagatagaacatgtatttcgagatcagctggcaaatgtttttgtaatcaatgccacttgattgttgatcattggcattctgttcttcttcttgatgtccttgacagatacatgtatcgaaaaagcgttgagcaaagagttgagagaatgattgatcttcttctgttgaattggcttgatcattgtagcaaagctcagtagctaagtgccaaagaagaaggctctcagcatattggtactcacctatgctccatttcagtttaatatagcttgaagaattctgcaacagagctgcttctcctctttgtgaacatgcttccattgcatctctcaaactaattgccttcttggatttattcttcgtctcctcgaaaatatgaatctcgagatccttatccactgctttccggtatgaaaaattgtacaagatccttttcatgagcttggacactccatacttgtgaagataacaaactaaattttcgaattttatctcaggttgtaaacaatgaccaattatgtccatttgggaaactgatttggaccatctttttcttcttaatatcatattgggaacatgtttaataaaccaactatctttaaatgccaagagaacccaatccaaaaacataagcttgacagcagagaaagtttcaaggacaatggctccaatgaacaaggcataagtaacaccattttcaaaattaccaaaaccatgttttttctcaatgaaaagaaaaaccaagaaggctaaaacagtggaacaaatagtaatgaagcgaagagagtaaccaagtttcccatgtatgacaagtgccttggtatggagcgcttggtacatgaaacagagctcgtattcaaccaatctaaatgctcgagcagcattttcatggaaaaaataactacgactccactctctatctttagagctgagaagaaaaccaacaataagtcccttaaaggtaccaaaaaaggtatatgcctcttgtaaaagtttcatctc

SEQ ID NO: 209251 - DNA, 549 bp, Cannabis indica
taatgcacgcaaactgtttggtgaaatgtgtgtgagagaatagttttcattgctgatgatgctgtgtttgatttttgtgttttataaaaatataaactttataaaaaaaaaattattaacaaaataaccgcgtttttgattgcataaagggccgaaaattagagtaatttgccaaactaataagttgaaatagtaaaatttgcaaaataaccatactctatgcgaacataatagtcgcagagtgaaaatctatggttattttatggtcgcacagtgtaacttatgcttgcttattttgctaataaaatttttcataaaatctatttttacaaaacactcttaaaaattacactttgtgaccataaatcgatcattatggttgtgtatatgtgtttattttgcaaatttttatatttcttgttgtgtaaattcaatgtggttattatgctttgtaaattggttgtgtaaatataatgtggttattttgctaatttaatattttcatatagttagtttggctaatttcccataaatataggtgtttgagtg

SEQ ID NO: 209252 - DNA, 585 bp, Cannabis indica
tcataaatagaatgaattggtagtccatactccataataagattaggctatgattgaaccatacattaagaaacaatgaatctaaaacattttgaaaaaaaaactaaaacttcaactcaaacgacataaagatatctataaactcacttataacaaacaaaattgtatagcagaacaaaatttgaagcttctctatgatcctcataagcatgtcagctttgagatgaaagaaaagtattacccttgttagatacgcaataaggatcgtccacaatccaagcagtgattcttttgctttgtcagcttccacaaacacagttatctgatcatcaccactttataaagtgggtaatggtgaagctgcgtcagcaaatattgctatatatgtataggaaagagaggaggaattgtccaccaccagcgtgtgtgtgtgcgtctctctctctcgagtctttgctaattcaagttatcaattcagctgttccgcacttaagtctttacttaaaaacttttctcgttttttaggtggtttcgtcgtccgtttgtctttttcgtcttctcttcctcttcgcttgcctttgattg

SEQ ID NO: 209253 - DNA, 589 bp, Cannabis indica
aagttcagagggcatgatttagtacatgtcaaaattcaggggaaaaaattactaattagcctaaaatttaataataatttgatttaaaggtgttatatatgacaaaactgttttacattttttgttttcgttcgtgttaaaaactgtcttcaagttgggtatattaaaaaaagagttgtaaaaaattaagctcagggtcctatttttaccattttgaaaaatacatgacccctttgtcatttaacaaaacagagagtccaatcggtaacttttgcaaaacacagtgtctaaaatagtatttacctataaatattttattttttttaatttttcatatatacacttaaataatatatgttttcttttcaacggattaaatacggtatattattttttttacagattaaatattatatgttacgcttttattgtaagttttaatctattattaaatctgactaaactaacatgtgacaattgattaattttccactttttttaaataaaaaatttaattaataattttaaaacttaaaaaaactaaataataattatttacaataaaaactaattaaataaataaataaaa

SEQ ID NO: 209254 - DNA, 889 bp, Cannabis indica
attgaatactaatgatgtgtgttgtaatttgtagcttgctatatcattatcgaagcagctggaatattatggcgaatatcaatcgagagttgtcggaatgatagggcaagcaaatgcttcgtccatattttccaatgcactttacataatcagcgcagggaccagtgacttgatacaaaattattatattagtcccattctacaagctacctatccaaatattcaccaatattttaacactcttctcagaaattatgagcaatttattgaggtacatttaaatatacatacacatacactcattataattatgtgtaaaccattattaattatagattatgatttgtatagaatttgcattcgatgggagccagaagaattggagtggcttcactagcaccgctagggtgtttgcccggagccataacaatatttggatttggaaacaataatcaatgtgtggataggctcaattatgatgccatgtatttcaacacaagattaaattccacttcccaaatactaaggaacagattgtctaacctgaatttgcttgtgttagacatataccaacctctctacaacttaattgtcaataatcctatacaaaatggtatgtaataatatattaacaattgttaattttttaacttatatattttaacgtgatatatatatagttgtaaataattaaacttaatcatcatgattatttttgtagggttttatgagacgagaaagggttgttgcggattagggacgatagaaacggcattactttgtaattcattagctattggaacatgttcaaatgcatcccatcatattttttgggatgcttttcatccatcagatgcagctaacaatttactttctagttatatgacta

SEQ ID NO: 209255 - DNA, 529 bp, Cannabis indica
aatctcctacttgtatatgcttaattaaggtaatctaaacttagagttagattagtaatgatggtccaagctaaaataattactcaaagaatatttagttgcaccagaataaatcaaaacagtcaataaggtaccagcaatagaaagctgacctgtcacggtggaagggccggcagtagcctcggcccgagtcagggcaaacacccgagcaggagcaggtgtatcatccttcttttgttctggtcatagcagctgtgggcaattcctcttcatgtgacccactactccatagtgaaaacaggccctggcctgacacttgctttggtggcgcctcttacatctcagacattcaggaaaagtctgccaatttttgttcccaccacgacggacactttggttacctaggaatctcttatttgggcatgcaactgattgttcattaggccttttcttgagatcaccagggtcattacccctaccagaactatcactagatgtctgcttccaagaatctcttctcgcaatattt

SEQ ID NO: 209256 - DNA, 757 bp, Cannabis indica
tccaagttacctgcgatgggtcccgtcgggctccgaaaaatggctatcactatcaaaagttgattttcaccgttagatcatcatctacgttcaaaaatgtctactttgtattttttttcctatttttgtggatctccttcacctacaaagagagagctctattagctcattttttatattgagaaaattactcacaaggttagagcttctctctctagtttttctctctagaaattggagctttgacacttagcctatttctctaataccatttctgagaaataaaaactcaaaagtaaacgtagcttcattactatcatgatacaaggagtgaactactatagatttgtggcatctgtcttataattacttaacaactatttcattcccgctaatctagtgagcgagtgtgacctaaaaggctagcctaaatttttcagtcaacgaaatcattaatctttgtaagtcgtcatacgtgatgatgttagaaattacatgtgcctaataacaatgccttctaaatgtgatggatggagacactaccctaattagacaagattgacaagttgctggatactaaaatatatatatatatttttttagtaattttttaaaataccacacatatttttaaaaatatattttttttttaaaaaaaaaaaaaactagtagctcataaactgagtgggtcctaaacacaagtctaatttaccttaactcaatcccggtcctgatgcctcttttggttgggtaagcc

SEQ ID NO: 209257 - DNA, 506 bp, Cannabis indica
ttgaggaagcaggtatgagataaacgtggaattggcttcttagattatatattctagtcttctatgactattatttttttcttgtttacggggcttaatttttttatttcatgctcaggctgaggctgaagatcttgcacgccaagttgaatcgttgacttctgagaacttagcacttaaagtagaattaaatcgagtaacagaaaactcggagaagctgaggcttgagaacactaaactagtggtacgttctagtacttttcttgaattactccttcaaagaactgataaattttcccaactatatcaatgcttattactcgagtctcattttgataaacagggtaagctggaagaagcaaaacttgggcgtaccgaagagattgtaatgaacaaggtcgacaagaggactcaacctataagtacagaaaatttactgtctagagttaataactctggttccattgatagaactgcagaggaagacaatggcatgtatgagaaaa

SEQ ID NO: 209258 - DNA, 684 bp, Cannabis indica
aataaccgcatttattttacgtgggacgtaatcaaatcccgtaatttctggaaaatattgttgtgggatatgaatttaattgtaattatctgccttcctatgtaactataaataggggcagagtgtactgaacaagggacgagaaatccttgagagaaagaaccttcgttttatatcagagaaatctaataagatagacttgtgaactatgcagaattttaactgcaaaactacgtaaaaaaaacagtgtgatttttgcattattcttcttatttttattatttctgtacaaattaatcacaaaataagctttattatcgttaacgaaaatttacagtaacagtccgatcattattttatttgccacgtgtgataaaatttgacaaaagaattaatttataacactgtaaataggtcaaggattattttagaaaaaattcaaatagcacgataatatgataaaatattttcacgacatatcattttcctttaaattttatttagtggttcacttttgtatgaaatttaatgctgaaggggtgactacatatcactttcaggtgtgtcaataaatgtctgtgtcatgttttacaactaaatcaatctcatcaatgcttcacaatttgaatatcttatagttgctgttgccaatcttgatttcgagattgaaaactataatttata

SEQ ID NO: 209259 - DNA, 749 bp, Cannabis indica
ccattaagaagaaacgaaaagctgactgaagtaacacatttcataattttttccacccaatgtctgtggtaccccagccgaatcatcatcatctctaagaatcgccattccacccgatcatatgcttttgccatatccagtttaagcgccaacttccttccattttgaaaccgatttttcctcatacaatgcaaaccttcatacccaataatagcgttatcatggatcaatcttcctttaacaaaagcactttgtgagtctgaaatcaccccatccaaggaaactcgtaaccgattagctaagcatttggaaattatcttatagataacattgcaaagactaattggtctaaactccgctactcgttcaggtttatcaacttttggaatcatggcaataatagtatcattgagacaactaaaatcagccccttcattaagacaccgaaggcacatcataacaatctcatccttaagagtattccagaatttatgataaaaaagtgccggcaatccatcagcccccggcgcttttgtcgggttcatttctttgacagcacgcacaatgtcctcctcctcaaattcggctaacaatagatcattcatctcattggtaactttcggctgtactgctgccaacacaagagaagtactatcatcattaaccggagcagcttgaaagagagaagaaaagtattcctccaccacttgcacaaccaaggtaatatcactttgccacacccccatatt

SEQ ID NO: 209260 - DNA, 826 bp, Cannabis indica
aatctcatgtctatgcaaaatttttagaacaattcattttgtgtacaaatactatatgcaaatttctcattaaaaatatttatttgcacactctacaggtctcatttcactttatgtgagtaaatttgactggactgcgttatattattttggccaaaaatagaatgtatgtcgataattcttgacaaataccatgatcattgctatctcatgttactaatttattgcatatgcaaactagggatgtacatatatttttataaacttcccaatccaaacaatttgcccaaaccaaaccgaataacccgacaaaaaatacaaattgaaaaactcgacaaaaatataactcgttcaatctttataatggtgtagtctcccattattatattttttatttcaatttgttatgctacatgttgatgtatatgattttgttatggtaatctatttcttattatttctctccaaaaccaaaggactgaaaaatcaaagccaaaatcatcagggatattactcatagatgaaatcaaactctacaaaactcccctaaatctctctagtgagtctttaaaatcgacgcctatagttaagaatacccgtcgattttaaaggtttgttatgaatcagcgtcaattttcaattgatattgaattaaaaatgaaacgaggtttgcattattgtcgaaagttcagaatcatcatctatactttagcctacgactaaaaatcgacggctattcccctcttataatataaaaccctttgattcaattcatttcaacctcattctcactcttagatctcttattttccctctctctctctct

SEQ ID NO: 209261 - DNA, 687 bp, Cannabis indica
acaggcctagcccgcctatgcccgggcctgcacacattaccatatatataatgttttatttataaatatattatttaaataaaataaataaaaaatttaaagatgttgtatgatataaagtaaaagtttaaagtagaatagagaaagtgaggtgttgatgatgtattttaaaggataaaatatagaagttgttgtgagtgctctaaaagttataaaaatgtcaaaaaagcatatccaatagataaagctaaaataactcaaaaatttaccttataaatagtgcatagctaaatatagctaagcgattttttagttttagagtactcccaataacttttctactctattatttaagatacatcactataactctactttctctattttacagcagaattttacattacaccatacatcaacttctttaaaatacatcatcaaattcctattttttttttaaaattttattatattttattcatttcaaatatataatattagtatatatacatatccccatacaaaaataattaataatatgaatagtaatatagtatcttagaacaataaatatgtttagaacaatgaatagtattttataaatgtagagcatgaataatgtattttaaaaaagctttaaaatgaagaatgagtttagagcatttgttgtagcgtgtttttagtatg

SEQ ID NO: 209262 - DNA, 1347 bp, Cannabis indica
ccactcggccatcctgacttgttgattatgagttcaataactttatatttacccaattttaaatcttagcttttttatatgatactatttacttctttttattagatatgttaattagattcattcattattatatttgcaatcattgtggcctaacagttatgtttttcaataatatatctaacatgcggaaattttatgaggttagagttaggtgagtgagttgggcagtgaattgatgaaatctttaatattgtaaagtgcggttaagtaagggtgttcataaaatagttgatcaaatttaatttgcaagattcaatctaattcaatctaataaaatttgcattgggtgttgattgacatgtaaaagtaaccgatctaatctaattcatacatatttataaaaaattaaaaattatatatacaaataatattttaatgtaaagaaaatagtaattaaaaattttaatacatataatacaattatattttcaaattttataaatcaaatgtatattctattttaatatatatatatattttttttctacatacaatttaaaataaaataacatttctttttacatgcatttttttttcctttgaatttgttatttgttattttaatatgttgttagagacataaaataactataatttattttattttgttgctagttataaaaaaaatcataaatattaaataatttaatattaaaaagtaacaaatttaaaataattgatccaatctgtacttttgcgaattggattggattggatttgaattattgtgcggattcgattggatccaaaaaaataaaatccgcacttagtgcagatcagatgtactatgagcaaaataatacaaattagattggacgaacacctctacggttaaatcacaaagaaagtattgaacatagcaactcataaaaatcatacaatcaacctagttactttcgttctaaattaaattgcatccaaaacaaccaaagcataatcaaatctcactttttcagaattttgatttgaattcataaatagtaattatagatggccaataaataatcacaaaattaaatcaaatagcatggaattgaaataagagaagaacaaaaaaattgaataactacattaatccataaaaaaaaaaaattagtgattcacataacaattctaagaagaaaattagttcataattatcattctaaacataaaaaaaatttaagataaacattgagattgataaagagaagaaaataattcttcaaaactagtagaaaagtccaatggtggttcaatgatttcccaaaatcgttctcccattttctctctctctctctctct

SEQ ID NO: 209263 - DNA, 542 bp, Cannabis indica
cccttttatcctggtttttaacttaaaaccggaattaaaagtgtcccacttaaaacaggcggagacccatgtctggtaattaacctagaggcgacagactacaacccagagaaaccctcgcccaaaatacccaaaaacctcgcccaaaatacccagaaacctcgcccaaacccctcattgtgagactcgatcccccaaaatacccaaacgacagacggggatgctattaaacgattaaaggtatgattttttcttattattttctcctattttagaattttttccaccattttttttttctgctaagcaagtagcaaatatattagttttatctatttatttggtttgtgaataaatagatttcatctaataataatgatgatagtctaacaaagagaaaaaccttgattcaacaaagaaagaaaagaaaaaacaaaaaatagagggattctatatccaacggtattttaagaaaaaaaaaatctgagagttttttttttggttaataatgtcttttactttagggattatttattatgtat

SEQ ID NO: 209264 - DNA, 1067 bp, Cannabis indica
cgcgatgtttgtccaagaagtatgaatcctgagttaaatgtgtgtgtaagtggtatttgtgtaattttttttatttagagtgtatatttatttatttggtcaattaaaaatatttttgtaatattttttttttttgttaaaactaaaatattttttaaaaactaatctctatactttatagtgattttatataatatttattacaataaaaaaaaaatgaaggtatttttttatatattctgtaggtgatgctctcatcctcatcatcatggtcactactctcgctcacttggacaaaatcacactaatttcaattcaaattccaatggctctccgtctctgtaatcccaatccgcttagctactgtcatttccctccaatttcacacataccgactaccgccacaaccagattctcagtccggggctccatttccaaccacaatgatcctcgcaaggtattctattatttctcctaatttctcttttttgtttggttgccaagaaaatagtaaaagaaagatacatatattgaataattaggttaattattatcgcaagttttgtgtccttttcaagctgtgcagctagtactggaagtgaaagagaagcttgagaaagatcatcattatcttccggttggtgaaaatggaagagatgatgaagatatgattttctggttccttaaagacaggaaattttctgtcgaagaaaccgtgtccaaactgtccaaagctattgtatcctctccactaatgcctaattttatctgaataaatataactaaaaatgtcatatttttctctagttcattcacttgaaatagtgctaacaatgaattgatatgaaaaattaaagttttgagttatatgtaatgggattttttattggaagtttatgttgtgagttttccatcatcaactaaaagaaatggcgtcaagaatttggagtgtctgaattgactgaagattctgtgaaaagaatggctgagactggaaaaggattcgtacatgactttctagatgtcaatgatagacctgtgctcgttgtggtggcatccaagcatat

SEQ ID NO: 209265 - DNA, 886 bp, Cannabis indica
tttgagtgagtgagacagaaattttggtgggaagaaaaggtgagtggtcactggtcactagaccctcaatcgtccatgggatcattcattgcatttgcaaaaataaaagttagaaaaaatatttgttatatttacaatattattctataaatttttgaataattttaaataatttacaatatcaaaaataaattaaaaaaattttaaacacacggaataaactagaataccaaaaattttatttttaatattgtgaaaatttaaaaatttacaaaaataatattttaactataatgaataggttataatatgctatgttttatagaaaaacaaaaaaaaatatttaagagattataattaacacttccaaaatgtaaaagtccctaataactaaagttgcccattaaaccacttgaggctagctcaagtggccataggtggtgcgtgtgtattggaggtcctgggttcgaatcccaggttatgttgatgtaatatataaacgcttaaattaaaaaaaaaaaaaaagttgcccactacttttttatttttcttttttatctagtctgtacaaatggatacatctttttcctctgtatatatatatatatatatatagagataagacttatattgtggtgatggtgatggtggtcccatcaacaaagagtagtagtaaagtacttactagtttatagtactttacttgcattaggataggaagtaggaaggaacacacaaaattacagcaccccaacttttcctcttagtttcaccacatcttaaaattttaattattgtttccaatattttatttattttttaataatttattgtactaaaacttagcttaaaaataatgagacaaaaaacactcctaccatgtgtt

SEQ ID NO: 209266 - DNA, 713 bp, Cannabis indica
ccaaggaggaagattataaataataagattgatcggccaacaactgtagttgctactcatgaaactatgaggattgataccatctgcagaaaggcctattcgaagatttctagggtctgaagctattttaggatacatgtcatcaatgtttttccaagacgaagaatcagccggatgacgcatttttccatccttaattctcttctcgtcatgccataccaaactttttgcatgttcaggattgcgaaataaacgcttaaacctaggaattggtggtatataccacaataatttggcaggaatcccctccttctcctttccattatcattcaacttccatctagagcacttacaaactgggcaatgcttagccaacacaaactcattcctaaataatatgcaatcattaggacatgcatgtatcttttcatactttatgcctaatgactgcaaaatcttctttgcctcataagtactacttgggatattatttccttcaggaaaaatattgcttaagtaagaaagtaattgtgaaaatccattatcactcaatccattcctagcctttatattatacatcttaactaaaaatgacatttttctaaccttagacccaatataaatggatttttctgaatcttcaattattcttacaaattcatccaggcaatctgcaaactcttattctaaatcgttaaccatatcaatgtgaa

SEQ ID NO: 209267 - DNA, 636 bp, Cannabis indica
agcgcagcaaaataacaaagaaataaaacaaagcaatttactcaatttggtaaaactataccaaacccataaagagagatatatttcacttatcacttcaaaattacacaataagctcacacacttctctgttcacaactcaatatttttcaacacacatacctctctaacacataaaatacatatttataaagttacaaaacttggacaccaagacaacttggggaccaagacattaagcttccttaagaagaccttttaaaacttagacactaacactttcttttttccacaattaataattaccccaaaaaaatcataactttacaaatatatataaataaataaagaaataaataatttgagtcaaactccaacataatatatatagataataagtgtatatttttatatcttattttttaacactctttctatctattaaaaaaattaaggtaattccttctatttttttttctatcttttatatgattaataaaagtaatatatagtttttttttttggtattattttatagtttattcaaagttaatttatgaatgatttgtatattttaacaagattgatgtctttttatttttctgttgatttataattatctttttgttattttat

SEQ ID NO: 209268 - DNA, 719 bp, Cannabis indica
agaaaacttaacacagtatactgcagtaatgaaacttataaaaaaatacagtaaaaaagtaaaaaataccgcgcggctagtatttttgtaaaaaaaattgacaaaagttagtataccatataaatttccttatttttaattcgatgtttctcgcaaccctctaagaatacacaactccattattaatctttctatattagtattcctcaaattattttatagtcacctttctctttctaattttatatttttttgctaattctttttagttatcgtgagatttatatgttcattatttttttttctttttctttttgatatttctctcaaccctctaacaatacaaaattttattattaatctttctacattattattcctcaaaatttttttgtagttacctttctctttttatttttacactttttgctaatttttttttataattatccttagatttatatgttaattgttatttttttcttttctttttaaaagttatccatattattaactttaatcgataatgatcatgaaaaggtcaatgtgtaatgtttattagtagtaatatgtcattagtccctttctattttaattttatattgtgatataaataaatattatatcatattatttacaaattattattgttgttattgcagtatttagtacagggccggccctaggtataggcgggctaggcccacacctagggccta

SEQ ID NO: 209269 - DNA, 743 bp, Cannabis indica
agccaaatttcgggtataacaaacttaaatatattattctaattaattagatattataaaatataatttagtaactagaaataactattaactatctagaatatatctcattaaactaagtatttttctaaattaattttaaaataatccaatgaaaaaattaatttcatttattttaaaattaattgtgttgctaattcaattttaattaagttaaactaatataattagcttaatacaattattaaaataaggcaaatgggccttcacaattagggtggttcgtgtgagggagagctgattcagtttgtcatacccactactatggcccctaactctcgcacaaggcccaaaggaaaggaattttaccattaaataaataattgttattcattgaataagcctaatactaatcggtcctaaataaaactatcaatgtgatattttattttagcaacctagtccatttaactaactaaacttaaatgggcttcctatatgcatctaaacctaaaagcaaacatataggctcacacaggttaaatgatttagatgagcgatatcatgtttttaggtttatcacagatgaaagaaattacaaaatttacttgttacaaattatttgtaatatctattgacaattgaactattattaaaatcaaatcattgaatttgtcaacaagttaatcataataacttagatcaaataaataataggtttgtttaatattttttttggaata

SEQ ID NO: 209270 - DNA, 663 bp, Cannabis indica
cttcacatcgatttgttaattcgtgaaaaacccagttggtttcgagaaatacccatctaattgcgacctcaggaaagttcttcttggaatcagatcaatctgggtgtctttccgaaatggagaaagaacagaagggtccaaatgatcaagaaagagtagaagatgaggacacggaagctttggagcttgttctctatcaagtctcggagtgttatgtctatatggtaagatttattggattttcctcaatgggtttttcgagattcgacccaaaatgttaatttgataatttgatgaggtttcctcatgattgaacagctataattgcatgcatttcgtttagaagatcaagattcaagctttttagttgattgtggtactttagtaacaagatgtttttgggagattggatcatagggttctttatgtacttgttgataacttgaaatgtgggcaacatttatttgcttgaactactgatatgatatgtcattataaattacataataatttgaatgttgtgggtcaagtaattgatagtggcaattattcagtcttccattttattttctttttaaatattaatgaatgtgaaagtgttaagctgagttcttttatgctctttctgcagataccgccgaggaaaacagcagcttcctacag

SEQ ID NO: 209271 - DNA, 737 bp, Cannabis indica
gttttcaaataatgacaccagattcttatcaattgtttttggtacaaacccctgtaagccactgctttccccaaaacctaattgactaaatcggttctttcatttaatgaacagaaacaagagtagtgttattgtttgagcatgcaaaattcaataagataaaagaacgaaaagtcatgggctggcccaaaatttcatattagatgtttataggttaagcaagctgaaaaagtattaatgggccatcatgtgctggacagcttactgatttcaaaaataaaaagaccaaattcttaccaggaatgcatccataatggatggaatcggtaattcgagcactgttcacctgggaacctccagggcatatgcagtacttagtgatgtaaaatctcttttggtacaccagattcccagtagctctgttaattcggttatttaatacataaagctctgtgtcattttcccaaacttgtgccaatataactcgaattttggagttccgatgaccagcccaaaaaccaaggacagtcctgaaaaacatcatttgattagccagtaattaatacacagtaatacaaaatcaaattaacctaactgcccagcactaactaattggcaaccactactagatagcgagaaactaatgtctatacacatacctgttctccacatcatttcctccacgcaggcagaagcaaaaaggctgtaaatattgtaggcagagcaacatcttgtgt

SEQ ID NO: 209272 - DNA, 513 bp, Cannabis indica
atattaataattatcacactatgattattttttttagactttcaatttatttatgattaagaatctttcataaaataaaataaatcaacagtcataaaaataatcaaaataaaataaatacatttataaagaaacattataatattatttagaaataatttatatataaaatttcttaattaaaaaaatcattaattattaattgagttctaaaattttaaattaattaaaatgtaatgttgatatctaatgttcaaatttattgaattaatgtatatcacgcatattattaagaaaaatgtaggatttaaaatctgcaaggtcataataaaatatcttaaattaatcgtgaagtaaaactttaaacttgtcttttgctctctttcgagaagagccttcacgagatgctgaaaacgcctgaaactatgaatcaaactgatatcaccatggaagacctcctgagcagaacatctaacctaactgtcttggacgaggatggctgggaaatcgaac

SEQ ID NO: 209273 - DNA, 1041 bp, Cannabis indica
cattgtcccatttatatttttctatagttgcacaagagattgagagaaataaaaaaaccttgagctctttcattcctccccaataattttattaaatctgtgttgaatcacttaaagaatcattctcatccgtttcaactaaacttatttctcatgtcatacaatacaaggctactctcatataaatcctgctcaaaaaaaaagtttagcatgtaccataataaggcactttccgttcttcatttctttccaaaaaaaataagggtaactatggttgaattttattaacagatagatttttctcaataacgatttgatggcatagaagcagaattacactctcataaattttgaagagctgaacaagtacaccgagcttaacaagagctatctctcaatacagctggagctccaaaactcttttacacttgcaaccttttacttttaacttttggtttcatgttccgcatagcacactttaaagatgtataatatatttactaggtagatgttacgtgccgagctacgtattgttagttttatttgaggttttgctttttttttttatataaatttttgtaattaaagtgatatgattatttgaacgatttgttttataaaataccatatgaaaaataaagtaaagtatagtgaaattttatcttaatctttcatcgtttcagcagtttaaatggtgaattaattgtactttggactcattgtttattttaaatctccatacaattggactcaaatttagaatacccttatctgaaaatcaaagcaaaagattgaatgtgaaactgtaaaatagaattttaaatttacagacttattgatataatttccaaacaatgaagaacttattttcctaataacaatctaatgttgtaatataaaattaaacacataaaagttttaataaatacataaacacaaatattatataaatatatatataattggaagaaaaaaaatctcctcagcctaggccaaccaacagagaccactggagtcagagatagagttgaagttgcgata

SEQ ID NO: 209274 - DNA, 576 bp, Cannabis indica
ttttatgtgtttattttatatcgatttagaagttcatgtgtaggatgttaaaaacatacttgttagtaaatctagatccaggtaaaatatattccaataattggccttagagccatggtaattgacttactttcaagaaatttggacttaaaacgatgtatatatgatttggatgtgatatatgttgatctagtgttttttatgattgtttgatgtttgcaattttcttacaaaaaaaaaaaattggaatcttgttctggaatttttttggttggatagtatggaaaaaattaagcaattcacttttttactgaacttaatttcgatttcatttgaattaattatgaatttttgaaaatcgaaaaaaattaggaggtgtgtcacctccatgcgcacgcggatgcccatgtttcttgggtgcacgcgcttccgataaggctcctgtccgagatttctcgttcagaagggctgttttgtttgaattttgggccatgcgcgtgtgggacaccctcctagcagcctcattggctgagggttcttggtcagcccctctcagatgcgcgcgcggatggtatg

SEQ ID NO: 209275 - DNA, 540 bp, Cannabis indica
gatccgactagtctcaaatgtatcctaagcctggaagcatatgtaggaatataaacagctaacccgcactagagaagtcgcatacgttaatgtatttagtagattaaactggaaattattcttcatttattatgtttacattttttagcttaatcattgtaaatcaatgtataaacggattgacaatgaatgcaatccttgtgtaaatgataggacacttgctttgtatataaaggagtgatccggcgtgaaatgaaaaatgaaagaatctttgcaacagtggactaagcagaagtgatctgactgaaccactatacttctctcgtgtttaatatttttccagtcttatattaagtatttgtgttcccggttcgagtactcgccattctgggttgaatactcgcacttgttcatcattttgttttttatcaagaaggaacaacttcattaatcaactaacaattacaaacaaatctcagctgaaggaagcaaaaccagatgcaagtcaactaatttcacagtatagttgctctatgaagt

SEQ ID NO: 209276 - DNA, 970 bp, Cannabis indica
caagttagaattttatgggaaatattataattgatgtttcaattgacattgatattaaacattgtatgctcaatgaggggatatcaaaagatctaaatgtattgtgtatgtatattatttcatggtaactcatctgacaaggtagacagattagaaaaatggcaatatgagttaaatttgataatattcccaagtggaatataggacatgagtagttaatgggggtatccatctaattgatttggagaacaaaatcttttgattaaaagtgatctagtgttagtataagtgggacaatttatgagtattgtccaaaaccctaggtgaattgaaggcaacgattgtgtgggtggatctattcactaccaagggcatgagtcaagttatgacaattagagtcccgtgatctgcgaaggaaagaccaggaactgtacaatcccacatcgcctgggggaaaggtcgtatgtaatgattcttagattatgcatgcatgggactacatagtagttgaggacttgaatagattgcttgagaccacctatattagcgagaaacatctttttttggtaacctacattgaaggaactctacgactaagtgtgcttgacctggggtgatttcatttaggaactttcctatgaagtgtgcgagttacagcaaagcacattggaaacacttggattggtctgtacggccagtcgttagcccaggaagcagctacagtgacacactcgtgtataagagccatcattccgtgggtgtaagggcccaatagaggtttgaagtggggacgtgaccaggataaagtataggtgaacatcagggagagtagtggtatcactaaggtaaggaagattacctaaattactcattgtaatacagtaatgatggagagtgcttttataattgactggatagctcgctaatcagatactgtagcttttattacacagatacaaagctttgagat

SEQ ID NO: 209277 - DNA, 728 bp, Cannabis indica
gcactctcttatgtgtcaatatccctgttggtccaacaaagaatcaagtctaatataatttaatataataatttttaaggagtgtcgttagccaatcgtaaagtgatatatctagactagcaccactaatgctcaatagtactacggtaagaaaatagcttttagggaagagaaatgttaaaaggcactagtggtacctagcagcctcttacacgtcaatttcgatattggttcaactaagtatcgagtctcatatagtttaatgcaatattttttaaggagtatcgctaacaaattataaagcgacacatctagaaggtgttagacactactggtactcaataacaataggagtcttataccttatcctccacaacaagctattcttctaaaaagccaagcataaaccctcttatgaggagtcgtgacaaaattcgaatccttaatctaagctaagaaatatgttatcaaaagacattcctactactccagtttttttttattattattatttttaaaagcatagttaggttggtagttaaaattaaaatgagtttttacaccatgtactgaaaattttaattttttttattgtgaagcagattttttttcaaaaaaattgtataagttttatactgtgtactgcgttaagttcttatggttgtttcgtggttattttttaattgtttcactgttgttccatgattgttttttagttgtttcactgt

SEQ ID NO: 209278 - DNA, 869 bp, Cannabis indica
tagggagaatgatttttgcaatgtagtcaaaggaattcaaaaggatgggtgttagatttttatttggacttacattaacttttattggtttttattaaaatttgggttgattggatacttatttattttattagcccatattattagtgatcaatagttattggatttagcatctatatgtgtaaagtctagttgaagcaaaagtgtgggcttttctatttaactatagtctttgatgagcagacactatccaactagggttatatagctaagtttcctccataactctgttaatacatgttgtctcatcacaattgtatacttttaataatcaaataataataaaaacaacttctgatttagagacctaagaggaagacttagttgatagtaatgcactatcgaattgagataacttatatagatcaatcaagtatgcatacttaattattatatattattattgagttctatattatatacaagttgatcttggatttattatcaatttttctaaattttctattagattgtcaattatatattatttaggacctataatttgtgtaacaattaatatgtatacattatttttcaccaattgcatgttaattttgttattattttatgttaaattttgcgtatttcaatcttaaaagtttagggattttattcgtcatgaaattctctttctatttatatcttatatgtctaaaattgttgagtaaattgagataattttgtgattaaacttttagagtttgtgtcttctaatgaaaaaatcaaatttagattttttaattatatttattattgaatgaaattgattgaaaatatcttattattatctattttacaatatttttaca

SEQ ID NO: 209279 - DNA, 504 bp, Cannabis indica
ctactgcttctcaacaacaaaataatactgctcccactatctcccctaatgattatcaagttcccatacatcatactcgtcccaatcccctacctgacacttatccctcatcgaattcccaattcaacaccctttcccacaacaaccatagcatatctacccctgaacaacattctggatactcattccctgctccatctcaacccttatctaatgataataaccagtcccatacagaatcccaaagtgctaattctcatgacacattaccattaccaccgcataatcatcaccccatggtcactcggtccaaaatgggaatttttaaacccaagatttacttggcagatgtgcaaactgaaaaggaacctacctcggtcaaacaggctttggctaatccaaagtggaataaggcaatgaacaacgaattctctgctttaaaaaaggaaaaatacttgggtcttagttccacccactcctaacatggttattgtttctaacaaa

SEQ ID NO: 209280 - DNA, 609 bp, Cannabis indica
cagcagtggtttgtacactttggatactgccagatctgaaagtgttctatccgtcactgccgacttatggcactctagattaggacatttatcccagaaaagattggctctgttgagcaatcaattgaattgtgctgttaatactctacataaacatgctccttgttatgtttgccctttggccaaacaaagaaaattaccttttcctaataagaattcttttgcaaatttcaagtattttctcactctagtagatgatcacactagattcacttggatttatcttatgcaacaaaaatttgaagtttctagcattgtaccacaatttatttcttatgttcaaacccaatttcattgcaccatcaagcgatttagatctgacaatgcacctgaattggttttcaaagatctttttgctaaacttggtatattgcatgacttcacttgcatagagacacctgaacaaaatgctatagctgaaagaaaacatcagcacttattaaatgttgctcgggctctctattttcaagccaatatgccaatcaagttttggtctgaatgtattatgacagcaacctttctaataaaccgcactcctacccctcttct

SEQ ID NO: 209281 - DNA, 955 bp, Cannabis indica
taacaaactttttaattaacaaatgatcaattgacatgttaatataatttttaaaatagagcagaccagattataggggcatcaaatgcgtatcttgggccgtgaccagaaattgtactagcaaattatccaagacaacctaaaaactaagaatgtggcttttatgttttgaaatacatgactgatatattaacaaataataaaactaatataaatttttacttctttcatagtttggagaaaaatatacatacaatccaaaaattgaattattaccattacaacgacaatgaatagaacgattgattcacgaaggcttggatgaatgatactgaaaggcctaagaatttttcttccctagcttacttttttaggttaacttgtaattagagttattaacttgttaatactttgactaattttacaatacttatgtaatatataattgtaatttatttcattataatttattttgaagtgtgaatgtgttatgtgaaatgggagataattaaatttataaaggagaaaaggccttttggttgtgccctttaattggccaagggtttccaaaaataccattggcacaattaacatgctcttcacttgaaataaaaatagcactcctctctttttgacacttatcagttgtgttgataaaatttgtaatgtacacatttaattatgtgaaagaataaaaaattatcgtcctttttacaaattaaatttctttccacatatataattaaatttaaatttcacaaattgcgagagaagaagatacaacagacttgcagcgatgacagtcttaaccgagtactctaggagacaacaaagtaagcgaaaagcaacatgcttattatcttcaagacaagaggggtacaacaacaaaagtctttcccgaaaattttcgacaaacacttttgaggggtaaatgttatacccaattttcgaaaaa

SEQ ID NO: 209282 - DNA, 1601 bp, Cannabis indica
ttaaggttcgggtccgggtcctgttcccgatatgggtttagatctctatttgggtcggggtctgggttcggattcgggttagggtcctaggtttgggtcctaggttcgagtccgggtttgggtcccaaggtcgggtttgagtttggttcacaagtttgggtctgggtctgggtctggattcgggtccgggttggggtcccgagttctaatctcggtctttgtttggatttgggctctggtcaaggtctgagtcttgatcctattccctatccctattccagttcggggtcgggtctgggtttgcatctagctccaggtctagattagggtagagatctaggtccggctctgggtctcgagttctgatcctaatacttggttcgggtgcaagtcagtgtctcagtctaggttatgatctccgtctgggtccgagtctgagtccgggtccaggtttgggaccaggttcaggtttgagtcttgggttcgggtccagatatgggtttgggttcaggtccgagtttgagtctcggtcctagtccctatttgggtctagggccaggttttggttcggttctagttacacgtcggggttcgagttcgagttagggtcaagattttggtcgggtcttggttcagttctacttccgggtccaagtttgagtttaggtctaggtttagggtttaggggttaaggatttagttttttttagggtttagcattttgggtttagtgtttagggatttagggtttagggtttaggatttaggatttatggattaggatttagcgtttaggatttagggattagggtttagggtttaagatttaccgtatagggtttagtgtttatggtttatggtttatggtttttggttagggtttagggtttatggtttagggtttacagtttaggatttagggttcacagtttagggtttagggtttagggtttaggtataattaaaaataaacctaattatcatttcttatcattacttatattaaatttatcattacttatcattactaatatttatcattactaatcattacttaacattactaatcattacatatcattacttatcattactaatcattacttattattacatatcataactaatcagtacttatcattattaatcattacttatcccttaaaccttaaactagaaaccttaatccctaaaccttaaaccctaaactctaaagactaaaccctctaccctaaaccctaatccctaaaccataaaccctaaacccattaccataaaccctaaccctaaaccctaatccctcaaccctaaactctatactctaaaccctaaaccctaatacctaacccgtaaaccttaaaccctaatccctaattctttatccctagaccctaaaacttaagccctaaacctagacttgaaaccaaaactgagagtgggactcggacccaccccaagaccggaacaagaacctggattaggacttagacccaaacccggactcagacacaaacccaaaccaagattgggacctaggacctaagattctaagacagacacttactcagactcagacctagatctagacccgaacccagact

SEQ ID NO: 209283 - DNA, 675 bp, Cannabis indica
ttttcttattttagaattatttacttaatgttaaaatgattaaaattgtgtgaaataagaagaacatgacatatgtacatttttatacatgtcacctatcttacttggcacttaacatagcattttggatggaaaagtaaatatcaaagcgcgatgtttgtttggaaccaaacaattagtttgtagggttaagtgttacaaaacttatagttcaggtagtattattgttactatcctattttgaaatatatttgtattctgtgttaaatttttaaattactattatatacgttaaaatattaattgtatatataattttttaaaaaaatatatatgtgtggattagattagatcaattacttttatatgtcaattaacatgcaatccacacaagtgcgaattttagattttctaatccaatccatactgtatgaattaaattggattagatcgtacgaattagattagatattttataagatgattacctcacaatacatactttcgaaaatatttatgaaaatatgttaaatattttaatactgtcaatacttgagctctttctaataaatcggtaaatgtgtaccggaactcaactttttcttttgctactcaccacccagccatcaagagttagaatctctctattgtcaatgcatgaggccttttatttat

SEQ ID NO: 209284 - DNA, 540 bp, Cannabis indica
actatggaggctgaggcaagcagtgcctgagagtcatctggaacaggttttggtgtattattgcttggctcaccttgatagctaagatcaaatcgatggaagcacttaagagaaatgtggccagctctaccaaagacttggcatataggacgattgccaccacgattgttagggttggaacgtcctcctctgcctcgtgcaccattggaggatcctcgaccacgattagtgttgttagaaggtgtagaggagctacttgctttctttaaggcaaaggcgtaattagctgttagattttgaagatccaaggcagcaatagagtgttgttgttcaattcgcatttcttgtgtttgcagcaagaattgaacctcaaagagagtgataacgtgtttggtagtaagagcaactatggcagaatcatattcactaccaagaccctcaagaatgtataatatgagttcatcatcgctgattgcatgactagcagcatataatgcgtcagccaaacatctcatctttaggatgtattcatccacaggt

SEQ ID NO: 209285 - DNA, 787 bp, Cannabis indica
acaagctcaaagtactgtcaagtccccttacctgaaaacatcccgctcctagacactagcaaaagactagaagccatgaatctcacttaccaacctggtatggccactccctcgggttcaaaggcttcgaggaaaagaaacaagcccgactccaaagacaagttcaaaaggcaaacagaaatggtcaatggggagctccgtcaccaaatcaagcgttcccgctcagacaatctgcaagtcaacgaagtctcttctggaagtgcaggccttgccaccgagcaggcctgcctgccaccatgaagattatcagctggaatgcgcgaggaattgggaatgatcgcgcattccgaaacctctcccgtttggtgtcatcttgtaatcctactttgttatttattatggaatctagacttgctaagaatgttatcggttatgcaaaaaacaagctccattttgattccggcttagaaatgcctaggataggtagaagcgggggcttacttttgttatggactaatgatgtaactgttaccttaaattctcaatctatcagtcattttgattgttatgtgtcgtgtgctatttcgaatgagtcgtttcatctcacttgtttttacggctatccggtggattctctcaagcctcacacctggcaaatcctgaataggattggtagagataatccccaagacccgtggcttatcattggggactttaacgcttttcttttttcccatgacaaacaaggggggaatcccgacaaaggcccttcgtcagcttttagaca

SEQ ID NO: 209286 - DNA, 512 bp, Cannabis indica
aaaatatctatataatttttatttaaactaagaatttcgtcatatagccacatagattgccaagaaacaatttaacttattatatagaacaaaaaaatttaaatgttataacaaattaagtaaattttacaaatataattttaaaattattggttatagttaggattgtttttttcttcatatttatatagagtaatagtaatatatttcattattttagtgatgtgggactggtgtatgtttgttcacaaactattcagttattgttatttaaaagttaattaaaagtagatagaaattaataagtagagtgtttaatagagtaatgttagttttagtttttagttttaataaaaaaaatgtttatttaatccaaaaaccaaataataaccaaatgaaccataatgttttataaaaaaaaaacataaaaaataagtaattgatcaataaattataagattgtaatacactcaaaaacacacattatttatacacaataatacttattccac

SEQ ID NO: 209287 - DNA, 835 bp, Cannabis indica
cttaatcgttttcaattctaaaattaatgttaaaatattctattaaaaaaactagactaaaaagatcttctaaatgtaccataacaatacttttaagaagtataatgtagacttacccaactcgtaagtatacgtatcgttttaacaagtaatactcaggtaagtgagatagttcccatgaggactgtagttaagtaccaatcaattaaaatcctgtttctatttgccaatcgaataaataaattttgaagtaaataaactaagcaaaattaaataaaaccaataaataaaagatttaacaatggatgtgaaattaaaggatatgattttaattgctttgattacccaattgataacactaattaaccattcttcttcctctcctatgtgatgacaaattttaaattaacccaaactcttttcaaatcataaaggtcctaaattgcatgccaactactgcgtctttgagatagaacaacatacaattcgcattaagcaataatctaaaagtcacataagctatgtgtatactctcgtttcacatcaaaatctatgtctattcatttagagtattctcaatactcactttttaaattttgtactgagatcatagatcatgcataaggtggccaatcaaacacatgtaataagtacaaatatgaataaatcgcaataatagagaaagaaagaacaatcaaataacattaatgcatagaataatctcagttaatatccatcaaattcttaaatagagagtttagctcataatcaattccataataataataataaaaaaataactataaataagcgtataatgtagacttacccaaaa

SEQ ID NO: 209288 - DNA, 774 bp, Cannabis indica
caattttgattattggcataaaacattttgagttaggagtgcttacaaacagtcttagccttgggacattctagtagagcatgggagacagtttcaaccttgctcttacaaaaatgacaggagggattattgagggattttttatggaaaagattaaggccacaggggaggatgttgtgaaaggctttccaggtgaagtgtttaatttttggggggatttgaaggttccaaacagacttccactaatgctttaagctgtcagtgtttgaggttgagggtgaagtaatgctactaacaatgttaggaagatgataggctgaattaacagttaggatatcagaatggtgatgtccccaaataaggctatcttccagagaggggtcaatgggggtctggaggatggcactggcttggtaatcaggcaaataatgcaaaagtttattcttatttcaagtgttatcagggtttatgaaaaaagaaacagtgtgaccaaaggtgttaaagccatgtaagaatgtaagtgagtgcagggaaggaaaccagttaagagctagtagagggatggagctacctttgcccactttctagataagaccctttttcagtaaatctcttccccataggatacttctccaggtaatagaagagttatgtcccttgggagcagtaaagaaatcattatttttaaaatatctagctctaaggatggaatgaagaagggaatagggattggtccaaatcctccaccaaagaatcccagaccaccaaagaatt

SEQ ID NO: 209289 - DNA, 583 bp, Cannabis indica
gtctcaaaattctattctaaggttctctacaaagaaaaaaaaaataaaaatatattctaagttaggtaatgattttttttttcattatcaaaacttttaaaaccataccaaattacgtagtatgaaataatggtaagaggtaaaaaaagataattttgataaatgaaatttattaattaataaaatttaagtggcgtttagtaatatttttttaattaattttttaatttttaattagaaaaataaaaacattttctttaaaactatttttttttcaattttttttttaattgagaatcaaaatgttcacaaaattataaaaaaaacactttcaattttttttcttaatcaatattttaaattatgatcagaccaaattcgaatttgaattcagaccctagtcccgaacccgaacttggaccccagctccaaactcgaactcggacccaacccagactcagatacaacttaaataaaatcaaaaaatcaaatcaaatttacaaacactttttttttgttattataattaaaaacaaaaatggttataaaatatatttttatcttttaaatgattgaaaataaa

SEQ ID NO: 209290 - DNA, 580 bp, Cannabis indica
ggccatggaggaggaactcaaggttgaggttaggaactagaagtccgaggtgacgaggctcagggagaaggtgagtgccctagagacagctggtctcgagatattttatgacttttggaagtcccaaggaaatctttgattatctgggtgcttccaaagacatgtatctcgactactgcactgctcaggcggcctacggggagcccgaggcgaccactaccacctttcctaccgatcaaaatgctaaggctcctttcgcccagaatgatggttctcaggccccttcaaatccagctgacctatacaaagagcctgggactcttgccgtttaattactttctttttactatctctttttatgtgtgctcgaccagtaggccttcttttgagagaaagtgaccggccaagcggtctttaaactttgaatatatttttcattttttgaataactggctgaccgggcatcctttaatcctgggtttgaatgcttttgttattcacaatgaatttcatcctttgtttataatcatcgtgcaattatgttagttttgtttttcaccaaatgctttgtacacgtata

SEQ ID NO: 209291 - DNA, 837 bp, Cannabis indica
cgtatttgtctacccaaatctagaggaggtcttggcttccgtaaatccatggaattgaatcaggctctcctggctaagtggagatgggcactccttactgagaatcaaacactttgctgcagggtgctgagagctaaatacctgaaaagtaagccttttttttaggctacctataaagattcagattcttggttctggaaaaatgtggtcaagactattcctatcctcagaaagggcgcttgcaagtttatctcaaatggtgaagatacaaatgtttggaatgatctgtgggttgttcatggagatgggttttacccgaagcccattaattcttgtcaagagagggtggataaggtggcggatcttctcacgaatgatggggactgggacctttctaggctcgggaccttgcttgattctgttaccattacaaatatccttaaaggggggaggccttgtggtcaggggagagacaggtggatttggaccaaggaaagaagcggtaaattcactactaagtctgcttatttgattcaggcagaggagagagcccctgccagtgtggtgtcaccggccttatggaataaactttggaactccaaaattctagaaaggcacaaatacctctagtggggcatcctttctaatgctattccaatccgtggtctcctcacgaggagaatccctattgatgatgacacgtgccctttgtgtggggaggctacggagtcgatggaacacctgttcctttattgaatttttgcttattacctctggagatcctccccttggggggtgttcccgatccgatggctctgaggtcggtttgggactggg

SEQ ID NO: 209292 - DNA, 853 bp, Cannabis indica
tgttcatggagatgggttttacctgaagcccatcaattcgtgtcaagagagagtggataaggtggtggatcttctcacgaatgatggggactggtacctttctaggcttgggaccttgtttgattctgttaccattacaaatatcctcaaaggggggaggccttgtggccaggggagagacaggtggatttggaccaaggaaagaaacggtaaattcactactaagtctgcttatttgattcaagcagaggagagagcccctgccaatgtggtggcaccggccttatggaacaaactttggaactccaaaattctagaaaggcacaaatacctctagtggggcatcctttctaatgctattccaatccgtggtctcctcacgaggagaatccctattgatgatgacacgtgccctttgtgtggggaggctacggagtcgatggaacacctgttcctttattgtaattttgcttattacctctggagatcctccccttggggggtgttcccgatccatggctctagaggtcgggtttgggactgggttaaatttttgtggaaccttaggttgaatggggtggaattagaaaaattattcttgtatgcgtgtatcgttgtggacactatatggactacccgtaataacaaggtacataattctcaaccgaataacattgtgactgctattaattctatctctcattgttatacagattatgcatcctgcttattccctccgacgagtactacggcttctccgatttggacccctccgccggactgactggatcaaaatcaaatgtgatgtcaagttggtggagctccatgttcattgcggccttggcgagagatc

SEQ ID NO: 209293 - DNA, 652 bp, Cannabis indica
cattaatttcatgaaaatattatgtagaatgaattttattttgtatttttacactaataaatatgcattttttactacttaacacaacccccaactagcttataactagtccctagcaatttaagcggataacaaaatattaccaagatgaacaaatcaaaacaattctgcctaattgaaacaaaataaaatattggtgtaaactctagaaaatactatataaaaatttacaatatatataattccagatttcgtgtgtatgtgttttcaaatcatattctttgctttaattcattatacagataatattgaaaaatctttaaagtaaaaagtctaaactctaaatccttacaggcattgaaatatttaaaagaggaagggttgtcactcttggacttggaaagatatattaattgacgctcaaatagataataaaaaaatttaagacgacaatgtaaataattattgacccatagataggctaaccaaaactatttttgaaattcaaatgacaagttaactttcgaaatttcattacagtacctagatccaaaataaagaaataaacaacgatttttttttgtgactaatatttacaaaaaataaactatagcaaagttatttttgattgataattttttatatatatatt

SEQ ID NO: 209294 - DNA, 846 bp, Cannabis indica
aacaattcaaaaagctggggagagatggcgggattggaaaaacaccttaacaaaaggtatttacaaggttaaagatgtggctccacaacttcttgagaagccaccgagattgtacgaagacataatcgatgagaccgagtggacagagtttgtggcttcaagattaactaaagaatggggggtgacgagaaagaaggcccaagctagcagggcaaaaaatatttacccccaccgctctggacgaggtggtgcgaggatggtggagttacagatggagaaagagttaggccaccaattggtcaaaattgatagagccgatttatggaagagacttcgcacaaacagtaaaggcgagttggaaggcccagctgtggaagttgcccaacgcattgtaagtttaaagtctaattgcatttatatttttatgtttcataatttaattctaactctatttatttattatgtttgtaggatgacttgcgaaagcaactcgaagagggaacaataagtgtggaagggaagaatgacatcttgaccatggcccttgggacagatgaacatggtggtcgagtccggggcttgggttatggtgtcactcaaacccaatttttccacactccacgccctacaaagaggaagaataaagatgaggataatgaagcattgtcagatatggataagcgactccgtgagacagaggagagtaatagacagcttaaagaacaaatggctgaactcctgcgtatagttcgttcccagcatagtggtgttgcgggtacatcacatgcgtctggttcgggtgttggaggagaatcaaacaaactagcccgtgatgatgacattgtt

SEQ ID NO: 209295 - DNA, 639 bp, Cannabis indica
ctgtggagggtcctccattggaggacggggccaattgttcagatccacctggatgttcatgccatcctggccaactgtagtggctagattcatggtgcttgctatggtggcaggattgaccacatctgctgtgttcatgggaattcaagttgtggctggaacatggacatcaggttctacaatctgtgggtcttgagaagactcgaagatgtagatggtgcaaatggagttcttctcgtgttaaccatggcgtttgatcaaatatgatatcaactcgctctcaataaaagcaccaaactgttaacctcaaaaattgatcaaatgatagtaggggcgtgtaaagttgatgtttgacacgtgttacacaacaaggataataaagtaaataagacaaggatttttatagaggttcaacccccttagttagcgtgtaatgacctactcctcttttagttgtattgatacgtagagataatactattcatatcactataggtgagatctgatataactctctataaggttacaaagcatggatcaagtaggaagatctctaatgagacataggtaaagccttagacgcatgtgagagagaggaggagagagccccttaggagtgtacaagagagagagagagag

SEQ ID NO: 209296 - DNA, 617 bp, Cannabis indica
actgagtttccttttcagcttgtacatctctgactttgcttttctaaagatcagtatatcatcaacatagaatagaaagtatgattattgaaatgcacacatgagtcatactttcttttagtatatccaacattctgtatttaggtatcaaacctcaaattccattgcctaggtgcttgcttgaggccataaagagacttcttgagtaggcatacctcatctgggttcccaatgccaaagccctcaggctgttgcatatagatttcctcttctaattcccaatgtaagaaagttatccttacatccatctgtttgatctctaagtccatgcttgatgccttcgccatcatggctttcagtgaagcttgcttgaccactagagagaaaatctcattgtaattgatgccttccttctgagtgaaccccttggaaactaaccttgcattaaatctggtaggttcattattaaccttctttatgcttgaaaagccattttcatcctaccagcttgtaaaactctgatttcttcacaataacccaggttttattcttcctaagagatggcatctcttcatggatggcttgcagccatgttgcagcatctttacttctcatag

SEQ ID NO: 209297 - DNA, 1038 bp, Cannabis indica
tgtgtaatttcagtttcttcacagtttttctgatttttttttttcgtcattttctagtttagtatcattgcaggtatttttttcctagttgtttttgtccagaattaatagttgtatttttcttcgttttggtttcattttggttgttttgcggttttgtaaacgagcgcgtattttctatcttcatggttcgctctatacagctgaaggcttagtgcatgtggtatttttgtaaatatttgtatgtggactgtataaatgtttaatgggccggcccaaaatattttgtaattttttcctttttgtattttttgttttttcccttaaaaatatgataaagttaattttttttatttgagaatattctgttaagaatacaataaattaaagttaaataaacatttatataataggtaagatgtaaatataatgttaaaaatgcatgagatgtttaccctttcaaaattgaattatatgaaatgggatgtatttatatatatatagtcaagtagctagactcaactatgtgtactttgaactttgaataatctaatagtctaaaagtgactaagttaacaaattacccatcatcccatgcatatatctcaaaagacaattaaggtctctcttaatgttaaatttggtattagagcacacaaattcttcacttacgcaatcccatatatatttagtctcaagtagcctaagtgtcaaattttgactttttgggttgttattttagttgactttttgtttgatttcaaaagtgtaataacattataaaacaatgtgattgtgacaaacaattagagtagaccatttttatacagttttagtgtaatcgcaagttgtctttattaacttaccacatgtacgtaatattaacacaaaacctaaacattattttatgttatcattttagctaattactacccaaatttcgaaaggttcaattcacagtaataatgatttaaataataacttatttattattatacacaaactacaacaaagttagcacttgcctaaattcttttt

SEQ ID NO: 209298 - DNA, 1575 bp, Cannabis indica
ctaaactagtagggtgttgcaatgaagctcgaattttattattttgaatttatttttttattttttgaacaatttagtttcaatttagtttggaaattctatttcatattattgcagacaatttattgtgataattttaagagtattacttaaaaaagttctctttaaaaggatttcattatgagttgcttttataaaattgagctttatattttgtagcttgtatgctaatacaaaattatatttgtgtgtttatcaagcttttatgtgttttatatttattattgatacaaaatctatatttatgaataattgtcattttttaagttaaagattttgtttaataaaaaatcttgtggtcaaataagggtggaaagaagttattggttatgcagtttaaagatcttttacaatgaactctagattatattcaaaacatcacagaatctctttataacacatattatgattagacatagatataatatgtttaacaaactagaaaattagtagaacttattcttgatcctgtatatgttccaatagtaatagatatcactaaagtccctggacataaccttatcttggtgggaggattttaacaaatccagcctgttattatttggatgacactagtgatgatatgttcaagaaaggaactttaaataaagctaaggaaagttaatctaaccattcatatggatagttgtcacatatcagaattatgaggataaaataggaaaccttgcaatgtttattcgaaagacttaagcacaattcctggtccttatgaattattttatagtatctttagtgattacttaatcttaagcaagtatttttatattaatgttgatacaagaatgctatatttatgacttaatctagatggaatttttgtttccagataaagataaatgtcacaactagatgtccctaagtaccaataggaagaggttaaatgcacacttgtgtatgcattaaaccagagtcctactgttgagtggcagccatcgaagatataatccaacaagggaacatagggagacaatcaagaaggaatatctaaaagtgacctatatgttagatgataggggtgtatttagaatccttacatctataccaattcaaaatttaatatctaatatggtgattactctggggtggaggaattattttggaatggtggaaaaccctgtctataataatttagtaccactagctaaatgacttagttgcttctaaaaggtactagagagttattcaaattgaagaaagtttttgactgttttatctctattccattttggatagaatgagaattgtgttctctatatattcaaatgcacttatcaagcaataaagaatttaatttccctacaggagtaatatacatatagaaaaacgatgttccataatttattatgaacacaaaaggaagtaatggtggagaaagctatttctggctagaaccttgcagttcctgttatttgggtacagtcaaacacactatacttgacatgaatataaatataatggattaattgaaaatcacttctagttttatgttagtgc

SEQ ID NO: 209299 - DNA, 647 bp, Cannabis indica
atatatatatacacatatacacaattacaaaggatatctaaaactactgcatgcatgtgcttctgtgctttaatttgggtttgtaatttgtttctgatttttctcataatattatgaaatttaattataactactgcatgcatgccttatttatatatatatatatatatatatttatatgtacatgcacaaacaacataaataaattatatatattatatatacatttaataagcacatataatattcacgtatatatacttaatattgggttaattcacatcagattattattattattacttgatatcaattaataccattttcagctaagcaagctgcttaatatatatctatttaattatttattttttttggtgatcatcaaggaataagtgaggttttttgtaaaactcttctgaaaataataatctaacaaatacttcaagaacccaattctttgttatatatatttatatcttagctagagaaatattaatggagttagaaactaaataattcattaatatatatttacttcaaaaaactgaagaaaaaaaatgtcaattacttactttaattttattttattttgttcttatttacttactttaatatgttatagtaattattattaatttttaaat

SEQ ID NO: 209300 - DNA, 882 bp, Cannabis indica
aaattctaattggtatataaagtatgtaatgtcttaaagacgagtaatgtcatcgtcgttgtttctctgagtctcggaaggatgtgatgacgatccaacaccaagagcagtggggaatggtgaaagatccatgaaaggcaagttgaaacccgacacagcacgagaaaaaatactcaaactgatcttggaatcatctcaggtagagctgttgtatttcatattgctgcctcgtatattgagttgtctgctctgcttcctccacttttttctgtaaggcctcgtactgttccatagtaatggtcagtggggctgaagaattcatggcaggtgctcttttggcctcaattgccttcaatctcgggtgatgggcaaagcctcttagatgtcgagatcgctccccgagtacttacgtcataacagggaagtctcggggatactatgtgggatctccaacagtctcatcaggctcattctcagtgtgtgctagttgagttacagctaattcaaacatttgctcctaaaataaataaataaattaaatagttaatttaaatacaaaataaattgaaagaaataaatagaaattaatataaaggtaaatttacgtaagcttgttgcgcgtattcgttgcaccaattgttgcctttatggtgaaacttgtaaaaagtttccagcgcagttgggagttctcctatatcgcctatatttaagaaaaaaaaatattattattttatttttacaaaaaaaaatatgaaatcaatgataatgtattatataaacttaccccagcgacaacatgtgaaacaataggctttgatccccagtctccttaacattttatcttaccccgactttcttatttttgtctgctcttgcctggaa

SEQ ID NO: 209301 - DNA, 520 bp, Cannabis indica
atgcaccacaaaaattgacactgcactgcacttctcttttctttatcattacttttttaaaaaaaataaaaaaattaaacttttttctttaataaattcaagttttttttttttttgtaaacttttattagtgcactttttaaagaggtgcattaatatatactatttgtgttttggagttctgagttttgtattttgatgtaaatttgttataaatacatttgaatagtttaggtaaattttgtagggatatgattttgttttgttattgtactttcacggattgcaatctgtgatgtacggtagccgtcagatgagggaattatttgatctgacggctgagattgatctaggagtaattagggttaaaaagtagaaacgtaccttgacactcatttaatgtacactgagacacatttaatgtaccacggaacacattccgtgaaagtacatcacgggacaaaatcatatcttttaaaaaagatgtcccgatatatttatatttattttggtatttgaa

SEQ ID NO: 209302 - DNA, 553 bp, Cannabis indica
aatgcagtaggtttctaacatgatagagaaggtcaatttggtgcttccactagcagaacaagaatcaagcatgccacctttaatatacacgaggagggggagatcctcctctaagaaatggataaagttctaagttggaacgctcgagggatcaacaacaagtagaaacagagtgttgtcaggcagcagatttacactcaaaaagttgggctcgttggtctgctcgagatgagagtaaaggcccgaaaacttgggctttgtatgtaaatatgtttaatggatggtgtttttcttctaacatttcttggcatgttggagggcgaataatagttgcatggaatccacatagctttacagtgagcatcttgatgtgtgccagtcaacttgtacacttgcaagcgtccactatagacggtaaaaacaatttttatgctacctttgtgtatgagttgaatgatacagaggggaggaaagagctttggagggatcttgaaagaatccgaaccaaagaagcatgtatagtcttgggagacttgttgggaattattttacc

SEQ ID NO: 209303 - DNA, 507 bp, Cannabis indica
ataaaatgctaaaaaggtgttgtattattattatccctatttttaaaagggtaacacgtagcgtcttcaaaataggattaatttgaaatgaccaagactaaaacccttccacgatggcgggcccaaagatatccgaagtccaaaagtctcaccttcgagacgaagcttgtccagattcgaaaggtctctagcctaagccttccggggacatagtaaactaagccctccaaatgagcactaggactcatccagagagggtattctaagaggcgcctccagaagccctttcttgaacttgtaagatccaattgtaatatattaaagccatacgatctaatacattgactcgtagactaaaattaattaacatccgaaccacgtaaaaattatcatctccattctatacttatttaatttcataagctcttatttgaatcaattttcgaaaatcttagtaaacagtcataatttagcacacttgattaaaaaaaaaacctactcaaatag

SEQ ID NO: 209304 - DNA, 720 bp, Cannabis indica
ccatacctcattacaccatttctttttgattccaggaggagaaaggagaacataccctgctgcaattgtgtattgcctctgctggaatgctgctgtgtcacacttcagcttcagctgctctttgatggctaccagctttttccaataccagctggcatggatagaggctgtgtagtcccacctttttatacgataactttttacaaatgtgcaatatttgtgcgattttcttttccataatttatttgactaaatatttttcatattttacaatatttgcgatatttatgcgatatcttttgatatttgtgcaatatttttacgattttatttttgttgtgcgaaacaaaacaatcaatgaattacgattcaatttacagtactaacaaaaacgcaacacaatcaagaaacaatataccaagagatctcaagtattcaagtaatgagttaagcagtaaaacagaaaagaataacaccaggtttaatgagtttgagccatgtgcaatgctttacatctcagttggaacaacaacaactatatttttattgatatcagtgtttacaaggtaacaagaatcttcacaaatttctcagagattacgagaagaagtttctctcgctagtttagactttctctctcaaccttacactatcacaatttttactcaagcaaatctggtttgaatatcacagactattacaaagatttacaactatata

SEQ ID NO: 209305 - DNA, 1031 bp, Cannabis indica
ttgctgttgttgctagagatcatgttggcagagtctttagagttcacactgctcgggaagatttctcggatgctctctgtggagaagctgcggcctgctgcctggcggtctccgtagccttagagattggtgctaaatttgtgattgtggagaatgactcgagtgtggttatcaatgctctcaacgggaaggtttctcgctgggctcttgataactatgtctcattttgtactaagaattctccttctttcattagttgtaattttatttatgtcagtagaacttgtaatttcgccgctcataatgtggctagatgggcgtttgttcatcaggtttttgggtctatcccagtttcggatttaccaaacaatatcttgtgtaacgaccgcgaggtctaactatttcatttaatgtatgaaacgctttttactcaaaaaaaaaatttaatttatatatatagctaaaaagattagatggatccaatgcagtctaatggttggaaccgatcaaatccaatatatcgaattagatcagtattagattggatcagttgactccatttgattgaattgggttgacaaaatccaatattcaataaataggattgaataaataaaattatgtgaaaataaaagtgcagcttttatctcattcaatagaataatgtgaaataaaattgctgttttttggcaggtgccagcagcaatactcttgaaatgtacaaaactgaactcttcaatttaaattgcattatatgctcgcaaaacaggacaattaaacaaagtacaacaataatacaaagaactgttattattacaagtatctacccgttatttttcactaaaattcatagttaatattgtaatcggaaaaaaatgtccatagttcatacgatgaaatatatgacagacaaattcaaatgtgtaatcttcagattggattgctcactcagaactgccacatggaactgctaccccttaaattcgggacgtaaaaatatcatctataatacaaactagtacttgtatatt

SEQ ID NO: 209306 - DNA, 638 bp, Cannabis indica
cattttcattaggaatctcaactgatacgaacttatcaaaatctttgggttaacaattttttactttggctttagaataattagaaagtgtacatataaaaggcttctgaaattccacaacatacacgtatgtagccactattccaaatatttttcttttaaataaatcaattttagttcttctaattttgctctaaaaaggcatgctaataaattgggcctattttgtgccttatcattatcacttaattcttattttatttttgcccaattataattacatattactgctagaaagatatcaggtttcctaaatttttgtactatttatatcattgcatccatatattatttttgcatatatatctctaggtccaccaataaaaaatattggtaaaataattcttcaaccaattttagaacctctactttctcctaagtttatactatcaataattttttggtaaagctcaacacgaatttcaacttatttatttttaatgaaatttatttattatatttgatttggaacgaattcgatatgtatattggtagagagatgtaacgctaatccatatattcagaatcaactttaatacttttcttaatattggtttttcctcttagcctttgtaggt

SEQ ID NO: 209307 - DNA, 713 bp, Cannabis indica
ttaatacaaattattatataactatgtttttcttaatacaatattattcacttaaattagtgaattttattaatatagaatagagtttaacaaccaagatagttgcaaacagactaaagcctatcctcccttctttgatctgccctactcaagcggcttttgtcccggggaggaatatccaagataacaacgtgatagtacaggagattatccactcttttaacaggaagacaggcaaggagggatattttgcaataaagattgatcttgttaaagcttatgataggttaaactgggaagccattaatcaagctcttgagtggtatggatatccccagaagtttcgtaattgggtcacccagtgcatctccactacatctctaaatgtgtgccttaatggaggaatgatggacaagattatgccctcttgtggacttcgccaaggggatcctctttctccctacctctttatctgtgcagctgaagttttatctagactcttggaagatgatcttgcaaaatgtgtatttaagggtattaagttaagtaggggtggcccggtgctaactcacttattctttgccgatgatttaattttggtaggacgggccaatgtgagtgaagctaaaggtttctggaattgtttggagtcatttctcatatttttgagctttggcttacaattttaactattggctcttgcaggactatag

SEQ ID NO: 209308 - DNA, 537 bp, Cannabis indica
cctccttctcatcatgagggcagtggtggtaacggaggaggaggtggcggtggttgtagtgggggagcttttctcagttcaatgattcagatactaagtcaataaataatggtgttcttggatctaggtttgttaagcaagaaaaatctggaccttgtgatgatgactggaagagctctaaagttgctaaaactgttgatttattatctttaaaaacaatgccattacaccaaggaagtccaatgttgagatttaattcttttggcctccatgctgatactcgccaacaagaacatatgtttagcttctcttcaaacaaatcacaagtttcttttctcaataaagatactgcgttagtggaaagaacctctcaatactcttgcttttcctttctaccaaagactcccccacctctcaaaattaaaaaagcttttgtcattgttgtttgttggataatttcaaccaagttatattctgtcaaaagaaaattcaatgagagagagaatggaagaattattagagaagatacagagcgag

SEQ ID NO: 209309 - DNA, 523 bp, Cannabis indica
  modified_base (40)..(40): a, c, t, g, unknown or other
gtttaatttatataatggtcttttctcaaaaaaaaaaaanaaaaaaaaaactaaactcggacagataatatgtccacatgtttttgactgacataggaagttataagtaattgcatcttatagttactttttgttacatgttttcttgtgttagtccgacgagtactatatatataaaagccgttaattaatcactattcatttttgttattctctgcatttgatcaatgccactcatatgtgagctgaattgtaatggcgaaaggctaatctctattgtctcagattgtaaaatcactttggagattcaatatagaaaccagccattgttgaaggctgctttatttgatcaatgcaaacttttttttgagcattgtagataactactgatcaagaaagatttttgttcttcttatgaaattaaaatatcaggcatgagaaagattcatcaactggagtaagttaatagaaaatcaaattggggaagaaagtgaaaaatcttaggacaaataatggtctagag

SEQ ID NO: 209310 - DNA, 581 bp, Cannabis indica
aaatggtcaatcgtaggagtaaggaaaatatcagcccatgaatgattgatgaacccataatcaagcctttctttgacattagagttttgagcatgcttattatgccaagtgaaacggtcacccatgaaatctaattcagttaagccacaacgatcaatggtagatcggaaagcatcaatttgatgttcatcacgcaaaggtccaccaagtttgtcatgatttgacaaaatttcgttaaaatcacccatgactagccaaggaaagagaggagccgtgtcttttaatttgttcagcaactcccaagtgaaatgtctttgggaagtacagggagccccataaaaaccagaaaaatgacatgagggaccatcaacaaaacccaaataacagtcaacaaagttcttaccataattgagaatagatacatttacattagacttccaaagaaataaaataccaccactaagacctactctaggaacttcaataccattaggaaactttaaagcatttctaaatttagtaatagatcctaatttaagtttagactccattataaagagaacatcaggattacactggga

SEQ ID NO: 209311 - DNA, 732 bp, Cannabis indica
tttacaaaaaaccacaaaaatttgaatttcaagctagtcgcgaccaccaatgggctagtcgcgaccaactgacgaattactataaaaaaaaccccaattttcaccccattaaacctaaacctaaaccaaattttctcagccgaaaaccaccgccaaattacccattcttcaattcttttcatctccacaccaatttctcaatcccaatccatcccaaaagttaatttcactcatcaatcttcactttccatcaaaaatcacaccaaaagttgtcaatttcaccccaaatctgaaaacaccattgttcttcatcttcaacctcaagctttcaagaatattcaacaatggaggtggagtagtggcttcttcgggtttgtaagtatcattctctattacatttgagaaattgatttagaattttggaaattttttgtgaagatagtgattattttagaaattctttgttgatagtgggattattgggtttatattgtgattttggactgtgagtgtgtttatctgaattgttctagtgtaatttagaaatttgggaaagtaaaaatttaaggggaggtactgcccaatttttattagaattatttttgtgaaaacaactgtcattgagatattatggggcctaaaagaacaagacacattgaagaagggggaacatcatcaaacccaccatctacgagttttgatcgaacccgtttgtaagtgaggcggcacaaa

SEQ ID NO: 209312 - DNA, 642 bp, Cannabis indica
ggtaccctagaaagatacacctttttgctcttggttcaagcttgtcttgccttgtgtgagcataggcaagacaaaaaatcctcatgtgattatagctagctgagtttcctatccagacctccattggagttttaaaatcaatggcagatgaagggcctttgttaatcaaataacaatttgtaaaaacagcttcagccaaaaattactttggtagccctgagtatgagcatgcacctaacccttttccagaattgtcatgttcatcctctcagcaaggctattctgctgagggtttctagaaacagatttgtgcctaccaattccaaatttcttgcaataatcattaaactattctgcacaaaactctaatccattatctattctcagcttctttatcttctttccaatttgagtttcaagcatggttttcagttctttaaacttattgaaggcatcatttttgttctttaaaatataaacccacactaacctagaaaaatcatcaataaatgtgagaaaatacctagctccacctcttgaaagtgttctagatggaccccataaatctgagtgtagatagtccacaatggatttggatttgttcttacctaccccaaacttcaccttggttgctttgccaag

SEQ ID NO: 209313 - DNA, 518 bp, Cannabis indica
attgtcgttagggaagaccctcagtttattcattgctatgtgaaaatggctggtcaatcagaagctatgaatgtcacttttgtgtatggctttaacacaggtgaggaaaggaaggagttgtgggagggtttgatcaatctcaaggtctatgctaaactgtgggtaattacaggggactttaactctctctttgatttggaggataggaagggtggcaagaaggtcaatttaaatgatataagggactctaccaattggtttgcacaaagtcacatggatagacttattaaaacaggttcgggttttacttggacgaataaccaagaaggggacaagaggatctattctaaaattgatcacacttttgtgaatgaagattggaatgagaactttcctttgacaaaagctcactatagttgggagaccatttctgatcactgcttgtgtgtggtttcgatgactcccaatgaggacattgggatcaaacctttctaaatattataatttttgggctgacc

SEQ ID NO: 209314 - DNA, 1449 bp, Cannabis indica
aagtctgggatcactaaaccaaaagtttacatggcttccaaagaacctcagacattagctgaagctttacaaagcctacactggaatcaagctatggctgatgagatacttgctttaataaggaatcacacctggaaacttgtcaaattaccagaagggagaactgctattggttgtaaatgggtgtacaaggaaaagctcaatgcagatggctcagtcaataggcataaagcaagactagtggctaaagggtttcaccaacaacctggatttgactttactgagacttttagtccagtggtgaaacccataaccatcagggtggttcttactttggccttagctcgtggttggaaagttcagcaacttgatgttcacaatgcctttttgaatggcaatttacaagaagaggtttatatgactcagccacctggctttgaggatccaacagcccctgatcttgtgtgcaaacttaataaagctctatatggtcttaagcaagcaccaagggcttggtttgacaagctgcatcaatgcctattgagtcttggtttctgttcctctaaatcagatcagtccttgtttatctgttcaacacctcagtctactacacttatactagtgtatgtggatgatattttgattacaggaagtaattcccaggttgtctctcagctggttactgatttgaataagcagtttgctcttcgagatcttggagagttaaactattttcttggaattgaggttaactacacgactgaagggatgcacttgtctcaggaaaagtatgctagagatctcctctgcaaagccaaaatgcaaagtgcaaaagcttcatcaactccaatgaccagtggaagcaaactatcgggttatggaagtgatcctattgataatgtgcaggaatatcgttcgattgttgggggcttacaatatctgaccataactaggcctgagcttgcatttagtgtaaataaggtatgccagttcatgcatcaacctttgcaatctcattggatagctgtaaaaagaatcttgaggtatgtaagtggcacgattaagcatggtttgcatcttagaaggcctacatcttcatccctagaacttgtagcctactgtgatgcagattgggctgcggatccagatgacagaaggtccacctcagggtttgcaatctttcttggtccaaacttggtcagctggcagtgcaagaaacaaccaacagtttctagatcaagtacagaggcagagtataggagcttggcatgtgttgttgcagaattgacatggatgaacagtttgttcttggagttaaaagtttcattaccacgtgtccctaccatctggtgtgacaatttaagtactatacttcttacagctaatccggttcttcatgcaagaaccaaacatatcgagctggatctatattttgtcagagaaaagatt

SEQ ID NO: 209315 - DNA, 677 bp, Cannabis indica
tgttacttgtttcttaatatttatgtgttaacaaaattgttagcggtaagaaaattgtagtattaagtatttttgtcttcaaaaataaaattaaatatttaagtatataaatctaaaatattaaatatttatgaggcaatttttttttttttaaaaaaaattacaattgaattggagaaacccaaacccaaacccaactcaggcgaagctttcctttccctctcaccaaaacccaaacccactccactctccaccgtctctgctccccctttctctctttcctccgggaaatggaaggctccgcgaaagggacagtgacgccgctatcttcgttgttcgcagctgaagaagcgcagaaggcagcgaagcgcgtgtacgacaccatcgtcgagaagcagcagcagcttgaccgcctccggggcttcgtctccgataacgccaacctcattagcaccgtccagagactcccagaccagctccaccacgatattatggcaagaaacccaatactcacctctctctcattctcactcactccttgaaaaaacaaattttatggttttttctaattattgtaggttccatttggtaaggcagcttttttccctgggcgtttgatacacaccaatgaatttctggtatagaaattgaattttcagtggacaatcagtgtttga

SEQ ID NO: 209316 - DNA, 894 bp, Cannabis indica
aagtaaaagggcatgaaggaaaatttttgaagttgaagaagtctttatatagcctaaagcaagcaacgagagcttgggatactcgaattgacaagtactttcaagataagaatttcaccaagtgtcgatatgagcttgcactctatatcaaaattaagaatgaagatatcttaattgtatgcttgtatatgtggatgatttgatcttcactggaagcaactcaagtatgttttgggagctaaagaaagatatggcaaaagagtttgagatgattgatattaggctcatgtcttattacctcgacattaaggtgaatcaagaagacgaaggcattttcatcactcaagaagactattccaaggatgtacttaataagttcaagatggatgattctatccaattagcacacacaaaaaaaaaattcaaagcatgacgaaggaggaaaagtggatccaactcttacacaagccttgttggaagtttgcgctacctaacttgtacaaggctagatattctctatgttgttggaatcattagtcgctttatggaagctccaaaaacaactcatataaaaactgcaaagagaatactaaggtacattaaaggtacgactaattatggactattttattcatcctctaacaattatgagatagttggatatagtaatagcgattagagtggagacttggacaatagatagagcaccaccagattagtgtttttcatgggagatacaacatttacttggatgtcaaaaaagaaccaatcgttaaactatcaacttgtgaagtcgaataaattactgcaacttcatgaggttgttatgctatttggctaagaaaattgcttaaaaatttgaacgtgccacaagaggagacaactgagattcgt

SEQ ID NO: 209317 - DNA, 516 bp, Cannabis indica
attaatgtacgtactgctttgaaagtagatccactgaggtttgggtttgcttcaacgtagccagtgagtactgtataaggcatataatatgatgctataagaaaattaatgctattttcgtaaggattaaagggtggtcttatgtctctcccaaatgcaatgtctatggttcgtgcaaatactgctgaacttatatccaatagtggccttgggaaccctctcactgtatttgcaatagctctgcatgcatgcatatatacatatttgtatcaatatctataaataattagttacaaattaactttatcaattattaataattaatacaattacgtatagacctgatgtttccaacttgctgatatccgaattgtgtaatgatatctgctgtgagattatccaaattggcccttgtagcaccaatgggaggtgggccacctttggccagttgtggatcaactctgtccaaaccataacccaatgatccgtacaagaagaattcagctgccaaaaact

SEQ ID NO: 209318 - DNA, 604 bp, Cannabis indica
taattaaattcttatctaactatatttggttattggttatggaagataatggaagataagtttttacccctttaagcaatgaaaaattaattaggaaatttgtagaattgccactatctatagacaccatcaaattcattcatcacatttttgttaattatcataaaaccacatgtattttgatagaaatgtttatatataattaatgtaaattatgtaattataggcttattttaatggtttcacatctagaaaaaggtcaaaacttttttttttttttagttaaagaagtgttctttcttaattcgagcaatcgttcgtaagaatagacatcaattccaaggaacactattaatagaaaacatacgttcagctaaagaaatagagtgtcgggcaacaaagtgcgcaacacaattcacaaaacgattaacaaacaaaagcgaaacattaaacaaactatcaaggatcttcttgcaatcttccaccactgaaccgaaagaagaaacaaacacctctgcactacgaatggcttctgcacaaacgaggctatctgtctcaacaatggcctgggtgtaggtgttgtttttcagccaactcaaagctt

SEQ ID NO: 209319 - DNA, 1057 bp, Cannabis indica
acataacatacatactcgtgattcattatctattcagcatgcatgtatagtataacgtctatacgaaccgtatattacacaatataaaaatatcatagcatcttgccatgaatagctttatcattacactaatcaaatattcattcaatacacaatcacatattttcagtgccttgtaaagcactctaattttacatccctatatacacgtaatcttacatcctgtgagtcactgaggctctgcaagaaaagaaactagtttcttaagcaatataaaattcattcagtcacattataacaaagatgtatccgattacaactcatcacataataacatgcgtaattcatttcacaacttcgtaatcacacaatcctagtactttataaagtacccttaccactcgtcaaccacgagctacatatgtcactatcgttgcccgatacagcaaacgataagtaagaaacctatccacggtttcaagaataattactcataacagtaatgaccgttaccaatcctcaccactcgttatccacgagctgcgtatgtcactatcgttgcccgataaagcaaacgataagtaagaaacctatacgcggtttcaagagtaattactcataacggtaatgaccgtatcttaattcattcacaacaacagtgataaccgtgttcttccctcattcataaaaaattcacatacgagaatattcatttctcatcattacctcgattaccatcgagttacaacaaatacatattattaatctcgatcataatcaagaccataacaatcatatcattaaccatacacagtgcttaatacttttcttacctcaagtccaaagtcaagtatgtgggccaacttgagtggaatgatgctcgacaattttgagtcctatatcacgacaaaggtaaatcaataagggtctattccaaaacactgtctaaaacccgcataaaataacctagggttttctaccaaatcttatggtaaaaaataccctaaaataaaatgtattttttggctctaatctgtctgaaacggacacccgagtg

SEQ ID NO: 209320 - DNA, 519 bp, Cannabis indica
aacgaccataaacgaccttgaatttacactatgcgaccatcatggtcttttatgttcttcaacaaactttaaagaacttgaatttgctctgaacgaccataaacgaccttgaatttacactatgcgaccatcatggtcttttatgttcttcgataaaaacataactttgctcttaacgaccatgaacaaccttgaatttatacttgtatattgtgtactctaattctttaaatagttaaaaattaacttataccatgtaattcaatgattgagttatttaaaatatgtaactatatagtcaccaagacttatacaaagtactttaatggtgaaatccctacacaattataaaatatactttagttataatctatagatggttatacatacatattttataaaataattaattttatatattgaatctcatatatatatataatgtagttaaataatcacatagacttatacaattatataatatactttaattataatttataaattatactaaatgat

SEQ ID NO: 209321 - DNA, 1355 bp, Cannabis indica
gagttgaaacaaatctaagggagagtgactgtgttttcagatagtcagtcgtccatccatctttgtaagaacctggtttatcatgaaaagagcaagcatatagatattagcttctactagattagagagaagatagaagaaggacttgttaatttagagaatatcagaatggaagataatcttgttgatgttgggactaaggtcttgacagtaaacaagttcaagcattgcttgaacttgatcaatttcagaagttagcatactaagattcctgaaatagcacccatgatagctactttctttcttcatcatcgtcatacctttaatttgaagtaactaggtcaaatttgtagtatagttcttccaaatgaaaaggtcttcaaaatttattcctagaaagttaagggtctcccgaatgttgttcctagatagctaacttttccatctcaaaaggtgtcttgtggaatgataattgagttcggaagagagttgctggatgactatcatgtccactccgagttcagtcttcaagatagctagccctcctttggaaaggagtcttggatagctaattattcttccgagaaggttattatccatggaaggcagtttcgaatgtcgactccagctggttctatcctatccggaagcttcatcagcgaagtgcctttggtccgtgatcccggtagctcgtatttattcccggatgcacttagactgatgctaacgtggagatcacgctgaaagggagagttggttaagttaggaactgactaactaacttaacaaccatcgattcttgcaaccaccgactttaggatcttaatcttaagcttataaataccaccaacacttaagcattagaatatgacaaactgaagaccgttcagattgagattgagagtcagagagagaatgagactgagaggtagagagagaggtactgagaaaagagagagattgggtttgggttttgtatgacgaatcttctgtagatgaagaagattcttgggtaagagtgtgagagttgaaacactttgagagaactccacagagaatttttctcgactttaatgtaactatatttgtcaatcaataaagaagatttagtggtgttccagaactggagtagagccatagatcacatcaatctatcggacttgagccaatatatattttggtgttgatttcttattttctgcatttattgtttctagtttttcatactctgtttgcctctatttttccatttgttttcgatttgttaattttatcattgcgaattatttgattgtttaaaatgtagttgttttgattatgtactattagtcataattttcctattattattatta

SEQ ID NO: 209322 - DNA, 628 bp, Cannabis indica
gatcgttttaatcgaaatagtgaaaatctcacatttctgatagtggtacccctttgtgaaatgtggcccggaccaatctcggaattttttttgccactagtcacaatcaatttgtactactaagaaatgaatatgaagaatggttttgggttaaaatttgttgaaatggccccctaattgaaaatattcttcttttcaggggaaatttttacaagttttttccttactcttacactcgttagttatctgttaaaatctcaacctacacatctcccaaacgagtactactagtaagttaaactttacaacggggggggggtccccttaaggccccaaaaggaaccccggttttggttggccaattccaaccttttttttccttccttttggggaaccaaccggtttcggaaggaaggaaaaaaaaattttaaggttttttttccttttggccaaccttaaaaccggaattccggttttttttaaaattccggaaaaaattaaggttggaaaaaaaattccttccaaccaattttttacgttcggtagggtaagggtcggtaaaccccggtttcgtacgaaaactagggggtaggtacccggggaccaatctcggaattttttttgccac

SEQ ID NO: 209323 - DNA, 774 bp, Cannabis indica
ggctcttctatgatgagatcacaacatattatttttctttttgtccctataataattttaaattgtatcaacttttgatggtgattaagtctattcatgcacatagtaaattttgatattttatgtgtattatgaatttcaatttgaccaaattaattggtgttaaattctgacttttggcctttgttgtaacacgaatttttttctttcttgaattttatcttcatgccatacattatacatacaatatatatgtaatgtaatacacaactaatttcttcaagaactttttataacagagccattaatacgagttgaagagatcgaccaatttttttattataatgcttttaatcaaaattaatattttgaaaataattttgataacataatatttatctttatttaagatttctattttcttctttgattacgtactctcatattgacttattttctgaagtctaaagataaaaaaaaatacaaaaattatcaataagaaatttgtctcattgtttaagatttttattttcctctttgattatgcaccccaatattaatttattttttgaagtctagggaataaaagagaaacataaaaatcattcacaataaatttagcagtataacaacatggagaaattaaattttcttattttacctttggctatatctcgcttttgaagatattttgtagcttagagcttagatcaaagtggaccaaagataaaataaaaaaatattggagaagaaaagaggtttagattgatgaaa

SEQ ID NO: 209324 - DNA, 223 bp, Cannabis indica
accgtaacatggcttagctagttgggcattacatctgcacttcaagagcctatagacgcttacttggtgggtctctttgaagacaccaatctttgcatgatccacgctaagagggttaacatcatgcttagggatattcaattggctcctaggattagaagcaaggaagcttaggttttctaggtgatgacattcctttgtaattgcttgcttctcattaata

SEQ ID NO: 209325 - DNA, 508 bp, Cannabis indica
gttgtgggaagtaccaaatattatggtggctagttagttggattataatgtgttgatgatatctacttttgagttggaaaggtacgttaaataatattgaagtgagagtgatatatatgatcataaaatatagagaaatgttaaaaggtaccagtggtgcctagcattatcagtatcgttattggtccaactaagtatcggatcccatataatttaatataataatttttagagaatatcgttaactaatcgcaacgtgatatgtcgagaaggtgctagacattactggtgtcttatagccctaaaatataataagccattagattttttactgatttgcttttcatcaatgcttatcaaaaatgacatttgatttgtatttagtcgagaatatatttaaattagctgttaatgaatttttattcataaatattaataatcgttggttttagaaagtgacacgtatatccattatatgtattcatgttattcaggtccgacttttttt

SEQ ID NO: 209326 - DNA, 623 bp, Cannabis indica
atccaacaaagtacataccaattgtcgaattagaaaactgccatctcaagcgccgcttggaggaggcaaactagcgtaatgctgagttggagcgtgaggcaactgcgaccagggcagaacaagggaataatacgcaaaatcaacctgaccctagagagagaggaccacgaggcagacctcgagactcacgaaccagtgggtaggagacaactcaaggaaaccccaagaatgctcagttaagacaacatggggaaactgggaatcccttgaagacaagcagccaaattatcaaccaggaaccaaggaacaggaaattcctcatagaaataagcaaaatcctaggacacaacgtggagcacgcgggtcattagtgaggaatttccaacgttcttcccaaactcataaggaaggagctcacacaaatcccggtggggggaacgagacgaaccacacctaagggaaaagaacgtggtgtgaacaggcgagtgttacctcaaggcacacaataacccatagtcgatcaatgcgaggaggagaaatactcgtcgcaacaatgatcaagaaggcataggtacaagcaaggatgcaagtcacttgaggtgaggtccatgagcaggatacgg

SEQ ID NO: 209327 - DNA, 871 bp, Cannabis indica
agagccaccaaaaaaataccgatccaaaaaaatagagcaaaaagagccacttgtgatcaaggatagtgaaccaaaaaaagaaccgttatgatcgagttgtctaagatggtgagcaaataaaatagctaccatcttgaggggatgttagagagtcccacattacttgtgaaaagataatagaatatataagaggaatgtgctactcctcctattgccaattgattttgtgattaaaccccattcatcttatcctcaaattctaacacgaatattaattattaataagtaattatttaaaaaaatctaaagaaaattcttatgcagtatttttttttcatataatgaattacattatagttattggttgtatatattccaaaaattctaaataatttaatgtgctgaaaaaatgattcaagtaattacagaagtaaattataaataatttatgtgtggaatctattattttgaattttgatatcatgaattattcaaaaaaaattaaaaacatctcggatgcatcatgcatgcaagcttactataattataaatatacactgtaaaaaaaaaattggaatataatttttgttagtatcaaaaacagaataacaattacaaagtaggagtggagcaaaagtaatacctccaattcaaaaaaagtaattaaagtaaaatattatttagaatgtaaaagaagaaacaataataatgtagttgggacttttcatgtgttaattattttgtgttctttgcgtgaagggaaggggaagagagggaagcttcttttgtgaaagtgtactaaattgaattatcattctttctctctccctctttaacttaaatacaaatttgtaaataaatataaatatat

SEQ ID NO: 209328 - DNA, 522 bp, Cannabis indica
gaacgagctttccaacaagatatgtgaaactcccaaaatagagtccgaatcgaaaagttacgaatattcaaataacacgttgaatttgcccaaaaacaatgggcgggccgcggcactccccacacgggggccgcgacacctgagtagaaaacccaagatttccacatgggcagactgcccaatgagtggggccgcaacgcaagaaaccccaaattttcagctcgaacccaaggccaaaacacacctaaaacatcccaaacatacatataactcaaaatcatattccagagattattggataacatgacagggcgttaaaacacataatttcaaacttaattctcatctaaacatgtatcctaaactcagatttaatactaatcaaaataagctcaacacttgggtaaaaatcaacatatcctcacacaaagctgttgcacattaaggtcataaaacaatttcaaaactcggcatgcttttctaaccaacacaacacaactttagcaaccaagaatcccaatt

SEQ ID NO: 209329 - DNA, 811 bp, Cannabis indica
caaaagtttatcttctttctcaattaaagtacactaatgactttattgagcgtgctcgccttactgatactagagttgttgacactccctctgagttgaatgttcaatattctccttctgatggctctcctttggaagatcctactttgtatcacaccattgttggtagtctagtttatctcactattactcgtctagacattgcatgtgttgttcatattgttagttagtttgttgcttctcctaatactgctcactgggctagtagttcttcgcattctacgctatctttgaggtaccatctttcagagcctactgctgccttccatctcctctttggagtaacgagcttactgtgatgcagatcatggtcgtgatcccaccgaccaaaaatttatcactggtttctgtatctttttaagagattcctttatttcttagaagagcaagaagcaatctattgtttctcaatcttctatggaagttgagtatcttgccatggcgtctactactaaagaaattgtttggttgagatggttacttgtggatatgggtgttactcactcttgtcctactcttatgtattgtgacaatcaaagtgccattcagattgctcacaattcagtttttcatgaacacaattgccattttactcgtcaccatctgaaattgggcaccattactttaccttttgttccgtcatcgttgcagcttgctgactttattactaattcacatacaatttcttgtttttgttttctgttaggcaaactctaagtgcttcttggagcaacatcatgagtttgaggga

SEQ ID NO: 209330 - DNA, 1007 bp, Cannabis indica
gtgtctcgtttataatacatgccaaaatcatgtgagctgttacatattcagctcacatatagctttttattgttttatgagaaaatctcatttacaactgttattttgatttttttcttttaaagaaaaggtttttcaatttcttgactttatatttgtcaaaagacagttttaatcaattatcctttccttgtagaaatttttaataaatttttaggtttgtaatataatatatatttctaggtggactctagttattatacacatataaatgcccccaagtaattttaaagaaatatactttgtaattacttgaacaaattttaattttattcataacaatcactaatcattatagagataaatataacatttacacattaaattcactagtaataaggtcgtaaatgttcactattctattagttctttattagcgagccgttaagccaagttaatttgtaaattccggttcctacgatagcttcaataatatatggacttcccattttgggttaaatactactgcacctggatctcgcatatttacaaatacacgtcttaacacaaaatctccaactactaaaaagcctttttcaaactcttttattaaatatcttgttattcggtgttgaaaggctacattagttatctgctactcattgagtctttcttcaagtaggtccaaggataaattcaaaagttcttagttttcctcttgattataaaattcacgcttgtgggtcgcaatgttaacttctactggtaacattgctttcaagtcgaacaccaatgaaaatgaagtgtttcccgccattgttttctctgtagttctatgggcccaaagcacttgtggtagctcgtctacccatcttcctttagcagagtctaacttcttttaatagtatcttttaaggttttattaacaacttctacttgttcatttgcttgaggtcttgatactgatgagaagcttttaataattttataactttcacataactcaa

SEQ ID NO: 209331 - DNA, 761 bp, Cannabis indica
ttacaataaaaatgtaaccattgaaacctcttccattaatatataagtgatttgcttttgatattgttacttattagttaaagagtaaattatggatttttcttgacattaaaacgtaaataaaataatcatatacagaaattggattaactttacggaaaaattgtgtgtttttccctactcttatctttttatccttaatttggacaaaagatgacttgtttaggatactttttaattgtttattttttcgttgacagagtttagaatagcttcatgcacttgagttgagatctcttatttttaaaataatattcctttattagaatacacctagtttacttttttttttcttaattcaaattagaaaaagtactgtgtaaaagtacagtactttcataaaacgtttataatgaatctaaatcggataaaaaaacaaaacaatgcaaaagtgatagttggcacttgaagtacttgcctttaaatggaatgagaataatcaattagagtaataaattgatttattctaattatttttatttatataattataaagataattagaatattttaatttttttttggaaaaacgtgatttggatcacatcaggatatttccgagaagacttcaacaatcggtgcttggaacctattcaaacaggtataacttattgtttagcttaagggcatgtttagccaaaccatgagtggcagtgttatctttgcagaacaattgagacaaaattgtcctcgaaaattta

SEQ ID NO: 209332 - DNA, 570 bp, Cannabis indica
tattctaatggctccttcttcaccgcacagctggggtctaatccaagttacgtgtggcagagtgtgttggaagcccaagatctaattaggaaaggcactcggtggtgtgtttttaatggggaggagataaacgttcttcaggaaccgtggctgccatgtgaagatgatccttatgttcactcaagccatcctagtttgagtgaagctaaagtgtgtaatttaatggccatggagggtgggagttgggatgttgagattttgaatgacttgtttaatgagcgggaaaagaagcttattttggatatctcgttgaatataggccacgacagtgataagcttacttggagctatgaaacgtcaggcatttactctgttaaaagtggttataatctacttcaaaaactttatggaagatggagtgccaatgaagatgatctcaccaagttttggactaagttttgaaaactgaaaatccctccaaaagtgaagaatctggtttggagagctgctcgagaatgtctgccgacactgcagcagctgaagattaagtgagtagacgtacaaacactc

SEQ ID NO: 209333 - DNA, 922 bp, Cannabis indica
ctccagaagaaattccacctgtttagcgagatacggaaacctggaagttatacgtggatgctgcaaccaacgagaagggttcgggtgcaggggtaatattaatattgccaaaaggctttaagtttcactatgctctgaggtttcaatttgacgcatcaaattacgaggctgagtatgaagccttgagcgccgacttaaagatagtcgagccattgaaagtcaaaaacctcatctgccatagtgattcacaggtgattgtgaaccaggtcctcggggaataccaggccaaaggcttaaaaatgtcgaagtatttagagaaagtttggaagaacttggaatgatttgattaaatcgaacaaatcccaagagaacaaaactccaacgatgatgctttagcaaaactggcctcacagaacgacttggatgagttgaacttggttccggtggaggtactaagcgagccaagtatatgtgaaacggaagacctcgagatgatagacagctctcctaaatggatgactcctattatcaattactcactcgacagacaacttccaaatgacaaaacgaggcacgaaaactattgtattcagtgtctcgctacacaataatcgaaggaaaactatagagaagaaggtattggatgcccctactttggtgtgttctccctgtagaagtgtacaaaatcatcagagagattcatgaaggcttctgtcgggatcatgcaggttggaaagtctgtcgaaaaagatcattagacaaggatatactgaccaacgatcaataaggcacccacgagtttgtcaagaaatctgataagtgtcaaaggttttcgcatatacctcgcgtgtcgccactagaactaacaatgatgacctcgtcctacccatttgctatacgggaaattgacttaattggggca

SEQ ID NO: 209334 - DNA, 639 bp, Cannabis indica
tcgatgactttttcggcgccgaccgcaactccggtgactttctcgctgccggcagcaactccggcgactatgccaattccgatgagttgtttcagttaactttattgtttagcatttatttttcgttatgatttttcatagtttcgaatctggtttcagagggttcataagtttgaaactggttttgcaggtttaactcatgattaattactgctaaagcttgatttttttaaaaaatttgcgcatcatttgaattttcatatttgctaatgtttgaaaagataaatgcatgtttgactttaaatttaaagtctcaaccactctagaacttatttgataattatttgaggcgaaatcgataaattacacatgattttaagatataatataggcaatttgtttggatcgattaagcttttcaagtctaccctatttgttaattccctagttttacccaatttgagcctaaatattgacatcttatttttcttttaaccatatacaataaccttttgagccttaaaaaaaatctcttgttcatcatttttcataccatagtatattgatcttttatgtatttgtaaaggtgtgagagttttgttaatgaaaagatatccatgattatgtataagtgatgat

SEQ ID NO: 209335 - DNA, 529 bp, Cannabis indica
cttgatatttcctttttgtgtatgtttggtatcaaagttagcttggtttattttgatttaaaaatctgagtttatgaatggttttggttgaattttgggtatggtttgattgaggttcgaatttatgaaaaagttagcatttttaggccttaaaatggagtttttgggtgttctgaactcagtcgccgcgacggccactgggtttggcagtgagaaagtctgtttttcctgattttgttttagccataacttttgactcgggaatccgtttgggacgttctttatattgttggaaagctcgttttgagctctattgaattatctgtatttttaattccatgtttatgaaatgtgaaagtggatttagggatcaaccctatgcttgtaaatctcaaaatttgtgactaggattatcggcacttggtcaggagcactcgggggctttggaatctcttcacttgagggacattaggtaagacagtagttgcacgtagagttatacacgatggcacttatgctgaaatattat

SEQ ID NO: 209336 - DNA, 609 bp, Cannabis indica
aaatgtgaaaacgtgaaatatgaatttgagccaccgagttggtctagagaaacggatctcccgagtgtaacatgacatgaaaatactgagtttaccctataaaattattgacatgtgaaacggcacaacataacttatattttttcatgacacacgagctctgtatttttgtgggacattttaaaagaaaaatttgactaattatgtataatttatgtacttaaattaaagcgctaaatttaaatatatccaaattgttaaaaattggtacactttatctatcttaagctccaaaatactcttctcatttgaacaatcgtctctctctcttcacccattctctctctctcttcacccattctctctctctctcgctctcagaactataccctaaccctaacgaatcaacccacaaccaccacgcaaaaccaacagccacctcaatctcttctctccacgaccaccgcgaccccactcacgagccacggacccaacgactactgtacgacccaacggcttctccctattttccattttatattaaggcatttccaaccgttgggagacggcctattatgatgcaagcatgtgtcatgttatgatgcaagc

SEQ ID NO: 209337 - DNA, 616 bp, Cannabis indica
gtaaaaataacattgaattcagcctagaatttgtttctaggataggagaaccttgtaatttatttgtgtgattttacctttgttaatgaattgttcttaaagattcaagaaaatgaattagatttaagtatagtactttcagagagaaagagagaacaacattctaatccacacaaactgcatatgtcaaaagttgtcgacttgttcgattacaaggaagcaaaaacaacactctcatatgataatctctcacagatgaaaggggcttcccattctaatgttgttggaagcataataaaagatttctatattagtttcttatggcatagaatttctgaggagaatccacccaagaaacaaccactcatacaactaataagagtaaaccaaacaacataaaagcactaacacataaaccatcaggcaggcactgcctacaaaactgtaatcacccaaactaaacacatcgaattcctcaactcaaagccttcacttcgcaacaagtaaatttcatactactgttattacttcaattcaatatcagaattcaaatccccaattcatggaaatatgtttaatcacgcaatttgatttagtctcacttttcgtggatagt

SEQ ID NO: 209338 - DNA, 948 bp, Cannabis indica
tgtgttacctgcaccattaccaagatcagagttgggaatgttggtttgttgtccagcaagcaggttgaggagctgctggtactgtgcagcagaaagttgaggcagcagtgcatgtttttcactttggtcatcatctacatccttgttggtttggacttgatttgcagtagcatcttttgatttattcttgttgtaaccaggagggtaaccgtggattttatagcacctctcaatagtgtggccaagaacattacaatgagtgcaaaaaggcctattctttttgggaggatgagacttatttccttgagaatctggtttattcgggttagatttttctccttgaaaagcaaaagcaatcccaggattgggatccgaaggagtgtttgagttactcttttggttttcttcttgagtgacaaggtggaaaaccctattgatttcgggtaagggatccatgattaatatactcccacggacttgggaaaaagaatctgaaagtcccataagaaatgacattatatgtccatgtggtgttctaagcttcttgacaccaccacaagtgcagccattacaaacacaagctggcctataattggacaattgttcccagattgttttcaatttcgtatagtacatactgaccgtttgattctcttgttttaaattcattagacttctcctaaggttgtatatgtgaggaccatttcgttgatgaaaacgaaccttaagatcagaccaaatggcagcagcggactcatcgtacaatatactagatgaaatttctttagacacagaattcaaaatccaggaaataactatgttgttgttcctaaaccatgcattgtacataatatgatcagaagaaaggggtttaggaatggtaccatccaagaatccaagcttgttcttgacggagatggccaagatcattgctctgctccaagacat

SEQ ID NO: 209339 - DNA, 543 bp, Cannabis indica
ttttttctttcattggtggaatggatattacatgtttaattaggttataatttacaagtacgtgtcagcgaggaattaagatggccaataggatatagacacttttaattcattataacgaaggggtacttagtcaaagcatcaaacggcggctttttggtcattgattgtcttcatggattcgaacattacaaactgatggccaatatttgtccattgtattatatgtgatgtataaacacaatcattgaacagcataatcagccggctattgccttaaattctccattcattctattctaaaaacttattaactatgtaatcagcctaattaattgccaaactttcttgcttaccaacctaatccattgcccccttctctctctctctcatttattaatttgccatttatgtcaactttattaatatttatttatatataagacacaatgcaatcgtttgaatatgatggaaactttcaggaatcgatgcaagcacacaactaatcatatttatatggaagttgttacgcaagctctcaaa

SEQ ID NO: 209340 - DNA, 675 bp, Cannabis indica
gcatatgtatttacatgcttagcatgcatgtttatggagcttgttagattacattgagagcggtatcagtatacatagaattatactggatactgatagatgtatctttggctcaagtacaagattgacgctatcacatcggtactactagagtatgactagagtaccgagtataggctgatattatggtcgatagtacggtcgtttgaacgttctagactcagtaccgtgttggacacggggataggattatggttgggtgtatgggcccctaattataatctcggttatatttatgattatgattttcttatgagtctgtcgactcacacctattgtttgcgtgtataggtaaggataaggctaaggttgagcagctgtgagagtgagcatgtgaagattgtacatgtcgggatggttaggtctggagcgtacggtctttgggacagctggttgtattttgtatagtcggtaggcgacaacttttgtattacgtactttgtaatagttgtaaatattttatactcgggatcccgattatatatatatatatatgtttttcttttgatatttacctttatttaagtaaaagttttaattactcagaattttcaattaactcgttgattagcaacgaatgtacaattaatacaaaaatcacgataacacgcctaa

SEQ ID NO: 209341 - DNA, 684 bp, Cannabis indica
cacgtggaatcgacttcaggtattcacttgcaagacacaagccgaacaggatacttcgtacatgcactcggacgaagtcctctagaccaagcagtgggaaatccgcacagaacgccaacacttagcgaattcatcgcatcgtgagtcatcaaggaaatccctataactttgggatcagattacagagatacggtaagctatccaaatccctcccttacacccacgaaatgatgactcttatacacgagtatgtcactctggctgcttcctagactgatgactggccctacagaccaatatgagtctttctagcgttctttgtcctcactcgcccactttctgggaaaacttcctaagagatcacccatcctaaaattactccaagccaagcatgcttaactgtggagttctttcatgatggctaccagaatagaagatgcatcttgttgatataggtagtaccaatcaatccatttaagccatcttaaactatgtagtctcatacctacacagtctcataataatcccaattcacctttcccaggtggtatgggattgcacagcttacccggtatttccctttacagatcatgggactactgactatcacaatcacccccttacagggttcgacgtcctcgtcgacaacacttctggttaagtcaaagctctgatactaatgcc

SEQ ID NO: 209342 - DNA, 628 bp, Cannabis indica
atagcccatgaaaacacaagcacgggctctaggttcgaatttggttctatgagctgtaatagtggaggcaaaaacaagacatccgaaatttctcaaatgttcatagttgggaggaatcccaaagagcaattcataaggagtcttgttatcaagattaggggtaggagttctatttataagaaaagtagcagtcattatgcattcggtccagtaagaaataggtactctagattgaaagaaaagagatcttgcaacatttaaaagatgttggtgctttctttcagcaacaacgttttgttcaggagtctgaatacaagagtaatcatgcataatcccaagttttaaaaaaagatctttgaaaactaattcgggggcgttgtcagactgaaaacgttttagagtacatttgaactgagtttgtacataagaaataaaatctggtataatctttatcacatcagatttttgtcttaacaaacatatccaagtgaagcttgagtaatcatcaaccaatgtaagaaaatacttgaagttagagtgagaggggatatggtaaggacccatatatcacaatgaatcaagttaaatttattttcagcaaagtgattgttctttggaaaagacaatt

SEQ ID NO: 209343 - DNA, 668 bp, Cannabis indica
tggaatcaaaggaataatgttgttcatcatcagcatactcttcatccggatgatgtttttaattggagtgttaattttttcttcaagtacttggatatgcagcaggttcaagctcaaactaccaattctgccattgctcaacgagatacacaagggctgtttctatggattcttttcaaatttatacagatgcagccattgatcttaattgtaggaaatatagcattggagtggttgttttggacaatctttatcaggttaaagcagaatttttcaagtcttttactggttgtgttccccctacagtggcaaaagccaaggcaattttacaagctattcaatgggctcgattgcttcatcttccagtagatgttcttaaagcagattgtaaatctattgttgagaagcttgaatcttgtaattggggttatagccttttggatgacattctgatttgtgtcaaaaacttattatcttccagcctaaatatgaatttggtccatgttagtagagagtctaataaattggctcatagagttgttaagtttggttttggacttgataatgagttagtatgaaatggttctttaccttccttttagtcttgtgtgttttgtagtgtttgttgtccttttaatgcacaagatttccttaaaaaaaaaaaaaca

SEQ ID NO: 209344 - DNA, 1480 bp, Cannabis indica
gtagattttcgttaatcaaatttaagcctgacaatgataattcaacacagaaaaaatcactactacaaactaactatttagtgacccgcataaaagtgtgggtcactaaagggttaagggtgagttatagtaacacacataaaaagactttaaaaatttagtgttagtgacctataagttgggtcactaaaaatatgagcgtcactaaatattaactccaaaaatttctattattttttttgaaaaaaaatattaacactatagtgacacgccaagtgtgactggataaatgtgtgctgacccacttggcacgtcattatatcataatccaaatttaaaaaaaatatagctattattaatattttaaataaaaaatacatatatttttaaaaaatagtgaaagataaggtagctattaattaatacactttaccatttgtttcaacacatttattaattctcaaataaaaaaaaccctagcaactatctctcaagccgcctcctccctttatcattgttcctttctctcggataggcggacggtccaggcgagtggatggacaggccggcaagcggacggacagcgacgacctctcaccttttatcctagacggtagctacctttcccatctctatctctttcggttctttgtgtgacaattattgcttagttccattttcggtcgtttcccctcaaccacgcccaggacagtagcttgaagatctgaacaaggaccaccgacgatcttttcatttgcaggtataatagttgcctcaatactgctcttgtttttgttcttatttgagatcgttgatctcctcttctgttcttgtttttgttcttgtttgaaagcctagcaagaacttttatatgagccttttaagtgcctcactaatgtaaaaaaaaaactcctttctctttgtctcggcaaagggagaaactaactgaaagtgtgaactaacatggctattggcgaagaggacgactgtggatactttgaaatggttaagatgaagaatcaaaagtccaaacccaagaggcaaactcacgtaagtctctcactcgctcttctcttctcttctccagtccattcatgttcttcttaaatgtttatggttttgatcctacgaaaagaattgttccttactctactcttaaagttttggatttccttttgatttttttactctactctcaaagttttagatttcaaattggattgatgcaattagagttgggttgtggaaatggtcactttcatgtaattgattaattgtggatacaaaaaaaaaatcaagcctgaattttctatggcagatattggcaagacgtgaaacatggtgatagaagttgtgctagtaggattttggacattgtggtatgatatagttagggcctagaaagactagtagtactttatttgaagcagtttcaagaagttgttgagttggtctaagaatgagatgaaattttgactta

SEQ ID NO: 209345 - DNA, 728 bp, Cannabis indica
tatgttaatattgttattgatttaactaaatattatattattcgtgacaaataaccacacacacaaacttcacaaaaaaatattcaatcaattatatttgtttaagaaagtttcacctgtcaatataattccctacttgtcattagccatccgtacactttgtaaattattaaagagaaatttggtccaactaagtatcaagtctatattgtgagagaagcaagagaaagagagaaacaacaagaaatagctgaatgattattctgttattgaagtgagcaacaagctcagtatatatacagagataagttagttacagagtataacaaactaagcaacggaagctacagtaaataactaactctaactaactatgattgtacaaaataacagaataacagaatgtacaattgactcatatagagtctctaacaccccccttcaaactcagctgggccaatgagactaagctgagtttgtctctaagaagtagaaatcgtgtactggaaagagcctttgtcaagatgtcagcaatttggtcatgaacaggggtatgcttgacaataagctgcttcgataggattcgttcacgaacaaagtagagatctagctctatatgtttggttctggagtgaagtacagggttggctgacatgagtactgtactctggttatcacaccagatcgtggggggatggtgaagcctgaaaccaatttcagtcaataaa

SEQ ID NO: 209346 - DNA, 1355 bp, Cannabis indica
accacatataagagcatattttactctagcattcttagaaagtattttcttatcattctcatcataagcctcataagttttaataacttcgtcaccatttataacatgtttagcaatgtaaggaccattagacacaatattccacaaattataatccatagattgaaggtaatattctattctaattttctaataagaaaaatctccattgaagtatggtgctctatttgtgcgcaaaccttctaatatgttattttgtgaattacttggaaacgttatactctagattgtgaaatctaataaaataaatgagcccttgctctaataccaattgttaacccactttatatttacaagaggaggtgaattggaaatttaaaataatttcggtaaattaaaatttttaacacaaaactatacaattaatcaatttaatcgagtaaatacaaataatatggtaagaaattatatagagcaaataataaaacttgtaaagtaaagagttttaagggtaagaaattacaaactcttaatttttacaagttccggtagaactaagccacctacgtccttagtcttcaaagctttagacctagctttgagttccactatctagccaagttaatgagcttgactaacccttacaactgggaatttttcaccaatgtgtttccaaacctcttacaatagttttgcagtgccaagggattatcggcctctttctcagcttgttgtagtaacaatttcattctaaccgagttatttataatgccggtgccaacctcacttcaatcacaatttgaaaatgtgtttaaaattacaagcaaactgactctagaagtatgataaaaaaattgaaaatctagagtaattagcaagcacactttaaagaattaaacacaaattttggctcagtgtgtgaaaaatatttattggattttaaacttgggagcttattaaactaacttgaatagatttggtatatgaaataaatgctcactcaacttacatttttgggtgaaaatcaagtttatatagtgtttaaacaaaaactagctgtttatagccgttagaacgttttccaaaaagatcttgggaaaaatggtagaccaaaaatagggcagtggaaaaactcaattatccaattttagaaatttcaaattttttcttctagctaaatgatatgtgattttaaaagtcagtttaaaaattttagatatcatttggtaaaatgaattgttgcacaagttagtatgccaaaattcataattaaaacctttttaagtatggacttaaaaagcactgtacaagactagagaatgtaaataaacattcatgaagtcttgtcttgagtt

SEQ ID NO: 209347 - DNA, 1518 bp, Cannabis indica
gagagagagagatgttgcggctaatcaaagggaaagagagtaatgaagttatttaagggtagggttttcttttaaggtttgtagaatgggaaaaatttacatttcaaacattttttttctaagaaaaacttctttgttgtgtcaattataaactaacactactttgtgtttatttataaccgacacaaaatcttaaaatatggttttgaattgacacaaaatgtcgtcagttataaaacaataatttttttttaagataactaattgcgccaatttttaactttgacctcgtgttgagtgacataaattgaccgttttgtaatagtgttacaaaaaaattatactgtatttaaaaatttggctgataattatgttttttctttgaaagcaacatcaatattttctctaagttttttagtatctctgttataataaatgtgtgtgtgttgtgtaaatctatcatcataactggcttaaaagaaacttttagttacaagtactacaagttttaacaactcaatatagattctcaataacaaaccctcaaattttcgtttcagttaactacttctaggagataaattgtaaataaaagtttacaaaggcttcttaaaactttacaattttaacaagaatggattccagagctcgtgcattacaaaagtgaaaagttcttcccatttttttgagagtgttttcttgcatgaacataaaaaagaatgagatagttatgagtggagatgtttcagtgagaactaaggatgtacatgtatttttcgtaaaccacccaaaccaaactaataaaacttgacaaaaaatacaaacataaaatctccacaaaatataacccgcccaatctgtatattgggcgggttaaaaataaagtcaacccgcccaattaaactgaccaacctgaccaaatttttttaaattatattttcgttatatataaatatatatataatataatttataattatatgcatattaaaaaaaaattaaaacttaaaaagaagaaaagaaactgtaaagaccgtttagtttaatttggaaattagcagttaattaagatctaattataaaaaatatttatagatatttaaataattatttatgttgttatatttgaattcagaatgcattttatgtcatatagtgaaatttcataattttgcattttcggtgcccaacaacatggaacgcggtgtatggctcagtagaatcacaattttagtatttcagtatagtgggacggtttatttagacattgggaatgtcgggattagtcgagaatttagagttttctcaaaataccccttagtacccttttatgtcattttattgtgtgagggcaaaaaggtcattttgccatatgtgccttgtcatttataaattttatttaaagtttataatctgatttttattagttattttatgctgaataaaagtatgttaaaaaccattttaatattcactttgcaaaagtaagaaaaaccaaagaaaagaagcaacttttgc

SEQ ID NO: 209348 - DNA, 575 bp, Cannabis indica
acaaagtatactttacataaaccatctgaataaaatcaaagtttttgtttccgtggttttcctccgcgctccctagtataaatgggaggaggtcagtctaactaagacacttgacctttgtctatttttccaaaaaaaaaaatgaaagatttagttttaattatcttgggcagtgtaataaactctcatacccctttttaaccaggcatgggtggtacagctaaatgttggaaaatttctattcaggtctgatcaagaaaaaaacaagttcatatacatgtgctcctacatccttcatatcacatataagagtaatgatgtttcagcagagcaaatttaaaggaaaatgagcttgcacaaaaataatggccgaacagtcaaaatgaaaagaggatatcccctagttagtcttgcctgttcactgtttcatgattattcaatctaactaccaacgccaaatagtcctaatttcaaaagcaactgtctaagacactatcatcctttgtacatagaaacaattatcagacataattaagagacagaaacaaaacttaaaagagtcaaagatcagtaga

SEQ ID NO: 209349 - DNA, 1491 bp, Cannabis indica
ggaacagcgaaaagcgcgtaacctgcgatggcttgcaccttgactctattaactcttcctcgaaagtgacgttagggtcctgggaagtccttgatttacgaggcttggtagacattatgtcaaaatccaagtcaccaggttcaaaagcaactatgaccttgggtaaaaacagacgcttagccaaaggaatagaggacacactgggaggttcaggcagggcagcacctcgcaagaaatggtgtttcccttctgtaatttcttgcaagaagcgtctgtgggaactaacaatatcatcatggtgggttttcactaatgttctctaattcttgcatcatttacctttaatttggatttggctcttggagttctgggtttatgtgggacgacaagtctagtttgacactctatttttaattcttttggacgataaacttgtgaaccagattgggacactattgcaaggaggaagcaatcctaattcttggaggaaatttatcaaagtagaagttggtaaattgaagagttttgaaagacctacgttctgcctaaaccctaatagctactcagaatcgatcctgccctaaagtttctagaaccaaatgaagtgaccaaggtgctaaataagaaattagaaatcaaacccataaacacagcatcaaaactacgtaagaaaatgagaggaagagtcactgtttggggtttgattgtaagacgaggaacagttctgcaatctgtgaatcaacgaacggcttgaagatcccttagaatgcttgaagtcaaaaattaaatcagatgaaattcgaaggaagaatatcaaagatagggatggcatgcaagtttttgagcaaacctggaaatggtctttcggcagaaaagtttgaaaaattcttagagtttctaatatggcaatggtaatgcaaagcaagttcctttttccgttttatactctttggataatctccgttagatcagaaagataattgatcctatgggtaagatttgaaaaagaagtggaaaggatggtcatcaaatgttgatgtaccgcgaaaccataaaaatgccaaaatcaaaggcatgcataatttcaaaagggattatgatgcacataccctttgtaatcatttaaaaataactttttaatgggcaattattatattcgaaattcagttggcacttcaaagaaggacgtgtgtcaacttgggagaatacgaatcaacaaatataatagtaattatatttgaagattttaaaatggaataacacattaaatgaagagcagatagagtatagtagggcataatttgcctcttttcctgaaacatttgatccccttcatgggagacacccgtaggaacacatgatctcctacttgaaactctacatttttgcttttcggatctgcataactcttttgcctactctgagaggcaagcattctcgccttaatcttctctatttcttcattagaccgttgcactgattccggaccta

SEQ ID NO: 209350 - DNA, 1299 bp, Cannabis indica
taatggtgagtcttctataaacatatatatgtttatatataaattaaaatagtgctggaaatacgaatcggctttttaacattgtacaaaattattacgagtccagaagacatgtatacaaattaagcacgaaaaaatatgcgcttgagcacgacacgacatgatgctacaaattagcacgacacgtaggaccggccctgagtagaaatcggtcataggaccaaaaaaaaattttaggcccttactataaagataaattatatttttaaaattaattaaaaaatatatatttttaaaatgtaatttttttatttgggtccggcctatgcctaaggccgaccctaatgacacgacataaaaaacacgaaagacacaatatgtaagcacgaataaactagtctaaaaggcataacatgcgacaagcccaaaaagtacgacacgatatattaaaaagccttataatttattattattattattattattattaatagtaataatacaatatttttttctaatcaattttgtaagatgattttttatattatattaatatgtgggttgttaaatatttgtttattgtaaccggtttttatttttaatttttgttttggttatttaagtaactggtttatgtaagttaatttttcatttaattattttactgtgaaattaattttaactaagttggttaatgtaacaggtttatgtatgtcacattattcacatctcactttagaaaatagctagtattaaatgttcactattagtttctttggggagtttcattggggggactagctagctaggagaaattaggtttcatgcctaactctatgatattttgggactaagaacttttgcaagtattaataaggatataacaagatgagaaatagttgagaagattattttataatacataaatgcttaaaattttgaaatttttacatcaaaaatctaatttactcaatttattacaaaaaaaaaacccatacacgcttacatcatcatttttacttttcctctttcttttattacaattataccacttacacatcaattccatgcatgcagccacgtcattgattgatgacttatatcaatcacaccttacatcattcacttatctttttctcttctttccttttttttttttattattttcaatttcttttcagttttttttttttaaataaaacctccatagctgaactcttctcctccccctttgccaaagaaaagttctaaaatggggttgaaatatgtagctaataagaataacacgatgactccgat

SEQ ID NO: 209351 - DNA, 645 bp, Cannabis indica
gtttatagaataaagaaattaatgaattaagtatgtgtgtgtgtgtgtataggtatttgtgattcaaagtgtgaggttcgatgtggaaagactggaaaaaagcattgatgcttgaagtactgtggaatatgttgcaaagcgtgcaagtgtgtcctatttgggacttatggtaacaagtcagaatgcccttgctaccgtgacaagttgagctctaagggcacccccaagtgcccttaatattatcatcactacaaatactgtgtctaattaagctaattaggaattacaaacataaacgaaaagatttatcataaactaattaagtgaaggattctaaacaaagaattatcataaacgaaaagaattatcataaactaattaagtgaaggattctaaacaaagaattatcataaacaaaagaaaagagaaaaaacacttccatggattttcattcctataatcctaatattgtttacatatattaaagatgtttacacttactatagctctgaaattggacggcggcgttggcttcaaaagcaaaacgaagagactgttggaggagagtgacggagagtgggtatcttggcggtagtggtggtggtatattgccttttgctttattggagagagagagagagagag

SEQ ID NO: 209352 - DNA, 659 bp, Cannabis indica
cttttgtgcaagagacagactggatttgggggtaattccccttcatgaacatatcctttaggaagtgtcatatatactttttcagtaagatctccatgtaagaaggcattatcaatgtccatttggtgaagtgtccagttattgatagcagccaaggctaagaagagtttaagggtattaaattttgcaacaggggcaaatgtttctgtgtaatcaatgccctgttgttgtgaataccctttagcaacaaggcgtgctttatatctgtccatttcaccttgttcattgtattttattttatatacccatttgttaccaatgggttgacaacctgggggtagggaaacaaccgaccaagtattattttcttaagagcaaaaaattcagcatccattgcttttaaccactgagtgaactgggatgcatgttaaatgactttggttcacattcagtataggcatgaaagatggcatttcgaaaggaaacacttaatttgtcatagtttaaatatttaatcaaagggtgattagtggaagattgacaaatatagtcttgaagatgagatggttttgaagtttgtctacctgctttagtgatgacaggctgctgtgattttgtggaagatgcatcagtaggtggggaagcatcagtgacaactg

SEQ ID NO: 209353 - DNA, 656 bp, Cannabis indica
gagggagtttcttttgaagaatcacactacactcctttttgttagggctaccatctcaaattcttccatctttcttttctttgacaaaatctccttcatgaatttgacgtagcttggcatttgttcaatgcagctttctgaatacttcaaagaacttgctaaactgcttatccatattattcttgcgcaacctctggggatagggaacctttatatgatggtcaatactaatagggggagaagtttctttttactgaagaccatcaatagtcttctgctctgttgttgttgtggttggtgtcggttgatcttcttcattctctggcttggcttggctcgggccatcataactcgttccactcctcagggtaatttccttgcagttttctttaggattaacttcagttgtactaggaaagttttcctgaggacgagttgctatctaagttgctagttgccacatctgagtttgcaagtctttaattgaagatctcgtctctgtcatgaattgcaataataaatctgtctgaagaccagaatttctactagagctttgttgttgagtctgttgttggttctgtgactggttctgatttctctgttgatagaactcactattccttcgatttccttcttgattaaacccatagttgctg

SEQ ID NO: 209354 - DNA, 994 bp, Cannabis indica
aaaaataataactaaaatagaaatcaatttcaaataactgaataattacaaccaataacaactaaaaaaagaataatacaaaagaaatcgaaataactaaacaaatctaaaccctaaaataaaatcaaaataatatacacaacccacaaaataaaataaataaaatatcaaagttggggaaaaactaaaaagaaactataaaacaaacctctgaaccatgatcagcttcaaccttccctttcttattctcagatggacaaattttctgaggaataaaaactttagatttcttcttagcaggaccacgttcccgtttcacaataggcggagcaaagtttgagtcatcatcttctacgactgggtgtttgcctttggatttatttactatagatttaacacctattttgaaagtttttttaggcaatggagaaggaaacaaagaagaatgagtaatggacattaatatataatttcaaactgaaaaaatagggaaaagaaaatgggcagttcagttaagggagttagagaagataatggcagaacaaactttcgatcgtgggtatatagcttttgatcgtgggttgggatgggttttaggtatgaaaaaaattgaaaaataaaactgaaagaagtgaaagaaaattgaactaaaaatgaaaattagaagaaaaaaagagagaagagatgataggtgtcaatcacggtcaactcatgtatggagtgtgcacagtgtgtgtaagtggtattttggtaaataaaaaaccattaggcaaaaatgttggccatgccgtgtgggagtaattttgtaataaaaaagccaatttgtatttttttatgtaaaaatttctattttttttcatagtaatattcgttatagttacaatatcattcctgtaaatttttgaatagtttatagttttgaaaacagaatttttaatatttcaatctaccacaagttttcaaaaaccttcaaacttatttttaacactataaa

SEQ ID NO: 209355 - DNA, 743 bp, Cannabis indica
ctctttccactttgtaaagaagtgaactgccatcactacgtactttgctcctccttgccctgtagggagtgccccaatcaaatcaatcccccatattaaaatgggtaaggcgaggtaatcattcttagctatgttggtggtacgggaggtatatgtgaaaacctttgacatttattgtattttttgacaaattcatgtgtgtctttgtttattgtcggccaatagtatccttgtcgaattatcttctttgacaagctttgccaacatgcatggtctccacaaaagccatcatggatttctttgataatctaatctgcttctgtggggagaacacacatgtaggagaggcattgaatagccccttcgatacaattagccttctattatcgtgtagcgaggcactaaatacaagagttttcgtgcctctttttgtcagctggaagttgccagttgagaagatagtcgactatgggtgtcatccaagtatgcaagctttctatcatctcaacttcttccttttcacatatacccggctcgtctaacacttccactagtactaggttcaattgatcaagtttaatatgcgaagctagttttgccaaggcgtcggtattagatttttgttctcctgggatttgttcaatttttaaataatcaaaaattttagaattcttccgaaccttctttatgtattttacaatttttaagccctttgcctcatattcgcctagaacttgatttac

SEQ ID NO: 209356 - DNA, 575 bp, Cannabis indica
tggttcaccaacactgatgaatgggaagtcaatttttaatcgcttatatctgccccctataaattattatggctgtaatataacattaggtggtaactaagatgaaatcctagtgaattatgtacaacgatgactttcttttgttactacaatgaagaacatgaactatcagataacaaaacaacatcaatctgaaacagtacgcaagaatcaaatgataacaacataattgcacaacaccccaatctcccacattctagtccaaagcatttggtccaaaacatctccttctcacagggttccacacccactgaatcataaacttcctccctttcactccattaacattgtatccaactcccctagagcccttataaactttgcccacatagcctccacccccacccacctcccactaaaccaacccactacacaagtcagctatctctgtgggagcagttggagtcctccccacgcataccaagcattcacaagagggttacttgacacctctgcaagctcatgagctaacacactgatcatcccatcaacaccggcatcccccatttggtggg

SEQ ID NO: 209357 - DNA, 765 bp, Cannabis indica
tagtttcgatttggattctaggtctgggtttaggttcgggtctggatccgggtccaggtctaggtccgggtcaaggtttgtgtcctagtctaagtctatgtttgggtctgggtctgggtccaggtcggggtccgagtttacgtcctggttccttgtttgggtccaggtctgggttcaggtccctggttcgtgttcgggtcaaggttcgagtctgagtctaagtttggctcccgagtcgaggttcgggtctctggtcttggtttgggtccgggttcaagtccgggttccaattcgggtcttgagtataggtctaggtctaggtcaacgtcttgtatttcgatcccaatttggttctggctccaagttcgggtccaggtctgggcttagttcgaagtctgggtccggatcctggtcggggtccgggcctggtttaggtatgggagcaagtcttgggtttagtttgggttcgggtctcggtcccggcctgcgtctgggatttggtctgggcctgggttccgatcttggtttaggtccgcagctgggtgctgatctagttccgggtctaggtcctggtcacggtctcgggcctattctaaggtcctagtctggttctggttcaggttccaattttaggtctcaggtccaggtctgggttcggttccttgtctgagttcaggttctagtctgaatctcagatctagacactgactacgggtttcgtccaagccctagatttcggatctcgagtcaagatacggatcccag

SEQ ID NO: 209358 - DNA, 538 bp, Cannabis indica
ttcttttttttttttgtacatatctatacatatagcaaaagagggactttattgttatgtgaatcgaaactctcaccaccccgaactcacattccattatcatctccaatgtaaacttgtttcaccatattttgcaaagtgttatcctcacttccctaaccccattaatgtttgatttgtccttgataatttaagtaattaggtgtgggttgtgaaggataaaatttgtgtgtgtgtggatatataaactttgatgggtgttatgaaaaaaaaaaagctattaactcaaatagggtgactattgataagtaaatattctcgagtttgcttgaaaggttcaatcgtccaaaaatcatctagatcatttccaagttgtaaaactgctaggatttcacctcaaggggtacaccaaccaattctagaagcttaaactctctcaagatgttagtcattctataaatccaaagcatagtgggatagcacaagtacacatctatttaaaagaattactctagactagcatttggacaaaatgtac

SEQ ID NO: 209359 - DNA, 635 bp, Cannabis indica
ccctatcatatctgagttgctcccgacaaactgattatggtttgcctctaaaaaatcgattaattgctattttagtctctcttccaaaactttcccaatgtatacacattttgtgggattatttagatctaaaataacctcttccaactcttcaataggtttgagcttgttattttgtcttgaattttaggatccagatcttcctcttcccttttgccttcttctattaggataccatcaattgatgattggctctcctattttgaagttctattcgatagcactattgagccaacaattggtcacctcggactactcctactcctgcctgtgttagaaactttattgataagtgcttaatcgagcttactgcccccagtccaattagtgtaggatgacccataaatacattgtatactgatggaagatcaacaactaaaaattcctgcatcaacatcgttaataagggtggctatcctacagtcaatggaagttcaatgatgcctaggctggcgacgctatcacttgcagattagcataggctcaccatgcaaggttttaatcttgcatcctccaatctcatcttttttagtgtgtcgttgtgaggatgttaattgaactcccattgtttacca

SEQ ID NO: 209360 - DNA, 733 bp, Cannabis indica
ataaaaaagaaacaaaaaagtttattttaatattaatcgttcttttatgtttctcacatattaaaatgattattttattatttatatatgtgtagaattctaaaaataaattttttaatgggaaagtaactaattgatatcttattcaaatcaaaagcaactaaatggttgctttttccaaaactcccaaaaagcgaaaaattttggaaacgagattttttcagttttttcaaatttcggtaattgttttgaattttggtatgtaggctgacgtggcataatggtatttgtgtaaataattctcttaaaagtatttttataaataaaattatttttaggtataatattgaaaaatccccaaaaatatttggtcggaatctggtttaagaagtggaaaggtgcgaaatggggatttagtttatcatcatagtggtgtgaagtgggactcttggtcactcgtccgaattattaattttttttttgtttttattttattctttaaatttattaattagttttatgtaatctttaataaattaagtgaaaaaaaaaaccaaactaatttctgttagtgggtaccaacggggtagtgtaaacaaatgagttttgagtattaatgccgtaatttttaaaaattgagtatttattagtaacacaatgaacaaaatagaggtatttatgccgtaaatttttcttaactatattataaataagttgaactagaatttataat

SEQ ID NO: 209361 - DNA, 792 bp, Cannabis indica
aaaatgtgtactttagctaattttccatctgtgaactgtgataagaaaattgtccacttatttttcccattcttttctttataatgtgcatgtttttcaggatgatgtgtgtattgagactggagatggaatcaaacactgtaaattgatagcagtacatgctggtttggtgagcaatcaagatgtcaaagaacagttgaagtttttaaaagccaaagatacccgagtgcctaaggttgatagtctgagtgggagaaaaaatgtgtgggatatgccaaaggtactgactttttttatcatgatccaatgatgtgtgaacaattagtttagttatgaatttatgataatgatgcctaatggtaataatatataaataccagaatattctgaaatgtacactataatacaaacagaagaattgggttacaattttctcatgtgccaaaaacagaaaaagtttccggtaactcgaaaacaggattcctaccatagaagccttctggctgttcttttggcttataattcccattcatatgatttacattagcgttcttctaagtcattcaactgaagtttagacttttgtgtctatttgtctctctttcataggaactaagtgagactccaaccattgtggtaagtggtcaccatggaaagcttcacattgaaggtctgaggctgattatcgatgaaggtggcggctacgagcataagccagtggctgcaattgttctcccctcaatgaaaatagtacgtgatacagatgattctcttgcaacataagctcaagtt

SEQ ID NO: 209362 - DNA, 578 bp, Cannabis indica
aaaattagtataattttatttatttttaaagcacctaattttaataatttttattttatataaaagttataactttaattatactaatttttttctttcaattaatatttttaaaaaatatgcctatcaaataaaaataaattatattttaaatattatgaggaaaaaattaaaacaaaaaattatatgaaattttcttagaaaaaataaaaaaaaaacaaatacacatgagttagaaaaaattatgaaaataaaatcaaaataataaatattgaaattaacataaaataatgtgagaaaaaaattaatacaataataagagtaatttttaaaaattctttaagtttatattttttaaataatggggtgtacttatcatattatggggtgcaaatagaactcccctaaaggaaatcacaaaaggaggtgaggtggcattctagaaattttttactatatgttatcttttttctaattttttatattttttatttgttttttaaaatttggtaattttactcattacactactacaaaaatacctttaacaggcgatttttaaggcctttcaatgtcgg

SEQ ID NO: 209363 - DNA, 533 bp, Cannabis indica
aatactaactgcatttttcatatcagtagctgcagacaaagatctgatcccacgttcacagccctataatataatagaaacataataagcaaccaaatataacataaaagttatttaaatcaaaataatatttttgtcatatttgaattaattcacatttattaccacaacaagcttatcgtccttattacaagcagatgaaacctccttcaaaaaccctgaatttttcaccctacctgaaatgaaataaaagcagaaataataaaactcaaaaaattattatacaaattttcctttttagaaatgaatattaaaaaaataaatatgtttttatttaagtaaattaatataattgatataatgttacaaataataatagggtaaatggcagcaaaactccgttttatcaaaccccacaacccaaatttctgcgggtaaatccctaaaaccactattctgttagtaatttaccatttccgtccaaatttagctgttaaatgtcaagttggtttgtccatgtggacacaatatac

SEQ ID NO: 209364 - DNA, 980 bp, Cannabis indica
atatgtgtcatattaaattattataattaagtattcccacataaagtaatttgataattattatataaaatatgactaatcatttacatgacgatacctctaaatgttgttaggtatcactgaaaatcttattgttatattatttttttggcctcacatttgaattgtccatattaactgaaccttgcgaaatactaagctcggacatgtcataactgtcataacaaacattttgttatgacaattatgacatcaactccctttgtccaagttctatgaaagggatcctctctaatcgagctcaacatccagaaactcaatgtgtgctactgagatagattaagagaaagaaagagagaaaccaaaactgagagtgagagagatgtgtgcctcctgtaattgaagcatagcttcattcgagtgtttatgaactattcttcacagttcttggtgtaactttctagtaaactttctctatcaataaagattaatgcacaaagggttgtttctggctgtggagtaggcagaattacaagctgttattcctgtttgaaccatgtaaaatctatctcccatttattgtttttgttttattcaattcattttaattgctatagcatttgctccacatttctgtgctcattcctatactctattttgtgtttgtcattgtgtacttggtcgagttttcttcaacagttagtatcagagcatcaggttcgaattcaccaagaacagttcaagatcttgacaagatcaagattaccagacaactatggcttcaagacgttttgaggtagataagttttcatgattttgggctatagaggattaaaatgaaagcactactggttcatcaaggcatcactaggccatagacaagaagaatgaagaactggtgaagcaaaaagaagatcaaggagatcgagattaaagcacacagtgccatactttgagcttgggagatgaagtggtcagag

SEQ ID NO: 209365 - DNA, 650 bp, Cannabis indica
tggaccaataatacttcaacacgcggcaaattcgacagcaactaacagatcagttaagttagggaccaacgaacttattaccgccaatttttgaggttgaggattaatctgtatcaactctaagtttttagggacttttgccgcaattattttttttttaagaaaaaaattaccattatattttatattaaatattttgtttttttttaatattatttatacaattaaactatttatgatttttactagtaattaaaaattataattcattgcctaaacaaaaaattaaacatagaaaattaagaatactcacacggcacataattttaatttaatataaaaataagtattgaaattaatataagataatgtttgatttttttttaaaataaataattattaagtgtgattttaaccttttcattttaatattaggggtacttttttttattttgtaggataaatagaattattattttttcccgtatttcaatcaaattttattattttctgcagtccaaaaattgtgagacccatttaaacacgtgattggtagatagttttttaaaattaaatccaagtattttcaaagaaaaataaaataaactcatggtccaaatttataagcatctcaaaaaaaaaaaaaaaaa

SEQ ID NO: 209366 - DNA, 1015 bp, Cannabis indica
gcttttacaaaatacagtgaagcttaatccatattaaccaaatatattggtattttacacaagatccccttgtgtcaaatgttcgaaactccccttcaaacatatttactcaatttcgaaatcccttatctctcaagcctaaaacttaaactgaaatcccttcagtgcttccatctcaactttgatcttcacataaccttgaaccatttcccatggagttcctacaataaatcaatacaaagaagaaacaaagagaatagaagaataggtattcaatctaggattcaatatgctctgcgatcaagggttagtcaaaacaataacaagaaatggtatttatactcagctaaataatgaaacctaaaatggatagttgtaactagctggacaactaaaaacccaaaatatgttttgttgacatggactatcactaacagtacaaaacgtagacttaacatcaaccactccaaacatgactctgggaaataattctccacacacaaaaataatgacaattagatggtgtaaaattttaagttaagttttgcttttgtttctctatttttttatatattgaactttgagatattagcaataaaattataaatataattttttatatattatattactttaaatttcctaacaaccgataagagtaatttttttatgctatttttaaaaataaatcactaaaatattattttattttactttcaaaaaattactttacaacatacaatttttttaaaaaaatacatcaacaaaactccactatattcatttttttcatataaattattcatttcaaatttataatattaaaatacacatccacatataaaaagaaaaatttaaaatcttaacaattaagtgtgcttaagttctttgacgaaggcgcctctattatatatttgaagctttgggtttcagcctgatatagatttctatgcttgtcaagctgatattgagaagttattggtgttggtttggactttggagaatttggtttcat

SEQ ID NO: 209367 - DNA, 619 bp, Cannabis indica
gattaggaatagggaaatacgcggaaattagagaatattagagaggtagagaaataaactgaagcatctaggctcacgctcatgccttattaatttatttatgttcggttcatgtcccgtaaaatgaataaaatcagcaaatgataatctcagctttttctttttcgtttttactattctttcgcaactttttatttggattttgttatcattatttcctcattcatgacatataaacctagtacattaattaataactgcccatacgtttcatccccaataaaaaatataaaagttaaactgtattttgtacaaaaattaatttatgatatttttatattaactttattattgtgttctaatatataattttaaattttgatgcaaaatttaatatattatttaatatttatttaataatttattaaaaaatataaaattaaatataaatttaataaaataataatataataatacaagttttttagtgcaaaagagtatgttagctaaaatttaataataaaatattaaaaatgatataatagtaattagtaaatataatagtataacatttattgtgataaaaattttgtatgatgctatattgtgatgtaaattt

SEQ ID NO: 209368 - DNA, 566 bp, Cannabis indica
ttatctccatcgaagaacagagcaaccaaaagaaccccattttagggatttggtgattcttcaccatagccacctacgttaagctccttctgatctcatcctactatagcacagactttgaggtccatcgccattgactcgctatcacaaactctctaccgatttcaaagcccctttgctgaaaaaattgcccctaatttactttttttttttcaaacatttatatatgtattgtaactgtaaaaaaaatgaggaaggcagagatatatatgcctaagcatggatggagtggagaatactggatgacttgggtttgggtggcggtggcatctcgggcgtggtcgacagaagaggaaagggcaaaatctaggatttaaggtttaggccgaaggggagagacgacatactttttgttgcaggccagaggggagagggatgagacgtaggtggagaaagaattactgggcttggatgcttgggaatggttgaggtgcagctggtggctcggagtggttttcggcgaaggagatgaaggagacgaaaaagacgaagaagaataaagaaga

SEQ ID NO: 209369 - DNA, 861 bp, Cannabis indica
gtatatacactataaatagtacaataattttcggcataaatacctaactaataggtaataatacctaaattataattttagaactcctgtagtaaattattgacaatttctgattagtcaaagttattaaatttttattatttaaaaaaaaaaatagtttaaatatactaataagaaaatcacacgttaatttaatggcttaatatttaatgttaggtacctacagagttacataaatataacttaggtattattactgttaaaaattaaacttaggtatttatttgcaactggaagtgaaacttaaatatttatgccgcaaattactataacatattaaatcaaacttagactaatttgcctttttgcaaataaatactaagtttaaattttagcagaataaaaatttaatgacttaaactaatttgtgactgtcacatgtcaatttacttaacacttaagagctagttacctacataagttttagaattatattaccgtcaaaaattaaatttaagtatttatttagaattagaaattaacttaggtatttatgctataaattactctaaaacttaataataactcaataaaaatatactatgacagaactagttatgtttttttacatttgtgttagaaattatttttaacttagttattaaaaaaaataaaaaatttaacttaaagtcttattttgtatactatttttaaaaatacagaattatttttgtcatttaacaaaacaaaaaatctagtcaataaattttgtaaaatacgaattaaaataacattaacccaaaaattaatgattaatttttttttgtaacaaaaaaattaataattaaacattgttattaa

SEQ ID NO: 209370 - DNA, 537 bp, Cannabis indica
aaacaaaatttagaacttaaagttcccggcaacggcgcccaaaacttgttgtgaaaatttatattgatttataattgtgcaagtgtacacaatcacaaacaagcaatacaatgataagtaatcaaagttcgtctccacagggactttttactaaataatgcaaaataaactaagagcaattccaataatttcaaataaaaaataaaacagagtaacaaattaattcaagagcaaaattcttaaccttaattctaaacttgagaaataatattttaaactcaataaactaaaaataagaagctaaaagttattaacatggtgataatttcatatttggaaaatagacttgggtaattaatttccacttgtatgtcccagttgatacagcaagggaatattggtatggagttgtttcaacacatccaaaaacttcctaaattttttatcttgctgctgtttctgaaatctttgaggaaatggaacgggtggttgaggactagaacataccggtgctgattgctgactgtcaggttgctg

SEQ ID NO: 209371 - DNA, 748 bp, Cannabis indica
tgggtcttagtcagattctagttgttagactcaaacccaatgtcggactcggacacaagtctggggtacgggtgtgggtttttgtcagggtccgagtccaggtctgggtttgagtccgggtatgggtctcagatccaaacactgactacgggtcagttccaagcgatgagtcagggtccgggtcctagtctagttctactttggatccccggtcctggtctaggtcctaggttagggtccgggtttgaggtcaggtctcggtcctaatttttatggccatgtcctgggtctaggtccctaatccaagtccgagtcctacgtcccagtccaagtccaggacccggtcgcgggtcaagtcctagtccgagtctgggtttgggttctgatctcggtttgggtccaaatttgggttcgagtctagttctaggctcgggtccgtgtcccgagttccgatctaggtctaggttctggggcccaagtctagctccccaatataggttcaggtcctaggtcccgatctgggtccattcacgtttgggtccttgtcccaatttaaatttcgattcagtttttgggttcgggtttgggtctgggtcggggtcggggtctgaatttgaatctagttctcatgtttcaatctcggtctaggtctagtttgggtttgactccaagttcgtatttgaatccctatctaggtccgagtctagatctgggattgggtccctgatctaggtccttctccgggttc

SEQ ID NO: 209372 - DNA, 856 bp, Cannabis indica
acgatttgtagataaacagagtctcttgaccaagcaatgagtcaatttattgtaaatacgttttacaaaacacaaaatttacagaagataaaagccaaaaggaaatttcgaacatcttgatcaataagacaaaattgtgaaaggcgtaaaaacatcgttctgaatcagttggacacacaccaagttatctatttctaacatgattctatcacacaaatgagttgcaatctaactcaatacttctttaatgcctattatctcaacaattttaggttgaacacatccaatctttcccttcttgaatacttctaccatagcaccatgatgattttgagttacacaatccatgccaaaagacaagactcgaagactaatatgaaaaattaaaaggaaaatactaaaggaccatgtcaaaagacaaactaatatgaaaaattaaattagtttcaattcaacacataaacacgatcacatcattaaaattaattagaaattaaatggttcgggttcgtgggttttgggctcgcgggtttacgggtccacgggttcgggttggctgggtcaacgggttgacctggtttaatttattattttttttaaaaaataattaaaatttatgtggttttttctatacattaaattaagcatatttttttttttttttaaaattaaaagttaaacaccttaaatgcacaacctcaagcagagccccataaaatttagtagaacacataattcatgacatgtaaagaatcccattcaaaattacattatcattctttttccatccaaacaaaaattgaaaatgatagaagtagataaaattggtcacataccaagcctgtctcactagatg

SEQ ID NO: 209373 - DNA, 720 bp, Cannabis indica
gttgctgcatcacgatatgttggtgccagtatgccatgtactgtcctaatatcttcgaacgataacgacccgtttatgtgatttagcagtatccgcaaaaaataactttcgccttttaatgggtttgctataacaatacgccctatcactatcttttttttcgtggaggccactttctattttgattgttctaaacatagtattcaggaatttgtttgtacagtaatatccttgcattttcatctactctatttaatgcaaagaattttgttaacatggattttttataatgttttgaattagcaatgtttgaaaggtcagaatttcctcagaatgtaaccaggtgctgattcttgagatgtaaatgcaagctatatactgtcggggacatctcatttacaataaatctgtatattctccacatagcttcaggggcagcaatccatcgagctgtttgaaactgaagtatgtcatcaactggttgattatttgattcggagactaagtttaatgcgacacggtcatggcctttgtaaatatatttacagagatactttaccgccttcactgtagagcatatttctacatcaatgtagaagtcaaatgtggcaaggagatatgggttgtatggaactacccaatgattgtctaatgttgcccctgaccttcacagtcacaccattatttgaaatcctataaataggaaaatagtcattttct

SEQ ID NO: 209374 - DNA, 781 bp, Cannabis indica
tgttcattttcatggcagctacttatcattggtctggcatcaacttgatattaaaaatagttttttttctatggagatcttgaggaaaaagtgtatatggagcaacctcctgggtttgttgctcagggggagtttgtcgtcttcacaaatctttatatggattgaaataaagttctcgagcttggtttggtaaatttagttaaactattgagagatttgttttgttgaaaagtaagtcagatcattctgtgttcaatagatcaactgttggtatcattttgttagtggtgtatgttgatgacatcgttattactagaaatgatactaaaggtatctcatcccttaagtctttcattcatacccagtttcatccgaaggatttaggggtgttcaagtatttcttgggagttgaagttactcatggtaaacaatgtattttttttttctcaaaaaaagtatgtacttgatttgttaactaagataggaaaattggaagcaaaaccttgtaatgctccaatgaatctagctgtgcatcttacacgtgatggagaaccatttgaagatcttgagaaatatcgattgtcattttgtttgtgagaaaattcaacaagccctgatctccacatgatatgtgaagaccgaagaacaattatgaaatatttttacaaatgctttgaatggggtgcaaattgattatctttgtaacaagttggacttaacatttatgctccagcttcaaagggattgttatattagttgtaaaaattaatttaattatatt

SEQ ID NO: 209375 - DNA, 904 bp, Cannabis indica
gcacatttcaaactctccacctacattcaagtaaagaagaaaaaaagaaagcttaataagtctgaatttgatatgaacatacaaaattaaaaaaatcaaaagctaactccagctcaaatctgaccagaaattcgcagtagtaacactgtactcgtatctttccagctctctttgaccatacaatcagaattgcttgcgaactcgtaagaacagtcaaagcaagagtaaccattgacctaataaagatcacgaatttagagttaccaataaactaatgtcaaatacacaaaaacaatgtgtatatatatatatatatataagctcgtactttcgcttccatacggttcgatcaattggaccgattcccaagctgacggctgcatcaatcaccgccaaaccgaaatcagtaaacaattcaaatgtttcacattaagatttcaacctaacaagattgaaaaaaggaaagaaaaaaagtaccagcagaaagcggttttcctcgcaagctctcaacatcgtcaacgactgaatcttcatccttatcctgcatatatgcaaaaaaaaaatgtaatatgaagttaaatgttgacgaattgaacaggagtgaagattgagaagagcgaaaatgcattgcatcataagatgagatgagaatacctggtctttgattttcctgtactccatttttgaggaacagtacagatctctttggttagttgttcagaatcagagcccctgggttttctttcagatctctctctttctataaatatatatatatatatatatttatatatgagcaattaagaagagagtgtcaccactgaatggagtgaattgaatactgtgatgaagaaacaaacaacaacggcctgcattgcataaccccaatcacttcaaaccttcc

SEQ ID NO: 209376 - DNA, 683 bp, Cannabis indica
ctgctctctgtttttgtagagttggatggcatggcatgtaagcagagaggcccaacaggccatgattttggcccaacttttcggttccagtaatcgacgaacactggctccagctcataaaagctgttgaaaataataccaaagctattacttgaggcctcaatagtttttgactggaactcaagagcaatagactcttcttcatcacttttaacacgtgggaaaaattcgtttcgcgcgagtttaatccaaggaaaatcagggactactgtccctgtctctgtctccatattattatcatcttgctcctgttcgtgaagagcagacgttttaccattaaagagagaatggaagacggccatggagtaatgtgacataccgtaagaaaccaaccgtgggaatcccagcttggaggccgaatcaagggtccaccaaaggaacccatcagagaccatgaagctcactggaggttgaatattctccagagctcgatctaagtcgggtttcatgagttgggtgcccaaaacgaaggtatggaggacgggcatggacacagaaggcaaagcgtctgtaccctctacgccggcggggactcccggcatgttttccggaaagggaagctcgagaatggcagcggatgtgccggagagagattgagctatgaagggtcggttggctggagt

SEQ ID NO: 209377 - DNA, 734 bp, Cannabis indica
ttttttttttttaaaaaaagagctagagtttttccttggatgatttgaagatagagaatcttggttcccttgattctttcctagctaaattggctgcaaaatgatgaaggaaaatctacttttcttttggtttatgaagatgccgagagaaagaaagtgtggtatgtgggactatagtaggtaacttttggagttgttaattattggattaatttttgtatgaaaagttatcaaatcttatgcggatgagaaaaaaaaaaatattttaggaagatgtgtacacttttgccaactataagtgttgcccctgattagagatgctcactacaaaaaatgtcacttttgccagcatatttttgtgatatcaaaagtttagtattgtgctagcaaaataaaatctatttttgatgtgttggcaaaaaggaattgacaaattaacgttggtattagaacttttgtcggcacaaaatgaaaagcgctggcgtgacttttcccagcacgtaaatgtgctactaaaagttaaatttttaaatatacgttggtaaaactttggcctttctgctaacataatttgcaagatacactgataaaaattacttttaccaacacaataacaaactgtactaacaaaagtgatatttggccttatgagtcaacaaattataaaccatgctagtactaaaaaaattaaaacaaccaaccaaaaaacaaaagaagttctttttttttttttt

SEQ ID NO: 209378 - DNA, 638 bp, Cannabis indica
ggggtttagaccttgttgatgtaggcctcgattatgtcttgtctttgtatgttgtatttctccattttcctatcaacaatcacagttagttagttaagagtgttttgagtttgttaggaagtgattttgccaactgtatgaattagttagaatctgttattctgttgcttagccttagtggtttataccagatttgtatataaactgttcctgtttttttgttgtaatcaatggaaaattacacagagttcttcaattccttttctctcagttttgtaatatggtatcagagctagactctgtgtaaactccattcacgtcttcttcttccttctttttctttcatggctcgaggtggaggagctcacactcgaagctctattgaaaatttaaatcgcttctctgctttggatcctggtggccattccttttctgatgatgctagaaatccctattttctatcaaatagtgatcaccctggagctagtctagttcctaagatccttaatggatgtgagaattatagctcatgacgtagagctatgactgttgctttgattgcgagaaataagctgaagttcgtcaatggcaagattccagaaccagaagaagacaatgatgattttgagctatggcat

SEQ ID NO: 209379 - DNA, 552 bp, Cannabis indica
aaggacaattcatcttggtaggaccaaatacgataccaacatcatacccaatgaaaagatcagcataaacaaaaaaatttctcccataagaaagggggaagctatttattagttggatttataatattaagtcatgaaattgatagactataattagtttgattggctctatacccaatccttggaaaaatctccgttatactaatctttggggatatacggtagctacaaatattcaactgaatattttaaggtggatcatacttatagcacccacttttgtttatgtaatatatatactatatatatagtatgaattaataaatgataaattgacattattcctttaatctactgtattatttaacttattcttgttgtcattcaattatttttttaaataagtagatacttattaaaatttaggttataactaggtataaaatattacaatatttttaagtgcaaaatttcttttttttttaaattttttttttttatatttttaaaatattctataaaaacaattaaaaaattacgtaaaagtaacat

SEQ ID NO: 209380 - DNA, 1880 bp, Cannabis indica
ttgatatttctatgttgccttagtaccatagttgttgactttcaccttaggccaacattgtcatgttgttatcttagtacttgagtcctgctgactttcaccctagataactagcatttcctgtgtcctgagtcttcttggctttacattctggaaaaacaaaccatctcaatgatactcatctcgatgcttgtattgaatatctagtctgctgagtgaactgtgagggtctctcccccacttcatctgtgggcatcctcgacaacaagcccacacgcaaatgtctgactgcctaacttttcatgcacaccacgccatctaaaagtgcatcccgcaggttgtgactctcgagtcaactatcacatatagcacccctgttgatttttatatgcatgccttgtccactcaaccatccaactgattcacactagcatcacgcccttctaggctccctcgatgtactaagttccaatgatgcaaccctctagccttcatgaaaactctagcacccttcttgaccttcgtaggctcacatgactactaagtctcactggcacagccctctagcctctacttaaactctagcgccatattgtgcttagtcttcttagccctgctggcttctttgatgtattcattcaacaactccacatctctatcaatgcctttgtgtgacttacgcccactggcgcttttacaagccaacacatcccactcgactgtgttggctcttcccatatggatcaaataaaagtcacatgcaaatgcctccaactacgatcatcctctgacgattgcggcatccgcctcttggtctccatgtgtgtccctcttgacacacacacacacgtagcaactgaatcattccatgtctatccaaatttaaaccatctcagtcatcaactcttgaccactgtcgtgactaacaagaatctaacggcccttgcaatacttctacacccatgccaataagtttctttttcaacaaaagcgcctcttgcggcttacgatgtcacttaggtaaactcgacctagtgtaccaagcatacagtatggactacctaatcaaatcttctactatgccaacgagtttcaagcatttttttgtgcctctctaaaatttcacatggtagttttctttctagcatccctaaacttaatttaaaccaaccatcactgtctcctttctaggatgtccagcattcccacaaagaaaagcaactcaatctcaactccatatccgtctattgatccactttaggagactaactagctcaatgacatcttgttccatcattcaaattatctcgatcatccacacgcctacatcccctctaggataggccaaccaggttcacctcccagtgagatgaacttagctctgataccaactgtcacgatctcactttttcaggcaatggaatacccatttggcactttgacttctctaagccaaggttagccttccagccattcgagtaataatgggctcatttattgcacgaccgtgtgcctctcgcacactttcgtctctcaaacaactctcgttgagtcatgctcggaagcatctatgagtgcatccatgcatcgaggctctctagccaagatactcacactgtctataggttcccactatgataaagaaaattccaacaccatcgctcacctcgtcactcgtgaccaaggtagcatgtgtggcaagatgccaacactaagttggcgtgccaacgcttctaatcatgccccatttgataccatccgaacagtctctctcatcgcccaaggactcccatacgtccatggtctaattctcaaggcaccatgcctctacacatgttggcaagctcttgagacaattcaccaaactagtagcatacgtt

SEQ ID NO: 209381 - DNA, 700 bp, Cannabis indica
agaaattagcatatgaacaatttttttttttgaaagcaaatgttttagtatatgaacaatttgatattatgtcattgctctaataatagtttttcaaatatgtcaacattggtcccctcatataaataaaatatccaaataataattatcaagcataaaaataaccaaaatatttagtctctctgaaacttctcctgtatatatattccatacagtttttcaatacactctaatataaagaagtttacagagacatcaaatggtaataaattacaaatacacccttttcaactatgagatattattccaagcaaatctaacctaaacccacccaattcttaccaaaaaaaaaactaacaaaatacccaaaaaaataaaaggaaacaaaatttaacccaaaaaataaaattacaatgttaccaaaaaataaaatttaaaaaccaacataataataataataataatctccttgcctaaatactctaaacctatgctgttttctgcatcttatctaagtgatcaacatcaagaacaacattttctttcaatatttgttcctcatttccgcaccaccgaccgatcgaccgataaaacgctttgttttcttaacttaaaaaatgaccttgatgatgagaacatatggtacaaatttcctcctcacttatacattttttgttgcagatgacaaggattttttgga

SEQ ID NO: 209382 - DNA, 510 bp, Cannabis indica
tctcactaatccgactgtgtacaggagtgccataggtgctttacagtacctaagtcataccagaccagacattgctttcgccataaataaattgagccaattcctacaaaatccaacaacaactcactggagtggagttaagcgaatcttgagatatctgaagggaaccattcgtcacggcttacacattggttttagtgaaagattatccttagttggttattcggatgctgattgggcatgttgtccagatgatagaaaatcggtggctggatattgtgtttatcttggagaagctcttgtttcgtggtcatcaaagaaacaagctgttgtttcaagatctagtacagaatccgaatacagagcattggcacatgtagcatctgaaataacttggattgaatccttgttaaaagaactaaagttcaaactgcctgagacaccaattacttggtgtgataacatcagtgccaatgcacttgcctccaatcccgtttaccatgcaagaac

SEQ ID NO: 209383 - DNA, 2112 bp, Cannabis indica
aactgttcatatatttggtaactgttcatatatagaggaggaaaaaaaaaacttacttgaatctaagcgaattgtaatcattttattaaaagtttgtattaatacattgaaaagctttatcaactaacaattatcattgtaaattgtttttgtatactgtctatttagtaaccatgtttgatggttaccaacatttattcattttacctcaggatcttatgatctttttctttttcttggtggttttagtactgggtcatttttacatgatcttttgttgtgtcctctctggcgacattgaccgcataccacttgtgcttttgcttcaagtccatttttgtatcgttgtttctttggtcttccggcagctctcttatgtttaggtgggaggactacaatatttcttattaaatctggtatattccatgatgttgcctcacctaatgggagtatactgtcttcatatgttgccataaaagcttctttcgtgtagtagtatgagcaatatttgtagcaagacaggttccttttgcttagtacagccattgcatgagagcaaggcatttcatcatattcaaatcgttggcagctgcatgttttattctccaagtttactatgtgagatctgttgttgtcgtgtacttggtataccagaaggtttgctgtttcaacctgtattaatcaagtaaacgattattaagtttacaacagagtaaatatgtttgtaagcaatttttatttttctgtatacataattaccttgtactttaaactcatatctctttgtttctttaatgttttttcaggtatttttgccagtgttgttgtagttttttgggctctattcttgttttcccaataccatctttgcaccaatgaatgtaggcattctagtagagttgcgatgggtaggtctcttactgctttcaaggctgcattgactgattcggcaatatttgatgtcattgttttgtatctcctgttcatgccatatagtcttgtccacttttcgacaccaatttcattcaccaagtaatctcttattcttacatctatattgtccaagtcttgcatgctcttttcaaaatcttctatgttgtaagctttagatgcactattaaatgcaatcttgagctcatcacctccttttttgaatttcatttttatattcttcatcaaatggtaacaacataccccatgcattatatctggaaaggtctcttttactgcttttagtatactctcatgtctatctgatacgatgcattgaccttctctttcgccataagtttcctttattttgtgaagaaaccattcccaagagctgtcattttcggaatctactactgcaaatgcaagtgggaatatatgtctatttgcattttgtgcacttgctatcaacaaagtgcctccatgttggtttgtcaaaaaggttccatctgtgactattattggtgtacagtgttgccaaccttttattgaagcacctactgcaaagtatagatatttgaatttgttatcttcatctgttactaggtctgtgattgttcctgtttcaaaagtaaccaattagtttatagtataaattcctatatagcatattagtactttatgttgacgaagtattttattacctgggtttgatatttgcatcatgtataaaattgatggtatctcactgtatgattcttgtgggcagcgacgagcatccacaattgccttttctctagctctccatgctttttggtaagatatagagacactgtaatcatctgccatgtcatccacaatttctgttggagtgtaatctctttttgggtttacaaacttgttttttataacctttccaaccaggttgcttgtagcttgaggatggtctccagaagtgatgtccaatgaacatgtatgagtatgctctatttttcttatgataaacatgtcagtctttccatgttttgatgctaagaatgtccagttgcagttatcatcaatacagactagtttatagtctagttttgatgatctttttaccttgaaaggttgattgtatcttattgagtgaaggcttactgcttgttggagggtttccttgtttgcaaaaacttggccaat

SEQ ID NO: 209384 - DNA, 1259 bp, Cannabis indica
tttttaaaattatcaacttttttttttcacaccttcttacattctctaaattttacacataaaaaaaaagaaaaccaaatcttcataaatatagtttaaatatttttaatactcaattttgaaatatagctttttgagaaattggccattataatatggtgttattcaatactagattccttagtcttatagggactgaagccatggtttcataataaacaaatcagaaaagacctataagctaattcgatgagcgcaatggtcgattggagaaatggtcagtgactccgtggcaaaggacttggctgaaagaagtgaggagaagattggttgaaatttatttctatccgtgaaatagagtaatttcatattttactcatttacctaagtggaacaatgaaatgataaatttaaggtgtgtatcatcacaccttactttgattaaatcaaaccaaaatctcatttgatacactaaggcctatttatatatatatataacttttaaaaatatatgacatatcttcaattaaactagattatagtagaagtatttggttttttttttttttttttgtctaactgaatcttacccacatctcaaaaaactgaacaaatagagaatagtcaaaaaaatcatacataaaaaaaaaaaaagtatctgatcaatgatctgggtatataattaaactacagaataaattaaaaaaaaaaaattaaaacaaaattgaaccattacacgagtatgttatttattttttattttttttataagtttttttacaattatgttattgttaataatgttttttaatttcttttaaaaattttaaataatttttttaaaaaattaaatatttaaataaaaatatgattattaatgtggaccaattatttaaatgtttttttttaaaaagaataattaattattcaacaaatttattttaaaatgggtaaaaattaagtttttataaaaaaatatatttttttttttttgcaaatattataactaaatggttaactgttaaaaatttgtaatagagatttaataaatataaaagtagaaatcatttataaatattaattattaaaaagagtctcattaaaaatttaaatgaaaaattaatttttatttattttataattaattataattatttttttgagataaaatagttacccaatatttaaataaagaatattatagatttgataaagaatttggatggtcaattattttatttttaaataaattttaacat

SEQ ID NO: 209385 - DNA, 1736 bp, Cannabis indica
tgaattcgaatcacttcacccaaatgattccttgctacgactgttgtgcacatgctttcaaggcccaccctcacttcaattttatccaatcctaaggaggaggactccaggacaccctcgaggttggagttgggcaaggcaagaaagcatcatgtaactctgcataagaagtacaaatctagtcaatacatttcaatacatccggaggtgagttattatgtagcaaatcgttgcgcatctctagttttgacatttgaggaaattataatttaaatttagtatattattatcctatttagttaaatttctactaaaagtataagataaatataagttttgacttatttttattatttgaataagtattatatgaatatcttttttgtaatgaaaagtacttttcaaagtatttgggtattattaaaaaatataaattagaaattatgtaaattattttaattttaaaaataactttttaaaatttttttgttaaaaaaagtaaaaaacccaaactacttctaaaaagatttttaaattaataaaaagattttttttattttttatctaaataactttgggaaattctacaatgcacatccttaaaatgaatatattgatgcactcttatctgttttagtacccgaaataattttttagtcaagttttttttcatggtcatgtacattatagttatttaagacatcctgtaaaattttaaaaaattcggaaaagtttaacatgccgaaaaatacgttcaaacagtgtgttgcacgcgtgactattttattttatacgcatgtaaaatagacaatttgaacattgttttctatattgtaaattattctgaatttctcaaaattttgtaggttatcttaaatagctataacatacataaatatgaaaaaaaattagactaaaaaattttattgaatgccgaaacaagtcaagggtgcatcagtacatcctttttaagagggtgcattgtagaatcacccaataactttaaaatgatttttttaattttaaaatttaaaaaagaacttataaaaactaaactaaacatggttataatggaatacattataattatgacaaatcttctaccggttttttaaaaaaattgaataattgcacagagtgtctggtactttttatacgtatacaaattgattattttaaattctgtttttggtattgtaaattattcataatttttcaaaaactaaccgcatggccatgatgcacaccgccatgtaaaaaaatttataatttttttaaataacaaaaagcgaaaagccccgccggtagaggcaaaaatgaccatcttacaactagaggtgaatttgtcaccaattttgactcttttgattacccatttaagttgcagcaaacttatattataagaaaaaaaaataacatgaaatcacactatagctctccattgttgtggataattgttcatcacagcaaatggaacaaagcatgaaactttactgttggcctttttcacctaaaccgatcttcagcgcgccatgtatgaagtttcatggtaagatctacgtgttttccgattcatcaacagagccaactacaaagcaaatttaatagattttcagtgatagaaaatcattttaacaattatgtccatcgtctgaaggaagcagttaccaaaccgcgcatgctcggtcgctgagaagatgcatgaccagctatgattttttctctgaattctgatc

SEQ ID NO: 209386 - DNA, 524 bp, Cannabis indica
gttaaaagatcttggtccccttcaattttttcttggcctataaattgctcgatattccaaaggtatttctctgtcataaagacccttcacactccaaatacttcatgattctagttatcttggctcaaaaccagtttctaccccaatggaaccgaaccttaaactcagcaatgattcaggggaaatactccataacccgactcaatatagaagcctcattggcaaacttctataccttacaatcacacagcctgacataagttttgccctaaacaaactcagccactttttacaatcccctcgataaccacacttgactgtcgcaaccagaatattacattacttgaaaaattccctaggatagggtctattcttttatgcatctgcaccatcacctattcaacttcaagcctttgtagatgctgattggggagcatgccttgacaccagacgatcaatctcacgctattgtgtcttcttaggtcgttccctcatatcctagaaattgaagaaacaacctacta

SEQ ID NO: 209387 - DNA, 821 bp, Cannabis indica
ttttgtcaaattttatttaatttcactattttaaagattgtttgtgtactaaatcatgctcctaaactttgatatctaccaaatcatgcccctcgaattttgacatgtactaaattatgccctctgaactttcatccatgttagacttttttactaaaattagaaaaaaaatccttaagtccaacaatctaaatagttcaggagacatttttaacgaccttaaaagttcaggagacatgatttggtatatgtcaaaattcaagaggcaaaaatcttaattagcctttcttttttcctattttattttatttgtacaataattatttttttactgtgtttatttatttatttatttactttttgaattttagacaacaaaatacacttaccaataaaatatatatttacatatataaaaagttgaaatttttaattgattgcagtcaatttttttttttacttaaaataattttattcttaacccttttttttcttttttttttttaaatttgtgcaaattcacatgaactctcattcctatatattatttatgtgtttatacatatatattgctcttaagcatataattaaacactctttatttaattttttattatttttgagctttatttttcctgttcattatcttcttcttcttttttttttcatgtctacaacatcaactaaataaaagctaaaccttttctttagtaggtaacaaaaaaaaagtatgtgaagtaagaagaagaaaaagaaaatttgttgaatataagagtgtgactgtgtgtgtgatagaggagagtttgctctgtgatgagctt

SEQ ID NO: 209388 - DNA, 503 bp, Cannabis indica
cctctagtgtaagctggaatggtaggtggggtacgaccatagactgcttgaaatggtgtcatgccgatggcggagtgataagtagtattgtagtgatattcagcccatgagagaaacttgctccatttcttggggtactcggcagagaatgcacgtaaatattgttctaagtagcagtttgtgacctccgtttggccatccgtttgggggtgataggctgaactcatttttaatgtggtacccattaactcgaacaattttttccaaaaggcacttgtaaacacagggtcacggtctgaaacaatggtccgaggcatgctatggagccgaatcaccatgtgagaaaaaaggtctgcgaccttggttgctgtataatgaattggtaaagctccaaagtgagcgtatttagtgaagcgatcaatgaccacgaggatgttggtggctccattagaattaggcaaaccgacaatgaaatccatagataaatcctcccaaacccgttc

SEQ ID NO: 209389 - DNA, 1333 bp, Cannabis indica
taaaaaggtttggaagaatgataaatagttttagaatatttacgttggcttttggccaataaacaactttcacattgaaaagacaaaggattcaattttttaaacaaagtgggaaacaagtgttttaaataagaaaaactaggatgacctagcctataatgccaaatcattatttgatcataaacagaagaagaactgatgctactaagcccctgagcaattttattcttagaaatatcatcttcaaaataatagagaccatttatcatcctagcaccgccaatcgtcttccctgaactttggtcctgaaaaagacaataagattcatggaagattacacaacaactagccttgataatttactcacagacagaagattgcaggttagattaggaacatgaagaacagatttaagatctattctttcagagaatcttataagaccttttcctacaataggtgagaaattaccatctgcaatcttaacttttttatcacctgaacaaggtatataggagttaaacaaattagaagaatttgtcatatgatcagaagctccagaatcaattacccaaggagcataatttggaaagaaacaaattaaagcatttatttctttacctgattatgcaacagaaacattaggaatactagatgaggacaaagtggatttcagcaatgcatgaagttgagccatctgctccttagtgaaaggattagcctcgacttcatttgcagtagggttgcgactatttctttctgccttactcttccaatttgttggttttccatgaattctccagcaggtttctcgagtatggcgaggtttattacaaaattcacaccaaacacggggtttctcatcaggttttggcagatgtggagtgttcttactgtagcctcctccaacagcaaaggctgatccttcaatagaagtgccaacaaccctttttccgagcataacactcctcctactctcctctcttctaacctcagaaaaaacttcgccaatagaaggtaagggctgccttccaataattctcccccttgcctcatcatactcaacagtgagaccagccaagaatttacaaatctgggttttctcaattgttttcttatgggctagaacaatagtggtcttagagggattaatttttgtggtggctgactcactgctttcagacatggtggaaagggattagagaaaggcaggctgggattagggtttagggttgtgtgttggctttgataccaagtcaacaaagagggtaatttttctatattatttctcagaaatatgcatgttaaaatatttaacatgtacaagaatccc

SEQ ID NO: 209390 - DNA, 518 bp, Cannabis indica
agggcctaaaaagatagaaaaaccgcacatattcggatttaaatttttgggaaaccaccacgagaatatattttttttcttgctgacaaagaggcaggccgcgacatgctaataccatgccgcgacatgtgtggccttctgagatattccccttaatttttttaacgtaggcgggccgtggcatgctaataccatgccgcggcccgtgtggtgctctgatccaaattccacatctttttatcttttttttccgaatttgaatttgatattttccaccaggataattttatgcgatattttatcctttttctattgatattttccaactcttcatctattttaaatctgcaaaatttaaaagataaaaacgtaaaaatgctccaaacatgatttaaactgaaaaaaaaaatgctaaaattaacctaaatttaatactaaaaataacctaacaccttataagcacaatttgacgaccaatttcgtaaaaagtccgaccactatacacacacaacaacaat

SEQ ID NO: 209391 - DNA, 670 bp, Cannabis indica
gtttagggcatgggacgattttcgctcccacattctgcgtttttcattttccgtccactttcgctgcctttggtttttgcacccgatgtttgctaaggaaagtcctttgggtttccatttttggcaaacatccggagggggcctctttccagcggttaggggacccccattcccttttttaacattagggtttggtttggggtctaactgctggattctttcttttttcagaacaaaacatgtctacccctgcgtccggagctaagtcttctaagaagggggcggccgctctggccaccctagaggaggttatgaagggcccggtggcccaggagaactacacatgccgttctaacggctgggaagctgatgaactccactccaccctgatttgtgctcaccaattggagaagatcgtgacggttgttgggattatatcgtccgtgtctggggttttccatcgtttacctcgagacgaagagacgcccaaccacaattatgggggtttcagagcttggagccagacccatctcatgtccagagccatgcttctccttcaggattacttcattaatttccttgtatttgttggtctcgcgccttaccaacttattccctaagcttaccgccactctcaggcctttttgttttttatgtagccagaggctgg

SEQ ID NO: 209392 - DNA, 500 bp, Cannabis indica
tttattaaattaatttatttttaactaagtataacataatttcttttattctttttctttccaaaagtatatttttatataaaaaaaatatattgactctcaaataatcattttactatatataaataaactaaactataagccatcaaataacggacaattaaattaataaataatttaacaatgaaatctcaactttatttgcttttcaatttagttttatcccaaaactaagaaaacaataatttgtcatcaaaattataggacaatttttgagctttctttttctttttgatcgactagtaactctatgtacatgatctaattaagctattaatcattatattggcagtctagtctcttatttcttgttatttgacttcctggtcggagcgtacgtgcatgacaactcttttgacgctgcttacctcttcgatcgtagtgttgctgtcacagtagttattgggatgcatggtttatagatgatatatatatatata

SEQ ID NO: 209393 - DNA, 1607 bp, Cannabis indica
aataagattatcttaataatttgatctttttttatttaccatatttcgagttatgtgttttgtttttgcttttaccaattattaatatttatccttattctgtctcttttcttaatctctcattttttctttttctttatcttttttttaaaaaaaaaatctctgattttttactcgatttgttttttttaaatatgtaccattttttaagtcttttgtacatttttactattttttttcatgtattttttaaaataaattttacttgcttatttttttatgtttttcttcttatttatttattagtaaatataatatagtgtaaaaattatataagtatatatatggtattaatcttttttgtggtgttattcttcttttctttataaatttttgttagttattattttattttttttctaaactttatttataattagtagataataatagagaaaatcagacaagaaaattagacgagcttacatttagatattggagaaaataccatacttatgttcttgtttaaatatatttttttaatagttatttaaatataattgataaaagtaagagatatgaatataattcatatatattgatgggtattacgtgtttttggtacgtactccttaactagtatatctattctatataaaatgtgcctatgtaacagaatttttggtttatgaaaaattattgggtgattttttttaacacttttaaaatatttcaaatcaaaccttcctattctcacgaaaacgattcagtttgttaatcgcttttaagtaataacttatttattttttttatgaaaagaaataaattctcaatcaatttgaaaaccttatcaagcgaataaatcttatttgaaagactaaataatcagtttaacgattgacatagcaagccaataaaataaaattaaatatataattaatattaaatagcttacgatttgtaagctaatatataaatataagtaataataaatatatattaacccccttcttgaaccatcaattatcattgattgtcgaatgcaccaagtctctctctctctctctctctctctctctctctttgaaaacccatccccgtaagccatcctcgccaccttcgttccgtacaatgacgagaaaccaaaaccccgtagccattgatggcccctcagtctccaagtataacttgccatttgggctgccggagtaatttggccatatggatgagtcgattgaagatggaagatctgcgatcggtagtagagtcgatttgggcatttggaagctttgtaaaaaatttccatgtacaatctcttctccatatatgattgagaagtatggttagtgagaaatcttcgttgatgtttttaatcgaattgggtttttctctgctctttatttatatgactatattcaatacccctaatgcatcactaattttcaagaacaaaatgttactcaattcattagatttggagtttgcactgctcactttgaagttttatgtatattcactcattggaaaacaggtactgtacttagggttttaagtttttaatctgctaatgagattggaaaacaggaaactcttctttttgtttggat

SEQ ID NO: 209394 - DNA, 843 bp, Cannabis indica
catagaattagcttaaacaattctcacacaactctaactcacgtttcatgtatgaaaacctagtttttactatgaactttaaagaggagaagtgaagagattaccttgaacttgaaatggactaaggttactagaaattttgttagaatcctcagaaataattagaattttagactttttggttgctttgatttgggtctggtcgaagcctaagggagaaagggacaaagaatttcttccaattttctaatttcttctaaatgattaatgaataaaacccacttatttcaacataaaaaaatcaattaactaaaagttagtagaaatccacctatctttaaaaacaaaattagggtaaagttaccaatttaccccttgcttcatcatgaagtaactttgccacttaagggtattttagtcaaacctaataatcccgcataatcctaacatactaaatatttatctataatgccctgctatttctaaagtactaaactaaaataaattgactctataggccatacgtcgcattccactgttaccgacataaaaaatgaaaaatataaaattcatatataatataatttgcacacttagaattcaaatatatctccacaattgcataaataataattaaaagtctaattctgaattaaactctaattatctgctaattctcatattaaagctaagcggtcattttttctgttagtgatttttttattttttattttttaattttgtgaataagaagattgtattacttcaaaagcaaactcattacaaactaatagtgctaataaggccggtttggactctatattctcctgcaatacaagtatc

SEQ ID NO: 209395 - DNA, 616 bp, Cannabis indica
cttattttgatatatatttttttgtataacatgcatacaaatatacaattattcttaattatatactataacgatttgtatgatttttcttaattttttccattctgaataaattatgtattggttgaattggtacaaatgatgtgtatatatttgttttacccataagacaattatataaatatataacttcttccactatttatattttttaaaaaattaaaagtgtctctctatatataaaaatttatattaatttcttccactatttattattttttaaaaaattaaagtatctccctctatatataaaataaataaggtctaattgttcaaaataaataaataaataaggtttgaacaaggaagttggggttgaaaatattttgtatgatatggtcagcctctatttaaaaatagaaataaaaaactataggaatacctaatattgatgaaagtttagagaagactatatgggaagcacaatattttagtacatggattatatcaatattttaataaaatggaagaaaattggatagaaatttttaaattcaacaatctcattggagtacataaatgatcactcaaattaaagaaaaattaggataaatcc

SEQ ID NO: 209396 - DNA, 655 bp, Cannabis indica
tcaaaaataaaatatattaactcatattatattaaaattaatattaaaaagaggggtaatctactcatacttgaaaattaggtccaccaaagtcaaagatagggtactaagtgtgtagaatttgtaaataaagggcaccaagtagttaattttagaaacataaggtactaaacttgtatcttgataaaacacaaggtactaaatatatgtttattgtttgtaaataaataaattaaaaatattaaaataaggtcctccaccgttccatctagcgaccggcgagaacaccctgatctgtcacgccaccatatcgacatggtcggtttcgcagcgacgttttcagtcaaagaatagcgagtggaaattaacaaggtcctcttcctgttgcataacttgtgttttggatccttgattcggagtctgaggttggtcctacgctcaatcctaattagagtccagatcttttacgggcttctcgacgaagtcaaaaaacaacgaatcactcaaggtctctctttcctttcccaaggtatttgattccatgtgagcatcatatcagcaaacagtaccttattagcattgtttttgcactatttttttaatgggttggatgctttttatggtctttgtgtcatctttatggcttgcccctaat

SEQ ID NO: 209397 - DNA, 922 bp, Cannabis indica
agatttcacttagtctagatctcgcaattttgcttctttaattctttcaaaaaagtacattgcatggtaatgttagctaacttccccacaacaaactcaatattagcttgggtcatttcctcagccagtttcttggagatttgtttcactgtattcatctggttctgactttttctacttagggcatcagttacaacattggccttcccaatatgataaagaatttcacagtcataatcctttactagctcaagccaacgcctttgtctcatgttcaggcctgtctgggtaaaaaagtatttcagacttttatgatcagtgtatatgtcacatttcttgccatataagtaatgttgccaaatctttagcgtaaaaactactgctgtgagctctagaatgtgagtagggtacctcttctctactcctttaactgtcgagaagcataaactatcacctttctagtttgaataagaacatagcctagaccttgtctcgaggcatcacaataaacaacaaacttttccttattagaaggaagagttaatactggaggggtaatcaagtgctgctttaactcttgaaagcttttctcacaccgatcattccacataaactttagattcttctgggttagttctgtttagggtgttgcaatttttgagaaaccccccatgaaccgacaatagtaaccagctaaacccaaaacttctaacttcagtagccgattttggtgttggcaaatcctgaacagcttcgatcttggccaaatcaaccatgatcccatctttatccactatgtgccccaagaaagatacacgtgataaccagaactcacacttcttgaacttagcgtaaagcttgtgatccagtaatcattgaagtactaacctgagatgtacttcatgctcttcctctgattcaa

SEQ ID NO: 209398 - DNA, 741 bp, Cannabis indica
cttgagtatatgttgttttataagaccaatttctaaaacttaatccaaagcagacacagtgtttgttgtcctgagaataattaatgaaaaagaaaatgcggtgagcgtggatcgaacacgcgaccttcagatcttcagtctgacgctctcccaactgagctatcccccgcttcacgagcaatttctcactacacaaaaccttcacaattacaatctttcttccctgtttggtttcctagaaattcggtaatatccagagagacaaggggagaacttggggatcatctatagggcactacaagtatttgtttgtttgttgtttttttaattgtttctttaggtttttattaatttgttttaaaagtgtactttttgaagcttgtgatctgctttgttactgcgtatttttggattctgcattgttatatgattttgcagacattggattttctccatatgagagtattcaaggtagcttcggacaatatgcaagcaagggtccaatcttttagaaaagaagagatgtgtaagatagattataaatcttatagcatagacaatgaagaattcctaccaatctcggtggagcagaagacgatttagcatagacaatgaagaattcctaccaatctcgggtggagcagaagacgatttggtagatgtctcctaattgtaattatccctttattatgcatcctaatttctatcaatttgtttaattagccttcattccattgacaa

SEQ ID NO: 209399 - DNA, 609 bp, Cannabis indica
aaaaccctaggtgagttaaaggcgacaattgtgtgggtggacctattcactaccaaggggcatgagtcaagttgtgacaatcagagccccgtgaactatgaaggaaagaccaagagctaaacatccccacgttgcttgggggaaaggtcgtatgtagtgattccgaaattatgtaggcgagggactaaatagttgttgaggacttgaatggattgcttgggactacctatgttagcaagaagcatcttgttttcgtagcccacgatgaaggaactccatggttaagtgtcgttgacctggggtgatttcatttaggaagttttcccatgaagcttgcgaataaaaacaaagcatgttagaaacacttggattggtctctagggctagttgtcaatcaaggaagcaattggagtgacgcatttgtgcataagggccatcattttgtgactataagagcacaatggaggcttgaagcgaggatattaccatggtaacatataaagaagattagggagagtagttttatcgctaaggtaaagaagattacctagattacttatggtgatacggtaacgatggaaagtgtgtttatagttgactggatagtca

SEQ ID NO: 209400 - DNA, 699 bp, Cannabis indica
tcgtcagaaaagtcaccgaaaaaaatcactgaaaaagttaccaaaagtaaatgtttcaaatataaacaaatatagaaccggttctattatataatgaataaaaataaataacacaaaataactcaaaccggttataattgaaatataaccaattttataaaaaaaaaaaatataacaaattttataacataatgaataaaaataaataacataaaataactcaaaccagttataattaaaatagatccggttctataacaatattataatgaataaaaacaactaacacgaaataactcaaaccgattataactaaaataaaatcaattacttatattacaaatttattctttcgcttatattttattcatttctataaataattttttaatgtatagcttatcttgagctaatatactataatttaagagtctaaacaaaaaataattgtataaataatattctaacaataaaatttaagactgtacatatttgaaaaaaaaaattacaaaaatcttttgattgtatttcattcatttttgtaaataatttcttaatgttagagctgattctgcactaatatactataattcaagagtccatgtataaaataattacatagatagtattctaacaataaaatgtgggattatgaacgtgtagttttagagttaatatttacataaagttattatattt

SEQ ID NO: 209401 - DNA, 507 bp, Cannabis indica
caagtcattgtgattgcagaaatggatcagtatgtgtactgctatgccaagattttagggcaaaaggagactttctgtattacctttgtttatgggcacaactcgattaagtctacaaaaatgttatggcagagcctaaaaattcttgctttaccaataaaaccttagcttttattaggagattttaatgctcctcttagtaagaacaatagatatagaggtcattgtgtgactcaagttgagatagtagactcttctaattagttagctctcggattgactgactatttgaaaagttctggttctttctatacttggactaacaactaggatgatcaagtaagaatctattcttgtattcatcatgttctaaataatgaaaattttttagatgcttttcctgattttggacccataattcagtaggagacaacctctgaccattgttcatgtttaatgaaagcttttcttgttaatgacccaggtattaaggccttcaaattttac

SEQ ID NO: 209402 - DNA, 924 bp, Cannabis indica
tgaaacgtatcatgatgtggctatgttgattacatttataggtcaataggttataaaacttttcctcttttaagttggtattaatttagctatgtttgagttaaaataaatatataattaatctttttttattcttaaatgaaaattaattttgatgacttttggtttgactgttcttattataaactataagtataagtatttttataagtataaaaatttagaataataagaaaaaaagataaaaacaaaattttataatgccacatcaccttatttaacattagaattagaattatatagatatatagatagatacgaatatatagatagataaatatatataaataaataaatatagatataaatataaagtgaaaataattatattttagttataaatcttataggtataaaaccaccaaactcatcctaacacatatactatgctagaacgttaaatagaatgtaagagtcttaagaattaaatgtcaaattcaaactctgttatataaaatctttaagttattataattgttaaaaaaaaatataatgattaagttatggaagtgtaagagttttatggattaattgtcaaaataattttcaccataattatgtcaaaataaaaaattaaagcacattaaaggagaaaaatataataaaaactaatgaaataatatgaaaaattgagagagctaagattagaaaaaaaagatcatatagattgccacctcaactccttcaaaccttcttttatatatatagattgattgatattgattactgtatatgtcatttgcagtcaacatcacaattattattgcttacatttgtgtcaattaaataatctttaaagtattattttaatctttatttgtttaatatgtaacatgaaatgtattttaaattacttaatcaaag

SEQ ID NO: 209403 - DNA, 1267 bp, Cannabis indica
agatttagggctcgatttaggcttagatctccaatttggagaaatcagtttttgggaagataatggtccaatgggacccccgatgggtccgatggtatggcccgatgcattggctttgattttaaaaaaaatgatctgggtccgatggcccaatgggtctgatggtctctactataaagggtccgatatgggtccgatggtccgattgtaggcccgatggggcgccatcggaccccgttttttttttttggttttattaattattatttatctagttattgttttaggtattattttatttttaatgatttattaagtattttttaattaattattgtgttaattttattgttttattaattattagttatgtttttttagtaattattaattattgtgttagtattaattattaattattgttttaatttttattaattattaattattgttctattttttattttttattaataattgttttatattaattatttttaattgttttagttataattgttaattattattttagtattaattattaattattgttttaatttttattaattattaattattgttctattttttattttttattaataattgttttatattaattattttttaattgttttagttataattgtaattattgttttattattaattattaattattattttattattaattattaattattgttactttttatttattaataattatttgatattatttattagtatattatttattagttattgtttaattgtttaatttttttattattttagttataattattaattattgttttattattaattgttttacatgaattattagttattgttttattttttattgtttttgttataataattaattattgaattattattaattattaattattattttattattaattattgttatattttttatttattaataatttttttatattaattattaattattttttattaatacttgttttatattaattattaataattgttttattaataatttttttattattaatgaatcaattattgttttatttttttattattaattattaattatcgttcttggttttttttttcagggaactccacatctaataattccaatgtcggaccattacactggccgtgtcacatggcgcggcggtagttattactacccgaagattaaggctaaatttcaagaattcaacctatgggacagggtgagggaatccccttt

SEQ ID NO: 209404 - DNA, 707 bp, Cannabis indica
gttgaatggtgtgataattatttgcaggaggctcgggggccatgtgcaggtggaagtggtcgggttgtgagggagaaggcacgttggctgcctcctccgaatgctgaagtgaagataaatgttgatgcgggtgtgaagtgtggagaggggcattcaagtttcagttgtgttattcaggatgcgggggggcaatgtttgtttgcttcggctgctgctatgccaagggagtactcaccattacatgtggagttgttggctatttaaaatggcttgcaagttgggatacaacgggaactacatcgctttagtattgaatcagattgtcaagctgctgtccatttaatccatgctaaggaggacggctgtcgagacattgtggcatactaaatggtattagagagttaatgttacatgtttctgttgttggtgtttcttttgtgtatcgggaggccaatgaggttgtccatgctttagccaattacgctttgtttaacaaggtgagagctatgtggattggagttgtttccccttgcgcgagacttgtggtgttgtaagacttgcctaatcctttgtaattgatttggggtaatgaagaatttattttcaaaaaaaaaaaagttggaagagatgtctctggttaaaatacagacaattattttagttagttgctattaacaaaattagataattaatttttaaaaaaaaaa

SEQ ID NO: 209405 - DNA, 792 bp, Cannabis indica
acatagcttaactcggaccctaagaaaaggcccccatccttcattcgtagaatcctcaaaaacttccatgaattgcccaatggtgtttccaagtgcttcagcaagtgcagtggttttgctgaggaaaggtagcctatagatttgaacccagaaaggagtgaaaatcaaatcctccgttgagacattttgcagaacatttggcgtgagtaaaacgattaagtggttctgaaaatgccaaggctcctttgtaaggactcttcttctatctccttcacacccaaaagagacatgaaacatatcagttttgaattcagtgatggttacaggaaaccggcctctccaatggccaggcatttgatcataaaaacctggtttgtaaattggctttgaggaaatgacacgggctatgagggagaaaggcgaggtattaggggtggaaaccgaaggtaaggagataatatttctctcctcatcagtaagggatagggtggattgtagtgaatcagtaaagtggtccattgcaacaaaggtattgcgatcggaagcagagaaaaaaacctgaaaaaaaccaggaaaaacctggaaacaggggaggagcaaggcggaagagggaggagggaaaaggcgggagcagttaaggaaacttaggattcaaaaaaggaaaaaatagatggataaaagtacatgaaaataacaacaaaaatgacatacaaataataaaaaatcaacaacaatttaacaagaatataacataaaaagactgcattttctgttaataaaatcaaaaaattt

SEQ ID NO: 209406 - DNA, 1123 bp, Cannabis indica
gtggaagccacatgacaaacatagttttgcaaatgggatggtttgacaataggtctaccttttgtggaggtttgtatggcaatagatgaagtaggaccgggtttggttgttgttaattcaacaaccgtgtgttgatcctgggaagattgagttgctggtgtgagtgttgttggttcaacaccagtgtgctgatcctgggaagattgtgctgctggtgaagtaggagcatcagattggagaaagggtggatctggtgcatgttcaattgttgcaggagcaacaggttgctggattgagtttattgtattggtgactgttgctggtgcaacaggttgttggcaggggaggattgcttgagaaaaataattgtcaatctcagttgatggtatggtagagatgaatggaaaaatattctcatgaaatgtaacatctctagatgtgtatatttgatgagattcaatatcaagtaggagataggctttcatgccggttggatagccaataaaaatagaggcgcggctcctaggtgaaaatttgtgccgtttagaacttaaagttgaaccataagctaaacatccgaatgatctaagatgatcataaataggtggtttttggtataatatttcaaaggatgtactgtgatgaagtagcacagaaggtgtacggttcattaagtaagtagccgtggcaattaggtgaggccaataaaccaatgggagatgagattggaattctaatgcacgagcaacatttagaatgtgctggtgtttcctctcaacaacggagttttgttgaggtctctcaacacatgagtgataatgtatgactcatttggatgcataaaaggaggagagatttaattctttggcattatccgaacggacaaccttgatattgagagcaaattgagtggaaatcatggcaaaaaaatctgggatgattttgtttacttcagatttcgttttcagcatatatgtccatgtgtatcgagatttatcatcaacaatagtcaagaagtatttatagccttcagtactaattattggaaagggaccccaaatgtccaatggactaaatcaaatatatgagattccaaatttttattggatacaaaagggagttt

SEQ ID NO: 209407 - DNA, 554 bp, Cannabis indica
tgatcctgaagaaaatgacattggagcaactgcaaagagggtgtattttcaggatggtccagatagcagtgacacagacaatgaacgggtaaagagatagagttccattggtttattattggatagtgttgactgctataagagaatatcactatgagatttttgtaattatgtgcctatcactcacattattacaaaagggttatagtgatattctctcatagattgtatatttgacttttctttaattattttgaaacactaaagagaaagcctaaccaatcaagacgtatcagttccctcaacaatgcagataaagccattagaacaaatataagacattcaatttgttatcttaatactttaacaccacctcaatcaattagacaatgtctactaattgaatgtctggttttactagaaggttgagatagcagcctttgtgtgaactttaattactttttcaaatttcaagtgcaacttaagattttataattgttagatctttgactttattaggtaatagcaaccgagattttcctaacaaagtctta

SEQ ID NO: 209408 - DNA, 519 bp, Cannabis indica
actgcaataaaacaaaaaaaaatgatgaaaaaccggtttctgtgcaaacaaaacaaaacctgacaaaaaatataaacagaacaaaacataaaactagtttcaattaaaaaaaatatatgatgaaaagaggaagaattacctattgacctgacttggaagcccatctatgaacttgaaattcaaaggttctcttttcccaacagaatatggaccttgatccaaattaagatccggcctagaagaataaacatcaagatactccaaataaaatggcagcatagtagaataagctttcacatgatccaaggcgcgtttcttgttgagagcaccagacatggagttatatacgttcaacatcctctccttgatgtcaaaatggaccaatatccaatgtttttgcttttgaatattgacatatataagaacatggtcagtaagcacccaaggagtattgcaaaacaaatactcaccaacaatgtatccaggaatgaaattttcaaagtcaatcttagaaggatt

SEQ ID NO: 209409 - DNA, 737 bp, Cannabis indica
aactcctttttctctttttccagtcgctaaaatttgccaatgcaccaggccaaaaatgattcttcctgctgaattacagtccctattcccactcgatcccaacttgtcttaacagcaggacaggttacaagcgcgtgcaaaatagattcatcttcgatagaacagactggacacttagcttcaaccggtacatgcttgaaccggagctggagcatcgttagaaggcagccacttcctgctctccacaccaggttcttcattttagaaggaagtttgagactctaaaattgtttccagaatttattctccactatctccaccaaatcaacctcaccttttagctcctacatcaatctatatgcacttttaacagtgtacactcctgaaagttctctaaaccacaccagacagtcacgggttgttggtgtgtcaagcgtaatatgcaagatcaaattgcgatctcttggctcaaaaagatcattcagcaccacctcatcccattctaatctgcccggtttcatcaagtttgcaactttagtatttattaggcccgagtgtgaagacataatccttgggttagcatcatcagggagccatgcctctcctaacaccgagatagaactaccattaccaacattccaacaaacccccctagccaccaaattttgagcttcaaggatactccgccaaacatagctcaggttggatcctaaagaggccgaaataaacgtgccatt

SEQ ID NO: 209410 - DNA, 1096 bp, Cannabis indica
caacaacaacatgcacctcatcagtttttaccttttcagcaacgacacagactgtccacaatcatctccactcccaccatcctcatcagtatttggaccaccatcaccagagttgtcattggcattatcatcatcatctccaggctcattgtcttccctgaaatcaatttcttcatcatcctcatttttaccatcaccaacaacatcatcatcattttctaaggagcgaagcacattctctgtttggcttgaatgatggttataagcagcacgcgaagactatgaaaagaaaaggaaatttgaataaaaacctaaacaaaataaaaaacaatacaaaaacaacacaactagtacattaaaaaaagaaacaaaaaataatacctcaataagagtatccatctttctgttcaaatcaacaaaattagacacaataatttgctgttggctaagaacaagagacacattttttttaaatcctcatactcaatacgagttacatgctcatgagccttagacgatggtggaccaacttgatcaccttctatagaagcattgggcacagatttagaactgaattcacgattacctttacctttaaccttaataaaggaaggagtcgtgtcaccagaaaaataatcagtcagatttaaattgaatatctcaacagaagttggaaaaatatttcagttgaaactgtaaaaaaaggcaacaaaggaaaaaggaataaaagtgaataaaaatacaattcataaaataaattaaaaaacaacactaaaataacaaaaaaaaaaaaacaaaagtaaaacaacacacaaatacctcctttaaaggttgattgaagatgatgctattcacattatccatttttagctgaaatacttttagctttggcattttaggccagttaagaagcctagaaatgccaatgtttgaatacaaagaaagttttccaatgacgtatggataatactcaaaaaactaaacctgcaatgcataaggaaaaactaacaacctataaaacctaccatccttatccttcttcctaacagtcataatattgacatcaatcttatccttaagagattcaatagtcatc

SEQ ID NO: 209411 - DNA, 664 bp, Cannabis indica
gagattcaatagtcatctcaaaaaacttcgttccccacccactcattataatgaccactattcataatatcaagttctttaatagaaataacctttcgaagaggacctcccagcaagtgtaatactgaacaaaatacaaaacagccaacttgactgcaagatcaacattatccctaaggttgttagcagtaaaggtaacttaattcgaattcctggtaatttcttttattaccctttaaacaatgttcaactagcatattcttatcatgtttgaactgaaatatattcgactcaatgtggtaatctagacctgtgggtaaggcaaattcctctacactaaatctaagaaacttcctagcaacagatacctagaattccatctcattaggttgttgaacttccctcaacaatagaccatgcaagacttgaaaatgaataatatattctggaattcgaaggaagtgacccaaaatagtttgagaaaagattttcaactgggttggggttggaatagttttaatatcgttaatggatgaataataactagaagttattaatttagaatgataatgttgtgagcacctatatttacatgtctagtcgtgggaaaataaacatgcaaattttttttaaaccaactcaaaaataactagaaaacaaaaaa

SEQ ID NO: 209412 - DNA, 551 bp, Cannabis indica
cccaggttcttgatgcactgatatgcttttttagtcctctcggtcctgagggccagtgctctctctagggagcctgcccctcggcggacccttcccttttgggaaatcagagaagacttttcgcggatcctaagcattttttttctctttatggaattacgtaggatttctcatatggttcccttcatagggatatcgtaaagggcttggttccctatttttatgcttttgggtacttggtgacgactcttcctgtctttctcctggtcccgaaggtacgaccttaggatgcacgtggattccagccattttcatagccttctgcatggcgaccattatctcttgcatcctcctattttcgtccttttgcgcgtccagttcggccttgtgatcagctgccttttgccttagggtaagtagttcggtataattgccatcgtcataagcctcataccctttttggttttcttcgtactccttgtcatttgttttgtcttgctcttcagagtccatgtttactcatgaagttgcttcttcgtcccttggattct

SEQ ID NO: 209413 - DNA, 774 bp, Cannabis indica
atctgaataaagaacactactcgagcattcatgtagcagagaaaaaggcaaggcaagatcttgaaaatgtgctaagtttgctacaccagcagcctttgaatgtgcagctgcgaattcaagaacaagaagcaagagaacagtttgtcaagatacataaagattattgctcctttttgcaacagaagtctagagtacattggctcaaagagggtgatgaaaactcagcactatttcattcgagcatcagagagagaaggcagcacaataatatcctatctatagcagatgcgaatggaacaaggcacgaagatccggagagcatcactaaagctttcttagctttctaccaagaattatgggatctaagatggtgaacagactgcctgtaaacatcagcttaatcagaaaaggagcatgtgtaactgaacaacatagttggattctaaatgctgcttacacaatggaggagttaaaagatgctatttttggcataccaatagtaaaggccccgaggccagacgggtacggtagctcgttctaccaggacaattgggacttaatcaaacaagatatctttgaagcagtaactttatttcttcactctggccatttacttaaggagctgaattcgacgataatcaatcttgtgccaaatagtaaatgcccgaatgttgtaagtgattatagacatatagcctgttgttatgtactctacaaggttgcaactaaaatgatttgtagcaaatggaaacttatactgccagatattatagc

SEQ ID NO: 209414 - DNA, 510 bp, Cannabis indica
gattgctctcccacccccatacttgcttcttaaattcacttcatatccgccccaatacccgtccccaatacccgtttaaattaaagcggatcgggacgggtattacccgacgagggaaggatcccatcagatacccattacatatatatttttgaaaataaatgatgtcttaaagagaattaaaaaaaataatcataaaaacttggtaaaaataataaacttaagtgaaatagtgtgtatagtaaaaaaaaaagtataatcaggatgaagttattttaattttagtagttatgatattaaaatttaaatatatatatatatatcatatcggggcgggtacgggacgactattcccccactctcgtcccgttttcgactcgagtatgaatctttaaacccatacccgcccctaccctccgaaagtcaacccccactacccgccccattaggggcggacctgcaggtataattgtcatccctatgatagaaagattcattgatgattggcat

SEQ ID NO: 209415 - DNA, 769 bp, Cannabis indica
aaattctacatatatagtagtttagacaaaagattagttgcataatttgttttttgagctaaaagtcttatatgctaatttgggtatatgccaacaaacaaacaaccgtagtggaaaccagtcatggacaagcatcacaaaatatgtgaattgggaattaatgcttgaaaaaagaaaataagatgttcttgtcattagttgctaaactaagcataattatttggagacattatttaatacataatactatgctactataacaaggttactagattcactcaaaagccaagagagagagaaagaagggggtaaagggttgtggtagtttagctgtaaccataccaaaaagacaaataacaaaggacaccctataatgtaagaggtagagaggaagagttggttagttttaagaaaaccaacaaatgaggaaatttacaacacatttttagcttttaggtctttgggtaactaggtaccatttggaattcatactacttgattccgcatagattaggcggactagatttgtgtatagaacttctactgaaaaggcgtataattttttttttaatttttggcagttaaattctcccaattattgtttcacttatacttaatctttcaaactcaaattttggtagaaaaactttcaaaactactgaactgttagcaaatttaaggtattaccttgttaactgtcactatagactgtttatgtgtacacttttgtacacgtgatacatttatattggaatatactattattatt

SEQ ID NO: 209416 - DNA, 912 bp, Cannabis indica
tcgaggattggatgaacatactccacgggatgtgatagtggctcccaaacaacctgggcttgttcgaagttatgctcagatagttgaattggccctaactggtgagagtccagaagaccagatacgaaagaaaaatattgcgagaagagattctttgaagcacacatctagtgctggttctggtagggataatgacattggtgatcgcaagaaaaggcctaatgaaccatcagttgcaggtccaaatatgagatttcaaggtaaccaaggtttccgacgtggtgggaacgaaaactggcagacttttcctgaatgttcgaggtgcaacaagcgccaccagggtgagtgtcaacctggggcttgttttcaatgtgggatagtgggtcacttgaagaggaattgcccacagctactgcgactagaacaaaagaaggatgatacacctgcccctactttagtgtttgctttggcacaggccaaggttgatgctggtccttccactgtgacaggtcagctttctgtcgttggtactttattgactgttcttattgattctggtgcgacacattcttatatttcaagtagaataattgaaaagttgaataggcctagtgatgtactttctagaggcttcagaactttactccctactggggagttggttatctctagcaggtgggttcggtcccttctagtatttatggaaggaagggagttattgatcgatctaatacaactaaatttttatgaatttgatgttattttgggtaacgattggcttgcaaaatataacgccactattgattgcaaaagaaaaatggtaactttgagcttgagggtgaggacccctttatgtttgtgggaaagatgcaaggatcccgaattcccctaattttagcacttaaggcaaga

SEQ ID NO: 209417 - DNA, 724 bp, Cannabis indica
ttgatcgggttgaatggaattttttggaacaagttatgttaaaattggggtttggttttccaatggttgaattgattctccgctgtctgaaatcagtttcatattctttcttgttgaatggctctattcaaggttcaattacacctcagcgtggtataaggcaaggagaccccctatcgccttatttgttcttaatatgttctgaaggtttctctcgacttttacaattccaggaatctattggtgctttacaaggactaaaagtttcacggtcagcccctcctattacgcatctattgtttgctgacgatagcgtgcttttttgtcgagcttctcggtcttcagcaagagctatacatctttgtcttgatttatacagccgtgcctctgggcaaatgcttaaccctgagaaaagtgtactttctttctctccaaacactcgaaccacagagcaacttttcttccagcatcttctcaatatgcccatacaaccttgccatgaacaatatttggggttgccttctttctcgggcagggataagtctcagttgtttagtggaataactgacaagatttggaagttaatgaatgcttggagagaacaactcttctcaattggtggtaaagaagtattactaaaagctgtagttcaagccattccaacctatgctatgagttgtttccaattgccaatcaaactttgcaatcaaattgagcaacttat

SEQ ID NO: 209418 - DNA, 771 bp, Cannabis indica
aataaaataaaataaaactaatttttttaagtataagtttttgttgatcaatggcagctatataaacccattgtgatataagtgggtgagtctgtttttggaggtgctctttgtgtttttaaactttagagaggataaattataatgcttctatacttggtgactcggtatgtgatgtccaaaattatcaaccgaatgggtgaagaaagaatttacaccacctaatctcttttttttagctcaaaaccaaaaaaaaaagaaaaaaagaaaaaaaaaagtgttaatgagtggaaataaggtcatataatacataaaaaatttaaaattatataaatatcttgaattctaccaaaataataatggtaattaaaggaaaattctcaagctctttaatttatggtccccactatacaacaatataatcttgtttcactttaacattataggcatgcttgagaacttaagtacgccataagctatattatatttaagttcataggaaaaaataaaacatagcagtttaatcactttagggacttttaattgcaattaattattacaatttaaactttcttgacttttagagaaagcaagttttgagaatataatcttattctccaattaaaaataaaagttacaataatgtgcaggcatatacatattaattaattagcttggtcctattacatttcttttttctttcctttatttttttttgttatataaaataataaaaataatgatatatatatatatataatttttttaatt

SEQ ID NO: 209419 - DNA, 608 bp, Cannabis indica
aacactaacagctctgattctaaccaaatcattcataaacaaactctaatttaagcctagaagcctgttctaatctcagtttaataccttaatcctgaaattaccaaaatctcaactaatatcaaacctaaaacctaagaaatttaaggaaacaaaaccgaaaacttaccttgatgctttaataacctccacaaccaaccaaatcaaccagacattagatgagttttctaacaaaatcatccttaaaggcagctccttaagaggatcgggcaagaaagaaaaagaatgagggaaaaatgaagatagatgccccttattcactatattttaacttaataaatttttaattctttttttttatataatcccaactaataataattttaatttcagcaacatgatttaaataaaaccatataaatgcctatcatcaaaatgaccattttgccctctcataacccttgaactttaaattaaatgctaggggtattatagtcatctcataattaatccgcaaaaccaacaatccaaaactctaaactagtccggtatacaaatccaattcaattcatctttattgtcgttacatatctaacctcccgtcaagt

SEQ ID NO: 209420 - DNA, 545 bp, Cannabis indica
ttgaattttatattaatttttctatctaaataaatttcttatttttacattatatgattggggttgtaccattagttgaaaaaaaacttaaaaaaatattttttgaaaaaaaaattgagtttggcttaattgttttgtatataaacatatttttaatatagtgtaaaaaaaagtatttttttaatatttttcaattaagtagttagattaagtataaaaattaaatttattttttattattcgaaattaaatcaaaatttaatacattagtattttaaaattaatatttataattaaatttattagtaatcatcaataaatataatacccattagaaattgttttatatatcttcaaattttttttaatattgggagtttttttttttttgtacattggaagagaggggagccgagcttgcaattttctctctacgaagagaaatgtagaactattaaattataccaatgaccacctaacaagcatatcctacatgttataggcaagtgttatatatatattttttaaactggttatggcatata

SEQ ID NO: 209421 - DNA, 806 bp, Cannabis indica
cacaacatcgagccacaaaccctcaaaggggaatgtgtgtctggtcgggtgatcatgccaagcaaggggcattgttgcctttgcacccatactttaggaatgtggcagacttcttgcgactctgcttgacccagttcactcccaagggcattaagtatctgtccaccctcttcgttctctatgcctcccagcagttggatatgccttctccccattaggttagctgattttttgatttgaagtccacccctaagcaaggtaggtcggggtacttcgatttctctcaaccagtctttaagtggttgacgggcaccggggccaaggccgttagcaaaattgggcattttgttgacgagtacatctttgtggaaggcatgggcaccacctatactcggttccagcagatccccacatatcaccgccatcccttcacacttgctcttagggatagagctcaaaggcttgctcagctattgagggatgctcggaatatcatcttgttgacctccgaggaaaactttgtgaagtacgggctctatccgaaggattttattcctaatcctgcgaaggagaggaagaggaaatctggtgctggccgagctgagagagctcaaaaggagaatgaactcattcaacttaagcgtgaagctaagttgataggaggtgcaacagccaaacagtatgctcagaagcctttgaatcctgaagatgaggctgaggaagagaaggtgactcaactcaagaggaggaagaaactttcggccaagcccaggcccgttgaggatgccattcgcattagggagccc

SEQ ID NO: 209422 - DNA, 556 bp, Cannabis indica
aaaacatacttgtattcaaaatgagttgtattcaaattgagagtgactgtaaagtagtatggcatattatatttgtaaattcataccacaactcaatttaaatttcattaatgtgcctagagacttttttggagactaactttttctttgtaaaagccatattttttttatagcttatagctttggctcttgaattttctccaagtttgtttttttgtcatgaatgttctagataagaacttgtaaagtcatagcagtataggcataggaactaaataaagaatagttttattggtttttttatgtacgtttttattcatgtcctttttctttagttagaggagctttgaggcttatggaaacttcttgtagttacacaagttattaactaatttttaaaatgaacgttctttacttgttgctgaaattttgtcgctacaacaagtaatttagttgagagttgttgtgtacacatattttactttacaatatgtttgataggagggggagatgggtggatggagaggagtggagggagagtgatggaaggagagct

SEQ ID NO: 209423 - DNA, 774 bp, Cannabis indica
aattggagatgctctaaactattaacatcaacttggcaacagtcataagagtgaggccctccacataactcataaattacttaggcctgttgcacttgagtatacttggaatgttaacttagtgatggcatcaacttcatgtaaacctgttactttcttcgattggcttctctcacttagctattgttgattattcatggccatctcctcaagtaattcataagccttgttagtacttttcctcttaaaggccccaccagaagcgacatctatgagtgtgcggctataattactagtcaacctattgtaaaagttatgaaccatcatccacttttcaatcccatgatggggacacattctgatcaagtctttgaatctctcaaaagcttcataaatagactcattgtcatgctggatgaaattgttgatcttcgatctcagcctgacagctttagctgaaggaaagaacttggaaatgaacttcagggccaaatcctctcaagtattgattgagttagatggcagagacaccaactaactctttgctcgttccctaagtgagaatgaaataaatttttttaaccaattaaattgattttaagatgagtccaaacaagttaaaaagtcttactaggtactgtatattttaacataaacgaattttatggatgaatatttccttactataacataaaggggagttctatttgctttcccatacaattataagtacactattattaaaaaagagtaaatttaaatcatttttaaaaa

SEQ ID NO: 209424 - DNA, 785 bp, Cannabis indica
aaggggaagaaaaggtcatccaatcctggagttcccatagccgccgaggtggttcctcccaagaagcaaaggaaaaccacctctcaaaagaagaagttaccggccgagcctattgatctcgaggtttcagacaacgagattcaagagcaagttcctcctccagttgttcctcataccaatgcccctcatcctgaggcaactcccgttaccgcttctccgagccaagccatcgagaccctgtcggtcgctgctggagaagctggctctgagtttgcccaggcatacggggtcacttcttggcgcaaacttcaaactctccttccccagattgggattttctcaatcttaggaatctagaggagatgctttcaaggatcttggactgtcacttaatggtatgtcgactttgttaatataattattctatctttttatacctcttttatactcagctgtttttcaattctccaggcttcctttgcttcttttgcttccaatcgactactttctgagcggcttgagtatttgaagggcgagactcacaaattaatatcccaatgcaaggatgtgtgtgagcagcgagacaacgcccaacaggagattacccgcctcaagcaagaagttgagaaagcgaaggaggaagtggagacagcaaacaaggaagccgagaaggcaaaagaggaggccgagaaggccctcaaagtccaagctgatgagtttgaggagaagcttgctgagaaacttgccgagaaagtaatagagaccgtagaatggtgcaataaagt

SEQ ID NO: 209425 - DNA, 655 bp, Cannabis indica
ataatgaggtcttaaaatttaaatgggccccaaaatagagtcgacacggaactagcctgcctatgcgtagaggcaaaccttaaaagtatatatttttaggttattttttagtcaaaaaatttcattgtgattgttaagagtagataacaaactgagtaaattattattattataatttacgaatatattttcttttatataaaaaaaaaatcgttattattatatgtactttttagactaaaaggtaaaattttccttaataaatgaagtttataatgttagtgataattttgtctaatttaacgtaaccgttagttattttctcaaaaatatttttatgaaccaaatataagcctttcagcaacttttaagtgtggtgctcattagtaacacgtggtgtgtctgaactctggaaggttaaaatgcaaaggtggacgtacaataatactatatgaaatatgcagtcattaacgaccaaggtagatgctcatgttctcaaatactgagaatatcattagcatatgtttcacaatacataggacacaaactcttaaatactaacattttgggcaggtccacatgtaattgagcataaattatcagatgatgctactgttcatatagtattgaagcttttaatgttttgcaaagccta

SEQ ID NO: 209426 - DNA, 760 bp, Cannabis indica
caagaagaagaagaaggctcccctaactgaccaagcaccagtaaaacacgctatcaggattaaggaacctgatatgcctgttcggccatcccccactgtgaagggaaaagggaaggccgtcttggtggagcaggaggaagactctttagatgatgatgttccgtctatacttgtttgagaaattgctcctgcccgcgtgtagggtatttttaacttgcacttccttcttttatactatacttttacatacattatatttgcttctaactgcgtcattttgttcgtacaaaaatgtctcagaaggtactccaagccttgaagaagagagtgggggacaactcgggtcagactcctctgcccaaaagatctaggggcagtgaggattcgtccaaagataaggggccggtcgaagagatcattgacctttctgaggaatggcctgccgtggaccctctactctagaaggtctcaaagttaaagagtttgaaagggggagctcggacaagtctgatcagactaggaccccttcattgactgtgacgctgagcacagaggcaaagaggggcaaggacatgctccaatattacatgaatcgatcacttcctgaagtgagcgatcaactatcttgggtggacaatgagctgtctctggaactagtcttgggaggagtcctgaaggaagctacttgggtaaatatttccttctttattttattctcttttttgtagcttggatttaacacttctccatgcaggtcaat

SEQ ID NO: 209427 - DNA, 753 bp, Cannabis indica
ccttccacacagggggcaactagaatcttcaatgtggaatctgtcaccgatcactgctctaacaggaagagccctagataaaatacaccaccataagatcttatgtcgttccagaatcttgctattccagagtttgttccaaagctttggggcgacatcgcattgaggtgctctttccaaggcttgggctagataggcagatttacaagagaattgcccattattttccagcgtccatatccatctatctatgccggaacccgtaggttgacccccttttagaatagctgtaacagattcgttatcaaaacaaagttttagctttggaatatcccattgcccattttcaccaaccagctcagaaactctgaaaaggttgcagtgggcttcccctctcggtttcgggcagaaacctttaaagtgcggaatccaaggatcccgccaaacatccgtagactctccattagctaccaacttacaggcccctttcctcaaagtagaattagcctttatgacactcttccaaaaccaagaatccgaacttttatacctacaggtgagaaaatctttgcccctgaggtactttgcaaccagaactttacaacataaagattggctcccattgaggatattccacccccatttagctaagaaggcctggttcatttctttggttttccggaatcccagaccaccaagagatttaggaaggcagagcttatcccaggcctttaggtgaagaccatgattacc

SEQ ID NO: 209428 - DNA, 763 bp, Cannabis indica
gttgtgaaaccacatcttgttgctaatgtcctcaacaccaaaacgaaaaggcggaaatattgtgtccttacccttacaatacacattagttgttgtgctaaaaaaaacaaataaaaaaatatcaaaacacaaataaaaaaataaaaaaataaatggaaaacgataagagatatataactgaaaacacctacaaaaatacttacttagatttatgctttctaagacctgtatcaacccacttgacaaactcagcttccaattgcggatcgacaggttcaccaatcttgttgtccaacgggcacaaaccacgcacatttaattaaccgtacttactacacgaagtaactctactcgaagggaaaacgtaaacgtgggaaggtagtaaccgtaacccgtagtttaagttttaagtagtcgacctaacgtaaaggaacgaacgaacgtcctaactaagtaagtaaggggtaggggtttactttaaaaccaaaaacgacgtcccttttccctttttcctttcgtagtacccttcccctttttcgttttagggaacgggtaaaaacgttaaaaaggtaagggtacgttcctttcgttttaaaaacgaaaaaaacccaaacctttactttaacgaaagtactacgtacgtttcctttcctactaaagttaacgttcctaaccaaacgaaacgggaacgacggggacggggactaaaggttaaggttagggaaaccggaaaacctaacttaaaaaacgtaaaaaaggaaaa

SEQ ID NO: 209429 - DNA, 1068 bp, Cannabis indica
gtttttgtttgggtccagatctacgtctatgtctgaatcaggctctgggagtgggttagggttcaggttctgggtcaaggttctggtccgaatcccagagttttgatctcgatctgagtctgagtttagttctgggtctaagtcctaggttctgatcctggtcagggttcgagttcgggtcctggtgcaggtctatgtttgggtctgattctgggtctgtgtctgagtttttgttcgggttcgggtttggtcctggtatgtgttcgtgtccaggttcctgtccttgtttgggtctggggcagatttcatgtccaagtcttggtccgacttcatattccccggtccaggtcaggtcctagttcaggatgaagtcccaaatttagatcaaggtctgggtttcggggcctaggtccttggtctaggtgccccatccaagtccggttcctaggtcctagtctagttccaagttcgggttcaggtcctgagtcttggttttagtccaggtcgcggtctgggttcaggtcgagggctcgatccctatctttgtttgggtttaggttcgggtccttgtcagggtctagatcctggtctgggttgcgagtgtcaggatccggtgagggtttaggacaaggtcaggtccaggtcccgatcccggtcctagtccaggttcaagtcttaggtctcaggtcccagtttggttccgggtctgggtctgggtcaaggtttgggtcagggtccgagtcttagttcgagtctgggtacgggtttttcggatctcggtttgggtccaagtctgagtcaaggttcaggttcagatcttggttctgggtcccaagttcgtgtctgggtctacgtctgcgtttgggtctaggtcccgtgtttcaatccctgtctaggtttgggtcggtatttgggtctgggtatgggttcgtgtccatgtctaggtccgaattccactttcggtcaggggcctcgtctttgtttgggatcgagtcccgagttcatgttcaggttctggttcgagtcttagtcctagtctaggtctaggactgggtctgagcccgagtt

SEQ ID NO: 209430 - DNA, 1100 bp, Cannabis indica
atcacagttttaataactaattaatcaattagtattaaattagtttgtaaaatcacatacgtggcgtccctatggaatagggcattattagaggagccaaggttttaaaggtcctaaagactggtcaaatatgtacatttgctgcgaagagaggtcgattcatggtatagtaagtgtttatattatttattattgccttacttgcttagacaattatagtgtatgatggaaagaagtagtgtactgactatctatactaagaatatgtgtatggtatattcatattgatattgatatctgttatacccaaaattcggtagccatctcaatggatgacacgtgtcacgataaggggaatatggatcgatgaaatcgctttatatggaataactcattaattacgtgagtatcagagtatatttgtaacctacagactataaggtcttatacgaggaatcaatatacaaactggtgcttagtatattagcaagaaactatatgttgttgaatgcgaatagtgaggcatcaaggacagtacgcataggaagacgaaagcgacatgtatcagttgcgaaagcccttagtatacaaactaagtgtaacagtcagatcagctcaagaccaagtaagcgaggtgcccgtctcgccatgggaagacttcctataacttcatccagttaatgtcagtgaggctcacaaccctggtaagtcagaagctaacattcaaatgatctttgaagaactctttgtaaataagaatcgcgatcgacaaaagacatgcatcgtcgacctcagaaggaaaaatggccccagctcgctcttgagatcactggaaccaagattctatcgagacaactccagaataattaaagacgtgttttatacacaatcattttgacccagtaaaagtgagaaaatcagagctatatgatttttaaatcatgaccgtatttacactacgtgatatgttatcaaaccctgtgattttagtgatgattgttgtaaacatattacagtcaatattgtaattaactgcccactatgtaattataaatagtcgtaaataagatcaaaaaagaaaaaaaactcatacaagagag

SEQ ID NO: 209431 - DNA, 1139 bp, Cannabis indica
agagtaaacacaataaataattgcaatactccgttaatgaaccgcatattaacaatttcaaacccgcaaaacgcactgtactatgcggtttaaaaaaaattcaaattgcgattgcactgcaaaaaaatttaaaccgcatttttttttgcgtacggtgcgggcgattcgagcagtttgagcggttttataaaagtcctactagttaggatgtcaacatgggtgctgggtgaaacctttggtgctcaagttgacttccaaggtgtaggttcatgtaatttcagctttcgggacctgaatttggttgctccatgtttgcatggtacaaaatatttaaatatagtgagttggaaacgagttatcaaagtcctaactttcatttcagagttctcgaagttaacctggacgcatggctaaggaccactctcaggtcgactattatgactcggaactacttaactctgagatgtcatctttcttgccacgtgtcaaacattgatgttcatgctagtagggagagtttttgggttaacatttgcccccaagtcaactttacaatgtgcatcaaatttgacaatcctgggcaattgtttgtgttcttcaagcattctcaatagaattaggactttgaattcccttgctcttgtgtggggaaattttcaaaaattagtaatcaaagaaaaagtggaaaaacttataattttttcacttatcttttatcttttttttttttttgtagaacttgaaattctcttgtatttcccatggcattaggattaacatgacatttacttacatactgttatgattagggttattggcgataatttttcttgatttactttgagttcatggttgttgtgtattttatttatttatcatttttcactcatttgatttctttagatcattcaaggcaaggggtagtatctatttatatctatatataaagttgaggaatgagacagtgacgtggcactctaaaattgttttaggtaaataatttatagcaaaatataattcacttatgtataaaagtgagtaattaccaatcattgtttgatttaatttacgtactgagcaaactaattgtgaagaatattaacgatgactataagtgagatcagggccggccctgaaac

SEQ ID NO: 209432 - DNA, 769 bp, Cannabis indica
acacgaattgccacccctaaccaccactacgcactatcatcacaagatttttaacaaattttcaataaatatggcataattttgtttatgcatattttatggtatttctatcttttttatggtatttattttaccctactactgaataccttacatcttcatgtttacacttcttttttctcatcaattttctttttatttttattatttttttgaaagattctttttattttttattcttctttatcattttatttatttcttatttagttttttttttaactcatacaccttatttatcttttatttatccatttttttttatttcttcttattttctttccatctactttttatttcttcatatttttactttcattttatttttctcttaatatttctttatttatatatatagattatagagaaattctataatacaccccttaaaacgagatacatcgatatatctctatctgttttagtattcgaaataactttttagtcaaattttttctcatggtcatgtaaattatacttatgcaaaatttttaaaaaattagaaaaatttaacattgccgaaaattacgttcaagcagtgtgttgcaagagtgaatattttattttacataagtgtaaaattgactgtttgaacattgttttctatattgttaattatttagaatttctcaaaatcttataggatatcttaaatagttataatttacataaatataaaaaaattagactaaaattttttccagatgcc

SEQ ID NO: 209433 - DNA, 819 bp, Cannabis indica
ataaaaataaataaaaaaaatgtctacccctagtaatttcttaatatttcatatatttctgtaattttttttattctcctaaactcaacttttcaaaaaaatatttctctttttcttttgttggtgctctaaaatcactcaaaataattttatttattctcttcttaattctttcatttaaattaataaaataatactactaaaattacttaaaatagtttgtatctaatttttaattctttttataaatactaattaattaataaactaaaaaaattattattattaataacaattaaaaaaatatctaataaaaataatagataaattttccaaactaataaaaaaatgataggtagcaaaaaaaaaatattattattattgaaaattataatatatatatatatgtatagtgaaaaaaatttgtatttagaagcattagaaaaatacatctaactaattaagtaataaataatatattataatttaaattttaaaactctctctaattaaatttatccctaaaattaagataaaaataaataaaaaaatgctacccctaataatttcatactatttcatatttgtttgtaattgttattattctcctaaactcaacttttcaaaaaaaaagatttctctttttttttttgtcataaagcattcttttttaccatcttaaaaaatgatgcaaataattagaagatagttccgtctcaataaaaatggtggtaatttgtgctcatgggtcatgtttgtgtcaacacatgtattacaagtatatgttgaacacaacttgtttaatattgtgtcaaaaaa

SEQ ID NO: 209434 - DNA, 956 bp, Cannabis indica
ttagctgccagcccacgattaccacctccctcaatcacctcctcagtcatcaccgtctgtccagccccaaacatcgccagagtcaccacattcgaactgccttcccctttctcgatcactcccccagcagcccctgaccggagccattttgctcctattttctccgacgctcgtttattattagctttcaagaacataccgtacggcttctgaatcaaatgggcaggagtgtgaaataacttaggacaaaatctttctgaatgacccagaattccacagatgaaacaaaacgtcgaaagattttcatatttaaaattcgcccagaaccaactacgatcctctctgaaaattttcatttttctccggagaggtttttcaacgtctattgtaactcggatcctcatatattctctccatactcctgagaaattattaatatccgattccacaaacttacccatcaagtttccaatatccgtcacaacctttagagattgaaatccatgttccaaatcatagatatgaacccatagatccaggaaatgaagattcacgtttctaggattctccccttccttcaacctatgaataatcagttgttttttgttgaaagtccatggactccctgtaatcactctagtaatgtctatctcatgataaaattggaataagaacagattagaattcagctctttgacatacattcccttaccgggttgccatagatatgccatcatattttgaaaagcatcaaaatcacttactcgtccagagagcagtttcccaatcaaacaccaacgtgtgtcgatcaccaattcctcctgctccactcggggggcaaccaaatcgatctcctcctcttcctctaattccaacgatgcccactgatcttccaactcttgcagatccatcgacagtcgaaataaaacaccagagaggaaagaacaaaacgaata

SEQ ID NO: 209435 - DNA, 548 bp, Cannabis indica
tacttttctatgctgaaaacatacatctttctatattacccaaattataatacccaattccaattcaaaaatatgaaactaatatgtttgcttgaactgtactcgcttgaagcacttagtgctttactaagatggtgagttgtaatcattctgaaataataccaacttaagtaaaaagagcaacaaaaatgagttatcttgttattacactaaagatgtaatattttgctggttctccaagccaatttaatatcaatatttttactaacatactaaatctttcgtacagagacattcatcaatagaaaaaaggtaagatcattaagaaaacttagcattgatcactatgttttgaggcaactgttaccaagctagttgcttttcatgagattatgagtttaaaagatcaatttaggattattaattttctctacatgcaactgggaccaatatactattagtgcaagtctattaaataaaaaataagcataactaaaaaaaaaaatactgacaataattattataaaatgcttgaaaaaactaagcaa

SEQ ID NO: 209436 - DNA, 539 bp, Cannabis indica
gtaagtctctttctctccctctgatttttgcacaaaatatttaaaaatttctcctctgtttttctgtttttggaattttttaaataatttatagggtaaatagcggcataagtacccaaaattttaagtttgtaagcggcataaacccaatgtttatttttagcggcataagtattcaatgtttgtaaaactgtaatttttttccaattttgtcagtacagattccgttttaaatttattaaaggaacatttagaagttactgatactacatgtttctgtctagacccaataatcaagaatctagaccttaaatgtggcatgtttaagaaaataacagggtttgtacggacgaaattagagaaaaattacagttttacaaacattgggtacttatgccgctaaaaataaacattgggattatgccacttacaaacttaaaaacataatgtttggtaattatgtaaaaacaatgtatatgttcttatttttttaaaaaaaaaattaattatgtaaaaatgttaaaaactataaatctaca

SEQ ID NO: 209437 - DNA, 548 bp, Cannabis indica
acctgtggggaccctcccatgttacctcaaccaatggatataagtattatatccacttcctagatgcctacactaggtttacatggatttacctactcaaaaacaaatcagatgcattaaaaacatttcaacttttcaaagcagaagctgaacttcagctaggtaaaaagataaaagttgttcaaagtgactggggaggtgaatacaggtctttcactccctatctcaatcagtttggtatcattcatagacacccttgtcccaccacccatgaacaaaatggccttgctgagagaaagcataggcatgtagttgaaaatggtctaactttattagctcaagcctctatgcccttaaagttctgggatgaagcctttaggacagcagtgttcatccacaacaggttacctacacctgtattgaacaacaaatctcctatagaaatgttgttcaatataaaacctgactactctacctttaaaacatttggatgtcaatgctatcccaacattagaccatacaataggcacaaactacagtttcgatcc

SEQ ID NO: 209438 - DNA, 985 bp, Cannabis indica
aaaaatggctacaagatgggtgacataatcttatgcatgttgatatttacgagcatatcgtcaacatatacttccatcgtctcacctatcgaatccacgaacatcatgttaaccagcctttgatacgttgcacctacgtcaatcaaacaaaagggtatcaccttatatgctcctggtctggttcatacatcggattctggttgtatcccgagtatgaattcatgaagctaagaagcttctgacttgcggtagcatcaacaagttggtcaatgcttcgtaaacgaaaactatccttaggacagactttgcttaaattatgaagtacgggatttgctaaccagatgggtagaatgactacgttatgaagccacataccaaaaggcgatcaacttcttctataagcgcttggtacctcgagtggtccattttacgctgcttctgtcggacgcctcacacttctgggtaaatgttcaatcgatgacacatgacctgcggtgatattccgaccatatttgaatgacttaggaaaaatccctagtccttataaaatatttatggtatctctaatgattacttaatcttaagcaagtattttacattaatgttaatactagattgctatgttgaggagttagtctagaaggaacttatagtttcagactaagataatatgtcacaacaagaggtccctaagaacaagtagtaagaggctaagtgtacacttatgtacgaacttaaccagactcctactattgagtggggtcctctaagatgtaaccaaacaaggaacattaggagacaatcaaggaagaaatctctgaaaaagacctatatgttagatgataggggtgtacattagaatccttatatctacaccaacttagaatattcgagatagtggttactcttggggtggaggaattattcaagaaagatgtaaacacccatctataataatttagttccactagtgaggctaaataac

SEQ ID NO: 209439 - DNA, 680 bp, Cannabis indica
tgttttccagattttcaatggtggatttagtcatatcaaatcacaaataacaaagaaaatttgaattcatacagagccacatacatagaaatattgttctagttcttaagtttctgcgtagttacattgatgttgcattaacattttactaacgctctgaaactagacatatcaataattacaaactgtcaatgatacaatagtttttatgatatttgcaggtgttttatatcccaatacacaaagctctttaaaaaaaaaatatttagcatggttagttttattaatatattcacttagttgatataaagttagtgtatggaattctaacagttgtttcttcacataataatattaaaataatattaaggtacaattgattgttgatcagtgattaaaaaaatactgacaaattttttcatgataatggtcattcaaattttcaatttatagttgcatttaagttgtatattggttgaataatagttgtgctactacaatattattatttaaaaaaaatagcgcttagaattggcaatacacgactcgtacagagaaaactcgattgtgataagttttgtttgtattacataggtgcattattagttgttttaaggtttaatatctgttgcctcacaacaaatatatttattgcactacagtttcatgacagttatccc

SEQ ID NO: 209440 - DNA, 563 bp, Cannabis indica
aacactttgtgattggggtgattgtgcaatgcaatgcaaatagtttatttatttatgagatttatttaacaggcaacaatgctttattggttcaaaaaaattatagagagaaatcaaaatgaaatattttagatttatttatttgtatttttgaagtggggtccttttacttggcaaactattattcttagtgctagtgaaatttaacaattttctatcttatttgtcacttataattatagcttaggaaatacaatagacaaatattaaataactaaattagaataatataatattatctaaatagataagcaataaacaagtttaaaagctatgattacagtttgttgagatttcaaatcatggacttcataaatcaatattattgtaatatatttattcaaaaaaaaaaatattattgtaatatgaatcactacatgacgactcaaattcgaaactataaggaggttggtaatttgtatctagcatgattgataaataaggtatctatatttgttagtggcatacgattcattattgattgtttttatgtatttatgtaa

SEQ ID NO: 209441 - DNA, 630 bp, Cannabis indica
ctctaagtagtgcatgcatacttcgtcttgacaaattaaatctagacccttacctatcaaggccataagaagatagccaggacaatcatatgtccatcatagatggcttcaaggtttaataatagtagtgttcaaaaatagagggcctataggcaaaagcaagaacatgaaagccttgaggccgaatatgagactattttgcatgcatgaggccaaggccctgctagaaccgtataatcaaaaaagacctagacagagctcctcttataagggccacgtactgggttatggctagggcagagttctttacaagatccaagccatgttaagtcttaagttgaacattcaactataatagactcaccattaaggtttatacagagtttccaaggaaaccacgcatgaaactaaggttgtacatgcctatagagcaagattcttgctaaagtcaatagaggacaaaaaactagccacctacttgaaaccaagccccatgacgaccaaggttcacaagccttgcggccagggtcccatgactcagccaataactggccagggtcactgaacccaggcatgaacaggcaagctttacagggtaaaactctaaggctggccaactcccatgatcaa

SEQ ID NO: 209442 - DNA, 595 bp, Cannabis indica
aaaatgaaactaagtatacgtgcgttgcacaatttttttaattttgttacataatgtttgctttaaattttacaaaacctatatcttgttcctctaaattttctataagtaaataataaatattattttgttatgacttatatatacacaattatattttactaaccaaatataatagtacaaatataactttaatacaataaatcatttgcataatcatacctttagttatagaaatctaaataaaaatgaagaactaaaactttaaataaaaataatatttacgtgcctcgacacataccttcaatcttgtataagtttaaaattgggaatcttgaaaatcgttataacattggatatgtattggaaactatagaaattaaggacatactttcataaataaaataatgcaaacttgacattaattacattggatatggatatgtattggtggattttaaattcaaattttggcattacattaaataataatatatatatgggaatttcgaaaaattgttaaatatttaaacatccaataggaaaagggagaattaatatggtgaaattttttctcgtaatatataatgagtaa

SEQ ID NO: 209443 - DNA, 799 bp, Cannabis indica
aattgttagagctgaatagataaggattaattaaattatcttcacaaaaaaaaaaccctcctccattctcctctctttctctcggctagaaccaccacaagaaatccctcaccctaaatcagaaattttcaaaaccatttcacatcaaactaactaaggaattttgctagagttagtgttgaagtggaaggaaggatcaaagtaaccttgttctcccttttctttgtaaattttgggcgaaatttttttattttaagttgaatttaatagttttggttatgtatgaagttgtatgtattaggttaagtttctaagcttaaatattagtggtttgggtataatttacggttgttagttgttgttttggctgcaatcttcaagtttgagtttttgaaatccaagcttgagctttaatagtcttttgtaaattttggtgcaattatagtttttgagttgtggtttgtgatcagaactaatattaagactattctagagagtttgacaggtattggacaagatagtagtaggtttgggaagtaaaaatttgagtttgtggtttctgtagagaaacggtgaattgtttccccaggcacgctcccaaaaaatagttaaccgtttgggaatctgatgatccgattggagacattctcaggaacctcaattttcatgttttatcgatatttagggtatcgctacattatttatcaataggaaaacttctgatcttgagtttatgtcatagaatgggtttaattgaattatttatcagtttaccactattgtgacatagggccccaaa

SEQ ID NO: 209444 - DNA, 649 bp, Cannabis indica
aaggaaatgatatacatcccaatagttatcctccaatcgactcccatccaaattatgttgatatttctccaacatttttgacaccagaaaagaagataaattgtttctcaggcaactttccatttgatagtgattttgaagctatgcctttaaaggaagtagttgatgcattcttggagtggtattcgaaaggcatgaacatgaagtggtaaattgtttgcgtatttattatatgtatatatctttagttcattttttttaaaattaattggacatattttctttttagcgaaaattctccatcttctgttccatttgttgaaaaaaatgacattatcatttttcaaagtgggaagaagttcaaattatgtacaacacttgtgttgcccttaatttttcccaaaatacatggaccaatgcgactacgacacgtggatctgaaaaatatgactctgagataaatcaactaagtctttttggatcaagagtatcaacaagaaaatacctctcggagaagatatgagagctccacatactcacggaggatagagctatggtaaggcacctccaggaggtaccagactccatttgaacagtcacctcgtatttaataaagcatgggagatgacgtattggaactgccataagc

SEQ ID NO: 209445 - DNA, 888 bp, Cannabis indica
cgtcggtcatgatcatgttactcgggtctgtatatacatgttcttaagcaccatatggactgtaatatcatcaacaagaccttgatttgccaagcctactcgcgtatcagattgccacccaataaaccaatataaataaatattgacctcatttttagtcaacgatgctgaattaattaaagtgattcgaaaaataaataattatgaataataattatatgaaattaagcaaaaaaaagacaccgagagttatagaggttcagtcccatcatagtggtaatagcctactccctatttacttgtattacttcttagaagagaggacaaaaagttcttgacctctctcgaaagcttataaatttttacagcataagagctctcttgaaagtatgatccccgaatagtaaaatgactccattatttataggaaagaattactaatattaggtttcccaaaaacaaaagactaaaaatgaagactagttactttactaaattaaactatttacgtgtagaaaccccattaaaataggaatttaattgaaaaaaaaaggtggaaagtatctttaaagctttctctgtcgcatttactttattctcaaatgagcagtatatgatggataatctactctagacgacagaccgataaaggttccctctttccaggtctataaatgcttcacatgtcacccaaataagcaccatgtcaacctgtgcagagtattcaacttcgttggatggtgaggacccactactacaaaaacaccttttaaagacgatttttaaggcctttcagtgttgattttggcaaaattcgctaccgatgctaatccaggtaatgttgtggggtctaaaataacggacgctatagggatacatatggcgtcg

SEQ ID NO: 209446 - DNA, 848 bp, Cannabis indica
aaaatggatgccttttctcattggtttaactctataatgtgggaaagtggctataatagaatttcatcatattgggtcttgtcaagtataataagtgagtgaatgaatgagtgaatggtggacctttcatttgtttgtgtctgtcatccaataatagtggacattggttgttgtttgttgtttgttttgggatagaataggaggccctcttcttaggctcctcatatggtgtttatgcagcatttgaaaagccactcactgcaatggtacactcatgaaatcatgagtgattgtgccactttctaaactttttgagttgatatgcctcgaattcggtaatcaatattggcacgatacgacataacatgatgcagttggtgatcgtgtatgaattcacacacaattttgaaactcgatagagggatttgaactcgggacttcttctttgtgagaaaatgtatgaaatcattctatctcaagcttttatgaggctttcccaaaaaaaaaacttatatgaggcttggagcaaaattttaaaaatagagtttttatcctaaaaataaaatgaaattcaaataagtttttaaattattaaaaaaaggagatatttacggtatttgtactttatttttttagtatttcacatttatgtaacatatatttttttacggattaaaatactacaactttcgttaagtgttaattataaaactaaataaataaaataatacttctatgtttttttaattatttaacttatattgttattattaaaattattaataattcttaaaataaaatagagttggatcgctaatatatgtgtcatttatttaaactaaattaac

SEQ ID NO: 209447 - DNA, 929 bp, Cannabis indica
acttaaaacgttatattattatcagtaaattaaatatcgaatctcacttgattaatttatgtaataactagtatagaacattgctagttgtttacaaagtgtcaccatagtagtactagctaagcaccattaatacttaatagcaatactctatatgataacaaatatatattgttataaggtgtaatattcttgtttaaactataatatatatgtaaaaaaaaaattaggaggaccaattaaatttttatatataaatgcatatattttttcctcaaccgcctattagtagttttgcttgattttttatgtctaaaatattcgtgttaagaaatttatgttttcttatcgtgctttcgtactttttttattttgctgtgttcagggccggcccaagtattgggcagcttgggccattgtacaaggcccccaattttttaaaaaccaattttttttaaaaaaagtcttattttttctattatatatacataaataaaaaatttataattgaaaatttatgaacgaatacttaaaaaaaaaaagctagtaatagaattgtaattttaatgtacacggtggtttttttttttaaaaacctaattttaaaattttgcacaagctaggcccccaaaatgcttgggccggccctgaccgtctttaagaattcatattattcgtgttgtattggattcaaattcatattttttactcgtgcaagtttcgtaccgtgccaaaaatctcaatctaaatgtaaagcgttaattataatcataaaataccatatcatatatatatatattataaattgggatacaatttctctagtatcaaaaatttaaaaacaaaaaaatctctatatatatatgtaattatgcattttctcatcactctcatcattttgcacacttcagttttttttttatatatta

SEQ ID NO: 209448 - DNA, 662 bp, Cannabis indica
ctgccttatactgtagtaacatgaagcctcatgaagtcaatcgcattatacagatctctggcttctgtaaacaggaaattccattcacttacctagggataccaatctgtgggaaaaagatttcagggaaagaatgtgatatactagctgacagaatgactgctagaatcagaagttggagttctaggaatctctcttttgctgggaggatcacactaataaactctgtcctcattgctatacaagcatactggagtcaaattatgatccttccaaagaaagttttgagatctattgaagccatctgtcgggcttttctttggaaagggaaaactatgtttcaaggtgctgcttctgttgcttggcatttcatttgtcaacctaaggcaggtggaggtctagggatcaagaacttggaaacatggaacaaggctgcaataagtaagtatatttgggccatttcaaataaacaagagagtttgtggctcaaatgggtacatagtgtctatataaagaatcaaccatgggagacttactctccttccatacattccagctggtattggaagaaaatggtcgcattgaaagatcagatctgagacatggtagattttgatgctttccataagcaaaaatatagtgttgcagccggttacaaactg

SEQ ID NO: 209449 - DNA, 802 bp, Cannabis indica
tattgtttttattccgtgcagaattgtcgaagaagatgattgaggctttgaagaagagagtggggggaagctcgggcttgacccctccggccaaaaagtccaagggcggtgaaactccgtccaaagagaaagcaccagctggagaggtcattgacctttctgaagaacaaactggcatggaccctccagcctcgaaagttactaagtccaaaggttcccaaggaagcagttcggacgaacctgagcaggcaaagggtggatcagaactgatcaaaagcgggtttgaacaagttaaggctcccaccctacctttggtattgcacacggagaccaaaaggggcagagacatgctcaaccactatgtgagccggacggtcccagaggtgaacaagcaattgtctggaccggataatgacttgtctttggaactggttatgggaggagtcttgaaagagctttcgagggtaagtcttttctgacatttttcttttattcttctttgaccagtttggatttttaaatgcctttttttctgcacagactggtttgaagatgacatatgcctattcccgagctaaattggctgttgctaagaacgttgccatttccaacacaatgcgaacgaaagtggacttggccaaaaaaagatgttgaggatgtatgggttcagcttgggtctgtgcggatagagctgggagaggtcaataagaaacttctagcggttgagatcaaagttgccgagctgaccaaggaactgtaggatacgccatcaaccgaggagcttgaggctgatattgcttct

SEQ ID NO: 209450 - DNA, 826 bp, Cannabis indica
taattaccataagtctactactcatgtctaatgcatgtaactgagtctcgaatgatgttgaccatggtacgattgaccataataccagcctatactcaatactccagtcgcactaatgtggtagcataaattcatactataagtacgattgaccataatatcaacctatactcaacactctagtcgtactgatgtggcagcttcaattcgttatattttgtattgcctaacatatatatgtctgtatcacaatgcaattttatgtacaccatacccttatatgttaatttgattggcattatttactatctgatacccactagtatcactagatatcaatatctaaatgtaactctatgtacatccatactgctgtctttagtataccaagtaaacgatatcataaaacttgttgttatcctaaagtttgcacatctgacatggcacttacatgtggcatgatccaaccaacttttcgaccttgtaaaaaacttccaggcagaattgtgcttggcaagtccatatgggggtgacatccctaagctacagatggacttttgtaaagcacctagcagaccaccaacctgctagcaagatatgataaaaggcataccctgtaagggaagtcttacgagtgatgctacgaaagaagacaagccttgtagaaggcctggccgggtagtgaatatgtcaaccataagagatcttgttaggagctaacaaacaaggatacaaaggcttgatttcgtccttaacaagcatccacaaatatcttcaactgaaatcctacaaatttgaatccaataaatctatccaagaataaagg

SEQ ID NO: 209451 - DNA, 1583 bp, Cannabis indica
ttagcaattcttaataaacatcaacaaatgggatgcttatgtgaattttcttgaaaatctctaaaaaattttgcaaacttttcatcaatctttttcttttggaatcgttgagggtatggtaatggtggttgatatggaggatgaatcactttcttctcaatcaaactctccttaactgcatttttctccttgtcaacctcacgcccttgggttttttccttctcattaagagaaaaattaatttatttttttctctaaatttcgaaaatttaatttcaagaaaaaaaaatcttctaatttttcaaattagtcttctatttatagtagttaaatctctttaattaaattgttatttaatttttttaataaataaaaatctataatcaaattcagttattgatatttatgagagaatttctcaactacttgagagaatatctcaacaaccttaaaatatctacgctaattgggatttttgccacaaattatgcctctgaacttttctggtcattaaaaattctcctattgagattgttagatttaaagacttttgtctaatttcattcaattttactattttagtgatcgtttatgtactaaatcatgctcctcaaactttgatatctaccaaaccatgcccctcgaacttttacatgtactacataatgtctcctgaactttcatctatgttagactttttttactaacttttcaaattagatatttacctaattgaatcaattaaataattaattaacccaaaaagataaactaagcctaccgtgtctccaggataaggttggtatcttttgtcctgacaacttttgtctcaacaaatattgtcttgacaaattttttcttaacaatttttgccttttccctatttaattaatttgaaaaattatttatttattacaaaattaaataattactgttttgctaattcaaaatagattttccaaatatctttatattactttgtattcctacccttgacaatattttaaggtagcaattcggggaccatggacctataattctaagctcgaataaactagattatttatgagtcccatcaaccaaataatttttgtttatcaattccatgattactccactataaatattgaattgaacttatagaattatatttactgagttttactgcagtgtccattgataaaatcaattccagttattagccctctatatattggttcgtaattagtgttattctaattttcacccacatgacgtgacatgtccacataagaaagatagatgtcacatggagtatagcctgtcaacagatgaactaagtcatcatgcacaatttatcaattgatgaagggtccaaatgcttaagcagaacaaagatacactaaaatagccaactatgagggtcttaccgaacaacccttggctggccaaagaagagtatgtgtcggccaaccctaaacaaagggtaggtcatccagcctctgtaacgacagccagaaagaagctcaaacgtttagtgtttctacagccttcaccctgggtagaccatgactcattattagctgcgaaaccattccaacaac

SEQ ID NO: 209452 - DNA, 740 bp, Cannabis indica
tcaaaatatgtatgagttataactaagcatgacccattcccatctcatcacactcctatcaaatctctttgggaacttgggcctctcttaatgaccaaaccctccactaacaaatatatatatatatataaacacgatcatcatcatcatcatatctaatctaatataataatatcaatttttatttgattggttttttgatttttattaaggttagtggcttcattataattgcatggttacttataaatcaaccttatgtgcttatgtttggccgtactatttaattatagcattatggccactaattgattttttctaaccgcgaaaattatatatgggttaaataatacttacattacaattggacataggaagccattaaaagttaacttaaacaagctaggttctgcaaaatgtatatatattaaacaacgaatttagtgtacgtacgtacgtgtattaattatttgttcatgcacgatcgaaattaaataaatcagtttaataatattactggaccatacattttattaactgtcgctatttatgtaagataaataatgaagtacatatatttgttaagaaaaaaaaacatatatgtggaaaaagttttaataattacattaaaaatataattatgatacttatattgctataacaagttgtaataactcattattaaaaaaattcaatttatagaattgaattaatatttaattatgatacttatattgcta

SEQ ID NO: 209453 - DNA, 1289 bp, Cannabis indica
aaaggcaacctcaatgtatctttaagaataaaataacataatatagcctaaaaatataaaaagaaacaaaaaagtttcttttaatattagtcgtctttttaggagataaaaaaatatatgtttctcacatattaaaataattattttattatttatatgtgtaaaattctaaaataaatttttaatagaaaagtaactaattgatatcttattcacatcaaaagtaactaaatggttgcttttcacaaaactcctaaaaagcgaaaaaaatctggaaatgagattttttcagttttttctattttcggtaattattttaaatttcggtatatatgctgacgtggcacagcggtatttgtgcaaataattttcttaaaggtatttttataaataaaataaattttaagtataatattgaaaactccccaaattttaatgctaaaaatgatttgcgatctctatagcatagaggaaataaaattatagaggagacgacgtgagacttacaacaattaacaccatgtgatacaagtaattaaggcaaaagagatatatataaaagttgaaagtatatatataagtgcgtgtgttagaagtacttaatttgagtcacaaattatgtattataatatataaacatttacgtaaaaaatatatatatatatatatacattaattttaaattcttataacctcaaatattaatagaggaaaaaaaaaaacaatgaaaccaaaatcaatcggtttccttgacgtctctctaagcaaaattgaagaaatgtcatactcatcatcgatcgttaattgaattaaacaatgtgcctctcattaattaattaatagagatatgaaatatggcccaccgcgtaaaattatgagaattattagtgtaaatgtaatggtctctaaatattataatgtctaaattaaaatcgcaatccacatggaccacaaccatcctactaacttggagagttggaaatataacacaatatttataatgaaaattcttccaaacttcttgagaagaaagggactggaagaaaaaagaaatcgtgaaattaatttatcaaggcaagttgattgtgagctgaccattaattctacaaaccaatgcatcaattaaattgatctctacactacaaatattgtaccggcctaacaccctaacgagaaaaaatactagttaataatttagttattgtgctgtatttttcattaattatataatgttacaatcattccacctactttattaattaaagagctagctaggcagcgcagctaaa

SEQ ID NO: 209454 - DNA, 898 bp, Cannabis indica
agacaacctctctaagtccagctaacttgagatcatctcccaagtctacatggggctcaccaatggttggctcgccaaattgttgctctatctctctagcctaataccaggaccagacccaatcgtggtgcccaggggttgctccacattggccattccttcagtacaaggcgccagtggaggcataggttggtcattaagaccaactgggttgttagtgtccacctgaccagtcattgtggcaaagtttgcggtgcctaccgagatggcagggttggccaaattcgtcaggtttgtagagattcaaattgtggctggaacacggagattaggattagccgccatagggtcttgaggaagactaaatgaggcagaagttgtagccggagttctccttatgttaaccatgatgtttgattagataaattgacaactcgctctcaatgaaaataccaaactgttgatctcaaatttggccaaccgacagcggagtcgtatttattattgatgtttaccacatgtatacaattagaacaggaaaataaaagagacataagatttttatagaggttcggcccctttagttagcggataatgacctactccccttttggttgtattaataccagagataataccacttagatcacaaggattgtggaatctgaagtggctctcttaagattacaatatgagaatcaagtggcaaatcccaagtgagaataaagccttgggcgtgtgagagagaagggaagagtgagttagggtttcaaacttgagattgagagcttttagtgagcttagagacttaagattgagagaattaggatttgactcatgctctttatatagtagactttacatgaagattaacaacttgtatccctcaaaaatagga

SEQ ID NO: 209455 - DNA, 766 bp, Cannabis indica
acacaagatccaaaaaagtatttcccctactaatttttcatatatcgtaataaggctaattaaatttttttttcccgaactttgacatgtaccaaatcatgcctcctgaacttttttgcccattaaaaattctcactgaactattgagattgttagatttaaggacttttgtctaatttcattcaattttactgtttcagtgattgtttatgtactaaaccatgctccccgactttgatatataccaaatcatgtccctcaaactttgatatgtactaaatcatgcccccattttaattatatttttacaaagtttaataaaaataacgtgcaaataatatagttcacaacctaaaaaaaacaatgcgtaatttttagagtaataattaaaataaagtcaaattcacaaaaatgtcaaaaaaaaactattaattatctatacataaattactatgttttgtaaaaattttatatctttaagtttagttttttttttattatatatatatatatttttacaatattctataaaaacagcacgaaaattactaacaaataacatctaaacaaaaaaaaaacattaaatttaatacaatataaaaacatatgactatctgtaaataaaagggaaatttacataatatacttatttttgctatttttttacatatatactgtgaggcggtaatatttacatttttactgtgtatattatttaattttatacaacaggctttttcttctttttttgacagtatatggcagt

SEQ ID NO: 209456 - DNA, 666 bp, Cannabis indica
caatggaaccataagtctcggtctgctttggaggtagtgaagtcggcaaaaaatgtccttggccaatggaaaattactaaatttgaatctcctaatgctttatttgctatgggggatatctcaaaaagtaattgttggcgtaaacctgatgagtatacggtcaaggtgaatgtcgatggtgcgacttttgaagctcaccaaaagtttggtttcggttgtgttgctcgtgatcaccatggtaagcttattgaagctatttctgagagtcgttggggttgtgtttctgcagaaatagctgaggtcattggcatcaaggaggcgctaagttggataaagcgcaagggctggggtagggtggttgttgagtctgacgctttagttgttgttcaagcaattaatagctcagtgcatatgccatcccagtttggtttgttggttgaggactgtcgtactattgtagctagtttgaataatgtccttatttcttatgttaatcgatctgcaaatagggctgcccattgtgttgctagggcgtcttatttatcgtcaggttgtacttttaatgagctaaatgctccgctttctgtgacattgttaaggctgatgcctgttaatttttaatgaaaatcctttattcaaaaaaataactgaaaaaccaattattta

SEQ ID NO: 209457 - DNA, 588 bp, Cannabis indica
tcaacggatggaaggaagggtcaaaaaagtgcatgaaaaataatataaattaagaaagaagctgttacgaaaaggagggacttgaaggagctaagagttgaaatgccattatcggcgctgctacaaacgaaggaggagattggtaaactaggaaagccctactaaagttttgggccttgaattaatttcttgagaaggataaagcccaatttccacgaggaaagcaaatgtaaaagacaattaattgggagtgggcccactgaaatttgacagagagaatattgaatataggtacgtgacctggtgaaattttgcatagttaattatggaattatgataaagtgagctgaatttagaagtcgcatcatatcccacgaaatatgataactcgctggtcaaacctctcccatatttcagtcaggtgctcttaatttacttatatatatatatattctttttcttcgtaaagaaagttaactataggatgaaaatacgtgtatgtggtcttgcaaaatttgagaccaaattttattgcaattgcgaaattggcaaaccccacgtgtgcacattctcgcataactgctcaac

SEQ ID NO: 209458 - DNA, 542 bp, Cannabis indica
atcccctttctgaaattagtattcggatcccatgctttcattattaccggcctcttgttgaagaaagtatagcctccattaagaatgctatcccttgtctcaactgaagtgaatctaatcagaaaaataccatatgagaggagcccaaccttatccactttctccttccatattcttctagaaaatacttcaagaacatctagtggagggtttgcacccaacacataacatacaatagcagaattccattgtgactttaacaattactttctcattatcaggtttctgtttctcagtcgaaacctcctgaaaagaactatctaatgatctaataacaaaacctgacctaagaattgggggaacagggaaattacctttcgagacatctctgctgcaactatggttagcttccaggaagtgagcgaagtcactccgaatgtcatcttgcctctgcaattcatgaagcgaagatcgtggtgaaagaccctgaagctgttcaaaatctggctcgtgtttatcgtcttcttcgtcagtgaaatcga

SEQ ID NO: 209459 - DNA, 674 bp, Cannabis indica
cgatccgacaaatcacctctgattcgaaactttcggatacttattggatcttggattagattcgctctgcccagcctatttttttctggatcggatctgatctgacctgatttcaatttatttttttaaaaaaacttaattcaagactcaaatccgactcggatgccttgggacctagacccttgacccagactccgactcggatgccttgggacctagacccggacctaagcttcgagttgtgccttcgtttggggtatgactagttgatcatggaatcaaattgcttcacgattattactactatcaataaatgtattattgaccaatcgtatttagaatgcattgttagagatttagttgacttattgtaataagtttgtttttttatttttttttcgcatttttagattggttaatagtgtgattcaaagtaggtgtgtcaaaaagattcatttagttggagcgggttggagctacgacccgacggatcacctctaattcgaaatattcgaatacttattggatcttggatcagatgtgctacgccccgcctaattttttttctggatcggatctgatccgacccgatttcaatttttttttaaaaaaaaacttaattcaagactcggatcccttgggacctagactcggacccggacccagacccacga

SEQ ID NO: 209460 - DNA, 646 bp, Cannabis indica
aggatgacgccgagctttggacgtcggaggttaagaaatattgcctttatataaattataggttattcctcttttctttgtttgagaggtataaaagttctttttctctttttttcttattttgcctctttttttattattttttttctcttctaggatggtcattttccatattaaaggcaagaactctcaatgtcattgtaaggtgtttttattaattttattttttaaattgagttgtttagactaacttttttttttattattatttatgattataaataagaatttattgatgaatatgatatttatctttgttactattgtattttttttcttcttcgtatcaattgttattgtggtctaaaattttggtaaaaatatagatgtacaatattggcaatatataacaagtgaattttgatttctgtaatgtcggcattcaaaatgcacagcagtttgtgctcgccgagatagaacaataacggggggctacgcccgccattcttccctgaaaaaatgcccttggaagagcctttccagattactaaataagtatcaagatgagtgccaattcgaatagcacgaattttatagcccaaatccttttcggatagaaaaacaaggagaccatacatggttccaa

SEQ ID NO: 209461 - DNA, 957 bp, Cannabis indica
ttaaatgacatattgtggaaccttgagttttcccttcaattacaggaaaacatggacggttcaagccattcttctaagcggggcggcgagaccagctctgaggatggtagtgtaagacaccagaacatggcaaagcattacaacaacctgagccttggaagtgatagtgagctgggaagtgatgacacttctggacagaattcaactgcaatcttctctcaaattgttaatccgagaggacgatagagtatgttgttgatggtgatcgctatgctacctgagaaagatttaatcaaagaaaataataatataataataatgaaaaaacccaaatgaatagattactttatatttgttcattgtatacaatatttcttttgtttttttttctttcttagtacttcttttttggtattcagcttcatgttctatttggtgtttctaaatgatcaaactaatatttatataaacatgtatgtcaaccttacagtgtagttttttgacattacattaggttattgtagagattttaattttacaattaaaaatagtgtaatctcttcttgatgaattgtaatagtagtgaaggggcaagagttcatgttatacacgagccattgttattaatgtccttgaagtcttaaactgtgaacatatgtgatttcaagtgaatataggaatttttttattagtgtaaaacaaagactattatattacaaataatgtaccaaaaacataatattccaaaaacataatattcatatcattaaattattgaatgtaatttacttaaaaataatataaaagtatattatatcatataatgtattaaaagaggtcactaagtcattaataatatttataatgtgtaaaatagatatgatactgaaaaaagatagagttgttcatcaaactgctcacactacggtactcaaacgtctaaaaaaatgcaatttg

SEQ ID NO: 209462 - DNA, 654 bp, Cannabis indica
ttttaatgtgttcatgttttggtgtacttttttttttggaatggaaaccatttttagtgatttttgagttaattaattaaaaagctaaagaagctattagctatatatcttaaacttaaaacagtgaatctcctagtgatttataacactgttaagcactttgacattgtgtgagatttatagtagtagtagtagtagccttttaacagccacttgctttgagaaaactgtcaaagggactagcaggaggaagctatttggtgtacttgatgtaaacaaccacaccactagatcaaaaactaaaggaattaaaattgaaaattttcaaataagagaaaagctaaaagtaaaattttagtcctcattgtctcaatgtatacatttcactatttttactttgtgattgctcatttcatactcttttatttttcctttatagaagaggaatgtctttattgtgcttgttatgaaccggttttatttattaaattttggtagctatgtaaaagtttataaattggttttaaactttagttattaaattgtatttattgtgcttgttatcatccttgctatttttttttgttttgattttgtatttattttatttgacagatggaacgagtatttgcttgtaataagctaaagctttgc

SEQ ID NO: 209463 - DNA, 1084 bp, Cannabis indica
cggaccacatgtaggcgaggcgggacagtcgccctaccctgaaaaaaaaaattgggaaaaaatgtatatgcaatttagttagtcacgacataaatttgtaaaaaaagaattaatatttatagatataatattagctttagtgtaatggttaaactagattacatatagggtagaggccaatggttcactccccataaagaatattatttttttttctttttaagtttactatcgcctcccatgccttacaaaaaaaaaaattataccctccttattttaaattctaggtctgccactgttggagagtatattgatatatatgtattgtgccttgttgtattttcttaagaaacataattataagttataatatattaagaagtaaaatgaaagggaaataaattcttatataatttttagtaagataaattaatgaagtttaataaaaataattgagaaaacataactttttaaaaaaaaaaaaaatagaacaaattttagatatatgtttcaaaatatatgactaaaaataaatatgtggttaagttattttctactatgcctattcatgatcttgtttggttcgaaatagacacctctcatccttgtttggaaattctttatcaattataggctttacaaatttcaaaattagtggcgttcttcttgtagggtaatttattcgaggacactgtttatgttagtttcgtaactttgatgatcattggatatagtgattatgctatgttgtcttctcaaattttgtgtcaatggcctatactcaatttcaaacgcaacaaaattaaaagaatctgaagaatcatataaccgttgtggagcttgctgaaggtggcatataggctggttgcatgaggtaaaaaataaaagtatagaatattagctaataattaattgttaatttataaattaattaattctttatctaatataaaattttatatttatttatagcaaatttgaatttgtgttacttttttttacgcaatttgaaattaacagatccccactacattgatgacatagaggacatatattatgaatatgttggagagcatattgagat

SEQ ID NO: 209464 - DNA, 507 bp, Cannabis indica
gatagacgatctacatctggctattgcatttttcttggaggaaacctcattagttggtgttcaaagaagcaaacagtggtagctcgatctagcaccgaatccgagtatcgagccattgctttggctacatcagaaattatgtggattcaatcaattctttctgagatcagcatccctattcctcaagctcctatactatggtgtgacaatcttggagctgcatctttagcatccaaccctgtatttcatgcccgaacaaaacacatagaagttgacatgcattttgttcgagacagggtcctggcacagcaacttgacattcgctatgttgaaaccgaaaaccagcttgcagaccttctcacaaaacctctaccaacacagtcttttcagttcttcattaacaagttaacacttggtcttaaccagtgtcacttgagggggggtgttggaacaactgaatatggttaagatcctattactgctgtatgtatttttactggtttattg

SEQ ID NO: 209465 - DNA, 518 bp, Cannabis indica
cttttttctaaccatgttactttaattttatgcagacatgtctcagaaaatcctcaaagccttgaagaagagagttggaggaagctagggcttgtcacctccagctaagaagtaaaagggcggtgagacaaccccatccagagagaaagcaccagttgaagtggtcattgacctctctaaggaacaaaccattgtagaccctcctgtcccaaaaatgactaagtccaaggattctcggggaggtagctcgggcaggccaaagcaagctaggggctgattcgagcttgtcagaagcagatccgagcagatcatggcccctgccccacctccggtgctgcacccagggaccaaaagaggcagagaaatgctcactcactacgtgactcgatcgatccatgaggtgaatgagcaacaggctggggcagacaatgacctttctctggagcttgtgatgggaggagttctaaaggagttttcaagggtaagtcctttctaatagtttctttttgtccttcttc

SEQ ID NO: 209466 - DNA, 1055 bp, Cannabis indica
ccagtcgacgatctccggcgacaaggttattgattttggttcgatttttttgcttttcttgattttgtatcgatctccggcaacgaagtttctggttttctttggattcgggtgcaattttctgggctggtggggtgttattctgcaattttctgggttgttcaacgtgtctctgtgcagttttttctggattttttctgggcagtacttctgggaggggtgcagtcggtcgtttcctgctgtgttctccctgggttctggtgttagcagcgtgttctccctgggtcgtggtgcgattctcttggcaggtgtgcaacgtgtttttgttctactcgtgctctcactgagtgttacaatggacttggaattggttaataggcttgctgaagtcttggtgctagatgaaggtgatggtcctgtccttcctttgaatcaggccggtgtggaagaggggaaaaagagattggatttatgtcttgttggtaaagtgattggtcctaaaccaatcaacaaggagggtattgagagagctatgaagggaatttggagaataaacaatcggtttcaggtggaagagctgagttcaaaaaatgttttccgtttttctttgggagtcgtgaggataggcagcgggtgtttggaggagggccatggacgattgataaacagctcatttgctttgtgaagccgatggggttaggcgaaatatcgaaaatgaattttgattttacgtcattttggatatcgatcaacaatgtccctctagcttgtatgactgaattatttgcaagggaatggggggagaggattgggaagctcgaagacataaagcttgtcaatggcacaatgaaggtgcgagtgcgtattaacatcactgagccacttaagcggggcttacgagtggcggtggatgatcaaggtaatgaggtttctctaatctttcaatatgaacatttacctgatttttgttttgattgtggaataattgggcataaggccatggattgtccgttaagagattttgcgggggagaatccacactttgaccgagggag

SEQ ID NO: 209467 - DNA, 639 bp, Cannabis indica
gacttcattcatatctttgatgtcgagcatcaatccagagaacttctttacatagtctcggactgtcccgacttgctttaactctctaagctgacgtcgagcgaggtaggcgacattctctggcagaaattgggcgttcaattccttcttgagatcttcccaagtgtcaatggtgcatttaccattctgaatgtcttcatatttcgtcctccaccacaacttggcgtccccggacaaatacatggtagctgttgctaccttagcttcttcagagtcggtccgcacgaccctaaagtactgctccatgtcaaacagaaagttttggagctccttggcatccctcgcccctccatagcatttgggctcgggtgctctcggtcggccatactccatacctccgtgccccccggtatttgcacgctctgccgctatcatggtaagatttagcttggttgacatccctgctaattcttcccggatggctgtgacagacacattacaatcctcgatcgtatcattgagggagtcttgtaatgcagcctgcccattttgtagtacagtgatagcagcctgcatgtctgctgttgcttgttctaatgccttgatgcgatcctccatctgaggtgcacctgatgttcc

SEQ ID NO: 209468 - DNA, 820 bp, Cannabis indica
aaaatatatatacaggcatttatttacaaaacttattctgaaatttgaatgtttttttttgcactaaataaggttagatataaaatataaagaagggaaaaaattaacaaatataataatatattaataattaattgaagaataaaaatataaatacaaatgataagatataaaatcagtaattgaaaggaaagtcgatgtatgtgagacacactttccttaaaacaaatttgccccctttacttgagcggtgctagaggatcaacgagcaacaacattccaagatacaacgactaacgagtagatgaatacaccactttcactactccagcaaactcgaattaatgtattctctctatcactttaagacttacggaaaagacaaagaaaaagaagacacaagagagctttttagtgagtgattctttttgttggtgtgattagaatgaaatgtgaagcctctatttataggcttcgtgcggggcggaatacctaattgtgaacataagagaattaatagccaaaaaatcttacaaaattagccatattgatcaatcaaaatcttcatcatacataatttctaatatcaatcagaatattcactattattacggtgattacatccttgatcaaatctgcattttattagcggctatttagaatgtttgccccccaaaatatgatctatatatattgtgcccctaaactttttagcccgttaaaaataatggtccatgaactattcagtgttgtacattggtccttctgttcaagttttgttacgatgtggcaaataaaatgatggcatggctccttagct

SEQ ID NO: 209469 - DNA, 710 bp, Cannabis indica
ggttatcttggctgcaaaccagtaaacactcctatggaagccaatttaaaacttgaacaagatgaaaaagagaagctggtcgatcctacattgtatagaaggattgttggaaagttaaaatgtctaacaattactagcgtcaataagctaagtcaattctcagccactccccgtgttactcacctacatgctgcacaaagagtgctgcaatatgtcaaaagtagtccaggacagggactattttttgcttcgaacatagatgttcagcttcatgcctacatagattcggattgggcttcttgtcctgacactagaaggtctactacaggcttttgcatattcattggaagctcaatcatatcatggaaaaagcaagaaacaacaaacggtctcaaggtcctcatccgaagctgaatatagggcgccatggcaaacactacttgtgaaattgtgtggcttctctctgttctaatagaattaaaaatagaacataaaggacctggtttgttgtattgtgacaacaaatctgtacaatacatagctgcaaatcctatttttcttgagagaactaaacacattgagatagattatcacctagtaagagaaaaggtccaagaggaagttgtcaaactgtccatgtttcatccaaggatcagcttgctgacattctaactaaaccctggcctttttcctaatcagtttaagagcat

SEQ ID NO: 209470 - DNA, 669 bp, Cannabis indica
ttatataaatagacccccaactcttatacatatttttctatcgcatacggtctaattctaaggccacttcaactaacaaatacgaatctagctctaaactcctaaatcgtagttgatgttttgcttgattttgagagtatcttttagttgattcattttgctaaagttcaacctacgtatgcagggcatcaatgcttgtgtgtttttggttatttagactggcaagcccaagatttaacttgatagggtgtattttttcaaaaatataacatgttaaaaaaaattgttaaaattgatacaaacttgtgtttttgcaatgttaaatataatttaaaactaatacataacaataaagagtttttcttggatgggttagttattcttatcggtaaggattcagatcctataatgtgcatttttttggtaaaaaataaatggtatatatatatattgttaaccccaaaaattggcatctttaatttttgagattattcgtcgaagggaagaaagacccgcggtggtgcgccgaatcggcatgcccgcccgcccgaggtccacccctcgaaaatagtactccaaatgttgctggattctgtttcagagtaatacagacttgggtttatttgagtgtctatcattgatcttaaatgataagattctatgttgtat

SEQ ID NO: 209471 - DNA, 630 bp, Cannabis indica
tagtacaaatataatttaatccagttttctaattaaatttaatactaactaatccacaattcaatttggcataccaaacttttaccttaattgtttttcttcttgttactacgaaagtagttgcttcactttcagccactcgaataaggtctaaacctttgtacgggaggaaaggcctctcgattaaagcactaacattgccaaggaaagaaaaaaaactgtaattgaaggcttaaaagagaggagactagagagaaaagaaaaaaaaataatcaatgaattaaaaggaaaaggattgaaggaaaagaaaagtagagaaaaaagggattcttttttatatatctcttgtattgattttcctcagtgtataaacaatgatttttacaatgtatttatagtacagggaataaaaattctaacaagaaaatattcctttgccacctcattggctgtaggatttttacccttttaacctacaccaacaaaacgtttttaatatcagtatcaaggtcaaaatcgacctttccttgtctaattaaagtctagacaaaaaacggcagcgttttaatcaacacgataccaactcttgtgtcgtttagatccatgggtcaaagactctccaagaagagt

SEQ ID NO: 209472 - DNA, 1152 bp, Cannabis indica
aaataaaaaataaataaaaatttggtgtaaacacccaatttttcttagtttttttttcaaatatttatcttctcccatgtttattacatttataatgaataatgtcgttttaatgttgatattgtcgtttgcgagagatataacacataacatttctaagacattactcccaaaccaacccaatccaaaaaagcttcgtgaagtctctctttgtttcttctacttttgcctggtttctttcaaatcaaagttcttctcttacgatttacgaatgtgtaggtgtttcagcttcactgagtcaaagaattggtgttaccgctccgctttcgctaggtcggggctccaatccactgtaacggacctccaagacgggacccacatgcattgctgggtccccaagcacccgaaccactccaaacccaatcttctcctcatccatggccttggggccaacgcaatgtggcagtggggtcacctagtccctcacttgactcctcatttcaacctctacatcccagacctcgtcttcttcggcgactcccatacgacccgacccgaccggactgagtcgttccaggctgagtgcgtgtttcgtgtcatggaggcccaatcggtgaggaagctgagcttggtgggcctaagctacggagggttcgtgggctacagcttggcggcccaatatggggattttgttgagaaagtggtgatatgtgggggtggggttagcatggaggagaaagatttgagtgaagggaatttctttagagtttctgatttggaggaggccactaagattttggttccccaaactccacagatgcttaagaaattgatgggtttcaccttttttaggcctctgcttttgggattattgccctctttctttctctctgattttattcatgtgagaaacaaactattctgcattacttaccatatgtcattgggtagttttaatccattacaatatacactctgtttacttacaatatcttgcaaatttgtgagacattcagccaaaaataaggttcaaaatacatttagtttatatgaggttttaaaccctattttctattttatgtattgtaaattatatttaatttatcataacattttaggatgccttagataatgttaggactaaggtgcggt

SEQ ID NO: 209473 - DNA, 559 bp, Cannabis indica
ctgaaattcgtccaagagtgcgctatttgtcaacaacataagtttgcagccactaccctagctgggttactgcagcccattgccctggcagctcaagtttgggatgatatttccgtagatttcatcgaaggtttgccaagattggaaggctgggataccatcatggtagtggtggatagattgagcaagtacgcccatttcgtcacccttaaacatccattcacagccacaacagttgcgcaagtcttccttaaagaggtagtccgcctccatagtttacccttgtccattatttcaaaccgtgatcggatctttactagccacttttggagtgatttagcaaggtacatccctcaagcgcagcaccgcttaccatccacaaactgacggccaaatagaagtggtgaatcagactcttgagacatacctccgttgttttgctaatgagaaagccaagcaatgggctaaatggttggcttgggcaaaatattggtataatacttccacccattcgagcattaagcttattctattctaggcattgtatggcagagatccc

SEQ ID NO: 209474 - DNA, 1432 bp, Cannabis indica
agagagagagagggtctgggtgcttcggctcggctccggtggtgtttcggttcagtagaagaagaagaagaagaaagaaagaaagaagaaagaaaaacgaaaaggagaaaaagaaagaaaaaaagaaattaatttagtttatttaataattttaaaattatttttttataattattttttaaaattaatattacgtcgtgtacaaatgtgtacacgtgaacagtccaccgtggtacttaactgtgatttttggacggagaggtacagagcaaaatagaatgggagtttaggtagttttgccccccaaaaattaatttttgtggttaagtgtcaaaaaatttaaagttcaagtattttagccaccaatatccatcaaaaaaatacacattacaatataaattattattctaaaaataatggttaagccacacaaattttatacactatatttatcacatcaaagtgtgtaaattatctcaattacacaataaaaaaaaaatgataacgaacattccttatcttgtcttcactaggggtagcaaaatgggtttcgacactgcacacgaacacaacacaaattttacgagttaggatcgtaaaaattagacatgggtcgaaaacggatcgacacgacttgacacaaaataaaaacagatcaaacacgacacgactcacttaacacgaatttgatacgtatgtttcacactatttttttaaatataataaaataaaaaaaattattaataaaaatatatatttagtgatttaacgtttattaaaaaaaattaatttaacatgaaatttgaaaatattttaaattttttaatttttattatatatataacaaattatatattactattataaaattggcttattggtgtgatatttatagactattttacctttacaagtttaattttattacaagtctattttcttttttgtctttaccctcacaattacaagtcaaatttctttcaaaactacaatgctaatccttttcttcaatccctacttttctaattacataaatgtcgtctcacgttcatattgaaaagatattgtgcacttacaataactttaataacaaatattatgaatagaattattcccttgttctttttttaaatgataataaaagccaaatattatattttagcttgaaaaagaaaatgttccatactaatggattcgggtccataaccatgggttccaatgtacgagatcttgtagaacttaccaatgaggtcgtctccgtaaaaaaaatttgacaaaaaaaaagaatttgattctattaattaattaattaatgttttcccttttgggtgggacgaaagaatcaacatactatcgtaatcaactatatttaatcttttatcctattaaattaaatacattaatcccattatccttggcagatagcgggaat

SEQ ID NO: 209475 - DNA, 497 bp, Cannabis indica
aaaacatgtaattgttgttggtttcacaattcagattttcatatagaatttggtactctctgattttggtactaaaaaggcatttctagtttgttgtatgtgtgttgtatatatattttttttttgtgatatgatgaagaattattcagtggattgtatgaataatggtaagtttcttttgctcaattattgtcattgtaggataatggctcgcttaactgtaagtgaaagacaaattttgagaaagaagaagatcataactctttatatgtattggatgaatgtgttgcatgtagtgcaatggttttttaaattatgggaaaaaattattgaacatagtattgaatcaagctctttgggaagacaattatacatacttgatatttttgtcaataggcaaattgtgcaccaaatagcttatgagagtgatgtcatttgttttgatcaacttaggatgaataggaaagcatttagcactttatgcataatgcttgaaa

SEQ ID NO: 209476 - DNA, 539 bp, Cannabis indica
taacttccataaatcagacatgtgctttgggcgaaatgtctcctctcccatcaagactcgattagccactttgatgggggtaaaagtggtggataattatggaaaatactttgtgctgccttcttttgttgggaggacgaaaaaacaacattttgagtttattaagaacaaggtgtggaataaattaaagggttggaaaggttcattttttttctgctgctgggaaagaagtccttatcaaggccattgtttaagttatccctacatatacaatgaactgctttcgtctaccaaagaaaactattaatagtatacatagcatggctgcaaggtttttgtggggatcgtcggaaaaggatgctaagattcattggtgtaaatggtccgttctgtgcaaacataaggagcaaggtggtttaggattctgggatttgggtcttttcaatcaagctcttcttgctaaacaaatttggagatgtataaggtttccaaattctttgtgtatcaaagttttgaaagccagttactatcctcatggt

SEQ ID NO: 209477 - DNA, 867 bp, Cannabis indica
tacatgtcaaaatttaaggggcagaaattctaattatactttaaataatgatcaattagtactctcagtttgtaaaaattatccactttagtacccttatgcatttaacctgaaggaaataccctaaagattgtccaccagagctcgtagttgctggtatagaagaatttgttggtgcggctttctcaggttcaatggatatgccggtcgaggcagacttctttttggcagtctttttggttttctttgaaacttctagggtggaatcagaagtgacttccatgggagttgttctctttttattacctcgcttggcagggacaattagactgcagaggagattttctaaactgtccatgtatgcgagagaaaaaataatatatcaaattctatgtaaagcaagtaatacaaaggtggcaatattaaaactctcacttagaacattaccataagtatcagacgaggaaaaactgctacaataattactaaactccctagaattagggatcatgtaacggttagagcatgaaatagagaaatgatttgcctcaaagttttgaaccgtcaaaataaaagcatgcaaattttaaatggggaaaatatgatcgtaccgttgaggcatttaaaaagtattttttactttaaaaagtactttttaggggacaactattatacctatatttagagcaataataaaaggttgacacgtgtatcaaagctagaatatgaaccatatcaaattatgcattattaaatgtacttaaatgactcgtctcaagaaatatagttaataaaaatactggaactcgtcgccgtatagtcaatagggagacatgaataataactattgactgacgagactagtga

SEQ ID NO: 209478 - DNA, 679 bp, Cannabis indica
ttttagcattcatcgcaccaattccaaacaggttctagaattaatttccataacttagtatgtatgaatacaaatgcaagtatttcgttccactattaatatttgaacaagtttgacatgtagctatgatcggttacaaccccatacatggagtggagcataccaatgctggggaagagagaacaaggaagctgcagtgagagctgcatctccacctggatttccagatggtttggtgagtaactttgagattaaatcgtttgatggatgtgcaaatccacacataggcttggctgcaatacttgctgctggcattgatgggcttcggaaacatctaagcctcccggaacctgttggtaagttcaactcccacttgctcttaattaagtccttataattacatatgtttataactagattcctcatcttaacgatctctgtacatgaaacagatacagatccttctacgtgtggaccagagcttaaaagattgccagaatcactttcagaatctttagcagctctaaatgaagacaatttcatggcagatctaattggtgaaaagcttcttgttgccgttaaagcaattcgcaaggtatgtcacattacaatatcaatttattctagatgtcatatgaaaaacttactttctaattaaccaacagtcttagattatatt

SEQ ID NO: 209479 - DNA, 511 bp, Cannabis indica
tatgcacagggttcttccacttgcccacattctccctatttttggtaaacttacgcatcagccaaagcctcaatgactccaataaagttacaattggtttatcccttgcattcaagattgcactattgaaactttcgcagatattgttaagcaacatgtcacacttcacagattctttgaagtgtgatttactccactcaaatgggttctttccagcaagccaattgtaagctccctcattaacatcttttaagtccttcatttttctttcaaagtcagctagggttgtggctcttgctgcagcccacaacatttgttttagcagaagtccagggaaatctttcttaaaattaccgtgcatgtgtctcacgcaaaaaacgaccatcagaaccaatgaaaatcttgtccactgcattttgcaaacccttttgcctatcactcatcatcgtgtatatgcaaggattggtgggatgcaagtcttctttcagcagctccaaaaaccaagtccagc

SEQ ID NO: 209480 - DNA, 640 bp, Cannabis indica
acattctcgtcaagaactataattaaggcaacaggtagattattttagtttatatcagaatattattgaataaaaactaaggttaataaaaaaaaattgtaaccatataatataaatatatagctgtttgggagaggtgattcgcattcttcatggtcatgagattggccgggattcattttcttattatgcgaatacaaataatcaactttgtagtacgaaagacaatatagagaataaaaactgcgtggttgtacgaatatttatttgtgcctaaataactcataagataaactataataaaatgaaaaaaaaaaaaaaaaccaataatagtgcgttttaattggattttagagatatacattagcaaacatgacgtcatgactcaaaaaaaattatggtaataacaaagaaaataatttcatgagtataacatcaccaaatattcataaatggtactcaaaaagaaaaatcaatggtatgagtaaatatggagaagaaaaatgttataaaagatagtcatatatattcagtgacttcaccagaaaaaatatttagccattaaaaacaaacaactaaacagagaaatttgtatacactaatttccatgttaaaatttgagaaaatgaacaaaaacaaa

SEQ ID NO: 209481 - DNA, 669 bp, Cannabis indica
aaaagtatattttacctccgtattttacacttagaggaaataaaatatgataaaagttattttagaacttttgatcacccttttgtgtttgatgaaagcacatttagttattaaaaaaaatgatgagtaattatataaagtactaattttagtaaaaaaaattatatctttacgtttaataaatttttttttatatatttttatggtttctcgtcaaaacaacacgaaaacaataagaaaactacataaaagtaacattaaaataacatctaaataatatacaaaaaaaaaaataaataacatacagataaaaaaaaaatcaacaataaattaacatgaattcaacataaaaagattgtattttttgtaaataaaatcaaaaaatttgtaaatatatttaaaatttattgaaaccgtatttttgtaatttgtttatcgtttttgtgtatttgtgaaatcatccctaaaaaattacacttttttatagcaaaaaaataaaataaaataaaaaaataacacttttacttgagtattcggtcatttgccaaacacaactttgtattttttttagattaatttgcagccaaattttctatatttttatgtttgttacgatttaacgcccttactcaaaaaattatggctatactccctaaactcaacattcgt

SEQ ID NO: 209482 - DNA, 935 bp, Cannabis indica
tttttatttttattttttccatttaaaaactaaaaaactctaaccctaacatatgtttctctctgcacatctctaacccttgtggtttcaggtgcaatttcgctgacgagtcaagaacaactcaccgaagtcagtctcgaccaagatggctactctggttcactcacttcaatctcattcaacctcccttcaaacaacttcttttctaggtcaacatccaactcactctttaacttgactcgtctccaacgactcggtctctcctccaacgttcttcgacaaaatcccatcctcttgttgggaaaacctattgcaattaaccacaatattttccctctttgtatgtcaaaaatggaatacttatcaaacactacaataagcaattattaaatatcaaccaaagcaccacaagcaatataaaatacacaaattaagaataaaagtgagacaccaagatttttacgtggaaaaaaccacaggatcgtagtccgctcaaatcatccactatcaccaaagttcaataatgggattacaaagttcttctctagaaaaactagaggctcacaacaacatcaagattaaacaatcttggatcaccaatacaatcatcaacatcatctcaaaagatggatacacaaaagaaaaaatgtttgggtctcaccaagtgggtattgtagaagagcaccttagagaggacaatcgccaaatcggaaccggtagatttgaagagcaccttgcaaggattcaccacccaaaatttgagctaaaatggatgagaatcaaccacttgatcttcaaagtaaaatggcaaaactcttttctctctctagctttctttctcttctttccctctctttttctttcttttctctttcctgccttgctgctcacgaagcactcttatgcttgctgcctctttttttttattatttttt

SEQ ID NO: 209483 - DNA, 1332 bp, Cannabis indica
tgccctcttcgtcctctacgactcccagaaggggcgtatgccttctcctcacgaagtcagttggttctttaatttgaagtcaaccactaagcaaggcaggtcgaggtacttctatttctctcaaccagacttcaagtggttgacgggcaccgatgattcggtcatcaacaaaattttagccaacaacaatgagtcttatttagtaagcgataagtgatttatagcaatcgatagatagtaaagcaatatatagacacaagaactttatagaggttcaaccccgagcggttcggtaatagcctaatttttcgttatttgtattgacttacgaacaaggagaaaggttccttttcttatagctcttacaatagtatctctgaatatgaattcttaaataatatctctagggtaaagtcttgactaaactgtttgcgaccttttgcccagtgaacatgcatcactatttatagggctgtgaacttggagaggaagtgtttcccgtctcgttacaatggatataaacagaaagatcgcacgatcaatgcagggacaaatgcggaatacactaatcgtgggataaatgcagaatacaatgatcgtgggatcgtgggtatgccatatctctgtaatctgatccccagattacagggatttctttgatgagtcacaatgcgaaagctgaatttgctaagttttgcttattttgcgtggattgctgatcgcttttcctcgggaatgctagtaaggcatcctgttcaaattgtatcctccgagcagatactccaaggttattccacgtgtcaccattatgtggtgccacgtcagagtgcaaaaattaggataacatttgccccccaagtctgtacaggaccttcaaagtttcgtgtagacttcatccgagctgtttctgccttcggatggggacacgtttcgggcgcgacggtacgggactcgatgtgaagctgactgggcgtccctttcgtttttggctaataaatgctctgactattaatatttcaaaatctgattttctctcaccactgttgatagctgtatttgattattttttatttcccatatttgcttttagggagaaccgaggcgtttgaggtttctctgaaatgattacctcgtttcgttacttgcatataaatatcaaccagcattggcacataaactcattttcatcatccttctttgctaagttggtttagagcgaaaagagaggtttttggcttcaagtttgctgaagtgcctacatcgaaacttctcgttggtttgatgttgcttgaatccagctatctcactgttgagtaagttctcaatttcctt

SEQ ID NO: 209484 - DNA, 882 bp, Cannabis indica
cttgggaacctagggtttcacccggtgcccggaatgacatttccaactagggtttcagtttctgggaccgtcttagtgcaaattggtcaaaacttgcattaggatatcaactagacataccacaaacatatttgaggcatcagaatcaaattcatagcaagttcattttttagcacctggtgcctgggcacccccgcccaagttaattatttgtcaatctgggtgccttccaagtatcagatctacgatccgacctttgcatcttctttgtcttcataaaaaatggggaaataggtactttcgtggaagaagcaacacttcttgggtgccaaaagcaagacccagcgcccaagttgacacttggggcttgcccaccacccaggttgacattttgttaactgggccaattctgatgatgttttctgagaactctttcgagcatcttctccattttaagcaaagattaagattcaatttttttttgggaccaaacaaaactttcgaagagctaaaagggggacccaacgtccaggttgacacctggcactaggcccaacgcccaggttgacatattgtcaaacttggctattttcaaccaagttctcaaaagtgttatgggaattttttttgtcataaaaaataatgaagattcaagcaaactcagggagaaaacaataatctcgagaccctagaaacagggtccagcgcccatgttgacttggtgttgggcccagcgcctaggttgacaatcaacctggtgcactggttttgatcactcaaatgtcaaatctgatttgaccattggatttggaatgtgaaaaacagggtaggagaacttgtcctcaaattctagagcctaagaagtatcaaaacgacatctcg

SEQ ID NO: 209485 - DNA, 819 bp, Cannabis indica
ttttggtgttgcttgttttccttctcttaggccttaccaagcacataagttccaatttcactccattaaatgtgtgaatcttggctataatgatgcacataaagtatacaaatgcttaagtccttcaggtcgtatctatatctcacgagatgtggtttttaatgaacttgaatttccttttcaaataggttttcttaacaattatcaatctgaaaagcctgtcatcattcaaagttccacttggtctattttaccatctgtttcacctgtcacaggttctcgattcacatctgctaatcaatcctcaagctctcaagaggcagaaccttcatcatctcagtctcacaatttttaggtaaacactcctgattctcctctcatatctcactcctctgctgactctccttcaggtagtgagaggggatcacttgaacaacatccttctagtccaattacaacaactttccttgatcctgaacctgctgatgaagcagctgttgctcctactgctgctacaattgaacaacctactgctgctctaggacacccgatgatcaccagagccaaggctggcatttttaagccaaaggtgttcattggacaagctgtttggaaccccagctctagagaaccgacaagtgttgctgaagttcttgctctcaaaggctagaacaatgctatgaatgaagaaatcacagctttaaagaccaacaaaacttatgttcttgttcctcctgcacctggtcagaatttaattggaaagcaagtgggtgtttagagaaaagttcaactcagatggaaccctccaaaggctcaagg

SEQ ID NO: 209486 - DNA, 734 bp, Cannabis indica
aataatgctttaaaagaaaaaaaaaggaaataaatagattttcataaaataaataaataaataaaagaaagtaaaaacttatgacaaaaaaagttaacatttataaattttaatttgactttcaaaggagtacaataattatcaaaacaaatcaatttttatatataaatataagcgcacacatatatatattctggggggccatagccccccatatgctctaatgtatattcgtgcttttgtatatagctatttcatataaaatgtagttatgtaaaaaaatttttagtttaacgatatcttttaattttttacgttaattttaatataatattctattacttaacagaatattctttattaattttataatattattatatatatttaaaaataaaatccatataaatatttttaatcatattttaaatttattagtttaactttgaattaaatatttatatcaaatttacgaatccaacccatatagtaaattataatatatacattatcaaatatattacctaattaaaaaaaattaaatttaagaaatacatatatgtaatcacattcaaaaaaaaaatttaaaaaatcaaaatctcaaaccctatttcaaaaatctcaaaaactatataatacttaattataaaaattaaacatattaatacttaacatcacctaattaaaaattaaatgaatattgttgatcttgttgtaaaaattaattatggttg

SEQ ID NO: 209487 - DNA, 563 bp, Cannabis indica
ttttccttggaggaaatctaatagcccttataaaataaaatagagaaggtgaaaagttgacaaattaaaccattaagtaataataaaaaaaataaaataaattaatgtaaaaccatgaaaaaatggtatgaaatgcggatcatcactctaattactattcattgctagcacaactacatcgtcggcgaccgaaacgacttcaccagttcactatgttggtagagatgctgaagaagaagatcttctaaacttaaaacatagaaaatacaaagttaagacaatataaataaaaatatataaacagaaatatatcataagaaatcaatgatattgaaaaccataaatcacatctaaaattaacaactcaaacccaaaaaaatctcgatcgactccggccagtgaacaatgattgatcctagtcgttgctgtcgcctctatgaactcccattggttatgtgaaccttattgtcgaattgaaattttgatttggtgcttcgttggacagtcagagaaggctatatgtggtctttgcaagattcaacgccgccaaacccaatcaagat

SEQ ID NO: 209488 - DNA, 511 bp, Cannabis indica
catgaaagcatcatcaaagtaacaagaaaagtgttcccagaaataacacatgactactgcatctaccaccacttctcaaacttgaaaacaaaattttaaaaaaatgtaaagcatttcagaggtccattctttgcagcagcgaaagcttacacagaaatagagttcgaatttcatatgagagagctagacaacttggataagcgcataagaccgaatctggaaaaaattggccataagaaatagtcaagatatcattcaaaaaacaacatgtaaaataataacaattaattataaaaaaggataatatatgatagagtaactactattaaaaacgttatttttgtgttttttttagagttgcatatcagttggattaaaaattatattgatgataaaatctgtttaaattacaggtactcaactatgacatctaacatagctgaaacacttaactcagcaaatttagcagccagggaaacaccagtcaaaacattaatggagtgcttgaggg

SEQ ID NO: 209489 - DNA, 911 bp, Cannabis indica
atacacaaagaattaaaaatgtggcatgtgaaaaacgtacataaaacgtacatataaaataaatatatatatatcggttaccagttttcttcgaaaccagttgcaagcgagcattaaaaatctagcgggcatttacatttgattttagtttcgaagaaaacttcaaggaaataataaaagcaattgagagtggtattgaaaactctatttgaatcgaacccatacaaaagataacgacgtacaataaaaggaagcctagtgtgggagttccatatgtttaattgcttttagatgtgttcctaatgtacttttaatttgatgtgcttttgattgagattttggaatatatagttttatcaactaccatcatatatagtgaatttcttaaaaagaaaaaaaaagttcgcatgagctttctatttttttcaaaagaatttttgcatgattatgacattaaggttatcaaaaaacgattataatggataggtgagaaatataaaatatattttaaataattaagtttcttttatatgtaataaaatatataataacacttttgatcgtaaagtaataaattttcagaaatacaatttgaaagattttattgttaaagtttaatataacgttgtcttcgaaagattctctttcttagaatttgaaagtccgtatataaagtattaatcatcatctctatcgtagtttcgagtatactgtatatataatagattttaattgagatttttggtatattttttgagttttgtaattaaaaaataatgaatcttgatgactgaattattgtcgaaatttttcattaggaaattatctaataagattttgaatgtaccaaaatgttagcatagataagactggatttgaatagcttttaagactatttattgttatgctgt

SEQ ID NO: 209490 - DNA, 649 bp, Cannabis indica
ctaaggcctatttctgacaataatccatatctttctactaagaagcacataacaataactttattaatttaatccttaattatctgttaattcccataatttttaactatgcggtcattacaattatcctcccgttaagaggatttcattctcaaaatctaatctaaacaacttcgagaactaagccctcagtctgattttaaatccaattggtttcattcaccttcctgtttccaaaattctttgaacaatgctatgatcttgttttgaagaactttttatttcttatcaaggattttcaatggttgtttttcataagacaagtctaattggagctctaaagctccacaactcaagatatgagtccggtctgaaacgtatttccttaacattgagacatgaaatatattatgtactactgacaatgctggaggcaaggctagacggtaaactaccaatctaacattctctagaatctctaaagaccccataaatatagagcatatcttgccctttttcctgaaggatttcattcctttcactggtgatattcataggaagacatgatcccctacttagatttctatgtttttgagcttcggatctagatatcctttttttcgtgatttgatgagaaagcatcatggct

SEQ ID NO: 209491 - DNA, 612 bp, Cannabis indica
actggagatcttgaagctgtggatgaccaagaagacgattattctgatggctggttggcatcagaggatgacaaaaacccttggagtgatgaaaatggttctatgctcccattaaagagtgcagatggccaacaaagtgagtgttctaaggactggaaaacagaaatgggtttgcatcctcaagatcagtctggtccgcatgtcaaaacatctgcgcttactggagttggattgcaagagttgctggaacttatagatgagaggctgaaggatcaagataagaagttgaatgctcacaatgttgtggaaaggagcatcttcaatcgaaaatggaggccccctcgagaagaggaagatggcatagctgttgaaaagtaaacacttcaatctggtccatttgttgttctttcctacatctaccttgggtcgctccatgactgaatacttgttacatactgaaacagctgaatgcaggtcgatttctcttctctttggtagctcaaaaactttgttgtccagaagcagttttctggtatttctcaagggaactcttgcaactaatgaaattacacaagttttcctcaaatctggcatttttattgtgaagaatgc

SEQ ID NO: 209492 - DNA, 466 bp, Cannabis indica
cgaagcatgcaatcagatattactaacaaaatgtagaatcaactattattaaattgatcaacaatgacttttagtttcaggttaagaatccactgtaagaacatggtaaattaacatcaactcaaccaacattatcatataaaaaacttatcatattagaattgcattttatatgagcaatgttttggattttctatatgaaatacctattaaaaatactaaaaatagtgtagcttcgatcaacattataaattctttgatcgtccataaaacgaaaaagaaaaatgtacgaaaactatattacaacaacattatctaaaaattgatattgtaattttgtatcttcaaattctaattgcctaattatacaaaaaaaaattctaattgctttgctttggcatattattgtagtgtttaccaagatgcctattgaccaaattgtctacatttcatgattaaaatgtcc

SEQ ID NO: 209493 - DNA, 791 bp, Cannabis indica
ttttcttttatgaatttcagatcagacattttatggtaagttttctatagatttctctttccatgagtttctttacaattttttaaatttttagtatttttcatctttattttgtatgttaccccatgataatctcatggaaactcatgaggttaagagattatctaatttttattgtttttaacctatgataagattttgataatttgataatattatgtttggtgtgattttgtgtaatagaaaataataacagatgtaatgtggtagcaatgaataaaaattttataattaggttttcaaattaaatttacacaaaaatatctaaaatatctatactaataattaatatatataaaatttaaatataaatgttaaatattttttaatcatatatacaataaattaatctattgaatatatatatatatatatatatatatatatatttatgtaaatagaatagtccggggaaatagtatgatactaactaattgattttattagttcatctatttctttgatgtataattttattttattttattgaaaaaaaactaaatcaataatcaataataatatataattagataatctattttgtactaaaaaaaatcttatttcaaaatttttatacattaaaattattatttttatgttaatttgtattaatgaaactttcttttcttttttattatattaaagttttattttttatttaattcgccgcatgaagggcggctaagttatctagttttataaaaagagaaacttaagggtgtgaaaatacc

SEQ ID NO: 209494 - DNA, 520 bp, Cannabis indica
tttttgtagcaatatttggctcattcattataaataaatgtgaaaaataatgaataaattcaagaccgaatacaaaaatagattggtacagctaaagtacggtatgaaaatattgagtttatactttataggttatggtgggtttattctttaaaaatattaacacaaatacgataggattcatattttttatggcataacacaatacgatgcatattttaaaaagcacaatataatatgtatcgaaccagcacacgacacacacaaatttacaatacaagaagtaactcctttgtagtctttattaatcatcaattaattattagtatatatttctttaagaaaaaatatgttttttatttcttttgctatttaagaaaaagtatgttggaaataaaaaagaagtttctttaaaaaaaccatgtggtttattccaagcttagctgtcgtttagccaaaaaaatgacttgcacttgtatatcgggtttagtattaactgtcgttctttgtaaaaacgaca

SEQ ID NO: 209495 - DNA, 336 bp, Cannabis indica
aaattacatgaaaaattagagctgattgttgggtcccgggaaaactattgtgcccgggcgtgctgcagctggacaatgaggacatttttacaaagtaaacacgtgtcattcaaagatttaacctttaaaagtagtggccacatgtcgcccaaagctttctcctttaaatgcagggggtctatatttacctgtcaaaaaagtggtaaaggtgtgcgcactaccatgcttggacgtaggagacaagatctcatcctgtattagaaaaaacataaccgtcactaggtgatttggctcatatcaaaggtagacattcgtgacagtcctaggagatcgaca

SEQ ID NO: 209496 - DNA, 828 bp, Cannabis indica
tttattattatttcattgtacatatatttatactaatgcaaaacttctcactgaagaccatttacaaaggtttcatgtgcagcttgatagcactctctgcaggtttgtgaggcagtaaaggaagattgaaattaaattttacttacagacacctttaattagtttttttaaacaagtatatatacaagtatattaatttcactctcatatgtatattaattgcaaactcatatcttatatttaagaccaaatattaaaagcaataaatgttgattaaagattttaatgcaatacaaatattaaaagtattttgggttattatattgatttagtttctcattcttttagtcatatttttgtataaataggagttcaccctattgaaataatcaactaagaaattctcatttagtttctttttctctattcatcatcttcttcttttcttcttatatttttataacaaaataatattattaaaaacatataccatactaataaaattatatactatgtttatatataataaaataagaaactaaatatgatactaaaataaataatatattataaacaacaaaatttatataccatacatacaaaaaatatataccattgatgcgtgtcgtaagccacaacaaatttaataattattttctttcagatttaccaattactttagtatagcaaaaaatacatgtcaaacccatgagaattaatgattaatttattattcaatatgaaatataaagtaaaagagggatgtgagtttgcaattaaaagaaaacaaataacgaatagacagttaacgatattatagacacgttt

SEQ ID NO: 209497 - DNA, 534 bp, Cannabis indica
tggatattggcgcgacactaggaccaataggcgcgaaaatgttgtgccaatgatcttttgaaaagttgtcgttagttcaggcgggaaatttccctccaaggcaggttggcatgaccacgtcgggctcagaactctgacatggcgtgccattaaatttttattttggtaggcacgactattagttgcacgacttagtcgggccaaaattgtccttttttttaaaaaaaaaagcagacttgggtattggcccattcaacccttcatttctttcatttcattttccctttcttctctctatttcaaaaaaaaaaaacctcctttcttagccaaaaaaaagtccaaccctttctcaaattgctcacaccatcggagagaagagggtgttgatcagagctggctgcaacagaacaacatttcatgtggtgcctctgatttggtctccttttgagttcaaaacaccttcgttaaattctctaaactccgttttatccctctttcttcttcttcatcactatttgttttatcttcttcatt

SEQ ID NO: 209498 - DNA, 988 bp, Cannabis indica
atttacctgctgacccgaccacgagcaaaaatctctcgaggcagctccagaaccatttgcctcaattagattagctcttccaccaaattaaatcatcagcaagaaaatatgggagagcaccgggccacccctactaagtgttatacccttaatgaggtgttggtgaagggattgggagatcaaccttgaaaggacttcagcggcccagatgaagagatagggggagagagggtctccttggcggagcccacaagagggggtaatgttccccacctgccccccattgagacacacattgagggtcgtggttgaaatacactgcgaaattctacgacggaaatccgaggggatgcccgagcactccaggacatgatcaataaacttccagctcagcctgtcataagccttgacaagatcaattttgatagcaaaaaacccctccttacccttcttccgattaaaggaatgaatgacttcttggataatcacattgttgtcatggatattccgccctgggacaaacgcggcttgcgtagggcaaatagtcgaaggaagactaggttttagcctatttgctaagatcttagctataaccttgtacaccacgttacgcaaagaaatcggcctaaagtggtttgtgcgattgggattttggacctttgggatgagcacaatattagtagcattaatccctctatgcatcctgccactaacgaagaaatcatgaacagctgcacagaaatcatcacccacctttagcacacacgcattcttctatggccacttcaattagtctcggttaaaaagaaattttagttaaaatgacacatttttttactagcacatggattcctaaacattttttaaggattttaatttttgtaattataatttttacgaaatctcataaaaataacatagtataaatatttgagtaatttacggcacatatacctaagtttaattcctggttgtaaataaatactta

SEQ ID NO: 209499 - DNA, 902 bp, Cannabis indica
tctgaagcaattctttcgatctccttcatagtgacgctagatcaccatttataggggcttaatgcatgagggatggttttccttttgcttacaatgcataaaataaaaaattacaatgattacataattacaatacatgaaatgggaaaaggaaataggttgctatatttctctaactcaatcacacgattataggaattgtctttgtgtctgaacattacaagatcattttgaagtaattaacgcttgtaactagctcggcccaacagaattctacctggtcagatgttctatctgccaccctactcgggtaatcaacaattgtagatgctcatgaattatgcattggctgttagggatatttacctctgcctaggtatcaaaaatgtgagacacgtgtcctcgatcctcttgccatgtcggtgtgcaaaaaaaaattgataacattatcctagacaaaataaatcgattaacaaaggatggtcatttgagataactaaaagttggcactcttccgatatgcgaatcttctctaaaaggcaagatggctaaaagacctttttctacaaaaagcaatagacccaaagaaaaaattgagcttatacacactaatgtgtgcggacctataaatattcaagatcgaggtggttataaatgcttcgtcaattttactgatgattattgttaatatggtcatacttactgaatggccaagaactctgaaactttcaggaacttaaagactttaaaagcatggctgaaaagcagttaggtaactcattaagacacttcaatatttagatcgtggtggcaagtatttggattctgaattcaaaaactaatttgatggtaaaagggagtcttaatcccaacttacagtcacctagacaactcagcagacc

SEQ ID NO: 209500 - DNA, 583 bp, Cannabis indica
cagagccatctttcccttctttggctcgatagaaccatttgcaacctatagcctttcttccaggaggaaaaggaacaacaatccaagttttatttctttttaaggctattatttcagttcccatagcattattccattcttttgacttcaaggcagcagctaaggtgagaggttccttgaagagtaagagtacttttggtttgtaggtgcctactttagcttttgtaaccattggatggttgttgacaggaacagtaggagtagctatggtggttgggggaactgaaaccgaagtagattggggctgcaatgagtgagatgaagagggattgcttgagacatcacttagtctgtcagtagcagcagctggaacaatttcaggagcagaggtactgctgggagcagacaagggaatatctgaagcaatatcagtagctgtagtattttcatctgtagcagcaggttgctgatggtgttgtgttgatgcttggtcagatcgaggaataacagatgatggtccagcagatttaaaaccagaagacaaagaatggttagtagatattttagcaaagggaaaagtata

SEQ ID NO: 209501 - DNA, 559 bp, Cannabis indica
tgattcctaaaattgacaacccgatcaaggttttacactttcgacctattagtctttgtaatgtcttttacaaaattactactaaggctatgactaatcgcatgcgagaggtgttgggtcacatcatttcggatgaacaaggtgtctttcttccaaattgtcttagtatcgacaatgctcttattaggtttaaatgtatcaatgctttgaagaaaaaaaagagaggtgatggtttctgtgctctcaaacttgatatgttcaaaacatatgatcggatcgagtggtgtttcttggagcagatgatggtgaagctcagatttcacggtgtttggatctgtaagattcttgattgcatctcttctaaagagtactctattttgttgaatggtgaggtcattggctcaaccactcctcaacgtgggcttagacaaggtgatcctatgtccccttattttttttactttgtgttgagggccttttgagcttggttagaagggattgtaaaaacaagttgtggtttaggcttccttgtggtcgggtaggggtggcaattcgtgtt

SEQ ID NO: 209502 - DNA, 891 bp, Cannabis indica
tgaaggcaaaccaagatcaattcccctggatcaatggagatatgatagggatcgaccctaatattatctgccatcatttaaatgttgatccaagctacccagcgaagaaacagaaaaggagacccttggattccaagaggctaggggcactaaaacaggaagtggacaagtttttagtcaacaactttatacgcgagctgttctatccctcgtggatagccaatcatgttctcgtctcgaagcctaacggaacatagagaacctgtattgatttctctgatctgaataaggcgtgcccaaaagattcctttccaatacctaggatcgaccagttagtggatgcaactgttgggcacgagcttatgtcctttatggatgaatattctggatataacaagataaaaatgtatgtcccagatcaagaacatacaagcttcgtaacaaacatgggaccctattgttataaagccatgccgtttggactgaagaacgcttgggcaacgtatcagcgattggtaaatgaaatatttgcaaaccaaatagggaggaacatggaactttacgtcgatgatatgttggtaaaattaataaagagtagggatcatacctcaaacctcgcgaaatgctttaagatattaaagaagtataacatgaagctgaacctgaaaaaatgttcctttggagttaattcaggaaaaattttgggattcatagttaacgcgaggggtattaaagcaaatcctgaaaaaaaaaaaatcaaggcattaatagacattccatcaccaataaggcctaaggaagtacaagccctgacagggaagaatggttgcacttaacagatttattttgaagtccactgataagtgtctgccattcttcaatatattgtga

SEQ ID NO: 209503 - DNA, 1242 bp, Cannabis indica
gaaaatctaactttttctacagaacttgagtacaaacataagtgactaaacccacaaaaagcatgcagttaaataattaaagggtttatatagatttccattaattaatgaaccaatcaaaccagtttttattcttttgaaaataataattatgtgtttagttataattttggaatggagttgctattaaattttttatgtaacttgtatttgtccatgccttgggtttgattccttctatatctttcttactttctaattaaggttaatagcagattttttaatttttttttctttttgtaagagaaaaaactgaaacttctattaatattgagaagaaaaaaactacaatggagtccgattataggatcggagtagaaaattatattaatacaaatatcattaatttcaaactaaatcagcaaataaatccttagatgaactcaagttgataaattctaaaagaaattaacccaaggaaaatttgtttggataacaggaaaaggtgctccaagcctccaagtactaaagtaacaaaaataatcaaagatgtttctacgaggaaaaatcaataaaaataacgagacaaataaataaatacccatttctagattttttttaaaaaaaaaaactaaaaaagatgaatgtattattgattttgaaaaaagaaaaaagaaatatattaatatgagaggctgagagagatgatatttttttaattgtcaaataatattaaataaaaaaataaagaattgaggttatattttagaaagatatgttaaatgaattggtgaaattatatttgtaattttttatttttcttagaaatggagttgatttttaattaaggtgggacacaaaaagaattggggaaggtgatttggatccaataattacaatataaatatttatggatgaatttttaattaatacatcttcaaaatattatatcattttagagtttaacattatatttggtagaggagagagaagaaccaagggaaagggtggaggaaagaaagaaggggtgataatttttttatttttgtgggaaagatggaacggaccctccctccaaacataaaaatttgattccattagaaagaattaaataaaaagacaaaaaaaaaataaatgtaataataatattatagaggataatattgtaataattttaatatttaatttactatttatctttggaactttagacttaataccaaacaatataaagaagaacaa

SEQ ID NO: 209504 - DNA, 909 bp, Cannabis indica
atcaatacttaaattgttttttaagaccatcgttaataaaactgaattttagtattttcgatgatttaaaatggctaaaaaatagaatgggaaatttttaaaaagataatccccgacgattgatgacgaaggtggacatcgatctaaattttttttaaggtgactcactataactgatggtttaaaattgtcggcaatttcttttaaaaatacaatacatgactcctaatttttcaggtcttgataatatggtgacatattgaggaagtacccaaatcatgggattgaaaagtggttacaagtgcataactttgatactggataactgaacaacacccgaacactgatagatgtcgtcgccggtggagctttcatgaggaaaagtgctaatgaggcctttgaattacttgaagagatgtccataactaatcaacattggttaacagagagaggcccaactaaaaaggtttcgggtatgcatgaagttgatgcaataaccaagttgacagcccaggtagagacattaacaaagctggtgactgcacaagccaaacaagctcaagttgtctgtaagctatgtcgaggatctcatgccactgacatcggccctatagatgtcgacagtttgccaatggagcaagcccacgccattggaaactatcagaatatataatcatggtcgtcagcagaacttccagaagcagttttatcctcagtaaaatcaatctcagcaaagccaacaatatccacaacaacaacaagcctcgagtggagggtctaatcctcagttagacacactgctacaattcatgacagagattaagtcttccattaaggtcttggaaattcaggtggggcagttggctgctcaaaacactagcagggctcaaggtaacttgtcgagcacta

SEQ ID NO: 209505 - DNA, 647 bp, Cannabis indica
ctgctgctgaagtccaagccgagaaccagcccttgccgtccatggaggcgatgaacagtgggaaggagaaggtgcagtccagtcgtgcgattaacagaggcaaagaaaagttgccttttttatctgatggagagaatcacggcagtttacaccccaaaacaatttctcctaattttgtgggaggtaatcaatctcctttatttcctcactcttttaataaaaattcatttattgagaatattggtcagaatgctttgattgtgccaaataccactactttatttttggccaatgaaatttcggaccataaaaggaggaggtcaaatgaggtagtttttatggaaagtgggcctaatgatgtggaaaattcaaatgggccgaatgatgctatggaagatgatttgtttatgtctcccaataatgctactccttcaaaaaatgggcttttggtgggttctggtgtccaggcccaccaaacattatgagtgttcttagttggaattgccgtgggcttgggaaccctcggaccgttcaattccttaaggatcttgtaatccaaaagaagcctaattttattttttgtgtgaaactttgtgtcgaaaggaagttgtggaaagaattcgagttgctattggttttgatggctt

SEQ ID NO: 209506 - DNA, 675 bp, Cannabis indica
cctcttctcgatccaagccgccaacttcttcaacatgtttatttaatttttttttagcaattgcccaaccatcgtgatctctctcatcctttcttactgttcattgtcatattatttgtaacattatatatatattttccttgaacaacaaatgaagctgtatttatacatatattttttagcgaaccagtaaggataagacgatggtcgtcgttttcactttgatgttttgcaatccggcgtgaccaagcttccgatcgtcctcaagtgaccactttgtgctgtccctcactgttaaagatccacagtcgtcactgatcaaatatccaccattgtccacgatcgaaaatcctccttcgatctatccgtgaagtgtgaattcattcccatagtgagtcaccattaacaacaaaaacagtctctctaacacactcaaaaccttgtgcgcgaagatccaatgccatctctgtcttttccgacgttggagttcttcgagctgcctttgttggtgcagatcgagaatccacaacatccgatgaagccatgctgatctcctccgctttcggtgttcttcgagttgccttcttcatcgtaggtcgaaccggaattgattgcgatctacctagatcagatccaactgaaatgtcactgtcgataagatcgagagccttctcc

SEQ ID NO: 209507 - DNA, 670 bp, Cannabis indica
tgcggcattaaatgcgaagtgacagttcaagtaatctctttccctcccggaaatgccttagcatagtactagcctcccggagagtaaagacgtgtcttatgctctcctctgggaggctcactccatgaggtatactttcttgtccaagacttagttgattttcgtgagtgggtgttctttcatatccacgtgtaacccttactcgttccacgtattttgagaaaaattaaaggcaatatttaccccctaagcctcatttagtgaagggaaaatgaggcttgtttgaggccttcggttggcttgttgatataacggcacttgccttaggcgcgtgggctgcatgtatgatggtcatcattaatatttatttctttttccttgcaatgattcgcttcccgtctattgagaggacgacaaatttaatcatggtcttagaaaggtactcaaacgtttttaaccgccttggcacccattcatctcgtccgttggatcatagaatgcgaatcgattctactttcccaccgtacgatggtgtctgatcactgctgccttgcaccctttttggtctataaaaggtaggattttcccttcattgggttactttcgctatttcgccatttcaacccaagtaacacttttgagaaaacttcagaaaccatagatttcttac

SEQ ID NO: 209508 - DNA, 632 bp, Cannabis indica
tgtcgaaggctggcaaagaaacattgctaaaaacagttgcacaagctttcccaagctatgcaatgtcagtttttttgttacctttagaaacctgtcgaagtttggaaggagtaatgagttctttttggtggaaatcttccaaggacaaacatagtgttagttggcatagctggaagaaattgtgcaaacacaaagccgttggaggtttgggttttagagactttagagagtacaatctagctttattgggcaaacaagcatggagacttttgactgagaccgactccctggtttgcaaaatctacaaagcaaggtatttccctgatgatacttttctaaatgcttctcttggtcataatccatctttcatttggaaaagcattttcgattccaaggctctcattgttgcgggtgcgagaattagtattggtaatggtttaacaaccaatattactaatactccttggcttccggatatgcatcatccctatgtaactacttcccaccccaccttagatgtcaaccatgtctcaagtctgatgcaaagggacaacttaagctgggatgttgatgttgttactgacctctttaatgaacgcgaccgtgcaattatcttaggcattccactccct

SEQ ID NO: 209509 - DNA, 701 bp, Cannabis indica
gcttcgtcaactcttctcaaacacctctcgtgcaagaatacttcaacttagaggactgcttcaatctacaaagaaaggatctacaccgattgatgaatacatcctcaaaatgaggtgtctcggagatgcgttaatggcggctggacatgcactctctgatgatgaattgatcttgtacattcttggaggactaggcagcgaatatgatcctgctattgtcaatcttacctccaaagaaactgttacgattcaagaagttcaattcttgctccaaacgcaagaaattcgaatcgaacaaatgaactccatagctgctttggatctgcaaaatccaactgcgaattatgctgcagcaaataagaaaggacctccaccacaaagttcgaattccaccagaggtggccgtggctctacaagaggcagaggaggccgtaatcccaataatcgtggaggcaatcgaccggtgtgtcaagtttgtggtcgcactggtcatatagcattaaaatgctatcatcggtttgatttgagctatcaaggtgaagaaagctctaacaatcaagaatccaatcctgctgaagcacaggccatgcttgctactgcatcaacactgactgattctcaatggtatttagacagtggtgcttctcaccatgtcactgctcatgccaattccttgactgataaagttgactacaaaggga

SEQ ID NO: 209510 - DNA, 1480 bp, Cannabis indica
atatcagatttaacactatcatcctcttcaccttttctttcgcaatgacgatgtagttgtccccatctttggtggaggttccgtttaaagtcgccaacaattagtcattgattttaaggaaaatagaggaagaaaaatattgaatctgagagagagaggaggaggcacgagtgtgagagattttagaaattagagtatagtgaagctccttgaaccaccgaagacgaagaagagggaaggctctcgactgggcagcaacctgcgtgtaacaaagtgagtaaggaagatgtctgcctgggtcattggtggtcggaggcagtagatcaaagtcgaggtcgaatttcgggcctccaacataaacttgagttgccccatagtgtggcggttgaaaataaaaaggcaaaacttcaaatgaagttaagaatgggaaaaacttagaacaacaataacaaccaacagtttatgaatgtgcaacatcatcaactgagacttatgtttacctatattaacatgaacatcatcatcaatttttacataaaattctgcatcgcacatagcaacagcagtgaaaaaaaaggtttttgtcttggctgttaactccatgtaaccctcaacatcatttagtataaatgtaaataaattaaaaaattatacaacctcaactttagcaaataaaattaaacggacaagcaactcaccaacaatttcggccctagtttcacttggacagaagaagcttcgagaaaaggacagagaagaagaaagagaaaaagaaaaagaaaaagaaaaaaaatataatatttaattttaaaaattaacttttttttgatctatttttatcatattttaataattaatattacgtgtgtttatcgagattttcgaaaactgaatctatagagcttaagaaaataaaagatattaaacaacagataaacatatttattacatgattcaggcattaatgatcagcctctttgggcaagtatttaagtacgttatttcaatttttttcttcttgatgtggtacgcttacgtggacaaaatcagcaaggccaagcagcacctaagcaaacagagaccccgacactcaaatgggtatcaagtgacagaccagctccctcagaggagttggcaggccttgggactgcaccatggccggctaagaggtgctctgtagggtttcttgtgctcttctacatgtggacatcaactaatgggctgtgaattaggccttaaaagcccaacataatggctgaataatatctagattcaaggacattttaatcttttgtaattatctgacaaactatgtaaatatctagggtttcaaactgtaatatagggtttaagcatcctatataaaggccttcactctagcctagaaatctaagttgaaatctaagcctgaaacctgcctctaagctctaagcctaagtttgacaatttctctcttcctcacacacctacactagcatta

SEQ ID NO: 209511 - DNA, 630 bp, Cannabis indica
tagagttattctttctattaaaaagtctgcaaaatcttggcccttaatggatgtttgagggtgataagttatgtcaaattaccccagttcaattgatcattttatcaatcttccagaaacgtctggttttgataaaacttgtctcaagtgttgatcaattaacacttttattgggtgtgcctggaagtaaggtcgtaacttgcgagacgcgtggatgaggcataagtcaagtttttcaggagggggatacctcaattctacccatagtaacgttttaccgacatagtaagcaggttgctggtgcttttcctaactacaagcaaaggcctttttaccggcgcatttcgtcaaatgcaccggtaaaagttgtcgacacaaagcaaaatctgaaatcccactttaattattacgccgacaaaacatattaatgtcatgcaataatgaacatgcgtcggtagaagtaagaaaatgaagctttaaaaggcgctagaagtttgctgcctttcattttatttttgctggcgcatgtctacttttaccggtgcatatatgcgccggaaaaagtctcaaaaaaaagggagggaaacttcctgcatggattttttggggtaggtagggatacttttaccg

SEQ ID NO: 209512 - DNA, 500 bp, Cannabis indica
acaacagtaaaatacaaaacataatgcgcaaactaacccaatacataaaaagtaatatctaaatctcttcctcaaacttaaattaaatattttctcaatgttacgataaaagttaagggaaaaaaattacttgacattaaaaaatctcacaaggatggactgacattataccctcatcatatgggtaaccaaactttgatgatggagcttggaagtggaaattcttagaatttgaagaaatattaatagaggaagatgaagaataataatttagaatgagaattgtgaaatggaagaagaaaatacaagaagaagaacaacaatagaaaagattttttttggaattttcttttttgaaaatgggcccagcggtttcgccaaacccctatgcagctgcacaactctactggaagacacttttttggcgtctggtgtgagcgcacaacttgctccatttggcttgtgctttctactggtacgggcgtgccaaacaccgtatg

SEQ ID NO: 209513 - DNA, 1039 bp, Cannabis indica
agtccacgaatcgatattattatgtatttttgctagaaaagcctttaggaatacaataagtatatgttctctattttttcttagagcaaatattgcaagagagttcaacccctaatctgaaggatttgttgggtatctatagtgtttacatgaattatactcggtttcctatttccctttaatggggagtttatatgataaatacataaattaggattgtattcgtgaggcctagcccatgagaggatagacatgctgactaagaaaattaaacacgatcaggttgtcattgccgtgttctataattgtgaataattaattgtgaattaattacttgatcttcattttgggtagttttcctttttaacttgatatgatcttctggccacaaaataaggaaatttaatcccttattttgtgtgatttgataagaagggaaactgtgttggtcttctaggaacacgctatgtggtcttccaggagcacagtactggaattgcttcctagtacaagtagtccttggtggaagctcatttgaatcaaggagggaagataccttcccaaaaggctttactggacttaggcttggcctaagttatcttcttcgggcccattggtggctttggatgctaacttggagtccacatgtcccttagtcgaaaacgcggataacatcatcctataccaccaaaaaatggttaaaattttctaatgaaactataaaaattcctaatccaattttaccatattatcgattcacattcatgtaaaaaatccatctattcacaatatatcatcatatatataaatgcataattaccaaacacaatatttaatctatataattatgaagatagctcttaattataaacaaaagtccttaaatttaacaatctcaatagttcgggggaatttctaacggccaaaaagttcagggggcacaatttagtacatgtcaaagttcgggggaaaaaattagtaattagcctaataaatatatttttaatcttttaaattaaaaagaatatattatatttaa

SEQ ID NO: 209514 - DNA, 1037 bp, Cannabis indica
ttttttctctaatatttttttttttgcagctttcacctcttttcatcatctttattacgcttacttccttctaactagaaaccatattttaatatctaattattcatagtacatacagacctggcccaattaccaaaataatatcttcattctttagtgtagaattaatactaagagtaagagtaagggtgatataattcttattattttactcatagagtatttaatttgtattttatattttggattcaatttaatttatatagtaactcaaattcaattcaattaaatctacaaaaatatagatttgtcagttattttagattaattactttttaatattaaattatttgatatttatttaaaaaattcacacaactaacaacaaaataaaataaattaaggttgttttatgtctttaacaataaatctacatatataggaaaaatacgagacagtaatcattgtaaatacctatttttgttttctacttaattcttttatttttataatttttttatttcgaaattttttaaatatatataatattatataactaactatatatattaatttattttaaatttaaacttccaaaactaaaaaattgcttataactatatattttaaaaaaaatatcaatatatacatataactctaaactatcctatttaaacctaaacctaattatatttggcaaaactctcattttttttttcagccacctatctctctctcacgttttcctttttgacaaaactcccactcacttatttggtgctcttgagcaagatcactgtaatgaccgctttagtaatttggattagtaaaggcaattaacactaatttttattattttattattatttgtgaatttatttaattgtggaccccaatatttagaaataaatattagagttataatttctcaattccggagattttattaaactctaggggtagcttatatgtgaaatatgttatttttgtaatttttgctcggcgacaacggaaaatgcgatggatggctagtttga

SEQ ID NO: 209515 - DNA, 814 bp, Cannabis indica
gtgaatgttccgaacagactccagattgtatgtcaacatgtataacttctgattacccgagcaggatgaaaggtagatcatccgggcaagcatagatttggcttcccaaactacttatcaggagttaactacttcagaatgatcttgtgaggtccagccacgaaggcaatccctacgatcgtgggattgaatcagagaaatatgacaacttgctctaaattcctattttgtatcttataattatgtaataaatgtaatttttatctatacattgtaagcaaaaggaaaaccttccctcatgcattaaggccctataaatagtgacttagcctcactgtgaaagggatcaaaagaattgcttcagagagagatctaagagaattactcagagattcattgtaagagttttgagagaggaaaacactttgttctttatctcaagttaatacaatccaaggggagcaggctattaccatactcatggggctgaatctctttaaaatttggtgttctttattacttatttgtttttgctctattttaattatattcttaatcgcttattaattgactcactatcgttggctaaaagcgaggtcaacaagtcacatatgctcagtctaatttctaaagatgagcatattatcacaatgttctgaccacgcagctagtggttcaacttaacgtctcacaactaaacaaatagtcactatttatagagtttcactcttctttgaacatgagtgacaaccacaaagcctttaaatgttattaataattaattaggtgttcatggactttaatggtttttttt

SEQ ID NO: 209516 - DNA, 210 bp, Cannabis indica
caacacattccccctcttcttttctctttaaatgctgctccacaacaccccctaattccaacaatacactactacatccttactccactcttgctcaaaaatcaccactcattccaaaccacaccaactcaaattcaaagcattcacaccaaattctttcaccctcggcaactacaacaattgcttcttgctttttacttctcgtttttt

SEQ ID NO: 209517 - DNA, 521 bp, Cannabis indica
atcagcctaacaatgatgaatcaataaccttatatgattcaatatttcccattgtcccatccgatcaattctttcagaatgttcatgattttggctatcatgctaattattatcaagagcacaacagtagtaatagtatcgttgatgaccaggccacctccatgttcagtgatgataaccctcatgcttgttccataatgtagtcatccttttaatttcatattatctactctaatatattgtctcttctcatattgtcaagtattcctaaaatgtaaaatattaatggtcgataataccgaaaataagtaatggaacaaattttccgaacaagcactctaagttgactcgcgcaacaagtctcgttttttaaaaaagttttgctgtagttctgaacatcgagcgggtttaccggatttcgggttggcgggtttcgggttcaaaaaaatgaaaccgaacctggaccgggttggcgggttgacgagtcacgggttggtaggtttcggttggccggattgacc

SEQ ID NO: 209518 - DNA, 540 bp, Cannabis indica
atggaagatatcaactcgggtaatgtcctgaagaggcttgaagaggcctggctttaccagctgaagaaacttaagaaagggtgttttatgtacttgttcgagttcgggaaaatatatgatattagagatgaagtaaacgagtttatgaggtgcgccgataaggaacttgtgattgagatgtctcaagagttgcttactgaagaaacaaatgtatatttgttatggtgtatatttttagtgtatatctttaacttgtttgaaccatgaaaactttgttggagccatcactatgtaatatattggcagtattaattaaaaaaaaaaaaagaaaaggaaagtcattgctgttaggttcattcattattagccataaaaatcttatctttaagcgttggacctttgaatattacatcaactctaaaccaaggctccttttgttctaacttctaagctctatccatacacttgttatctcttccaagatctgaaaccatggcggaattagtggtgggaggagctcttctttcgggtttgatgaat

SEQ ID NO: 209519 - DNA, 539 bp, Cannabis indica
cgacacgtagatcttaaagaacaccactcataaaaattggttaagtcatagacataaaggtgcatctcacagagcgagcctcccagagaggagcataaaacacgcctttactctccgggaggctggaaatgtaacaaggcatctctgagagggaaagagattgtttgaacagtcactttgcatttaacgctgcatggggaaaacgtatcagaatctccataagaggatttgacagatggcgtaagcctcttttacggtgattacacgataatcgacgagtctagtgatgactccattatgaagactcacattaatcaagggaggataaaagattatattcacctaatccctaaaaatacctacggcatatgtcatgtatttcctattttgtatctgctaggaatttgtgcccctaaggggctaacacttaaagacaagtgatccctttctagggattctctcgaaaaacactataaataccccaaagacagaatggaaaaggggtcaatggatcagttaaagaatcgaagggagtaaag

SEQ ID NO: 209520 - DNA, 372 bp, Cannabis indica
ataacttaaatttgtgtttttggattctagtaaagtaatgatggaaaaaaaaactactcatttttatttagcttttatatacaagttttaattctacagcactaattaagtcttttaactagtttagatggtttgagcaaagtatttaattaatttgtgcttttatttttgttaacggttaattattagtttgttagtttcatcttaggaagtatttttctcatacttgtataagaaaggaatgcaaataataaaatattatcaaaaatgtagtatatgttagagttatatgttaattttttttttcaaatgaaatgattattgtgtgtaagctatttctttgacctgttagaaagttttaaccctctagaa

SEQ ID NO: 209521 - DNA, 620 bp, Cannabis indica
actaccggagaaattcaagtcgtaaatttgaaaaaaaaagttaaaaaataatatatggggtaatttttttatatttttacataaatatttttttattaaatgtatcataatcattcatatattattctatatttgtatgattaaaagtaattatatatatattgttattcttcggttgcgttttgttaaaattaaattttttagttataaaaaaaatttgatgttgtgataatgttaaaaatttgttgcttatcccaaaaattctaatgaagatttagagatcctgttgatgagatacgtttttctattcctctttataaaatcaatttttacttgttaatttatagtgtatattttagtttgttggactcttatttgtactataatattttgtagggactcttacaatcattcaagcagattttatagatgggagtttagagtagctacttctgtttggtttatagtttcactttaagattgattgtaatttgacattgaattttactttctgtatgctttacaccgatgtacgattattgtatgattttactaagtttatttaccaatttttctaaagtatcctattctataacatattatggattataaaaagcttg

SEQ ID NO: 209522 - DNA, 517 bp, Cannabis indica
tgaatgatgtaaatttttctacacatcactttttttaaaagaaaaaatggccatgaatgaatgctccactactcgtctctatctactaataaaggtaagttgcgattacaattcaaactttagacgtgttaaggaagacaaatacaaataattaattttttactataatattaaaaaaagatatttattaattaatatgagtcataactataaaaaatgaacattgttagtactttctcgacatgtcgtattgtgattagttagtgatactctttaaaaattattatattaaattatatggaacacgacacttaattgaatcaatagcgatattgacacataggaaagtattaagcacaactttaacataaaaaaatatagtgagtgagagtatatgttttgatttgactacgtatgacttgtcgttaattaatacaaatcaaacctagctatgcttctttttataacagtactttagcaaatgtacgcatattcttttagttaattaataaaaaga

SEQ ID NO: 209523 - DNA, 536 bp, Cannabis indica
tgaccgttggattagattagattcaattatcagaaaagctgaaaggtataggatgttcgataaaaaatgcgccaaagttttgtgaatgtgtttggctggcgggaagtttcaaattctttcttaatgtcaaattaacactacctattctatgcatccaagtcttcaaaatatatattaggagtgcttttacaattcagcccttttatctatacattttttttaatctcttttggtatttgtggaaattttgtagttaattttttttttaaatggtttacgttgtaattatttaagatattttataaaattcataaaaatttaatacccctaacacaagattattttattttatatgcgtagactatttgaactatattttaagagttaaattttttaaaattttttaaaattttataagatgtcttaaataaatataacgtagacgaccataaaataaattagactaaaaaaatttctcagatgctgaaacagatagaaagtgtatggatagacctattttatgggacattacaaaa

SEQ ID NO: 209524 - DNA, 874 bp, Cannabis indica
tgtctcccatctggttgttcgttctaaattttagggggtacctcattttccctgggttgttcttctcgggcattttcctatctcctggttcgtgagccacgaggtctaccttatggtcttctcactccaggttcaggttgattttgagattcgtcccctgtgcccccctggccgaggctacatcacgctctaacttagcgtttcgacgttgtgcctcttccaaacggtgtctcagccagcggttttctgtttcataagtaccttctcccataaactgggaacctccacgattgagctcttcatccctcatcctggggttctggccactcccacgctgagttctcctcgagcatgtcgtccacttactaggaccaacatcgggttggactctccaggaacatgtggtatgtgtattaaggccaccctcaggttgagtcctcctggaacgggtggtccatctggaccacaggttggtagaccttctagagcccatgagctctttcctagaacgatgattagtttcctcatgatgggtgttaacgttttctggatttttagccatgaaggaggtggtttttcttcactagaagggagggtttttctgagctttttcaaagaggctctcaatgaaagcaccaaactattaatgtagattttcgttaaccaaatttgagcctcacagtagtgatttcacacacttaaaaataaaagctctaaaaataaaagtatgagcacagggttttttatgtggttttgcagttaaaattctgcatagtccacgagtcaatcttattcagattgctgattgtttttcagggctcctcttgtatgagtttttttgtctccctttccatcttacttgccactatttata

SEQ ID NO: 209525 - DNA, 778 bp, Cannabis indica
tgtggtttacttacacttggataagtataatgtctttttcaggacagtgaaaacgatatcataaacttaccgttatatcctttctaagtcaatatcacttagttaatgttagatcaattgatctcagttttgagatggttaagctttagcttaattgtaatatatgcatgggtgcttagacttgtttattattaccttacccgtaggagtagtccataatcacatattgggagcccggtagtgcaattgagagaaatgttaatcttttttttttgttgataaatcagcaagtttattgatattttacaaacatttacaatcaaatacatttaaatgggcatcttttaattaaaagatctcaagtatggcttttcacaacttgtgaaaccaatctctatcttgttgtcccaccttatttggccaaaacaactctattctatgtttgacactatgtatcactttttgtacaattacatcaatgctttctacatgattgttccacaatttatcattccttgcataccaaatttagtagaccaagcttgttgtagttgttgccattactttctttttaaacttgatgatttttgctttatgaatccatttgatcaactgtgacaactctgtggtctgagccccccatgccagccattctttgattttccgcatgcaaattagtgagaaagagcagctgaaaaacaggtgctttgttgtctcatcctgctatgaacagaggctgcaaacaggattaatagcaatatgaaatttctgcaatctt

SEQ ID NO: 209526 - DNA, 1537 bp, Cannabis indica
taaattgtatggttttgttaggacttatgattgttgagctttagatgagattttagaatgttttctatgtttgaattcagagtttatttgatgcgtggttgctaaaaaaaaaagagatttaactagttgaagttcaagttcttgagcctaaattttgatgatttatgctcatgtggggagcttgatgttggttgttgtttaaatcttagttagatgctttgagctgtgattttttgagccttaatgtgtgcttaccttttgtttggttggggttcgaatatatggtaaagtgatcacttctaggccttaaaaatggagtttttgggtgttctaaacccagtcgtcgcgacgggaattttggccgtcgcgactgggtttggcagtgagaaattctgttttttccgattttattttggccataacttttgactcgggactccgtttgggacgttctttatatcattggaaagcccgttctgagctctttttttattatctgtattttgaatggaaactttatattttgtaaaagtaaaatttgggattaaccctatttgtaaaatcccagattgtgtgactaggattactggcacttgatcaggagcacccaggggtttggaatctctgttattgtgggacaacaggtaagatagtagtttgcacgtagagtatgcgcggtggcgcttatgttgaatatgatatatgtgagtaattgtaatcgggattagggttattaccctaatatgagtggttaatagcctagggttattaccttagtgatataagttcagtaaatgatatgccatgctaagtatatgattatatttagatttaaggattatgcgtttaaggcataatcgggttggactcggtaaccataaccgagatgaaccattctaaggccttattgtatttagacgtgtgagagcagcacgtaggtctttgccacgtagacataaatagatgtgtgagagtaacacgtaggtttacgtcacgtaaacataaacaggcatgtgagcccaacatgtaggactgtgacacacagacagatttaaatagcattactgtttatattaactgatgagcatattattgagatattttatactgtcttgttgggctttgctcacgagtgctctactgtgcaggaaagggtaagactgttgttgatcaaccatgagtgcagaagctagacaaagaatgcacatgttcgggccacactagaccaagcgggttggggtctaccagtgatgtattttgagactctgttttgccgcttaggtcgaccaaaggaaaagaacttgtaatagtgttttgtaaatccttttgggatcccaacttttgtaacttttaaattataaggtttaaataattacaagttattttcatttccgtttattaataaagtttaatttttgcgcttattttactagtaatctcgattagtggattagtgtttcataagtttattgggtagcgtgcctaattatttagggcgctacagcacaccaactagcccgaagaggacctgtgcgcc

SEQ ID NO: 209527 - DNA, 1198 bp, Cannabis indica
aatcctagtcacaatttcgggatttacacatataggtttaatccttaattccacatttacaaaatatatacttggcattaaaaatataaatattcacatagagctcaaaacaagctttccaacggtataaagaactcccaaatcggagtccgaatcacaaagttatggctatttgaagtttgcataaggatctgcccagaaagaaaaaggcgcgccgcggcatgctaaataccatgccgcggcacctgggttcaaaacccagaaaaccagcaacaagaacacgaaaatcagcttcaaaacataatcaaatcaccccaattcacaaccaaactctcaaatcatcaaataaggttgctaacaaatattagagggtcaaaataacatatttcatgcatcaatttccagcaataaatcccataatttcagattactaattcatgaaaatcaaagctccaacttgagcttaattccatgaaattcttatcttgaattcttacaaaattaagccaagaattcatgcaatcaatttttagagcttaagaacagcaacatacacaaataaaatcctctaattttctgtccaaacttaacccaaacaaacccaagaattaaagctccaagcatgcataagacaacccaacaacaagaacatgcatctcaaatccaattttacaaccacaacccattttcatgctctccaatcaataaattttcagcaataaaacagagattaaaatcatagaagattatctcaagctcaatccaaaaacaaactcaaagatcctcaaattaaaagcttcaatccaagcaaacattcaccaaatcaaaaattgaaaatcaaagagggttgagagataaagagggattcgggtatgagggcttgaaaccagaaaaaaaaaaccaccttcatttccttaaaattcacctctttaattaaatgtaaatcaataggtcaaaagaccattttgcccctagggcttaataacatacccacacacatacaagggtagaaatatcatttcacatacacataaatctaaatatattttcagattattcaccaatatttaaaatgccactaaatcaattccaattgcatttcgggtccgaactcagttcggcccaaaacacccggttgtgactataccgcgccaacctgtcagaacgcacatgaagaaagacaacacaggcatactat

SEQ ID NO: 209528 - DNA, 842 bp, Cannabis indica
tttgtgtgttgtttttattttattttttaagttaacgtaagcgttgatgctcaattaatttttatattaaaatataattgttatcgtgttgtttattcgttgttattaagttatttcagtattgtattttttgaagtttttgtcttataaatttatttttgtttgcataatatgataaactttaattgatttatatgttatggttaagttgttttctagttgtttttgtgttgttatttagttgttttgcgctgagaaaagaagccctacagttgaaattcactttgtccgaatttgccacgtggcaaccactgctgcgttctgacgctacagtttgtgagcgtcaggcaactctgaaggctttgtccctcactcgcgtgtgagtctcactcgcgccacatagccacatgtgtgtcacacttctccttgcgcatctgggggagtttttctaccgtatttttgtaaataagaaactttaaaaatagtatatttgaaattaataaacaatataaatgtttatttttgcttttagtagtataaatgtttatttaaagtaatattaacctaaaataaaaaaaaaaaaaactcctaaaaaatatgtaataaatgtatttttattagctaatttattatatttgataattttcttaatttttttaaaaataaaacacttacttattttttaaatttaggtatcattttgcatctcaacccttaatccaattcaatagtacacgccaaacgggcccaaatatataattcgctctatgcaaaataataaaattgcttctttctctctctccctctggtactttcacccacaaaaacaaaaaaaaaaaaaa

SEQ ID NO: 209529 - DNA, 661 bp, Cannabis indica
tttttgatgccaatcgaggagagatcatctagtactgaagacctgcctgggaccttttttgctcatagcatccaccaccacattggctttctcggggtgatataaaatcttgtaatcataatctttgactaacttcaaccactatctttgtttcctctttaaatattattgaataaagaagtacttgagactcttgtggtcagtataaatctctcattactctccataccaacgatgccgccaaatgtttagggcaaacaaaaaaacaaagttccaaatcatgtgtcgggtaatgttgctcatactctttcaactaacaagaagcttaagcaaagaccttatcagcctacatcaaaacacactccaaaccctgtctggatgcattacaatacatcataattttctcttgatctgatgacaaagctaacactgatgctaaaatcaactgatgctttaactcttgaaaactagtttcacatttatcagaccacataaattgttgattcttcttagtcaaatctatcaatggcatagagatcttgaaaaattcttccacaaagcattgataatacccaactaatccaagaaaacttctaactccaaaaatttccttattctcacctagttcttaactaatctaactttccatgaatcaaccatg

SEQ ID NO: 209530 - DNA, 731 bp, Cannabis indica
aatatgttatgagcttgttcttgctgaagaaatagaagataatggaaatgttggtatgtaggtttggctaggaagtggtggtgcactagacgtggaaggtaaggaactgccgcgtcttgtgtatatctctcgtgagaaacgccctggttatcaacatcataagaaagcaggtgccatgaacgctctggtgagtacttagttctcttatctttacaaatgaagcttttaaagggaaaaacaagagataagattgattttatgagttgggattataatgcatggttggtgttttgattaataggtgagagtttctgctgtgcttacaaatgcaccgttcatgttgaatctggattgtgatcactaccttaacaacagcaaggccgtcagggaagctatgtgttttctaatggatcctcaattggggaagaagctctgttatgttcagtttcctcaaagatttgatggtattgatcgtcatgatagatatgccaatagaaacacggtgttctttgatgtaagtgatattaataaattaagtgtttgtgtgattgaatactgtgtttttatcaaatttagctcattgtctgggtttttccttcattgtagattaacatgaaaggtcttgatgggatccaaggaccggtgtacgtcggtactggatgtgtcttcaataggcaagctttgtatggctatgatccaccagtgtccgaaaaaagaccaaagatgacatg

SEQ ID NO: 209531 - DNA, 486 bp, Cannabis indica
acttcggggtttcgtagatcggcggctgggcaacacggctgagtgggcggtgagactaaattcgcactccaaatagggtttccgaaaaacaaccctaaactcaaaccctaattttttttttttttttaagaaccctaatttcgaatttcgaattttgaatcacaatgctctgataccatgtagaaaatagtgattcgaattgtgtatagatttcatagaataatacatatttatatacaaagttaggagactaaatatctactaaatatctactaaatatctaattcttttacaactaatatacatctaatatctaacagttgcctagaaaaataatgaaagctaagacatcgataatatatgtgtatggtcattttacatgcatgttctatttctggggaaagaatgttaattacaattgaaattctcacgaagtataattggaagaaggcctatgaagagaaagcagggcaactggaggaatat

SEQ ID NO: 209532 - DNA, 881 bp, Cannabis indica
gtgaataggagatctacacttctggccatacaacatctcgcaagggccatccatatagtactctggtaactgttgttgtaggaaaactctatcaatggcaggtacttgctctaggatccttcaaaatccatcacacaggctcgtaacatgtcttccagtatctgaattgtcctttcagactgtccatcagtctgatgatggaaagttgtactgaatttcaatttggtacccatagcctgctgaagactctacgagaattttgaagtaaactttggagctctatccgatataatggaccttagagtgccatgtaatcttactatctctttcacataaagctctgcatactgatccactgtaaaggttgtttttaccagtagaaaatgagcagacttcgtaaattgatctaccaaaacccaaattgaatcgtacattcacgtggttctaagtaaacccaccatgaaatccatagtgacatcctcacacttccactcaggaagtgtaagtggctgcaataatcctgctggtctttgatgctcagccttaatctactgacaagttaagcaccgggatacaagttccacatctttcttcatcccgcaccaccagtagtagggtctaagatcttggtacatcttggtagtgccatgatgcaatgaatatggacttgtatgagcttcctcgagaatctcatttctaagttctgcaccacttggagctaaaaccctggtcttatacaacagcatcccgctatcagacaccataaaatctttagcttgaccagcaaaacctcttcttgaatcttcactaattccgaatcagttaattgagcaactttaatttattccaaaatatcaaattgcaatgtcaagttatgaagt

SEQ ID NO: 209533 - DNA, 560 bp, Cannabis indica
acacaacttctcgggccaaaaacggaacctaaagaaaacccgaaaatttcccctgcaaggcaaccggtcgactggctttgctgatcaaataaatcatctatcctttgtagagcgtacttgttcttcactgtcaacttatttagctcccggtaatcaatgcacattcgtaaggttccatatttattttttagaaacaaaactggtgcaccccaaggtgaagtactaggtctagtaaattttaaatccatcattccctacaattgcacttttagctctttctgctacgtaggtgccatcctatagggaactcttgatacaagctctgctcctggtattagatcaatctcaaaatcaatttcacgtttcggtggtaaccccggtaactcttctggaaacacatctacaaattctcgaaccactgggacatgctccagtcccgcttgtggttcccagatagtatccacaacatttgctaagaaaccgctgcacccttcacacaacaaatctcttgccttaagcgctaaatttatgggaattcaggatcccttcatcttacccac

SEQ ID NO: 209534 - DNA, 551 bp, Cannabis indica
ttttgaaaattttaaataatttaatttataaaagtagaatttaaaatgtgtattattttattatacacgtacaatcaattatttaaaatttattttcgatatactaaataatccaaaaaattttaaaaataaacaaaaacattactataaattataatatacaccaataatatatattataactagtcaataatttttagaagagtgctaattacaattttttgttacaatctcttaatcaatttttacgttcaaattcacatgctaaattatttttttcaaatactttttataacagtattcgttatagttacagtatcatccatgtaaattttgaaaaattataaattatttacagtaccgaaaataaaaattcttgatttttcagtttaccacgcatgtttaataaacttcaaacataattttgatattgtaaattattcaaaattttacaaaattttaaagggatgatattgtaagcataccaaacactgtcatgaaaaaataattaaaaatattttacatatattttgaatacaaaaattaattaa

SEQ ID NO: 209535 - DNA, 792 bp, Cannabis indica
acctggagccttatggtctattcccacaccaccaccactggacataatgattgactaaaaatgattgttaataattcccacaccaccaccacagtattcttcaacgataccaaataatctattggaaaataaataatctttgggcagccatagaactttgttcaaaaccaaataatcttttttaattcatggatttcaagaataaatttcagaacttgaatatcaatattgaaaaataaaaaactaaaaaactctaaccttgtaatttgggcagccatagaactttctgtttggattatcaacagttcttgaagtgcggatacagattcaaacccataaccacagatgggtctactccattgaatctcttccttataccttctaccactattgactgagttgctagactgcgacattatgaacgacaatggaggaaagggcacaccggttggtatagaatcagagagaaagaaagagaatgacggagaagaaaaagataatgagggagagggagggggtgtgcgtctcgtgtggctggtggctggtgggggctgtgcatctcatcgatgtgggtgaccggctggtgcgtctcgtcggatccagaaccggtggtgggtggaggtgtgcatctcgtgtggctgggtgggggtcatgtggctgggtggtgcgtctcgtgtggctggtgggtggtggaggaattgggtttgaaaaccctaaagaaatctgaataaaaaaatatatatacatgtgtaaaatgacgtggattacttaatggcagccacgtcatcactc

SEQ ID NO: 209536 - DNA, 557 bp, Cannabis indica
tgcatgagaacaactccaagaccatatcctgaagcatccgtttcaactatgaatggtttagagaagtcgggcatagccagcactggaaccgaacacatagcctcttttagtttatgaaaggccttttcagcttcttcattccacctaaagttatcttttttgagttgttctgtcagaggccaagcgatgtgagcatacccagcaacaaacttgcggtaatagcctgtcaatcccaaaaatccctagagctctctaatgtttttcggtacagcccaattcttcattgctgctatctttgttgggtgagctgctaccccttgtcttgagatgatgtggcctaaataacccaattgtcgctgcccaaactcacatttctttcggttggcaaagagctggtgtttttgaagcaattctaagacaatgtcaagatgttcttgatgctcctcttcattagcactataaaccaatatatcatcgaagaagactagtacattctttcctagatgagggaggaaaatatcattcattaacgagtgaaatgtggcaggggcattagt

SEQ ID NO: 209537 - DNA, 538 bp, Cannabis indica
gagatcttcattattgattataaaacaaggtacttataactatactattgtcaatgttgcaggtcgcgtttgatgtaccagacacagataagaggatgacaattgctaaaggtggagataggtggaaagattggaaaagtaccctaacagaaggtatttttacattcaaagatgtcgctccccatcttctcgagaagcccaaactttatgaaaaaataattaatttgcaagaatggagagagtttgtggactcgagattaagtccagaatttggtgtgaagaggaagagggcccaagagagtagggcttgtaatctttatccccatcgcactggacgaggtggtgtaaggatgattcaagaacagatggagaaagaggtcggccaccaaattactgaatttgatagatctgaaatttggaaaagatctcgcactaagtctaatggcgaggtggagggcccaactgcagaagtcgttaaacggattgtaagtttaaagtttaattttgtttgtattaattcttatgcttcataatttat

SEQ ID NO: 209538 - DNA, 644 bp, Cannabis indica
tcacaacccatggactcatcagaaataataatcggcccagtatttaaattaccattatcaggcccatctttcaaagattcaccattggcccttcttctcttattatcaataaccacaattgcattgttttgtacgttactagctggccccacatcagatattcccatgtttgactttccaaaattatctttgtttctaatacctggaaagatattctcattaactgttccactaaaagtggaaagattaactctaccaccctcgattatgggagagttattgataattccctgattttttgcactgccacccaatgacgtatctggagcattcattctgttgatctcgtctgaggaagaggccgaaccgccagcagtagaggctgcaccatttcgaagccaccgtgaccctattgtatgttgacgtctgcgaggagccgccttcataaacagaccataaggtttctgaatttgctctcttggagtatcaaataatcgctcgcagaagcgttcggagtgacccataatgccgcatatgaagcagaaagttgagagatcctcaaacttgaactgtgcgtagcaagacgtacctccaaccctttccagtttcattcttatttttagaggcttatctacccgaactct

SEQ ID NO: 209539 - DNA, 578 bp, Cannabis indica
cggatgctaatccgtgtttagtacggatataatcaagaaaagtgaaaccctataattaattaattagtgatattttgtttaacagctaagcatatgtatgtgccttcttaatatatttatatatataattaaagctagaaaagaagatttctttgtggagggtttcttgttctattactttctgttatttatttattttttgtttttatgtgcatagtgattggttattagtggtgtccagtactttctataagtgacgttctatgattgcttagcgatattctctaaaagctattttcttaagttatacagagtctgatatttaattacaccaataagtacagtatggcattgaggagagtgttagacacaagtgtcttttagcatttatttttttgaattttttgaggccaaaccctctcaactattattcagcttgcacttaatcctcaaagcttaaattttagtggtaaaaccttccaaattactgaattgttagcaaatttaaagtatcatctatttttaaagttaattgctaacatgaattacttatggttacacttttatacacgtgacac

SEQ ID NO: 209540 - DNA, 616 bp, Cannabis indica
cccactcttatccattgaagccaattttctggctttattatcagtgttcagctgtagccgaagcaagctagaaggctttctttttgagtaattttcttcgtgaaataataagactaattatgatttttgttatttgaattttgacatgtatcaaatcatgctctttgaatttttaaggtcgttaaaaatgtcccctgaactattaagatggttgaatttaaagacttttgtctaatttcatttaattttactatttcatgattgtttatttactaaaccatgctcctcagaatatatactaaatcatgccccttgaactttgaaatgtactaaatcataccccttgaactttcatccatgtagacttttttactaaaatttaacaaaatttttaaattcaacaatctcaataattctgggagtattcttaacaaccttaaaagttcaagggacatgatttgttacacgtcaaagtaagttcatgagcaaaattcctaattagccaaataataaattgaataatgacctttcttttttgagtagtctccaatttaaaacttgaaacttaactatttgattacttatcatttgtgttgtaagatcaagtaaattaaag

SEQ ID NO: 209541 - DNA, 737 bp, Cannabis indica
tgggtatatcttaaataatatagtaacaaaagtaaaaagcgaaagaggtgaagtaaagtggtatacaatgtaatttcctctaatcctagcatcattagggtttggtataaatggggtattatttataaaagtgggtatatcttaaataatatagaaacaaaggtaaaaatcaaaagaggtgaagtaaagtgggtatacaatgtaatttcatccaatcctagcattattagggtttggtatggggcacgaagagtaccgttgcatgatatcattttcattctcaaaggttttattacctgaataatgtcttctcaaaatcccaagagaaattgatcgagagtgtttgccccttagtagtcttcatgtcctcaaatgccttgcttcaagactttcatctgtattcacctttggttgctgaggtgctttttccaccactttcagtaatttgcttctgttttgttctgttgtcatattctgaactctaatcactttcttctttggtttgccaataggagagccttttccctgtgtttcacattccccaacaatcacccctctccgatggcctgccagagtagaccatggaatcaatggcttcaaggtggctgcagtggaagagcttcccctgtatctgagatttgtgccaccatctctcctgaaccagtcaagctggtttctggtgttaaaacagctgatgaacactgcttttgccttaatccacggaccatatgtttgca

SEQ ID NO: 209542 - DNA, 2085 bp, Cannabis indica
ttagatttttcgaaacatcttgaattgtccaatttcgagttgtattgaagaagttatgaccaaaataccaatcaggtgcaaaatagaaattgtgctaggcactatagcgcccaattcctgtgctatagtgtcggtctgtaaaaaacatacacacacaaaaaaaagataatttgcaccgatttattttttttaaaaaaaaaaatcttaattctaaggagactcatctatcttttcaagcactattaatagaatcctaattctaaggggattcatttaacactataaataggacctcttaggctatgaatttaatcattctaaaactacaaatcagaatgagaaactcagagagagagcaaggaagagacggagatcgacttcgaagtgttcttcattcaagttcttttcttctccttctacttttactaaaattatgattttagttataatgtctaattcttagtatttttttttagctaagggttatttcaaaacccaaaacatgaattattaatttcattattgaatgttaatttttagtttctatcatatcaaattgcttctattattctatatcaatgttatgattattattttaatcttatttagacggacgctaaattatgttttactttaacctaccgtcatcttaggattactattcacctaatagtctaggattctaagtgtttgtgataaattgcaattttaattgtgatgaataatagaacctaggttaaataaattatatgcttcattgatttgttgcatagattagtctatctccataacactcaaagctttatctaagttaaataaattacatacttcgtggatttactgcttaggtaaaagagttaattattgagcgcttcgccttgattacatacaataggaagattggaataattgactgctttagcattatctgcgggattaataatttgattgaaaactgaaaattacattctttaataggaattaagaatgattgttgatggtgacgaataacctttaactagtttctcatatcataatctcaattttaatttgtttgttttatttttatttctgctactttaatcttaatctcaagacccccccccccctcttatctaattctagttactaatttgtgaataattgaataaacgtagtccttgtgggattgatccttacttacaattatactaaaataattagaggtattagaaaaaaaaaatagtaaaattgatacgacatacgacacacatcaaaggaattaactctccttaaatctcagccagaagatcatatcaaactaaaatgagaaattacttaaatgaagatcaagtaattaattcacaattaattgcccataattataagacacgataatgacagcttgagtgtgttcaacctgcctagtcaacaagcttatcgccccatggaccgggcctcacaaatacaaacttaactttcatgtaaacttcccattagagagaaagagaaactaaggataattcatacaaaactctaataaataactaaaaaaaaaaaaaaaacccaaaaaaaaaaggttgaacactcttgcaacaattgctcagagaaaaatagagaacatatactcattgtatttctaaaagcttttctttccaaattactcaataatatcgactcgtggactaaggctctttaatagcccaaccatgtaaaaactctaatggcgcgtttattaaactgcaattggaatcaaaataatcaacaggagaaatgaattggtttaaaatagaaaataatcggaaacaatattttattatgctatttactaaactatccgaaaagaaaactagaatcatattattttatttacataactaggaaaggtaattggaatgctttaatttgacaaaattgtcattattaaaacatgtaattattttttgtttatagatttttaagggcatatttgtttttttttttcacttttagttaataaaattaaaattaaaataaattaagttaggaaagagaaatgtattccctataaaaataggggagaacatttttcttcctaatttgtgtgaacttacctcactactttct

SEQ ID NO: 209543 - DNA, 532 bp, Cannabis indica
tcttctgcgcgtgtaagggctgcatgctgccttccagggctgcacgtgcagccctcctgggcagctactccgcaaaccctatttttgtgggattttttcaatttttctgaattttcccaatttcaaaataaaatattatttttaatatatttaaacttacatatcaattttaaattaataatatttaatttttaatagattgttattaatttctgatattttgaggtttaaatttaaaaattgattattttatttttaaattatgattagattattaaaatttgttaatttctttaatatttatataacatttaattataagattagacattttaatattactcatattttaatttaaaagataatcttatctttttatatgataaattaaataattaataaatttgaaattaacctagataattttatagatattctaatcataatatttttaaattcaaaaattaattattttgttaaatatttaattatttataaattataaattagaaaaatgatattttatatcatt

SEQ ID NO: 209544 - DNA, 1085 bp, Cannabis indica
ttggaattactgtagtaattattgagtctttctttgactatagtctatatgcatacacacgtgtatcgtccgcccttatctttgtgcaagcaaattaatgtttttattttttattattttaatttaatttgtttatgttaaattattaatttattataataataataaaataaacgtgtttgaattgatcaataaaagtttcatattatatactattaattaaacaaaaatatcaagcacaacaattctctctcactctctatgagaaaaatttacatctccaacacggataaagtgtacaaatttcttgcacagcagcttattgtgtagtacagcatcagagtatcactcgagtctcagcatagtctggtcccacttagccaaaagataatcttggacatgcgctcgattcaccaacaaaccggtaaataaggccgaacagtgacctgccaacgacaacgccgcaaccgagtcatcaccagtagaagtcgcatccaaggcaagagtaacacaggtagtcccggtgttggaagttgccctttcaaacagacgccatcagaatgaagtaggcgcagtcacactagcagtccgcgtatcaaagcccaagtaagaccctgtttctaaccttgttgaggggagcactaggagaagtaaatgaagaagagcccccttcttcagataagtcgcatgcaagtctcaacaaactgctcatatctgtaaaacacaaagaggattattagtaaaagagaaatggcaagcaaattgataaagcaatatgataagaaaggtgaataacaatcatcaccaagtaagtcactctctacctaacaagccttttcctagaaggcccagactcagtatctgccaccatggcgtcctcattctccctcagagacttcgaggttcgcgagtcttatgtgcttgtgttcaccccagtagaagggataactgaaaaaagttgattccaaaatcatccaaggtatgggtagaagccaaaatggcaatatccttcttaaacccaggcagtttagctatcgctaaagctctctcgtacatggccacagtaggcaagggtctaacaatag

SEQ ID NO: 209545 - DNA, 858 bp, Cannabis indica
catcttaaaagcatacagctttttcttcaagaactgtcgatttgccagagattttacaatgtataaattctctaacttgagccaaattccagcagctgttgtctccttcgaaacctccctaagtactcgatctcccaagctgagaatattggcactgtgtgccttttcgagtatctctgttctttccttttcaggcagagtagtgagtaattttgattcccccaacaatgcaccttggaagccttgttgaactaaggcacgcatcttgactctccataaaccaaaatcgttcttccctgtaaacttctcaagatcaaactttgcattccccatcttcttggatctattcctttgaatcttgaaaccacaatcttatgattcttggactccaagctctgataccacttgttggagatcaaagcatgttgatcttgttcaacttcagcacgaaaccaaagacacttgcacaaacatgaaccagaacacacacacacacacacacacactcgagacagagaaaataactaaaatgaatgatctttattgaatgagaataatagtgttcagtacaatcttaatagaaatgaactaaggtatttatagaacataccttaggataccaacattagactacacccgagattactacatatagttagttaacggttagttaactaactgacatggacaaaaatagtaagtgacacctaatgactaagacacaccatataacacacaatcccttgagatgaattcaccactaccttcgtaatttacataatccattcatttatcaaactgcctattaaactgtatgagaaatggaattgcttctatttcttaaaatttttaaaaatt

SEQ ID NO: 209546 - DNA, 545 bp, Cannabis indica
aatagtgctttagttaacatgtctgcaagttgatccttagtcgaaacatgtgaagtcttgacaattccctcttgcactttctgtctaattaaatggcaatctatctctatgtgttttgttctctcatgaaacacagggttggctgcaatgtgcaatgctgctttgttatcacaaatcatcaaagctggtcctttgtgttcaactttaagctctttgagtaaggacagcagccatgtcaattcactgacagtatttgccatagccctgtattctgcttctgcagatgatcttgagactgtcttttgcttcttacttttccaggaaatgatcgaacttccaagaaaaatacagaaccctgtagtagaccttctggtgtccacacatgctgcccaatccgagtctgtataagctttgagaagcactggtgatgcagcaggaaacaaaataccctgtcctggacttgatttcacatactgtaggactctttgagctgcctgcaagtgtctagatctaggattagttagaaattgactcaacttgttcac

SEQ ID NO: 209547 - DNA, 923 bp, Cannabis indica
attgtcttaaacaaaacaagttagtcctgaaaatgacatataacttgtaataaggttttactatttaattttatagcctaagatcaacattatgatagggcatattattttagatttaattaagtgtctcaagtatacatgtagtataaaattgtataatatccaaccaaaaaaaaaaagaagagcacttgaaaatgggataagaaaattgaaatgttagcatgaaaaaataaataaattgaggtttcaacatgaatcaaattctagattgtcacgagtttgtaaaatctaaagttacaatacaaggtttcgcaagcattgttgataaatctaattccacaaatcataagaaaactagaaaagggaacatactcctcgtgttacaatggtattaattttttttacatgttttaataattgaacatagttcaagacaccaatataacactgtatacaaattcggctacagtgagatcaaacaagctaaacttttccagataatgaaagcataaagcaatataaaactgaaacaaaggagcaaataaacaaaatagattagaagaagaaaaagggtttatttggggacatacccatgactccactaaagagactacgaacagcacagttgttccaaatgtcttggcagcaaatttcctcaatagtgggcaacgttatgagctcaatcggaggcttctctgcttctttggggatgggagaagcgttgggaacttcattatcaggagtagaagtagccattaaaatagcagctcgaatacgaagtagccatgggcgagggagacaaacgtcgatgcttctgctgctcctatactcgacggcatcttggaggatttcgtctttaagtgctgtcgcaaatgcgttgttcaagcgagagaaaatttcagacgagagagagagaaagagag

SEQ ID NO: 209548 - DNA, 953 bp, Cannabis indica
cttgcttagtcataaataagacacagtctaatttagaattttaattagttaattaacaccaattaactgagtctacaagccaatatcatcttaactagtatggggaccatgaacctatataatcaagcttctaataagtagacccgaaatttaccaagtaaatttcttaacttattaattcctcatgactccactatagattcagaattgtactcttaattatataaaacgctctatatgttccaaatatagatacactattaattatctattgttataatccaaataataaaaaatcctctataaatgatttacatcgagtatggataaatttactgttctacccctattcaaacctcgacctctatcattcgtttgctgacgtaatacacagggtgttgagttttttcctcctctcggaccaaggcaacactaaccgcgttttcagagatagccaaatataagtacaagtcttgtccgtgcacccgtttagataagacaggcggcttggccatatgttctttcaatttcctaacgcttctttacattccttggtccattcaaatttttgaattttctttaaaatgttaaagaacaggacacacttatcagtgtatttggagaaaaataaaatataatatatatcagccctaaagtaatattcttcccctacaaattgtccccacaccgcagtactctctctctctctctcgcacgataccctcaactagacccaaaaattttccccagctgaggccggcgcagcagacggagaccggtgcgaggtcctccctctcaggcggagaccgatgctcctccttaggcgcagcagacggacgcatctcaggtaagtaaatttttattcatttttcgttttattttttttctattttagatttatatatgactgttgggtttttttccatttcagatttttttccatttttgttgtt

SEQ ID NO: 209549 - DNA, 504 bp, Cannabis indica
actgttctcaaagcaagttatgaattacttttattaaatatggatttaaaacgatgattgtgatgatttggatgtgttcatatttgtgtatgtgtgatttgatgattgtatgtatattacaaaatttttcatgaaaataatttatttggatttcttgtgaaaaattaagtaattttggtttttacggaactcgattccgataaaaattgaaaaagatatgtgagtttgaagtttcgagtccaatggtgtcgatggatgcaccaatcgcacacacagaccctcgaacaaggaggatctgcgcgcgcaaaatggggacaattcctgtctgaatttgctgatgccccctgctcagacaacacccatcatgcccaggaaccctacaaatgttgagaaaactcagttagggaggctgcaatcaccctcatgcgcgcgcatcatgctgccagcagcctattctaggcagccagggtggtttcaacctaaaattcgattttttggggattt

SEQ ID NO: 209550 - DNA, 552 bp, Cannabis indica
agtagcatagcatgctctcctccacatcctaatgctaatcctttgatgaaattatagaataaaaatacaactaaactataacaaagtaaaatacatcatcatattatatatatataagcagaaaaagaagaaatagaatgaagaagaagcaatagattgaataatacgtatgtgtaattgaattttttttttaagaaaaaaaaaaaccaatatataggaaatagattgaataaagtacctgtaatcgaatttttttttaaaaaaaaattaaaaacaatatatatagatttagggttatatgtattttaaaaattggagaacatttaaatttaagttagatatttaaagttttttttaaaaaatatatataaagaaaataaaaaatttgttatttatattaataaacctaaataaaaaaataaaaaaagtagagagaattaaggaaataagagaaaaataagctgtacaacaataaataaataattaaagaaaacaaaattagtagatgtataaacgggtaggtgtcgaggagtatgtatattatttaggtta

SEQ ID NO: 209551 - DNA, 605 bp, Cannabis indica
aactttatatatatttttttaaacttaaaacgagctattgaaacttttcttttatagagaatgaggtcctattaaaataataataataataaaagaggatgtttcaatagttacattaaatatgtaaccatcatggttacattttttagccattagattactattgaatgattgtgattaatttaaaaattaataaaaataaataatgtttaacttataacctcatagtcacctaataatttattttcttataaaactttaatgaagattaattatattttaaaattaaattaattataattatgaattaatttttcataatttattattaaataaagatcttttagcaatttttttgcccttaaattattaaaatttttatagcaaaattctttataatttaaaattatacatatataatttcataataaaatttttattatacttataactttaatttaaaattattacacttaattacttaattttttatttaaatattttaaaagtaaaaagtgaaataggttgaatgtattttctaaaaaaagtggctaaactcctccattatttttttataaggattcatttactcaaaaaaccaaacc

SEQ ID NO: 209552 - DNA, 784 bp, Cannabis indica
tattatcctgtttgatggcgcaatacaaaaatttttttttggggggttaaaaatcgattctacaccctttgattgtagtccaagaagctaagatgagactgcgcattattgtgattctggttattgttggatgactgaggcatatgaagttgttgttgttgttgttgatgctattgctgctgagtttggtggctaccaaagtgatgcatgtcgggctggtgggaggagaattgaggagtgagtcctcggttgaacatattgccgttgacagtcatattttagagctgtaattgcatatggattctaagggattagaaattcttataggattaaaatttaaaagtaatattaatttatttaaaaattaataaaaaattattattttttaatagatttttattttttaaaaaattcactcataaatttctcataaaccaagaattcagttagataggcacactttatataaaatagataatataatttaataattacaaaattaaaattaaagaaaaaaaactaattaagaagggaagtacgtagtattgttattcaaccgcagtattattcgaatatatttgttattttgtaacaaactaataagctatttttttcaaatgaccttttattgaggagcacaatcaaaattaattctgaatttttctttttattattctcattactaataaattaatgcaccatttttattatatccatctcatggttcaaaaactcatatagtaaagaatattatttaagtctttgttagaatctacatattatt

SEQ ID NO: 209553 - DNA, 1215 bp, Cannabis indica
tcaatacagacccgccatttcttatttagcttgggcactaatacaggattcgcgacccaagccaggtagaaggcttcaattatgaagttgttgttgcgcagcttttcaacttcttccttcagggctactgctcgttctttgtctaaaagccttcgtttttgttgaactggctggaagtttggatggatattcagaacatgtgaaataatagaaggatcaattcgaaccatatccgcatgtgaccaggaaaaaacgtctaggtttgctctcataaattttatcaattctgattttactttgagcaacaaaccttttccaacttttagttttctagtcgggatatctggatcgatctcgatctcttctaattcttctacaggtccaacattgctgcttgggtccccaagtcgaggatccacatcttcatccccgccttgggaagttccctacttgggaatgttttttcccgtgtctgtgctctagctggaggatacttccttcttagccttggccactacaaggttatagcattctcgaacagactgctagtttcctcttagacaccctaccccattctttgttgggaacttcaggcacgagtgaaatattgacgtgacagcctttaagtcatacaaggccagtcggcctagcattacgttaaaagctgaaggaacatctaatatcaagaactgtactattatagtcctgctcgtcagagcttgtccaacagtgaagggtaggcaaatttatcctagaggtgcgactccttgaccggagaaaccatagataggctggaggcatggggttagatccttgagttggagtcccatcttttcatgagaagttttgacaagatgatggaagaggctccatggacttccacgactagtgagtcgttgtgtggaaatcttaattttgatagcgtcttcatcgttgaaggttatggttggctctcctgctcgtggaaatttgggcttcccttcttccacggcctggataacctcttcttgctcgtgctgcactgctcgggcatacctttcccgagctttactcgaatctccagcaatgtgtgggcctctaacaataacttgcagatgcccatctaccggtggaggcagcaaatctttattattgtcgtctctttgaccctgattggtcttaacatatttctgcaggtgtggattgttttacattattaggaattcaatttctcgc

SEQ ID NO: 209554 - DNA, 530 bp, Cannabis indica
cttgttaagcctcctcaaaaaactcttaaattcaataaagtatattattattatatagaaaaaaaaataaaaccaatcaattaatgctgttatgatatacttactacgtagatatgtaattaaatgcctctttcctttcgattttcatggaaattatatgtaattaatgctgttatgatatgaaaatcaaatgctgtcattctgtataatattgtactatatatattttcacatactatgtttatatctagtgagggccacttagagttaggaagtaaccaggaaaatacgtacttaaattaggtttcatttcgtcaaaggactatttcttcattgtcggcctgaccacttaaaaagttaattaattactttacaaataattatatataaatttgaacaaaataaatattttctaatatatctaggttagaaaagaaattaagaattattatgatcaacatattatttcggtaataaattttcaaaattagagagttgggcgaaagaaatccaacataaaattttacatt

SEQ ID NO: 209555 - DNA, 1221 bp, Cannabis indica
aaaataatatatgggataattccaaaaaaaaaatgacatcaaattttggaaaagtataatgtgaaaaaaaatattattattaatatcaaatttcaaattttggaaaagttaattttgtagattttttgaaaaaattattattaattaatatattatatacaagtaatttattgaggaaaagagtattagagtaattatttaataattaataataaaagtttttcagtggcaacatgatcagattatgattatatcctaacattgttatatcacattgttatatggcgataattcaaaattattgtaatgtcacatttgaagttgttatcacacttataattactattgcaatttcaataaattttctctacgtatgaaacaaatcaagaaaatataaacgttctgataaaatgtcattgattctaataaaaaatagaaaatgagacagaattgtatttaaagtgatgttagtgagatttaagaatatttctacacgtatatatgttgcttataatgtggtaaaaactaaatctattaaaaatactactcatagtgtggtaaaaactaaatctactaaaagtacaagagtatagatagaactaataaataataattatacttaagttataattgtaaaacttttgaatgtacctcaccgttaaattttcacgtgatagtttttgattggttcaaattattaactttttatttaaaaattgatttaattataccaataaaaaaataatatgtaaataatgactttacacttaacgatcaactactatgaccggccataatgatagggaaaattgcatcctatacccattttgggttaactactttcatttttaccctccttatctatgtattttatttataccttcatttatttgtcacattcccaataaatccttatctaataaccttcctcacttgaacagtagccatcttcctcaccaccttcgctcctccattcaacatcgtcagagccccttgcaccctacgatttcagccctcctccttcgtcgcccttcctaccttcgttccaacatcaccaccgacgatttcgtacctgtgcatcattctttctgtaatatcaaagttaggtaaattttattttcttaaatctctatattcttaaatttacttatcaattttatatcccttgattttttttaagtttgcgcctccaccagttgtcattaatttcctcttacccct

SEQ ID NO: 209556 - DNA, 688 bp, Cannabis indica
atcagattcccaatttctttaggtaaattcaaagtagaatagatatccacaggttgatgaccaataatcaaaactctaagcttcaaaaagtgattgcatacatgtctcaatactcttttatcattctcaattcctccaccatctacagcaaagcacctgagagttccatctatatttcgaaccatatgaataaaatcattaacattagtacttttattatcatagatggaaactcttcgtacatttgtgtctattgcctcttccctcctattctgccaatttgtaaaatgtagaaagttttcatcttgagctttcgacacacacaaatctcgcatgagatcatgaatgcaaaatgattttatccttcttcctgatgaactcatttctttgacctgaatcatactcctctccaccaactcacacaaccaatcatatgccacatcctccaaagtttccacagaacctcttcttcgcgatattaaaccttctgctatgagtacaagacataactcttttactcttattgggacatcttcagcgtaacaagccaagtacaaaaaacaaggcttcaagtgagatggtaattcactgtaactcaaacctaacacccccgaaacactacggtattttgagtcaacgtcatgttgttgttcagcttcacctaggcagcgaattacatttgctttca

SEQ ID NO: 209557 - DNA, 776 bp, Cannabis indica
cgggttaaccgacaaaacgataaatttcattacgcgggttattattttctttttgcttaattggatagattgcacttagatttttgtaatccgtctttacattaaattaaataaaatatagcataaactgtcgactaatgtacacccctagttagtactccaattcgaacccgtccgtccaataaacaggtccaatctaatttcaacggattttgaatggccagacttcatacaaatggattctgatggattgggcggcgaggcagattgacagatatttggttctcctaccttaaacataagccttgctaaatttccttttttttttttaaaaaaaaaacctttgctaaattttagtgatacatattttggttaaagacgacagagtacaaaattacaaatactctttgtgtagttgggatgggaaagactaccccatgtagctgtaagccaatactattcaaaagcttgtttcctaagcaaaagaaatctaaaggcaccactcctctagctactctctatttttcttctcttccttcacaataataatcaatgattaaacaaaaaagttatatacataccaaacacaatgataagtaaaaatatcagcagccaaccccaaaatccatctgccatagaacaggatgataaggcatctttagcactcagtgacttcttacataatcctgcaaaattttcaaccaacgtgaatgtttagacgacatatgccagtgcatgcaataatacattaaatttaattcattgaagtgtcttac

SEQ ID NO: 209558 - DNA, 769 bp, Cannabis indica
cttatcaatggactgtgaagaatcacttattcatctatgggatcgatgttttactttatgttgtcaaatgacagaaaacccactaacagatttgaatttgctacctggacatcttaaattatgggtggtagctttgatattacagtaaccaataaaatagaaagaaaaaagacatacaagtagattagtttttggttttgattgctgagctgtaggattttgttgttcctatctaaaccaaaacattcaacaatccctgaaattattttgtattatacaatcattgggctgttttcatagaccaaaatcctaaacaccaccacggttgtgtttttgctcctaatattaacagtttctgttcttatatagctctagaaattagttagtggctgtcaatttgaataatttagagtgttttccatgcctatagatttagaatttgatgatcttttcatgataggctacactcaaggattcccacttgacataatattcttgcggtctgcttttttggtcagctctagttgcaataattacgtttcgtctctatttcccatgctggtgaatgtattattgttgatcttacatgaatcctttgccacatgtttatgatcactttggtcctttttttttttgctttcaatcatactgttattgtggcgttggaagtcgtctttgaaccattgtcacccaaaaactctgattggttgtaatcaattatgattcctatgctcttcaggttgatcaatccagttgttgtgtcacctac

SEQ ID NO: 209559 - DNA, 911 bp, Cannabis indica
ggaaacttttagttttaagtgtaggtctccagaaagggttttagcaagttgtttatccatttacatgaatgtgacatagggcatccattcagcgcgtgattttccgttcaggtcgaccgacacacttgaatttaaaaatgaggtaagactagcatagaatgtatttatgtatgaatatgtgtatgtgtaatatatgaatgctaattatgattcgtatgctactaacactagtacagtagcggtactgagtgcattagtataatatatgacattcaacgactacaatacagtgttaccaacattagtacggttaagtacgtagtatatgtggtacaacacttagtggtacacgagatatgtgcaaaccctaccaacactagtacagtagcggtacgtagtgcatgtggtacagtggtcgtaccttagttaagaacgttattactcatttgttaagccttgtggataggtgtatgggcgcctagatacaagtcaatattatatacatatgttatgtgtttttcttactgagtctgttgactcacagatattattttcgtgtgtaggtaaaggaaaggctaaagctgaacaatagtgagttcagagctcaggggatgattatacatgtcgagacggtgcgacttggagtgttcggtctcgggacgacttggacttaatttattttatagtcgttgtgcaacatgtttgtaaaagttattttaaatgtgaatgtaaagtttaaaaataggatctcaattttatgtgaatatatataatgtataagtttataaaagtttaaatcaaataaaaattttaatttgtcacgatttttgagaaaattttttgattagtaaaggtgtgcaccgtaattaaatagtcattatagcgtgcctaaccattagggcgttacaaat

SEQ ID NO: 209560 - DNA, 834 bp, Cannabis indica
aaaattgattaaaaaattataattaatattccttaactttatatacatttcaacctgaaattaacaaaagcaacaagctgatgatgatgatgatgatgatgacacagtgggcgagaagaggaactattatggccttaacttttttatggcctagaaaaagatatattttctgaattttactaaaaaaaaaactatgaaatttttgttataatcctatcaagtatcatggcctcaaaaaattatattataattaaaaaatcgcttgcacatgtgttaagtagtcaaaaatgtgtcaattttttaagaaaaagagcattttatgacacattttaaaaacaagaattagaaacaaataaaagttgatccttttataaccaaccaaaaaaaaaaaaaaaattacatgatatattaacttttgttatttttttataaaaatactgttagacggtattttttatatttttactgtatttttttataagtttcatactgcagtatactatgttaagtttttactggttttctactagtgtttttttagatgttctactagtgttttttaggtgttctactattttttttttttgagccaaaaaattaactttattaaatcaaatcagctaccaagatagcttccaaaccagcagggacaaaactcccgcgggaaacacaaccagaaatagaaccagaagaacgagctaaaaaattagccgcctcgttcctggaccgtataacaaaactaattgaaataggaaataaaagaaaggattgcataagaacaacacaattcgaaatcaaaagccctaccggggacaacaaccgcttcttctgttg

SEQ ID NO: 209561 - DNA, 571 bp, Cannabis indica
gtcaatattttggtgctttaattgagagcaagggtcataaactcactatttacttcaaatttagtcataaacacgatggtggtatagactcgtagagatgtggttgatccagcaaattccctggcagtggatcccgcattgcagaacctaggaaatgtaagggttccaccagccacaaatcctgaactactgcgaattgtgggtcagggtgtgacgtctccttttaatggaatcgcaccgggtgtgcaagagactagaaatacaagtttggcaaccaatcagggtattcccaacactagagttccgccagcaacaaatgtccgaacaatagttggagatgacaacgagatccagaacgtctgtgctgctcttggactcatgcaaggccatactaacactctgcatcacgatcaggaagagctccgtgctgcagtgaacctcgcattttaatagcaaaggcgtttgttaacaaaatggagggataaagaggtggaaacattgagggctcagcaagcagccattgacaaccgaacaagacatgcaccgtactgatatgaagggcctatcaggc

SEQ ID NO: 209562 - DNA, 1366 bp, Cannabis indica
cattttcaatgacctagaagttcagggggcatgatttggtacgtgtcaaaattcagggagtaaaaatcctaattgccctttttttattattattttttatttctttcttcatttattgtttgagatctgagattggttttctttcttttttttttttttttgctttgcatttgagatttgagattcaggattggatatttttttgtcttctttgatttgaaatatttgagattttgaattggatttttttttcttttgtcttactttgtgatcttaaattttagatttgagattgtctttggatatgagatttaagattttagttttcatttgtatttgaatctcagagaattttagaaataaaatgtggattgttgctgctgttgtactggaggtagtgtgtcacgataatgctaaaggtgatgatttagtcatggtggtgatgttgaagaaaagaaaaagaagttttttttttttaatggagaacaaaaagaagttaattataaaaagaaaaaaaaatctgatacgaacatattttttttcaattgtttttgtaattttataatacttaaaagttattaaaataattaaaaattttggtaccaataagaatatgcaatgtgtacatagatgtacatagtggtagtcttagttggcgtcttaattggcacttaactgaaaaatttaactgtaattttaagtttccaaacacaactaaactaaagggggtttcaccaccaaaaaaaaaatagggggttatgtatatacaaactgaaacataaaggggtttagccgcaaatttctcttatttatttttatttaatttctaaattaatcacaactatttaatagtcatccaatagtttaaaaaaatgtaaccatgatgattataataaaaatgtaacaatgattgttacaataaaaatgtaaccattgaaatctcttccatatatatatttgcaccttgtgcattagagcacaaatacaaaaaatgggtcaattatagttacccggataattacataagacacaattttttataaaaaaaattatattttcacgtttaaaattttttttttacatttttacagttttccagtaaaacaatacgaaaacaataaattttttacataaagtaacatgaaaataacatctaaataacatcaaaataacaacaaaaaataacatgcagataacaaaaatcagtaacaacttaacaagagtataacataaaaaaaacgatttttttgtaaataaataaaaaaaaatacgtatttttaaattttatggaactatattttggtatttttgtatttttttttttgttttgttaatctatctatctatatatatctataatcctgat

SEQ ID NO: 209563 - DNA, 533 bp, Cannabis indica
aaatatttaagcacgaaattcatgttagtttatatgttgtttgttgaaaattttagcaataatgataatataataatataaggtattttaaaataataaagagctagccacaaaaaaaaaaaagctataaaaaaatcaatagtgacttaagtagctttagagtatctcccatggtcaaatatcaaaatataaaatattacacttttaaatttgccttttcattgccactatcaccttagttgcaaataaaataaaattaaaagttttaataataataataaaggaaatttctattgtaggtctcttaaaagtgtgtttttgaaaactttttatctgtttccacatttaaaaaatacttttagtttaatttttattttcattatcgcatacattatagttatttaggactacttgtacatatatttagaaaattttgaatagttaacattgtcaaaaataaaatttaaacaattacttactatatgtataagaaaaaaaacagtcgcgcgcgaatataataaaatatgtaaatt

SEQ ID NO: 209564 - DNA, 811 bp, Cannabis indica
ccattagggcttaccaactacgtcattttatttttaatatacaaataattatataggaaaaatatagtagtaaaactcctagaaaggcattttcagtagacttttatttgtttttgacattttagtaaaattattaagttcatttttttttttcatgatctatgttgttatttagaattatttataaattatcaaaaaactctaaataatttacagtgccaaaaaagatattggatctttttttttttcttaatgtgccaatagttatttaccacacgtacgtataagaaaaataatcgcatgtgcaccaaactatttgaaccttatttgtttagcattgcaaactatcaaaaaagttaaaaaaaatttatagtagtcctaaatagctacatagtacacgattatgaaaaaaaatagactaaaatattctcttaaatgccaaactagatagagggtctagtgaaactgtttattagaaagagtgttgtaatgacctcatacttataatatagattagtagacaattaatattaattaattatattatgtgatgtggaccctatttttaagaaataggtatttaaattatagttttttaattttggagattttattaaattctaggtgtattatatatgatatacatgaattttgatatttttatgatttatgtccgataaaggtagaaatgcaacagtttggccattagagtaacatagatatgatttagtatcttttatttagcgggtaaaattattggacatatgaaatatcgagattatgcgggtcagtggtttttgaccattttacc

SEQ ID NO: 209565 - DNA, 552 bp, Cannabis indica
ttttttagaataatactagaacacaaaacagaacaactaaaaacaacagtgaaacaactaaaaaataagagtaaaacaacagaagaaacttaacacagtacacagtatttttgaaaaaattaccacctccacagtaaaaaaaagtaaaaaatttcagtatgtggtgtaaaaaaaccctttatattaatgtcttggatatgatgaaacaagagatttacctataactattattgcatatcagaagaactttcccctattattttaactaaaataataaaaaagaaaagggcatgagttcgaacccaatactcagcatttggaataaagtattcaaaataatttgattatagataatattatgaaggagaacatgattgtagggaaatacgtaaattgtggttgtgtaggataatatgtaatcatattctccttaattaaattatattgtttggttgagtacaacaatcttatatattatttaaaaattaaaatgaaaatacttttattatatctgtttaatgttaattatacataaaaataaaataattattc

SEQ ID NO: 209566 - DNA, 586 bp, Cannabis indica
ccaccaactagcaagttctgaattgggcattaaaacacataaaacatgcatcaaaatccaaccatatacccctcaatgttcagatttaacaacatctaaactaagctccaaaccaagagctcaaatccataaaactccaacaataaagatttgcacatccaagtcaaaatctcaagcttcaagcaaaataaatttagagctataaatcatattataaacacaaaatatcactcgattaatcacaccgaaagcttacccaaagcaaaaatcaagagtttaagacaccacaagttcataacatcaaaatcaacccaatttacacaaacatgcaattcaagaatttcaaaactcaaaacacaaatttaaacttctatttcagctacaaattcaacatgaaaaaggggttaagaactacctcaatcacaacaccaagctaagctcaaaaacccaccatgaatccaagcttcaagatcaatttttcaaaacttaacaaattgaaaaaatatggagataagagagagaggggggttcggctatggctgtaagttggatttccaaacgagatgccctcctagaactgtaaaaa

SEQ ID NO: 209567 - DNA, 773 bp, Cannabis indica
attaccttgcctattgtcgttgctagacctcttcccatttgaattctaactgttgggatattgtggatactggatggacaccctccgctgtggttggttgttgattttctttcctgacagtatccacgtgccgtacaaattcttcgagcttaatgaatccatctacttgacacttaaattcatcaattgatctcacagttagtcttttaatgtccttccataactctcctagagtctcaatgtcatccagtattgaaactagtcttccttcttcaatcaaccccttaacatttgtagcttcggtcataaacttggtaataggctctaagaggctctcttggcatttgcttcacttctaccaggtcttccaggtgtgagagaagctgttaggaggaagaaaattatacgtgaaactcagatgtgaaggcattccatgagttaaaccttcctagaagcagtttagtataccattgctaggtggcctctatgagtgtggtaggaaagattctgcaccgtacatcacctctaaccccttgtagatccatctgcatctcaatttattttaggtgttataagggatcttcttttcttgtatacattttccatattggcattttgaaaattaggggtaggtcaagaactttgatctcaggcaagaagggtgatctgcgtgccaggtcgagttccaggatccttgatgaacttccaggtttaccaccgtaaagagaaatcgatttcattatcaatttagcacctagagcagaactggtttc

SEQ ID NO: 209568 - DNA, 704 bp, Cannabis indica
ttgggattttattccctatttcaaattattacagacaattcatttaatatttttgagattattaataaaattttcgtttaaagatattttgtcatgaatttcatttatgaattgagcttcatatttttctttatcttgtgtatgccaataccaattatatttatatgtttaaaatgtttgtatgcgtttgtgttttattattgatgcaaaatctatgatatattattctctgcaaagagataattccacataaacacctagaattttaaattcaatgtttatgaataattgttattctttaaacaattactaagatactgtttaataaaaagatcttttgatctaataggggtggaaaaatttaagagtaatatatgcagttcaacgatcttttatatctattgaacttcaaattatattcataactccacatgatctctataacacttaggggtggatgaagctattgacatatgtagttcattttgaactctaaactatactcaatacaccacagtatctccatggcacacatattttgattaaaacatgaatgtaatataatgaacaaattagaaaaattattacaacttattcttgatcctgtaattttttgttccaattaatatgttactgttgtaatagaaattgataccaataaagttcttagacgtagtatcagaataccttatttgagtgggaga

SEQ ID NO: 209569 - DNA, 758 bp, Cannabis indica
aaaaaaattgccaaaataatacaaaaataatttatgccatataacagtatttttgtaaaaattattttaaaactcaaacattaattattaggctaattagtaatatttccccccgaactttgacatgtaccaaatcataccccctgaacttttttggccgttaaagattctccctaaactattgagattgttagatttaaggattttagtctaattttagtaaaaaaattccaacatggatgaaatttcagggggcatgatttagtacatatcaaaatttaaggggcatgatttagtacatatcaaagtctagggagcatggtttagtatagaaacaatcactgatgttatagtgagatttctctcacctagaaactcgagaccagactcctgttcggaggacacgtgtattcagatttccaatgaaagttgagatgtccatgagagactcctcgagtttaaacctcgcctgagctaaagtcagcgagatgatgcgagtatgaccaaagtctgatcgcataactgtaattcgcattatgtgggactagagaacggatccaactcgcatgtatcgggatatgtgcgagtatcctttctatactcatgcgaaagcacagagatcgactctctttaatgcgagttgatcggaatgatctaaacagcctcgataaccaatatagactcgcgtgtctagattctatcagcttgtcatacgatgtccatagatgcaactatataagaacgcagacatcctaaac

SEQ ID NO: 209570 - DNA, 519 bp, Cannabis indica
caaaaattcttcagcagaagaagaagcagccagcttgaaattcagggttaggccctattcttcaaggttttttctttttattatttattttgaaaagaaaatggtaaaatgagtggtttgtatttttgggttcaagagtcttgttttagtgttccatttcacaatattttatgagatttttcagtaatgaaagcttttatatatatgtgtgtattttttattaaataataaaaaaaagtttatacagggatctaaagaaaagcggactattttggaattttttttgggtttgtaaagattcttagagtatgctctttatattgtttggtggattattgatagtttagtaaaagataattatttattgtttatttggttttttattaactatttattttggtttgttcataatatgtaaaatgaacttacgcacatggtgggggtccatatttatatataagtttttgattgttattattgtttactttatatatttatttatttttttgttgtgttaag

SEQ ID NO: 209571 - DNA, 650 bp, Cannabis indica
gaatggtggacaatgtcgacactgattgcatcttaaagagaatcttgttctctgtcaattctggaaagacccgctgaaaagatacaaacgtgtgatatccagaaaaaatagctaacaagatatttacaattaccatctccatctttctaatgttgattccccaataagatgagattgttactagacgatcacaccaaattgttaataatgcaaacaacaaatgaaaaatggtaacaagtgcagtaagtgtagccaacaggcaccatgcttgtttggctagaatgttgtcactcaatccaaggaagtcttcaaagagtgcaatggtgatatatagtgctaaagttgccaacgtaataaatttctcaactttgaaccttaagagctccatctctccttttctctctctttctttctttctctctttctttcttgcttatagtttgttgaaatggtttcatcccttttatataggaaaaattagataattataattgtataccaattataagtattatcattttcctgaaaaaaatgtataataggaaatctaaatcctttcctataatttattattatatatccttttcgttcgattattactatttatatgccgttttgatactatctttttttagattttcttttatatt

SEQ ID NO: 209572 - DNA, 857 bp, Cannabis indica
ttgagtgttgataaagcttttatggtgttactatcacaatatcactaatgtataattttatactcatatatagtgttatactctagggttaattatatcagtacaatatatataattataaaatttatttaataaattaatacaaattaatgtattttataaatagtagtttacaaaaattgatgagtagatatgatattgttaataaatgaacattattttatgatttttttcttttactgtgattgactatgatattgttaataaataaaaattattttatgattttttcttttgccgtgattgactatttgactccaacattcaacatataaaacaaaggcaagttaattatatatataatatatacagagaagtaatatgagagaacgggctgggttgggctgtgtagacttaaattttcaaaacccataaccaaaccatatataaacggcccattattttttaaaccaatgaagtacggcccatattttacataatcctttaacacaaaaaatgggttgggttggccagcttggtcggtctggcccgtattttgtgcacccctaattatatggctaagctccaatataaatattttaattttataactttttatataaaataatgagatcctttgttatgttaaataatagcatttttgaaaacttaggagctcatacgtcggcccaaactatcttgggccgttgagcaaattaaaaaagggaagtttacatctacaaacgtaaattagcatcttattactaagaataacgtagcaatttattttatatgttttataccgttattaatattattgtatcgtttttattttactaaattactaagttactttc

SEQ ID NO: 209573 - DNA, 788 bp, Cannabis indica
atcatacatatagtgtgttatgttattttatggtttatttggtacacgtgttgtattatattgtattatataatattgtgttggattttattttattgtattagtattatctgatataagactatagtttggtattgacttctatgaataggttgtactaaaattatactatctttaccataaactcgactcccgaaccccggtcctagacctaggcagtggattccgggtcccgtatccgaggttgggggttcgggtcttaaggtcaaatccaagcctaggtctgagtctcaagttccggtcctgatccgaatttgaattcgaggttcgggtccgggatccaagtccaagtttgggtttagatatggatctgaggttcgagttcgtgtctcagtgcgactctagcaccggggtcggggttcaaggtcgcaattgggtccgagcccgtgcttgggtgcaagtgcgatgttggggtcggatctagaatcctagtctaggcctcaatccccaaccctactctttttaaatattgtaatacacgctaacatagatcagttgttatgtattaaataataagatttgcgttgtattaaaatatatgttttataataattaatacaatgcaatgttttatccaaacaatataatattacttattatttaatataatatgatctttatacgctctatcgaacaaaccctaaacgtatacaatttggccacttacgtacaaagaaaataaggttcaaaaccatcccaaattgcatggtcctctctctctctctatc

SEQ ID NO: 209574 - DNA, 613 bp, Cannabis indica
ttttattcttattctcatataaatacattttacgagctaattgacaaaacaattttgaagggtgtggttcttttgtatttttttaagtagttatatatgcattattgttttacattagtttttgtgttgttttacttttttttttattctaatttgtcacgactgagcttgcaaatatagtcgcaattatatctagtattgaggctgtgtagaagttggtttaatcttttttctcatttgttttagtgttgttattcaattgttttgccatgattatttatttcgtgttgatttctctgttttgtttcatcttactagaattaatggttgtttttaggtgttctcgtattgctggggtggttctgtctgtgggtgtggaagatagaggcttggtatgtgatttttcgacatctacagtacaaaagacaaaaaagggcaaaggacaatataaatgtaattttctccgtgtgatagtataaatgtaaacctttactcaatatttattatgtgtaaaattcccaaaaatttatccctctgaaaaaaatttagcaaaagtagcaggagtaatcttgcttcttttggaaagaaatagtaaacatctaaaaataatcag

SEQ ID NO: 209575 - DNA, 555 bp, Cannabis indica
ataagaaaatcattggtttttttcaagtctccaaccaaaaaggggatacaattgcaaatgaaatgaagagatgtttgaaggattggggaacatgaaaggtgtttactgtgactgttgacaatgcttcttcaaacgacgcagctcttcaaaagttaaaaaagaaactgtgtgagaagaaaggaggtgtagttattggtggcgacttgttacacatgaggtgttgttgtcacataattaatctggtagttggagatggtttaaaggacttgaactcgtctatttgtagtattcgtaatgcggtaagatacgtcaaatcttcaccggcacgacttggaaagttcaaggactgcgcgaaggaggagaacattcaatctaaagcattgttgtccttagatgttccaactaggtggaactcaacgtacttgatgcttgaggctgcattgaaattcaaaaaagctttcaatagattagagggagacttgtattttactagttactttgatgaacccttaaatggtaaaaagatagatggcccaccaagtgagttagattggg

SEQ ID NO: 209576 - DNA, 866 bp, Cannabis indica
catgccagagagtgtatgctgattttggcttccttgataaatcttggaccatgccactcaagcaaagtgatgaagatgctcagagtgctactgctattctgtctcaaactgtgacagaagaagttgttggaacttattttactaggatctagatttactaacatgtatgtttgattatattctataatctaacatcctaaacatgaattttctaagacaatgaaataaacacatatatagttctagaaaaccttacattggtggtagcaaaatattatggctcattccattcagatctctagcccttgttcctttctgtcgcagagtattgccaagatctgaacatagatctcctttagtgacttgaattgtgtgggcaaggtactcttcactataggttcgaaattatgaagagaatgagagaggaattcaaattctataagagaggctcttaatttttcagttgtttgacaaagtagaaaactaggtaatgataatgagactcatcttattcattatataagattttagttagggttaggatttaaattaaatagaattaaaaataaataaaataatagcttaaaatacacttaagtggtcgacctcatatgtggaccccactagtttcaattttgccattttattttaacaacttatcttttctttcacaaatgctacattttaattctaatcctataaatgtcaaatctatttatttaataattataattaattatcaaataaaattttcatttaacttatttattagttagacctttacaaagtctcttaattaataaataaaccctaaaatctcattttttttctcaattaagcccttactcagtgaaaactcataaata

SEQ ID NO: 209577 - DNA, 545 bp, Cannabis indica
aaggaaataccacaaaaactaaaaactacatataatttttacttctatataatcaaaactagtttcttgaatgaaaaaaactaagctttttgaatgaaaaaaataattacctgaataaaaaaccgtttactcggtaagataaaattagcttcttgatgaaattatcatagataagaaggaataccaataaaaaacttaaaaaactcatttatataaattttacttttgtattatcaaaactagtttcttgaataaaaaaaaaccaatttctagaatacgatacatttgacttctttgatttatgtttcaaacaaagagaaagaaactttaaaaaaatttaattataggatttaaaaagacatttagttggcaaacctaaggccataaaaaagctcagaaaaaaaaaccaaaaaaatggactaagtttttttttatttctttgagataaaatggtgacattttattagcaaattgcatcaactaatacaatattcaaaagatccaccggagcattactctcgatgaatatacgaactgaatgaaaa

SEQ ID NO: 209578 - DNA, 711 bp, Cannabis indica
ctttcatatagatgcaacacccccataccaaatgcagagaagcaatgtgagtgaaaatagacaagtccctgaagattttacacttttcctcaaacacatacctcaaaaaaatcagagaggccgagtaaacaaggtggaactatgttacgttgcaccacgaaggacttcgataatcaatattttttttaagtttggtcaatatatatatatggccgcaatcgacaacaatccactttgatgtcagccaagatttatatgggattaaaaaggactcagtatggcttcctacaactaacactcaatgaattgtgccaaaatgaaatagttaggagcccaacctattgtaatgtgatgcaagtatgatattcaactcttaataaacttaggagatatcataattcattttttgactatatattattataattatagcatgcatttcaccagttttctaaaaaaatttacacagtgttaaaaataagatttaaacaatcagttgcacatgtagttaattttttatttttttttacatgtgtgcaactaattattttgagttgtattttaaaaattagttagcatatagcatataacaataacatatatagttaaataaaatgtttcacatatatggaacataaaattgttgcagctaaacaaaagtgatgcatatttatcataaagttttacaatagataataatattgatcatga

SEQ ID NO: 209579 - DNA, 791 bp, Cannabis indica
ataaataaattctaaactaattgttttctttcatatagatgcaacacccccaataaccaaatgcagaagaagcaattgtgagtgaaaatagacaagtccctgaagatttactctttcctcaaacacatcctcaaaaaaatcagagaggccgagtaaacaaggtggaactatgttacgttgcaccacgaaggacttcgataatcaatattttttttaagttggtcaatatatatatatggccgcaatcgacaacaatccactttgatgtcagccaagatttatatgggattaaaaaggactcagtatggcttcctacaactaacatcaatgaattgtgccaaatgaaatagttaggagcccaacctattgtaatgtgatgcaagtatgatattcaactcttaataaacttaggagatatcataattcattttttgactatatattattataattatagcatgcatttcaccagttttcaaaaaaatttcacagtgttaaaaataagatttaaacaatcagttgcacatgtagtaattttttattttttttacattgtgtgcaactaattattttgagttgtattttaaaattagttagcatatagcatataacaataacatatatagttaaataaaatgtttcacatatatggaacataaaattgttgcagctaaacaaaagtgatgcattatcataaagttttacaatagataataatattgatcatgagtatgaatatatatagtggtcatgagaaaggggccgactgcctgagaaacgctctcaaagtc

SEQ ID NO: 209580 - DNA, 1426 bp, Cannabis indica
attatatatatatatatatatattgggggaggaatattcaaatttgagacctactctttgtaatgagaagtgtaaaatcactaaattatattcctatgatcactaatggtggtgttttaagatgagggaatttttatggagctctcttctttgtgaaaaaaataataatttatttttaaaatgaattttgttcattttaaataattaaattaatgtgtagttatagatatagcgtagtggtttaacagtagaaactatgcattggaaggtaatttttttttttttaaaaaaaaaaaaataaacaatacaatagtgtgaagtgaaagatttcttttttatttgaagtgtcaattgagtagtttggccaacaaaatttaatggtgagtttagctgtctgttgatgctgaaaattagcttaataacaaatttatattatggcatagaattccttacactatgtttgatttagtcgagatatacattgctctatcaatctcccagtttctacaatcactctcccattcccctatttcatgaatttgaaaggttttgagaatgcattccaatagagtttcgactagtctggtgagagcaagaatctattcctttttctgaacaatggagtctcctatttatgggcagtaatgactgttggtccctttcttttcctttgttaaaattggccacgttggattttttttcttcttcacatgtttctcaagttcctcaggctttatttctaatttcctcaaattctgcttctacttttttaggtggttgaggttttgtctttcccgttctttctttttctttatgtgaaacagtgcatttaatgttcctatcacattgtttcattcgatcttctatgtttataatgaatagaattactatcttacccctaagattatttttatcacttacaattgcccctcgactctataatttctaagctcgggtttgtttaagttcgagctcagatgttgtggaactgattacccaaaataattcccacgtgtcataatgaatcataactgatttaatggggtattctattttttgggaaactgtcttcgccttttctaattaccctatttttattctaatttaaatttaaatttgtagatatttatttaaaggaagaaatgagagtttaagtaacttccctaatattttttccttttcaatcctttgttgctatattttataaacgctacgcaagtatacgcaatcaagtagtaaatctcacacaggtgaggtcgatcccacagggaattggattaagtaccactaaattatacttatgattctattcggcaaatcgaaagcaattatgatttaaaaacagtaaaatatgaaagaaattcagaaaacttaataacacaattgaaagttgagcaagatgagataatagggaggagaatcctgc

SEQ ID NO: 209581 - DNA, 694 bp, Cannabis indica
tgataaattaaacatgcaacaggcattaaacacaaaaaccctataagctatctataccatacaagtactcttgtcctatatagaaattcagttctacctcagtgtagcataattgacactcacttctcagatctcacatcaatatcatagacagttaattggtgatcatggaattaaaagtaattaagtacgaataaaataaaatacatagaaactgaggaaaaataaatcatattaaaaccataaaacaatatcaaacaatctccatctagaccctaattaaatgtttagctactcatattcattgtagcaaattcacacatattaatttaagaaaagaaaagagaatagagaagaaaagaatgttgaaaaccccgttgaaaaagacctttgcgattgattttatctctaatcttcgtcctccttgattgcttgttaaaactattgaagttcacttcttatatagccaaaaagggtataaaaacgctaaaaaacctattttgcttaggattagaaggggcgggccgcggcccatgatttccatgcctagccccccctcccctctttatttggatagtgagttttctactgcgttgactgatcgtattttggctataactctctcggtattactcgaaattggacgattcaagatgttccagcaagatgaaagagagatctatagcttttatgt

SEQ ID NO: 209582 - DNA, 785 bp, Cannabis indica
tatttgatatgccatatttttatttatatgtaaattaagttattaaaactcatatttaatattttttatttgtttttaggcaattttatttgttactagttctgaaaaagtcaccagagtttgctgtatggattaaaattggccatatatgtcaacattcatatattccccataatacccctcacatttcaaaaaaacaaacagggctcccttctctatttccctctcgctcatacccacggcacacccactccacccacaacatacccgcggcgcaccccaatcaacccacagtagacctcaatcgaccctatccacgacccttggtgcacgtacaaccaaagtgagacccaacccacgacctacggtgcacgaaggtgccatcggagacaatgtcgaaggtgagtccgtgttttaatttttagttttttattgattttgtttgtgattttactgttaaagattaattttgtttgtgaaacttaaattttgttagatttagggatgttgagaatgttggatctgtgatttgggcaagaaattggtctttaagccaggtccgatgcacatttgatgtaggtccgatgcattcaatgaatttgaaagattttgaggtagaagacgtaggtctgatgggttcggtaggtggtccgatatgtgtctgattgtccttttgctgtgtattatttgtttttgtccgatgtggttcaatacacggtccgatggagcccgatatatgtgtccgtttgtgcttttaatgtattatttatttattgtccgattgt

SEQ ID NO: 209583 - DNA, 617 bp, Cannabis indica
aataaaaaataaaaaatcaatctttaatgttttaacaatacaaaaaaaaattattaaatcataatgtggagacttgaactcccaacaagaaccaacacaacaccaaaataaacacacaatgatcaagaacacaatcaaccataaaccagcaacataaaccagagaataaaaccagtaaacaacttaaagaaagcactaaatgtacatagaacttacgtggttgggctacataatcaaggtgatcatgagcttaatccacaggagaaagcagccttaaaatggttgtgatgatgaattttattgatcttgacagaggtacaaaacagggatgacaaaccctgaaacaacaatggagtcttgctccttacaaagtgataatcgaatgactctctctcaaacacaagagaggtcaattacagctctcaattttctctctcaatctttctcaaccctctgaaaattctgtctaaaaactctcctacaaacataggaaacttcaaggcttatatagagtaggcagctaactaacttaactgtcaaaacagttaagttagttagatagataccaactgtcaaaactgacagtaaacatagattcaagaggtcaaacctcaaca

SEQ ID NO: 209584 - DNA, 517 bp, Cannabis indica
aataaaaataattacccacttaccaatgcagacaactcaaactgagtaatatcatataagtttaaatcaaatccagaaccaccatgaatagctactaactctttctcttccttaacatatggatcagaacatccatatcctcgcgcaaatctcgttttatttgatattgactccttatcttttgttgatactaacaccttagatttgaacaaccccccttccatatagtctccatcattcgtctcgaaacaattccattcatccaacattgatgattccttttcaaaagacacttctttattcttcccactgtcttcaaactgaacattgtcatcaccaatgcaatactttttaccacaactaacattcaaactattttcatccaccttatttaccaatattttttcatctttcacattaggtataatcgaaacatcaagatcactactgctaaatcctacaatatcttctaccaatttcaaaaatttgccattttccgtagaaggttccatatgac

SEQ ID NO: 209585 - DNA, 716 bp, Cannabis indica
attattggagattcttcaattttgtaatcgttataatatttttgctcataattttgttaaacttactttaacattactttggtgcccgggattatctctttttgttttgagtccttgcgactcatattttggcaatggttgtttgatgagaatttcataattttcactaaaaaaaaatggagctaatattcgatatgattgtaaaagttgaaaaatatggaaaaccacaatatatattgtcgaaggaatttggacaataccaaaaaacaaataaataacaattatttaacagaaaataacgagtactcaacctagaacaacaagtatttgaacaagactgcccagacaatagaacgaaaatggaaaagtataataaacacaaatatgtatagtagttcagtcagatcatggtctgcttaatctactgttgtaaatgatttctgtcttgtttattcatgttggatcactcctttatatataaaacaagtgtcgatttaattacacataactgatcggttatagaatcgttttataattaatattgacattaaattaaaataaacgtaataagaataaatgaagaacaattttaaatttgtttcaataagtatagcaacgtatatgacctgtagggtgcgagttgtctgttcatattctcacacaagctcacaagctttgggtgtgtcttatcttgggagggctaacgagcctcatgt

SEQ ID NO: 209586 - DNA, 744 bp, Cannabis indica
aattcagggtcaacaccaatctcggacacggacccgaacccggacctgggacccagactaaggacccagacccgagacccagaaaccaaacccggacccaaaccaggacttgggacccagactcggacttggagccgggactgggacctaaaccaggacccagacctggacccaagactcagactcgcacccacaccggaacctgggactcgaacttggacccggacccgcgacccgtatctgagactcgagacctagacccgtagttggtgttaggatcgagtgtattgaaaatatattataactttacacaatctattaatacaagtcaataccaaacatagtattgtattaaataatattaattgtttggtacgccatataagggtcgtattgtattaaataataaatatcactatgtttggataaaacaatgtattgtattaattattacgatcaaaatttttaatacaatgtacgttgcattatttaatacataacaaatggcccttattagcttgtattgtaatatttataaaggattcggggtcaacaccaatctctaatccagacatgggatccagacccggaccccgacccgggacctggacccggactctgaccctgacgctgacccggacccggacccgatcacggacctggacccggacccaatcccgaaccccgaccccagacccggacccagaccctgaccctgacacgaacccagacccggacccgaaa

SEQ ID NO: 209587 - DNA, 809 bp, Cannabis indica
tttttttattttatttgatttgtcatatttttaaaatatttaatttaaaaattcatatttatattttttaaactttgtgtaccctaaattttcatctacacctttatatttacatttgtcttttcctattaattttttccttctattttttaatcttttttattatttttttttacctcatgcaccttatttctcttttaattttctatcattttgtttaatttcttcttgttttctctttccatttactttttgtttatctcattttcgtacttcatttttttttttctttgttagtgtttcttttgcttcattttttgtctctattttttctaacataatggtaatatctatttgttaataacttaaggattttaggttcaaacttatattttttcccacccttccctcatcactgagctaatctaggagcttttttctttataacttttattctttttctttcgcattttcttttctttttttgatttccagttatttttttcttcttttttcacttattctatttatattccaccctccaaataggtatatataaagtcacataattcattttgaagtacccacattgggaccacaataaggagtacattagttattcacaatcaaagtacaaaaatttaaacttccacctactcacatttcaacgttataacattcatttgatcaatatcataaatatacaaaaataaaatcacgaagacttctagtactactaacaaaaaaaaaaataataaaatgtactttaaaaattgataataattatattattattgttgatcgagatt

SEQ ID NO: 209588 - DNA, 1217 bp, Cannabis indica
aaaataaattatttttaagactagtatattagttgtacaagatcattagcttttactgactaactatttcgtcacaaatttcaaaatttttagtgactaaataattttagtcaccaaaaattattagtctcgctactattataatttggcgccaaagttttagtgactaaatactattttagtcactaaaaataacaaacagtgactaaaaaattggtcattgatttttttggttctaattaaacattgtctcatgactaaaaatatttacgactaaatattagtcgcaaaatctaactattagtgactaagttggtttagtcacaaaaaatctagtcgctgaaaacttattttcttgtagtgcgtggacaatgaccttgcaagaggttggataacattcaggcccggctggataagcttgaggcccagcaggaagccgtcatgttggcacagacggggttagtaaatagccatctcagtatgaggcggtccttcacggagagtcagaaagatctgaaggagactctactggctaagatggacgagttgatggcaatggtaaaaggagagcccacacctgcaccgcaaaatgaggaacaaatggagagtgataacgaagatgtcttcccagaagattgggaagcagatgataacgaggcaccgtcaactccattggaagcaattatcacggccattggtgatacacaatcacaggacgaagtcctacttctacctggacccccagaaaatgtgccgtttgtgaggaagaggaagccgcctacgtacttgaaggactacactgcggaaaagaaaaagaggcgagttgttccagagaacgtagatccggaaagaccagcagaccgtagattgctacgtacgttcaagaggtggttgattggagacattcccaatgcccgacctaggaatgtgcacaccggtgttgctgatgtcaagttcttcacaaaattgtttctaatgggggattggctggacgatggtgtaagtatttaattattaattagtattttgatgtttttttgcaatctgtctttattgtcgatgtgttagcgacaatgtcacgacattatcgcgacattgttgctgacacagaaatttttttgcttctgttttgtttgtcgacatgtcacgacattgtcacgacattatcgcgacattgtgacattttttactctgttttgtttatcaacatgtcacga

SEQ ID NO: 209589 - DNA, 983 bp, Cannabis indica
cctaactaattgactaaaggcatggacatgtgtatagaacctaggcatacagatttaacatggcttgtaatggtttcagggagagagtgagagagggagttaaggttaggagagtaagaagaagaaaaacattaatttcttaacaatgtataaattttaaatatttttgatattttttaaataattaattacatgtaccaacacaattgtgtcatgtttataatgtgtacatatgaatgatccaacatgattttcataactaaaattggatgaaaatgacaaattactaacaaaatatgagttttggggggttttgcaacaaaaaaaaaaatgagtttgaggagttaattgctagcaagttaaaaattttagagattttgctgtaatttaatgtttaaaaaataaagctccaatagtagtgtacaacttatgccaaattttacacttgctaaacgtttggccaaacttagcacaatatatagcatcgactaaatttgtatttacaataaatgttatcttttttatttactcatttgtcactagttaataatttttattaattaaaagcttttaatattttatttattcatttaaatattttttttaatatactttcaataaaaatttaatgactatgggtgttaatttgtaccttgagtattggatcaaaattgtaaaatttgaaccaaatattaagagcatctctaataaagtactaaaagtatggtgtattgctacattttagtatatttaaaaaataatatcatattcaatggtgttataaaaaagtgttgtcatatttgcaacatgctaaaagttatacaaaattgattggtgaaatagatttcaaaatctaaatttggcaggttccaaatgcatgttctctcgacgaccttagttgcagttgtgtaccacatcttgagatcgtgtaatgaagcattatggaacttgaaaattttcactatagactccattgtaaaaaa

SEQ ID NO: 209590 - DNA, 495 bp, Cannabis indica
cgaaagaaagactatttttccaatatatgatgaataaaaatttaataattttttttatgcattttaaattttatttcatttcattcctattcttattcctatttctatgactgaagagttataaaatgatgaagatgatagttattctcattagtgttgtttgatattaaaaataaaattggaaatataaagagtaaaataaatattaaaattataattttattattttaatagaattatatattttattttaaatggtgtaaaaatcattttatatagtttttttattttttcaattcccctatttttttaatggattaaaaattgtgtatttggaggaagaaggtctcgctccattaatcctctctcttccaatcttcccttctccctcttgctaaataagcactattgataacctctatagacacacttctaattctaaacaaagataaaaaaaaaaaaaaaaaaatgaaacaatactccctattactatac

SEQ ID NO: 209591 - DNA, 508 bp, Cannabis indica
ttaactatctttagagataccaagatgctaatgctggtgagtcttcatctaatggtcagccttctccttaatggtcgaatgaattgtctactaccgaaataaatttggcttaaggtgaggaacttgtttgtggatgttgggattcgtgatgaagaccgcaaaatggggatgggggttgtggcgtccaattctaatggtcatgtctttttctctgatgtgttttcgagtgtgggatcttttgagcctcatgtcactgaggccaaagctttgcttcacagactttccatttgcctgcagttggggtatacatccattactactttctaataagtcgatattttgtcttataaatatgaccaatttatgtattaatattcttaaataattctttaaattattatttagtatgattttaatttgttaggctattttgaagattaatcatgcatttagtgtcattcgaaaggattttagcacattatggtgaaaaatagtggaagccggcaag

SEQ ID NO: 209592 - DNA, 508 bp, Cannabis indica
ttttcaagtgctttcataatattgcgcttacatttataaatctggctctattattggtcattgcaatgaataatagaaatttatcagtcatttgaaatattgactgaaatataattcattcattgttttccaatctatattaatctaacttaatttttgaaaatcctcataaaatccaaatatgagtttcagaaaaatataatatacatataacacaataacatagtaagtaaatatattgtatggaaaatgttaaaagaaagagacttgcatcataaggttctagtgcaaaattagtatttccatatgcagcgagaatttggcagtaaatattagggtgatttagatcattatcaagaactaaagcaagtttatattgaccgtataatgaaagagttaacaaattaaaaatatgtaagaggtcgactactctaagttacagcatcaaatcagtcatataattaatagtacttgcctttccaatagggccttcttttatctcatcaac

SEQ ID NO: 209593 - DNA, 639 bp, Cannabis indica
gcagcctaataaaagttccatgagaacagatgtcaccataactatccactgaaatcttgcctgccttacattgtaaaaagagtaaccacacaaacaacaattaatttaagttgcatccaaatattggtatttttaacaatatttttctaattgaaattttaccaattccattggctcatttagaaaagagttattagaattattttatcaagaagattcttcacctctccaacttatgtacccaaattatcagtaattcaccctaagcaatacacgatcattgtcatctatcttataaccatgccactcttctttcgaatgttagcttcccctatcacatgcgttctgcatcagggaaaagaaatcaaattaaatttttagaatgagattgaaaacgataagaacagagtgcaaagaaacaaaacagagagagagagagagataaaagagaaaaagttttaggaatgggttcagcatctaagaactgaattatagacaagtcgagtattcagtcttacactacagcaagttacaaagtgggcagatgaaatagagttcaaacattctgtaaaagaagattaattattttgtacacatttaaacgtgtaagccaaatcttcaaatggaatggaatggaat

SEQ ID NO: 209594 - DNA, 1245 bp, Cannabis indica
gactctgcctctagaatttgttttgtcatcgtgccctaaggcgttgttttctttccttttctgttgaggttggtcagcagctttagactttgtaggatactttgtggaaggtgtcttccttagttcttcaacagcgattgctttgcctttgtctttgcaaatgcttgaagatcgaggatcttttggatctgctttctcaagtgcatcatttgtttgaggagcttgtacgtcaggagataatttagtcaggacagtcattacaacctccattcttgtcatcttgccgagtagtaactcattgaatcgatcttgtcaagttagcttggttttggccagttgaagttatcttgccatgatgaccacgggatttgactcatcaggcttgctattctctccaacatcatcagcagcaactttgtcctgagggtcgtcttcatgcatatcctctggtacatctttggtattaacttcagcatccctaaagttactttctagattttgcatcctcaatgacatgatcgtctcgagtctgatatttgtcctgatggcctttctatagactagtcaccttttgggggtcactagaatctccaattttggcaccaagaccagacttggttcgggtgagggccatgattacttgaatgtaatttgtaagtggtctcattactttcttcagctctcgttaaaagtaccaagatgtttacccattttttcaaaaatagaatataaatgataagaactgaagaaaaataatcaaaagagaaggagcaaaaagagaaatatttttttatggtgatggggcattaactagccttagtctacgagttagtattatttggtaggtctttagcagtaaatacctttgagaatgcaaagaatatgtgttctcaagtttgcctcagcaaagttcacaaaagagttcaatccctaatctataggattcgagtggtatttatagtagtttgagaattatattatattttccttttccctctgttggagatttatagtaaataataccttaggctatctcatgagtccagtctataaagaagacgatctgctgactaggcaaatcagatttgaattgatttggtcaacaccatatgtacggattgtgggttgtgggcaattaatctatgaattaattgcataatattcgttataggaagtttctccattaatcttgatacgatattctattgtgatctagtagctagaatttccttatttgtgtgcagg

SEQ ID NO: 209595 - DNA, 953 bp, Cannabis indica
tgattaaaaaatgtttaaataaatgaaattattatttgttagctaccaaaaagaaaaaaagaaagggaaattattattttcaacaaattatgcatttcaaaaaaggaaaaaaaattatggaatgaaattagagtatctatatatatttatattaaactaaagcccgaccagccaaaaaaaaagaaaaaagaaagaaagaaatttaggttttaaaaaattaaataattattaaatatattgttggactaattaatcaattaaaaaataataaagtagaaaaagtgaaatattttgttttctaaagcttttcataataatatttacataatacattcaatttttattttttaaaattaagacaataaaattaattatctccatattttaacatagatgacgatcgataagagttggatatatttacgggatcgcactgatcctgcttactggagaggtatcttagccttttcaaaaatggctgaacaacacaagggctctgacggtaaaatcagatgtccttgtgtgaaatgtgtcaacaacaaacgacacactccagtggatgtgcgtggacacatattgcgttggggttttcaaactagttacgagcagtgggttttccacggagaagaggaagttaatgtagctgacgtgatagtcgatgagaatgatgtagatgagatgcgtgatgtcatcaatgattcctttactccggcatgtgatgataatacacctagcgttgacggaaatcgtatgggcgagtattacgatgagttgtttaaagatattgaagcagagttgtatccaggttgcaattggatatcgtctctcaacttcttagctaagttgatgcatttgaaaattgttggtggaatatcgaacaacatttttgatcaactattgagtttgttgaaatttgcatttccgaaagggaatacgattcctgaaacccacta

SEQ ID NO: 209596 - DNA, 557 bp, Cannabis indica
ttttttattcattttttttgtcaaatcaataagtagatctaaatcattatttatcaatattataatgctttaaattggttaaaattcaatgagtttccagagagtgaggatctgatttagattcattgtggtgctccatacgtgtcgtgagctctatatcgttaccagattgttttcttttagtatagacttgaatttgtttttctttattctcaggtatttgtcatgtgttttatttcattaccagatcatttccttttcttatagagttgaatttctttgttctgtgtatttacaaaattgtactagtggtttggtcataaatttcgatttaggaattgattttgatgaatgggatattattgacaaattaattaaaaactctaagggagagtttggtacgaggtattcaagataatttaattataggaaatataataaagaagaacatgattgtatgaaaatgtgtaaattgtatttggttgtgtaggataatatgtaatcatattatggtaaattgaattgtttggttgttttaaaataaaaatattttttta

SEQ ID NO: 209597 - DNA, 800 bp, Cannabis indica
tgtctattttaccaacaacatatacttattgttatatgttgatgacatcttgatgtgggggaataaaatagagattaacaagctaaagttgcagctaaatagttaatttgagatgaaagaccttggtaggccaagaaaatactaagaattaaggttgaaagaccaaaatcaggtataatcaagctgcgtcagaagaattaattggagaaagtactataaaaattcaagatggacaaggtcaaatatttagccaatcttctggctgcacatgtcaaattgtctcaaactcaatgtctacaaaccgagaaagataagaatggaaaaggtaccctatattaatattataggcaacttgatgtattctatggtttgtactagaccagatctagcagaagccttaagtgttgttagtaggtacatggctgatcctagagaggatcattggaaagctctcaaatggattctaggatatgtcctagggacaatagatttgggaaatgtttttcgaagaaaattaggtcaacaagctgaagtgtatgtttatgttgacaatgattatgcagccaatatagacacaagataaccactcgctggtttggtattttgtgtgtgtcgaaacatagtgagttggaagtataatatgaaaaaggtagtttctctctcaattactgaagctcagtacatggcaacaacaattgaggccttcaaggaagctctctggttgaagggtttagctcaagagattggttttaaggtagaaattgtggacatcttctaggataatcaaagtgctctgcact

SEQ ID NO: 209598 - DNA, 944 bp, Cannabis indica
catgcaaacagacgataaaaagcttgaagtgtccaaagaacttacatgaaagttgagagctggggggtcagcgtcggtcgacgatatagggtggactggcaacggcgaaggaagagcaacaagaaatctatggtgtctgaaattttttctctcaaatgggctcttgtgaaaaaatggcaaagtagtgaaagtaaccaaatgaagggaaaatgttggcttttataggccagaatgggtgcaaagcaactgtgatcaggcgtcatcgaacggtgggaatcgaatcgatttgtattctgcagatctaacggttgggatgaatgctcttcaagggcggctggaaatgcttgagtatttgtctgacacccattaaatgcgtcggatcatcaatggacgggaaacgaatcgttgcttgcaaaaagcaataaattttaatgatgactgtcataaatttagcccacgcgtccgaagcacgtgccaggaaatcaatgagacagccggaggcacctaagcaagcctcgtttgcttcacaccaaacaaggcttgggggtaaatgttgcccctattttcgcccaaaatacgtggaccagtatgacgacaacacgtggatctaagaggcgcaactcttagatcaatcgactaagtctcttagcttcaggattctcaccaagaatatacactcccggaggaaaggtaaaagctccacgtactcccggagaccagaggaacgccaagggacctccgggggggaacatgacattacttgaatagtcaccttgcatttaatgctgcatgggagaaaacatattggaactgccatatgcaataagtttgacggtgtaacccctcttatgcagctattacactatgattaataaggctagtgacagctactttatgagagatcacatcaatcaagaagggataaaagactttatccacctaac

SEQ ID NO: 209599 - DNA, 516 bp, Cannabis indica
ctcaagttgtttactgcgaaggtaatatcaggcctagataaagtcaaatagaggagcttgccaatgagctgtctatattctgaaggattggccagaagctcgccttgttggtcatccaatttggttctaggatccatgggggcttttgctggtttgcacccaatgtagccattatcttcgagtaactgaagcgtatattgtcgctgagagaggaaaaggccagtagaagctctcgcaatttcgaatccgagaaaatacttgagctgaccgagtgccttaagtttgaattgttgattgagagtggtctgtagctggtgcaaaatgtgaatatttggaccagtgatgacaatgtcatcaacgtacacaaggagtgctatgaaactgtcattggtgcctcgagtgaagagagtatagtcggctttggattgtttgaagccttcttggatgagagctgccgtgagcttcttgtaccattgtcgtgaagattgacgtagaccgtagatcgacttgtggagt

SEQ ID NO: 209600 - DNA, 440 bp, Cannabis indica
gcccatcaaaattagggagcactgccatttctatatgacagtggtcggatatggaccttataaagccttgagtggcttttctcatttgtatttaatacatatatgttgtaaatgtaacttggccaatgaaacccttcttcttgtattggggctgactactaccactccattatggcagtgtccatcaaaattggagagcactgccatttccttgtggcagtggtcggccaagtggtttctttaccacttggtggcttctttcacttggctttgacatattattgatgaaaatgcattgttgacaaaagttctcacttccccttcttcatggccgaccactgccatctccttatgacaatgctcatcaaaattggagagcactgccattttcttatggcagtggtcgactagagtaattcctaggtgggaaatgatttttc

SEQ ID NO: 209601 - DNA, 1139 bp, Cannabis indica
taccttggttgcattctcacctagttgcttaggagcttctttagttaacacaaacagggagtttttacctatgagagcaatattaatgttctctttttatttgacaaagttagctctagagaacttgttatcattcaatagtgacacaattgggttgttcatagtcatattgaaaactacaaatatcaataaatagaaatcaaataaggtccaaatacaaaatgatacacattcagaaattattaagcacttagcaagtaggaatgacatgtgaaaatacaaaaacaaacaatcctaattcggtttgacccgaccaaaccgcccaaaccgtcggtcgggttaagatttttttttttttttttttttttaaattggccaggttgcatgcataattttacaaaccgatctgtacgttgggttagaaaatatgtagtataaaccgactaaaaccgaccgatgtacaaccctacttatgagcttccaccattgtttcatactttgtaagccctactcttagcagccactattggggtgatcattatttttgttttgatcaagaaggaaaaatcttcatcaaccacaaacaattacaacctaaacaaacaaggcaacaaagcccgaaaagctacttacagtataatccctctatacatctcttctctaccctttttaatctccctttttttttgctatttgtaaccgatagaaaacattatctttaatatcctgaacaatattccaaaccaagctcaagtaattgttaaaaatacaacagtttctattgctccacaaattataaattgttgcttccatgactgtggtataaattctctgcattttatccttcttgatcttcactaaccatctttgccactcttgaaaatcaattggccaattggttatcccaagccagatgcacacctgagatagaacttcctgagagagacatcaagcaaagaaaaggtggctgtttgactcatcctcagccccacaaatcgggcaaataacactgtcaaggacaattttgaatcaagcaaatttatccgggttaacagttggtcattagctgcttgccagaaaacaaacctgtgtttgggcatgttgaagctgttccaaatgctgctgctgatctcgaagac

SEQ ID NO: 209602 - DNA, 552 bp, Cannabis indica
ccgctaagggtgcggtgagaaccatcgagggtgcaggtagggttatggttggggtatgggcgcctaatcgtaatcctatttatatctatgttatgattatgcttttcttactgagtctgtagactcacagttgttgcttgcatgtgtaggtaaggacaaagctaaggctaaacaacagtgagggcgagcgaatgaagattgtacatgtcggggcagttagacctggagcgtacgatctttgggacaacaggctgtatttttaaatggtcgctaggcaataacttttgtattaaatattttgtattacatttaaaaataatttaaatacaagatcccagttatgtaaaagatatttattttcatttaaagagtaattcagtaaaagttttaataaatcataattttctataaactcgttgattagcaatggattgcataattattattaaatcacgataacacgcctaaactagtagggtgttataatttggtatcagagccgccaggttgtcttccgaagattgcacatatataatcatcatcagagataag

SEQ ID NO: 209603 - DNA, 779 bp, Cannabis indica
aaaattcttcatttctaagtatgccagaatgagaaatgcaaagttatgaatttgacatctctgacttcatagatctttattattataaaaaactagacgaacagtcaaaatgacatcaggatcggataagcgaaacccagtgcaccagaccttttgtcaactttagcgctaggtacttaatcttgagctcctgggatctcatttttgatacttccaaggcttcagagcttgaggatgtggtctcctcccttgtttttaaccattctagattcaatggtcgcataagatttggcctttgagcaatgaaaggtagcatcccattttgattgtcaacctgagcattgggcccaacactagatcaacctgggcgctagccccgtttcttggggctcgagtttgtggttttctccccgagttttcttgaatcttcattacttttgatgatggaaaaaaaaccctaaacactttttgataaactcaatcaaaaatagcccaattgacaatatgttaacttgggcaatgggtcccagttttgtcccttcagaaattctatttggtcctacaaaatagttgattcttaatattttccaaaagtaaagaagattctcgaaagtgttaatgaaaaactccatttaaaatggcccatgttgaaaaaatgttaacttgggcacaagaccaaccacaggtgtaaaccttagcactgggccctattttttacacccagaaaatgatttttcttctttgaaatgacctattttctaacgccctgtccaacaggg

SEQ ID NO: 209604 - DNA, 675 bp, Cannabis indica
tttgtacgaaaattggccagtagtgaacattttcaagtattaaataaaaatgtgaccttatgattttttgcgtttaacgcttgtaaataaaattaatattttttataaaagtacgggcgttacagtttggtatcagagccacagttatattggtcacaaacgttctcacgagttacacacatcagctaaaaagtcttcgcttgccaccaagtaagtctcattatatatgcttgcattttatgtgtatttttgtaatttctaaatttacattttaacttaaaaaaaaaaaaaaaaaaaaaaaaaaaaaaaccttagtaccaatatttaagtttaggtaatacccatatgaaataatttgttcttaatatacacattttcaagctagtttaaaataaaaaatttggatgaaattttagaacttgattttagttagcactaaatgactcttgaaaaaaaaaagtgtgttttattattttattttatgttttattattttatctttgaataaatagaatttattgaactagttatgtaagtatggatattattatttttttgaaaatagtgatatcttatataagtttatcttcttttagagattcttagaaacaaacaaggaacattaggaaataatatctctatgaagattagctcgaatcaacggcaatggaaaca

SEQ ID NO: 209605 - DNA, 752 bp, Cannabis indica
aataatatatatataaaaactaaattagaattttatgtctgaattttaatttatatcatgttttttaaattttttatgtcgtttaaaatttttcctgaactattaagattattagatttgatgacttttatttaattttatttaattttgctaaaatgtgattgttcatatactaaatcgtgctctcgaactttgatacttacaaaatcatgccctttaaaatttaacatatactgaattatgcctcttaaattttcattcacgatagatttttttaataaaatcggataaaagttcttaaatctaataatctcaataatttgagaaaaaaatttaaagactcaaaaaaaattcaaacaatataatttaatatatgtaggaacataaatctaaattagcatattattattattattattattataatgaagaccaaatgttaagtcagcagtcaaacaataggaatctaatccaagattttatggtcatatcataactttgtagtttgttataagaagcatagagtggcggttaagtttatccacaactagctattatatgctgcggccacctctatttttgttcccgtgcacctttccgaaatccggcccattcgaagcccaagccaagtccacgccgacacaaacacagccccaaaagtccatacataggtaactacgcattattatttatataaatatttaatttgaaaaaataaagtaaaaaatctttttaaatatttaattcagtgg

SEQ ID NO: 209606 - DNA, 1051 bp, Cannabis indica
tcgcaattatttcgttatttactgaattacattgtgatagtgtttgtaaatttccccctttgctatgttttttctttgttccattgataattattttcaaatgttttttctttcgccatcgggtgtgtcattttgacaaagcttgctactttcttgtttattggtgttactacatatcgtggtgtgccttgtgttttgttttgggagattctgaacctagccggtaaagaaagttggcgttttgacaagattttgaggataaaccagagagggtaaaagtgatggattttgttcacaagattgaagccgaaggaagagacagtggagtgcctaaggagttccactgttactttattttttagatatccatcagagagagaggttatgcatgaatatcacttctgcgttgaagaatgttacgatcactccgtgccttttgtattcttcgttctttgaacttctctcggtctgctcattcccgtcatccccttcctctggtgactggtgatggtaacggcccttgtggtggagtggtgccggccttcctggcgtctcgtggctcgaggcgtagtaggataaggactagtcgtgtccctgcggcttttggaaagtcactttctgcagtgcccaaatggttacatagccggtgtgttcatccgattgcctcttctggtattttgccgaatgtggggtttgaggatgttggaaagaagcctgtggatttgcctatcctagaggttaatatccttttttcaaaatttgaccgtgcctcgattaatgaggttgatttgaaaaattttgaaatggtcaaagattggttggtgggctgatgtcgcccaattagttacactgcagtcgcggtagtaaacgggctatatgtcgtatccacagggaggaaaagtacactcaaaaggaaagttagtaattttatgagaataaaataagaaccttgaatgtgatgtgagaatattgagaaaatgattttcaaaaattaaacaagtaattaaaatgagaagtgatcagaaaatgattatggaagacacaagctttg

SEQ ID NO: 209607 - DNA, 525 bp, Cannabis indica
ttttaaaaacagaaaataaaaatcgattctcgaaatttcattttcaattgttaattttatttaaatcgggtctagatacagagtcgtgccccaggattggggtcctataccgagtcctggttcggggtttgggtccaagtctgggtccgagtctcaggtccagggccagggtcgggttcgaggttcgggctaggtttgtgtccaggttgagggtcgttgtagggttcgagttcgggtccagggctatgccgaggtctgggtctggattcgggatcgggttcgaattcggggccgtgtttggttccagttctcaggccgatcaaaataaaaaatgggatggacctgttcatttattagagaccattggttttctgttgaatctagatcaatggtttagattttttctaaataatcaaatattttataaaatgtcatttgagtaggtgtaccaattacaaccgattcttttttatttctttatctttcttaaaattaataatagtttttctctgttacagttgagag

SEQ ID NO: 209608 - DNA, 513 bp, Cannabis indica
gttgagtgtccttgacttggggtggtttcatttagaaaatttccctatgaagcgtgcgagtcagagcaaagcacattagaaacatttggattggtccgtgggactagtcgtcagtccaggaaacagctagagtgatgcactcgtgtataagagccattattctgtgggaataaggacccaacggaggcttgaagcggggacgttaccggggtaacgtataaaagaacatcaggaagaatagtggtatcactaaggtaaagaagattacctgaattacttaaggtgacatggtaatgatggagagtactttataattgaatgaatagtcaatgtggtttataaggagaccgttgaaattttaggaaaggattattttattaaggaattatggaaaggcatactcacctagaatggggaaaagcttatgtattgagatgaaatttaatggatatgtatttgagtgattggtgaatggtggatcacaaagtaagttgtttattaaacaacaagcta

SEQ ID NO: 209609 - DNA, 540 bp, Cannabis indica
aaatatgataaaaatattgcatgagtcaaattttacaccacaataaatattacttttttatttagggttcgtttggtatgtcgtattacaccgtattgtattgtataatattatattgaattgtattttatgcaatatttttaagtaaaactatatgtagtattaacttttatgggcacctaaatatataatatgttagtataaattaaaatttaacttagtattatataaaaatatgatataatccaatttaatataacataatataatacaatacgacctaatacgacgttctaaataagccctaagtctataattgtatatacaagtgtacaggtgacagatttttattgatccaactaatattaataagaaaaatttacataataagccaaaaatttgaaagaaatcaattttaatttttgaacttatttatttataaaactatctttttagtaaaaataataaatcagtttttatgttataatttattaatagttgtattatagttggagactatttttctaattattttatagt

SEQ ID NO: 209610 - DNA, 655 bp, Cannabis indica
tataactagtgtggcccatctatgtggctttccacttagtcctaatcataccattattttatcatttttctattccatataatttaatcctaaccctaagtgaaacagtataaaagaaataggatggtctcattatccaataacttaacctaatctctcataacctagtttacattctgccatacagctagagagagttcttgagacctccttcttcttcttgtattttagatttcctcatcattattcttcataatttttgagcctacagtgagtgagggcattcctactcatagcaagtctagtactttattaaagtgtgcaagactgtgaagaatccaaacacctgaaggaaaattggctcagatcttgataatactctgcgacagaaaggaacaagggttagaaatctgagtgagaagagtcatatattccgctgcaataaatgtaaggttacttaaactttctatgtgcttaaattccattattttagaaattcacacttaggatgttaataaatatacttgttagtaaatttatatcctggtaaaatatatcccaacaacaaaaccctcattccactgtacgaacaaaattctcttcccctctatctattttctttgatttataacccgaaatttagcgatataagctc

SEQ ID NO: 209611 - DNA, 563 bp, Cannabis indica
ttttttttaatttatatttggttatgtcatgtgctagcgagtattgagaggcacgtttcacgaggaaataaaataaaattccatgtgaacaaaaaaaaaaaaattcataagataattaaaagtgatgcactgatctactttacttgtttaggcatcgagaagagtttttagtttaatttttttcatattggtatacattagagttatttcagttgagtaattctcaacaccactactattttgcctatttcttaccttcgaattctaccgtaaatgaatccccatactatttattcttctttaaactctttaaaatcacatgtctgcttcacttctgctaagcaaaaaaaaacctagccgctttatggtaacgtctcaataggccatcccgctgacgaaattatagaggattcaaagagagatatcctacaaaatttgaaaaaattcaaaaaaatttacaatgtaaaaaatagtgttcaaacagtctattttacacacgtacaatacactatttgagccttatttttagcgagttaaatcttttcgaatttttttaaaatttt

SEQ ID NO: 209612 - DNA, 634 bp, Cannabis indica
ctcttctcgagttttcactaatttagaatcttccattagagcacttctgattctttctaacaaatcagattgaagcatcaaattattgagtttgccaacgacaaactcaatccttccttaaccatgtctgccgctaactgaggagagattaccatagcactaaaaacctacccgggacctttcctactaagagcatcagccacaacattggccttcttaggatgatacaaaatctctaagtcataatctttggctaattccaacgaccggctttgtctcatattcaaatttttgtgtgtgaagaaatacttgagactcttatggtctgtgtaaatctcacatttctctccatggagataatttcgccaaatctttagtacaaacacaattgcagcgagctctaaatcataaggtgggtaacgtttctcatactccttcaactgacaagaagcataagcaatgactctattagcttgcatcagaatgcaccccaaatcctgtctcaaggcatcacaataaatcataaatttctctcgatctgacagcaaagccaatactagagctataatcaatcgttgcttcaactcttgaaaactagtttcactcttgtctgtccataagaatcattgattct

SEQ ID NO: 209613 - DNA, 579 bp, Cannabis indica
taaaataatttccaacagtacagccaccaccatcatcaagaaggagctgctaccattattggaagaaattaaatgcagaagaaaaaagtaccaaaaaggaagtaactaaagaggaaaccactcgaaaaagaaggaggacataagcttcatttgtttgaatttttcttctctttcttttatttttctcctttatttaaatactttaaatttgttaaattgcaaagaattaggtagcaaccatggatgaacacactttattttggattttatttattggtttgaacatgaactaagcctcttgaggcttgaatgcctatgaacccctatgtttggtatgattaattttacgcatgttttagcaactttgcctttgttcattcaagtaagcttatggtttattgattgttattacttggccatgagtaataatttactaagctagatctggttctggaaagactagatctagtagttacaacttgtatgatgaaagtgaatacctagatttaagtttttcttagtaaatggaataggaatatttaattactgaaattgatgattaattgttgttctgtaatc

SEQ ID NO: 209614 - DNA, 581 bp, Cannabis indica
tcttaccaccacactttgtatgaaacatgaggtccattcaacgtgatcaacaaaataaaagtaattttcgaacactaaaatctatatatgtatcaagcatactaatttttaattaattttatttaggatctttttagtcggccatataaaggttacacttatgaataataagaatactatgtttagatagaattttgtacaatacgaattatattatttatacataaaaatagtttgtattagcttgtattataatatttagaaatagtctgggatcgggaattaaagtctgcagttaggttcggggtcaggatttgtgtccgagttggggtccaaggttggagtttggaaccggggtcggagttcgggatccaggtccagggccagagcagggttaaggtccagggatagggataaggctgtcatttgggtccagggtccaaggccaaggtaggatctgaggtcaaggtttgtgtctagaatcggagtctaacgtcgggtccagagaagggtgtggtggagatctagtttatgataaagataatataattttagaagacctattaatacaagttaatatc

SEQ ID NO: 209615 - DNA, 718 bp, Cannabis indica
tgaataagtttttggagtaatgatcatatgttatacaaaataataatatcattatcttgactacaccactatggctaggctactacaaaaaaatgatctttcattgactcgtacaaaagaaattcctataccaatgactaaatcttaaggaacaaaatatatataataataaatgaatgaagactttttatagtgaaagaatttttattttcatactctgactccatccatgcttgattatgatcaaataacacaattaccattttttttatcaaaaatactattgtataaaagaaaggatttatttgatgtttacactaaacaaaaatattttctatttttaataacaaaaatactattctaactattccctaaaataaatatgagtgtttggcatgattggcatccttaatttttctttctcattatacttttgtctatttttcatttatttattttgaatatttcctcacattatttttcttcatccttatttttctcaaaatattatttttaatacctctctatatccagtttctgtataattttttttatctaccatctctctccctttttttttttggctagtgtattgtccctttctagctaaagtatattaactaatttttatatggtaaatactattttagattatgtattttataaaaaatattaatttcacaatctgtttaaaaatgatttatacacactcaaatta

SEQ ID NO: 209616 - DNA, 500 bp, Cannabis indica
tgagagaggaacttcatactcaaccttacgatgaaatcaattggaaacaagtgcggcatttttgtgctaaggtgaatataatacaacttcctatccaaaaaatagtgaaactatatatctatatatacattgttttaaatatataattaacatttgtgtgttttttttttcttgtaggaggatttatattatcctcatccgtggttacaagatctactttgggatagtttatatatatgtactgagccttttcttactcgttggcccttaaacaaatttattagagacaaagctctaaaagtaacaatggagcatattcattatgaagatgagaatagtcgatacattacaattggatgcgtagaaaaggttgtttaaaataataatgaaaaaaaaattaagaaattatatattttccttacaatacaaaatatgtgtattattatattgttgtttaattattatatgtggattaacaggtgctatgtatgcttgcttgt

SEQ ID NO: 209617 - DNA, 893 bp, Cannabis indica
gcccagaagctatgaagaggcaagtagatagaagtctaaatggcttcaggcgatggattaggagatggattcactccgaaagaacaagacttgagtagttgtgtcgaagctagagaacaagaagattgtggagtgcaaatagattctcaaggtgaaagagggaatcaatgagaatgaaccagtgaggttcaaagccaggttagtggctaagggctttactcgggtggaaggaatagactatactcaaacattctcacctgtggtaaaatacaagacaataaggttgatgttgtccttggcagctcaaatggagttcaaagttgaacaacttgatgttaagattgtgtttctaaatggattcctggatgaagagatttacatgaagtaaccacttggggttcatgtggaagggaaatgagttgagttagtgtgcaagctaaatagatcttttatggtttgaaatagtccccaatgtaatggaataagagattcgatactcatatgcaacaaattaggttcaaacgatccgcatacaatcactggttatacttcaagaatctggagcaatctacagccgtgttcttattgctctatgtggatgatatattcatcatgagcaaagataaatttgtgatcaaaagtatcaaagacaagctcaaaagagaatttgagatgaaagagtttggaccagttaaaaagatacttggtatcgaagtttcacagaaccagaaagaagggattattaacttaaaacagtccgggtacatcaataaagttattcagaagtttaacatggaagatgcaaagagtacatccgttctgttagagggtcagtttgttttgtcaaaggaacaatgtcctaatagtacgaaaaagaaagaagagatgaaaga

SEQ ID NO: 209618 - DNA, 767 bp, Cannabis indica
gattgatgtcgtttatcatgttgtgaagtttttgttgatgagtttgtttataacatggtaatctcttcataatgtttggatacgaattgtgttatatataatttttcttttcctaacatatatatttttacgtaaaaaaatatatatatatttgaaatttaaaatccacatcattcagatttttaattttatttaataaataacattttaaaacaattatataattgatccgtgctaatataatatattatatttaaattttgaatatgaattaatcaaatatttaaatgaccttaaaattcggataatcaccttaaatatagaggtttgttaaaaaaaaatatgttaacagagaaaagcataaattgattcatgtaaattaaaaaaaacctaattataaattaaaataaattattaaaagagtaaggttacaactccaaccatttttttttacaaaagaaaaaaaaaaaaaaaactccaaccattttttttacaaaaccaaaaatatcctaatagtcttttgaaaagtaaaagaatgtgactaattataactaattatttatgttgtgattaaaaagtttgtgactaaagatattagttacaaaaattataatttgttgtgactaaatgtatgtttagtctatatttgttgtgactaaaactaaattagtagcaacttgtatttaaatattgtgttttagtcacaagtaatatttgttatgattaaaaatgatatttaatcaccaaaaaaaattatgttgtgatta

SEQ ID NO: 209619 - DNA, 701 bp, Cannabis indica
tctagtgtatacctggggggtaggccttgtcacgagaacccctatggtactttgggcaagttgtctagcattgatcaggacttgcttggtacttgttggatcatgcccgacattgagtaagcctttgggtctaaaccctgctgatggatttgctcgaggtgaccaggcaaggttggctgggttgtcaccagttggtggagcttggacattaggatccacatccatgggatcttgaggctctatggacacactcatccttgtcaggaccatggtgattaccaggtgaaaaagagacgagatcttcctgcgaagtttgaagctctcaatgaaagcacaaaaaatattaactggaaaaatagccaactgactcggagtcaaataatcactgattaatcacgaataaggagttagtaatagaaaataaataagaacacacaacaattatagaggttcgacccccttgtatgtgggtaatgacctactgcccttttatttgtattgattgtgagataataccgtgcatatcactaaggaagacagagtgaattctagctacatctctcaaagtgtttacaaagaatatcttttagcaaagtgcccttagatgcgtgagtatcattttaggtctcttccccttgtgaatgcctctactatttatagggggaaggttgttataattggctccgtaaaaagagtgatta

SEQ ID NO: 209620 - DNA, 637 bp, Cannabis indica
agctcaggctcatctcctccggctaagaagtcttgtggcggtgagacaacaccgtccagagagaaggcatcggccgaagccattaattatctttccgaggagctaaccattgtggacccttctgccttgaaagctgttaagtccaaagtctctccaggaggaagctcggatagtcccaaatagttgaagggcagatccgagctggccaaaagtggatctgagtagattcgggctcctaccccacctccatcattgcatccaaagactaagagaggcaaggagatgctcacccactacatgaatcggtcggtccctgaggtgaatgaacagctagccggagctgacaacgagccttccatggagttgttgatgggaggagtcctgaaggagtttacgagggtgagtctttcctgacagtttcctttaatccttctttacttggctcagattctaacattttttctctgtggagactagtctgaagatggcttacacttattctcaagctaagtctgttgcttccaagaacattgccatgtccaacaccgtgagggcagaagtggacttggccaggaaagacgctgatgaagccacgcttcatttcgaagccgtccgaatggaactgggtaaagtcaac

SEQ ID NO: 209621 - DNA, 679 bp, Cannabis indica
gtgtaaggtcttcacaataatagtaattttttacatttcatgtttagtatgaggtgttttttgttttgaatcctgaaaagttatttcataagactatgtttggaagttaaacaatttttataagaaagaaaaaaaagtaagaaaaatattggaaaaaaaatgtggagaacaaaaaaataaattaattttttaagtttgaaataaaaaaatttgttgaatcaagtgttattctatacaatttttctttctatacaaaatattattattattattattattttataatttctctattttttttcttttctcattaaaattcaacttttgaacatagcttagcacatggccttgctaaccaaatggttagttctctctttgaaacgcattataatgcctgagatatttctcttgttaagcatatgttcaaccaacgagatgcagagttgatcattggcattcccttaagctcttcatctgtcgaagactgctggtcttggactggcgaaagatctggtgagttctctgtcaaaagtacttataatatgctgcagaatcaaaaacatggtcgccacgatgcaaataattcagggttctggcataagctatgtcatcttaaaataccacccaaggtaaagagtttcatgtggagaactgtaacaaatactctacctacttgcct

SEQ ID NO: 209622 - DNA, 667 bp, Cannabis indica
cgagctatgttgattgtccaaggaaaaaccatgtcaccaattatgcaatttggcctcaaattaagctcttcaatccttttttctgctggttgttgcatcatagaggctgcttgaaagagttttgatgcccaatgtagagacggtagcttgtccaaattgtcacatccttcgggtaatcctacttcttttgaaggaaaatctaatatgattagatcaatactaagcccggtttcaacagcacgagcaagaattctttcgaaacaggctgcgttacctggtgtggtgactacggtgatcttggcaccacgtttggccaacatcctggctatgtctatcattggaatcatgtggccttgtgccatgaaaggaatcatgagaaagtggagctgtttttgatgagaatccattgaaatttcagaggaaaagaaaaagaaaacagattaattatagtgctatataattaatgttatttatatttctgggtatggggcttgttgttagtcttgctatatatatactctcaactcaagcaaacgtgcgacgtcgtgccttatatatatatatatattgtgcttattatattaatggaaaattttataatacataaaaaaattcactaatacttttatttgtttttgtattttaaataatattttaatctaatttt

SEQ ID NO: 209623 - DNA, 542 bp, Cannabis indica
cttgttgttagtcttgctatatatatactctcaactcaagacaaacgtgcgacgtcgtgccttatatatatatatatattgtgcttattatattaataggtaaaattttataatacaaaaaaaaattcactaatactttatttgttttgtattttaaataatattttaatcaaatttttttaataaacatgtgtattataattatttaagatattctaataaaatttaaaaaaatttgaaaaaatttaacgtgacaaaaaaaatagtgttagaaatagtttactgcatgcatatgcattattactttattttatttgagtataaaatattgttttaatactgttttcgatattatatattatcctgaatttttaaaaaatttatcagatatagtaaaagattataacttacacaaaaataaaaaggttagacaaaatttttgatagatcctaaaataagtaaagactgcattaataaatttctttgaagtcaatgcattataacctatattataatatcttttatagtcatatatgctgtca

SEQ ID NO: 209624 - DNA, 849 bp, Cannabis indica
agttactcatgatcagtgattagcaacttataatgttccctctattgtacattgtatacttctttgtaattctcagtgtaaagtgtattagtagtcaaggtggagaattgttaatttgagtatgcctactaatacccttccttgtatctaggacactaactgtcataactgttttgacagttatgttagttagtgtcatacctgtttcctatgtgtataaatagccaattggctttctagtttagatatcacgttgtaaaacattaagtatcaataagacatgttattttctcaattctagtcttagtgcactcgagttccttaaacataggttcagatgttgaacctatgagtgttctggtgtgaagaaactcacacctgctggtgtgatcgaattggtacttgctcaacagatgttgaaaaccattaaaaatgcgacatatcaattaataagtatgaattttgtaaaatggagaaacattatattattttatattttgcattttcaaaatttttttgagattttctttcttcttttttaaattgttctacttttcatggtttaaaaaagacaattttatcttttaattttcattacaattcatcttcctcttcattagtattctatcttcttttttattttctctctttcgcttttcttcaaatttgacatgcgaaaatcgttttaagttaagtagcaattctctgtttctactgtaaaaaataattataaacccataaattattctcttgtttagaaatcatattcaacataaaatttaggaaaaaaaaaattacatatcaaatcagtgttaacctaactcataatttacaactatttaatgtatg

SEQ ID NO: 209625 - DNA, 1650 bp, Cannabis indica
agtgcagaaagaaaaagtacaaacgaggaaggagaaaaaggggacccaagtgaaagaaaaagagaaggacaaaagccttatttgtttgcatctcttttcccttttcttttatatatttcttttcttttctttcttgtcttaaatactacaaacttgataatttgtaaaaaaggcaacagccatggatgacaaacttttagtttggattttattttttgatttgaatatgagctaaactttttgaggcttgaatggctatgaactcctatatatgttgggtatgattaatttttaagcatattttagcatctttgcctttgttcattcaagtgagcttgtcattttatttgattgttatttcttggccatgagtaacaatttgttaagctagatagatctagtagttaaacttggatggagcaagagaaattctagatttatgtttttctttgtaagtggaataggaatatttaatttaccttgcataacttaagaattgatgtttaaatagtattctgcaatctagtttaatataggaatatattgagctaagtggtagaacttaatttgtgagttttggaaaattctcataagcatagaagaatttctgttatctctgtgtgaaaatactgaagtaatgctgaagctatgctgtaacaactgggaaaaacctgacaatgggggattagctattcaagccacttttcaccatactacatttcttgcaagcaattttctagcaatagtagcattaattttagcaagtttaattacaatcattttaattttaaatcattgctcaaccattatcatatttttttctttgctttaagttgtaattagtttgttttacattgtattttgtttgcaattcctatggagacaatcttatttatcactctattacttatttgactatgtgcacttgcatatacataattttcacaacaggatagttttgacagtttgggggctaggtaggccctttatcatatctcttatttgatccagttgtgcttgcacaaaaggatttgatgcagtaggaacttgaccgagtggcctttttcttggctgggctgaagcctttggttggccagaccttggctgaccctaccctgggtgagggtatgtccatgtcggccagcccttgattaggtaactagctttggcaagccagctctgaattaggtaactggccatggttggccatccctaatctaggtaattggctatggctggccagctctatgctaggtagtgtctagtcgattgttctcccctaattggccggtgtggcctgtgtgttgatagggtgttgatcacatcaattacttaggtttggtggatccaattttctgaagtgattatttggtggtggaataaagttacttcaattctcactccttgagttgatgtcatgggtgtttccacttgttttgggcctagtttataaaaaataggccatagaacgatttactctcaaatgttttagagaggaatatcattatgttagtcagctagaggctggcctaatggtgttattactgagacaggaatacctaaccgaccccccataccacctggtgctaaggactggctatttctgccataagatctatttggtaagatttgttcatcctcggtaggggg

SEQ ID NO: 209626 - DNA, 763 bp, Cannabis indica
tgcatcccgcaggatgtgactctggaatcaactatctcattagcacccctgtcgatttccatatgcatgcaatgtccgctcaaccacccaactgattcacacttgcatcacgcccttctggctcccacaatgtactaagttccaatgatgcagccctctggccttcatgcaaacactagcacacttctcgaccttcgcaggtcaacatgactactaagtctcactggcacggccctctggcctccacacaaactctagcgccatctcaacacttgtgctcggtcttctcagccctgctggcttccttgatgcctttattccacaactccgcatctctgtcgatgtctttgtgtgacttacgccctctggcggttcaacaagccaacacattcaactcaactgcctcggcgcttccatatggatcaaatacaactcgcatgcgaacacctccaagtacaaccatcctctgacgattgcggcctcttgcttgccttggtctccatatgcgcccctcttgacacacacatgtagcaactgaatcatcccatgtctgtcccaatttgaaccatctcggttatcaactctcgacctctgtcgtgactagcaagaatctgacggaccctgcactacttccacactcctgccaacaagctttcttttcaacaaaagcgcctcctgcagcttacgatgtcattccggcacacttggccgagtgtaccaagcatacagaatggactattccaacgagtttcaaacattttgt

SEQ ID NO: 209627 - DNA, 560 bp, Cannabis indica
cttcaatctcattggcttgctgtcaagcgcatcctacgatatgttgctggaacaatacactatggcttacacatgcaaaagtctccaagttttgaagtcaaggccttctgtgatgcggattgggccactgacattgatgatcgtagatccacatctggctttgccatattttttgggtcaaatttaattgcctggaaatcatagaaacaacatacaatttctcgctcaagtacggaggctgaatatcgaagccttgccaatgttgtggctgagttagcttggcttcaatccttgttcttcgaattacacattgagctgccccaacctcctgttgtttggtgcgataatctcagtacagtcctgctcactgcgaacccggttcttcatgctcgtacaaaacacattgagctggacttgtacttcgtgcgagaaaaagttcagcaacacaaagttgttgtcaaacatgttcatgctattgatcagcttgcagatggttttaccaaggcaatttcaagtcaacacttccctcaatttcggtccaaactcaccattgtcgatag

SEQ ID NO: 209628 - DNA, 850 bp, Cannabis indica
ctctcatctatttcatacctatagaaattgcaaagaaataaataactttgtttatttcattaattcttttacactaggattaaatgtaaacaatgcataacatctaatctcaagacccatatgaaaaattaagaactgagatgtttgaaactttgaagggccagagcaggtccatttccatgaacttcaagggcatgcaaatcactaaaaattaatacttcctgaaaaaacaaagtgcaagagagactcgaaaagagactatagcaaatggcaggtactcgagagggactcaaaacccagaacttgtgggtagcaaatcatatgcatgaccgtttgagctatccaggtacaaagattaagactactgaaaaaggcatcacaagttcactagacccaatgaatatatgcaatctttactaatgatggttactaaaaccaacttaactaaagcaaacaaacatacaaaaattatatggagaagaactgaacttacttttttaagatactctgtaggtcgcattcgagtttccaaatatcattcacattcaaatatttttttatgttcaatatacccaacttggataaaagccgagcaaacattttcactgcgttaggcttctccattacattttctttatcagaaatgctagcacccagcaagtcatatacatctgcaggcttatcaatctcgtgtccctaatggtattgaaaagaacaaacatttcaaattatatcattacatgttatgaaaataaattataatagaaaataaatggcaacattgaaactctattgacatattaagattatttgtgaataaaaattgagtttgaaagttaaaaaaaaaaaa

SEQ ID NO: 209629 - DNA, 706 bp, Cannabis indica
gtaacttctgcctagtatatatagatatataatgaatagaaagggtaaggtttgggaatattaattaatattaatattattttattatagatattatttaaggttagatattttaaaacttttttaaaaatagaagaaaaattagaaaggaaaaaattgttggatagatttagaaggattttggttttatagatatttttagggttaaatattttagttattttagaaaataaaataaaaataaaacaaataaataaataagttcagaaaatagaaaaaaaaaaaaaatacaaaattgagaaatctataatgaaattaagaaatctaaaatatctcattaaacaatgtcaaatttagagaagaaaaacaaataagagatataatcaaacgaaaaactaaaaactttgtaaaaactcgggaatattaagtgaatataactatttttttaataaaatttctttgtttggtttttagatacttgaacaagaataatacgattgcaaaatttgcttagataggattagctgcaccaggaaaagttgggtcgtggcaatgggaaaataaggtatttaattttgtttatttattattaatttgaatatgaaaatgacaatagataatcgttatttttttttttttgaaaaaaccgaacccttattaaacaagaaaatacaaatacaaaaaaaatcaggttacaaaggaaggt

SEQ ID NO: 209630 - DNA, 556 bp, Cannabis indica
taatatatcaaatatatattaatctgttcatgcaattttttttctaatttgttattttttgtttgtcaattttaatttgttgtgagacaaataaaataataataacttattttattttgttgttagttatgtaaaaataatttaaattttaataaatattaaatagtttaatattaaaaaagtaacaaattcagaataattgatccaatctgcactattgcggattagattggatttgagcttttgtacggattagattggatccaaaatatgaaaatcgcagttagtgcagatcgaatgtattatgaacaaaatagtacaaattgaattaaatgaacactcctaaacgtgaaagagaggtttcggactttacaaataatactgagaaaataaaagaaagagataggatttagaaaaaaaaaaaaagagagaagagatagaggagtgaaagtaggggtggaaattcttggtaatgggtcatgttcgtgtcgtgttgaaggttaggtattacaagtaaatgtcaaacttaaacatgatctatttattagtcgtgttg

SEQ ID NO: 209631 - DNA, 582 bp, Cannabis indica
tgattatgaatggaagccaactgcttgtaagcattgtaaacggatgggacatgaaacaactgaatgcaggaaaaaagaaggaaagcaacccgaatggattgttaagaaggacaatagaaagccgactgataggaagaatcaaaatgatggtgcataggaagatttccagccagttgtgaaggggattaaaactaaagagaaagttcaatcaagcacaactgctgtggctaatcgataccaggttttgacagcacaagaacaacatggagatgaacctgttcaagcagaagaaaggcagagtaacacaggagggggggaggacctccttctcctaatggataggatcttaagttggaatgtccgagggattaactcccaacaaaaacaaagagaagttaggcaatttattgctcatcataatgttgggttggttggtctcctcgagacaagggttaaggcctccaagttgggggctttataccaacaaatgtttcaaggatggtgttttaccacaaatattgcgtggcacaagggaggaagaataaatgttgcttggaacccgcttcaattccaagttaacat

SEQ ID NO: 209632 - DNA, 659 bp, Cannabis indica
gaaacccaggtggttgcttcataaagacctcttcatccaaaaatctattcaaaataggactcttaacattaagttgttcaacttcaaactccagatgtgttgccaaggacatcaccagccttatcatcatgtattttaccacacgtgagaagatttatgtgtagttaatacattccatctgagtaaaacccttagccactaacctgactttgaatctcactggttcattctcattgattctctctttcaccttgagaatccatttgcactctacaatcttattattctcaaacttcggcataactacccaagtcttattctttcgtaaagaattcatctcctcatcaatggtgttgagccatttagacttatttccacctaaaatttcctcttcatagcttttgggctcttcaattttagtctattgaactatcgccagtgcaaatgctatcatgtctacttctgtgaaccttactataggttggatctctctttgggttctatcatgagccaactaataacctttcagacctatctagctgaatccttccggcacctctgtttggtcttcattatcttgttcttttggctccacaatagcttcaggctgtgcatagtcttccggttccacactacctttcacttgtgaaccttcttcc

SEQ ID NO: 209633 - DNA, 500 bp, Cannabis indica
tattatattatatttttttagatttgtattatattagctagtagtatttaatacaatattatatttagtattgaattgtattaattaataataagttgtgtaaaattatactatttttaccatagactcccaacctcgacctctcaactgagatcggagtctgagattcgagtctaggactaagtccagggtttggtttgggatcgggtttgatactaggttttgggttcgggcttggcttgggtcggagttgggggcaggtccagatatatgaggtcaggtctagggtctagagtttcggcctagtttcagggcctagggtccgagttcaagtccaatttgactctgagggtcagggtccgagtctgagaccaggacacggtttgaggtcgaggttaggatccggggtatggttcgagatcaaggttcgggacctgattcgaatctggggtaggggtgggtccccaatcttgaactattactaaatattataatacatg

SEQ ID NO: 209634 - DNA, 534 bp, Cannabis indica
agaccttaacctgaatccagacccagatccagacctgaatcacaaacctgaacccaaacgtggtctgacactaggaaccggagctgggtttgggtcaagggtcgaggtataggtctggatccgagctcgggtccgggatccggggtctgaggttcgagtttgggtccatgggtcccggtttgggtctgaggttcgagtctggaacaagttctgggtcatagtccacgccgtggttgggattggttggggagtccatttcaacacaatactatacaatataattcattaccatttaccgtataccaaacgagattatcaccatctagaacatcataatttccacactactagtttttttttttttccgcttaactcacactacttgtttaattattatacaaaaatgactttttgtggcccttaaattaataattcatctccatgctgcatcaatatacgagtttactaactaattaatatacagatcaatctaactgatctgtaatggggatatatctaacaactttgatcagc

SEQ ID NO: 209635 - DNA, 1298 bp, Cannabis indica
tatactcacgagtatgtgagtcaatgagttgcagactcttaaacaatttcatttatctactcttttccagcgacttgtctcttcatattctatacttgtttttggtttatcctttactctctgtgtaatgaccacatagttaaatcatgtgtattagtagataattacggaatttaattaatattttatgattatgtgcttcttattagaaattagggcttattgtcagaattaggttttatgaaaaatattttcttaattatggggatatatttgaattttaagtgtattacatgtgttacatataaaaatttatgcttttcatattttatgcttgataaaagtgtaatgtgacgttttggctattagagtcacttagatatagtgaagtatcttagaattagcggggcaagatagttagacatttaattttttttttatataattttgtatgttgtaattatttaggaccacatgtaaatttttttaaaaaatgtgaacggtttacagtgtcaaaaataagattcaaaccaatacttaccacatttataagaaaaaatagtcccgagtataacaaaatatttaaattttattcttacaaatatattaatatttaaattttattttttaatattgtaaattattaagaattttttaaaaatttataaataatctaaataactataaaatacataattattacaagaattaattaaacaaatatcatatatactaaaacaaatacgattgtaacgaaacctcttttagaagtgtaatatagatatttctcaaaagaaaaatattaagtattattgtgctgacatattgccaaaaaaaataaaaatatgttagatatatttatttgtgctgaataacatgatttaaaatttattaaatacaattacatccttttaaaaagtgataaatatgtatatttaaaagagtaatattataatttaattaattaattttttctcaatttcacatctaatatcaaataccagcatttctcttcctctccatcttctctaagctttccatctatctattttcttttttcttttttttttttttagaaaaaagaatataaatgaaaactttcattaataggcaaatagtacataatactattatgataaaatatcatttatctgaatcaacaaaaatagacttatcaaattgtttacaaaaataataataaaaatcctaataacactttcaactaaatattttacttaagtggcatttaattgagaggaatgaaaacataagaaataaaaatagagatagagaatagg

SEQ ID NO: 209636 - DNA, 1271 bp, Cannabis indica
ttcagggtgggttgggaattagaagattcgaagacttaaacagagccttattgtccaagcttgcttggagtgttgctcgaggagacaagaaaccttgggttacttgcctgttaaagaagtattgtaaacatgagaacttctgggcagtcgaaccaaagcagagtgattcgtactgctggaggaacattctggaagttcgaaatatcattctcaaaggatcgttaactatagctgcggatggtaagacgacagatgcatggagacaacagtggatcccttggttggagtatgatgagtttcgagatttaatggatcaattgaggagtcaaaggtacactttcaaaactctagccgatctttccaatgataacttttggaatgaagagataattgttcagatttttggggaaactatgggaaagagaatattggaaattcctagattacaatcttcacaccaggaccagctcgtttggaaggaaaacgttaatggagccttctcagtcaagagtgcttatggagtagatcaaggatatcggtggaacccaaagagagacttgtggaaaatgatttggaaaagtgagattcacccaagactctcggtatccctgtggcgcttcctcaatgaggcaatcccaactcgtaataagctgccttttgcaggggataagcagtgccttctatgcggctttcaacaggaaagttgtctccatatttttagagagtgttgtgtctcaagagctatttggctcactggaaatttccctttgatgattgataatttcccgggtgactcgatgatggaattcgtggaacaagtgctactagtcatcccaagtaacattcggttgatgtttgtggtatatatggcctgcgtttttgaggaagtttggaggctcagaaatggtgtgttatatcaaggaggcctgccaaatttatctttgggagccataaatatcaggaaaaaatatgaggaattcaacaggcacaatgaagttgaagaagtagggatcgatgatccctcaaaacaagtttgcaaggccagtaaagattttgatgtggtgttagttacggacgccgcttggtcagaagggactgctggcctggctgcagttatgatcaacattgaagatggatcttggaagtacaaggtggagacgactgatgcagggtcagctcttgaagctgaaacaaggctatttggatggctttagcgtgggctaagcaaggattgattcagaattctggtctgctctgattgttatcggcag

SEQ ID NO: 209637 - DNA, 651 bp, Cannabis indica
aaataaaaagaagatattaaaggcttagaagcgtggaacagtgatgttaagcaatgattttgtctgatcagggacagcacaatgctcagctttccaaggccacaccacaacttaaaatcctttaaacccctttctatatattctaaccaatgtgcatggtcacaatatatattcatgtagatgaaaaaagaaagaaaaaaaaaaccatgatttagcaaaatgggagttgtttgaatttatttctaggtagctcatgagtctgagctggtcctaatttctatatggccgcatgcttgggcttttttggggtgttagggcatgatatatgtcattgggccaatttaatgggccatatctctctctctctctctagctaatacatgatgatggtgttgcatgcatatatatgataatgatgatgatgatgatgatgttagttggagttggaccaagtaacatttaaagggtaattaatggtactaataggaatctgtaatgttgttatggagagtacaccataatgttgatgatcataacctgttactcctactagtactactatgtgtggggtcaaggcattataaccccatcgaagacaacactctacaccctttaaattatcttcattaattaattagtaatatacttaat

SEQ ID NO: 209638 - DNA, 706 bp, Cannabis indica
tttaagtcgggtccgaggctgggtttgagatcgggattgggggcgggtccaagtctggggccaggtccaggttcgattttcaaagtctaagttggagttggagtccaaaatattgattaaaaaaactgcttaaaaaatttttaaaagttttttttttgttttgtttttagcatttagattcttaattaaaaaattaaaaagtaaaaataattttatagaacatgattttggaaaatattttcacctttttaattttaaaaacaaaaatctaattaaaaaattattaccaaacgcactcaaaaattttcctttaaaatataaggattacataatcatgccatttttgttaggttcatttttttttccgttaaaaattaatacttttactctatgaactttgaccaatactaaattttgccccattttatttaaaaaaattaattgaaaaactataattttctattaattttaaaaaattaaaaaaatattaaaaacctaatgaaagtattaaattaataaaaaaatattaaatgtacttaaaaaacttaaattattcctaaaaatataatttcaaattttattttatttataaacatatatcttaaaaatcaaattaaaattattataaatccaataaataatttaaacaaagattttgtgaagagaaaatcaaacttttttacatttacaaactcatatcttaaaa

SEQ ID NO: 209639 - DNA, 705 bp, Cannabis indica
tctgcatctcaccaggcgaaaacatctagggttgctctcagaaattttatcaattccgattttactttgagcaacaaaccctttccaatttctagcttgctggctgggatagctggatcgatctcgatctcttctaattcttccataggtccaacattggtggttgggtccccaagtcgaggatctacatcttcatcctcgtcttgggaagtttcctacttgggaatatttattcccttgtttgggctttggtccatccttcggtctgggttggacctctcctcacggatgggcttttgcccatactaaagtttcatgataaggacattgcagtcgcaggaggtggtcttgcaacttttatagtttttgggtgtcaagtggtccatggggaaagagtagtggctccaacgtacctcttgtcaggacaccaaagcttgcaggcgagatgcctccactactcgtgctaaacccgtgctcagatgttgcaggtgatgttgttgtaccttgatatgtactcatccgcgtgcttgccttgcccttttgattctttgtctaacaactcacgaagtgttgctcatttgattgtgggacgttatgagttattgcaataatcaagtgtagggcatgcacgcccacttgcaagcatgttgagtggtcgtcgtagcatccatgtcgagctcctaccttgtggttgagttcccttgt

SEQ ID NO: 209640 - DNA, 807 bp, Cannabis indica
ttctagttccatcttgtacttggtgcggtacatggaaagggattaaactgtgctcaagttgcgaaaaggcaatttattgttcggagaaacatagggtaaagagctctataatttcttgacatttcctttcattgaacaagaaagaatatttgtactcttgtgtgtaaaacaagatcttttctggatacacacaggtcaagcattctcagttaggccatgattatgattgtcaacgtgtgcgtattgcttctaattcaattgaaagtagtcttggtaacagtggaaccatctccagtgaattacaagaaggttggtgtatagatatagtattgagatgtatttaaaataaatgggttattcaagatttgtctcctgaactatgacttatatattattgtgttctctgaatttttcagcacgttaaaaatagtccttgaactattcacagtgttgttaagtgtgattcttccgtcaaattttgtcacatgtggcaaataaaatgatgatgtgatgtttagattattgtcatgtcagctcaaatgtataatttaaaataaaaataataataaaatatggattttgaaaaaaatattaaggtaaaaatccattaatgattaaactaaattgaaaactcttatattattaatggatttttagcttaataattttttcaaaatacatattttaattatttttattttaaattacactagtgctgatgtggtagtggtaataatataaatattcacgtcattattctgtttgccacgtgtctaaaaacttaataaaatgaccactttacaatat

SEQ ID NO: 209641 - DNA, 688 bp, Cannabis indica
cagtttcacatatacttggctcggtcagcatctttaccggaaccaaatttagttcatctaggtcattctgcgaggccaactttgctaaggcatcagcgttggagttttgttctctcggaatttgttcgattttaaaggaatcgaatctttctaagttcttccgaactttctctaaatactttgccatttttaagcctttggcctggtattccccgaggacctagttcacaatcagttgccaatcactatgacaaatgagatttttgactttcaaggcctctgatatctttaagccggtgatcaaggcttcatattcaacctccttattggatgcgtcaaattggaacctcaaagcatagttaaacttaaagccttctggtgatattaatattacccctgcacctgaaccctgttcgttgggtgcaccatcgacgaagaacttccaggtttctgcatctcgctgatcaggtgggatttcttctggagttataccttttatcaagaagtcagctaaagcttggtccttgatggatgttcgaggatggtatgttatgtcaaactaccccaattcaatcgaccattttatcaatcttcaaaagcatctggttttgataaaacttgtctcaagggttgatcggttaacacttttatgggtgagcctgaatgtatggccgtagcttgcgagacg

SEQ ID NO: 209642 - DNA, 1117 bp, Cannabis indica
tcccgattacacatcgaacacaaaccgctcacatgcaccctcttagaccgcagagatgcaagggtagggagacaattagtaagaccccgccaaagaaaattcttcaccttaggtggcaatttcaagttccaaaacatcctccaaaaacctaaattgtcttgagtattccacctaccattgctgacttgcaaggcgcgataagcacttttgacagaataatctctatgagtctccaacatccaataccaatcatcctcaaccgaagacggagacaacggaatgcaacggatcaagtcaatatccctttgaacaaataaatcatgaagaacttcctcatcccactcaagagagcccacttttaatagattattgaccttacagtcatggagagccacatgcgaagaggtaacatatggatgttccttgcacggaagccatggttgattaaggactggtatagtcaacccggctccaacacgccatctcgcacccaacctaaccacaacttttgcctctagaatactccaccacacgtagctaggattaacacctaattcagcatccagaaacgaggaatgggggtaatacctggctttaaacaaccgagccactaaggaactattattcgtcaaaagcctccaaccttgcttacctaacatagctaaattaaagtccctgagatttcgaaaacccaaccccccttgatgcttatggaaacacatctgatcccaactcttctaatgaatacctaggccttgtgaagacttcgtatgccaccaatatctacccataagtcgatccacatccttacaaatctccaacgggatcaagaaaacactcatagcataagtcggtaaggattgaatcaccgatttcaaaagcacttccttacccgctctagacaggagtttactatcacacttgtgaattattttccgcaccttttcttttagaaagccaaaagtggcagtcttatttcttcccaccatactaggcagccccagatacaaactatgatcatctgtcgccctcatatgaagcgtagacaaaatagaatcacgagtcccaacatcagtaatagagctgaagaaaacaaggttcaccttctggcccaacg

SEQ ID NO: 209643 - DNA, 757 bp, Cannabis indica
atttgtaaattctttgctgttgtaggtttcccttctttatcccgagctccagtggaatgcaacattctttgatgagccggtgatttttttgatttctctttctccattttctcttaagaaaaaaaaatgcctgagtagctttatttttatccaccctatctattattggcttgtctgatatgatgaaaggaaagtattagtcctcctaatgcaataagtatttgttttctgaaagactaaacaaacaaataaaaaaaatcatggtaactgcactcttgtaggataataacttagtagatgatactttggtcttttgggttaatgatgcatttcttacatgaagctcctttttttagcatgcaggtcatgcttcttggttttgttctcctaggacgttctcttgaagaaagagctaggatcaaagcatcaagtgatatgaacgagcttctagtaagtcaatcttttccatatcagtgattcaaacatagtttgcagtaacagattactcaacgatttgtttgcttgttctctgctatttttgcagtcactaatatccacccagtcaaggcttgtaattacttcttcaggaagtgaatcctccaccaaaaatgtactttgctctgattcaatttgtgttgaagtcccaactgatgatgttcgagttggagactcggtattggttttgcctggggaaaccattcctgtagatgtaagaaatttaagtcgtgcactttctactttttgtttttaacatttt

SEQ ID NO: 209644 - DNA, 929 bp, Cannabis indica
tttactaacttttacaactcttctacaaatgagatttatcaaatattgtattggtataggactctaacaattttacaaaggaagcttaccaaatttctaccaagaatatagtatggttgcatgatcgtcttgaaaaatgggtgttcagatgtgaaaccattagtcctctgaaaggcaacaatcttctcactgtgagtcaatgattttcatagttttacgaatcccatatgtcatcttttttgtgggataagtagcaaatctatctccattgctcttagaaggtgaatcaagttttcctgtgcaatatgaaacaaatataatataatataatatcataacataaattgttttatttagatactcaataaattgtaataagagtggctgcttcacaagccttctagtctagaattctctgagctccttcattgaatcatttaattctcaactacttttgtactataatgaatctacaactttcaaacaagatagtttgcttgagttttacctggaggatttgttttcattctcttaaaaggctgagaacatgaagattttactcctgttttggggcaagaagagatatcatacaagatttcaaagctgtcaacattatcaataacttccctcttgggaactcggagttcgccattgtcaatgttagacttaaaaaaattaacaggggcagggggataatctatttctacattatttgtaccaaatatgataacataaatctcagaattcccatcatatctaaaagttagcatatagcctctttctatggaataatgcttcacaaattctggccaaccttcttctaaccaataattttccttataattttctaacttcattttccatttggaaccacatggaagcttaacaaacactgattcagtaaaagcttctccacattttttcacaaa

SEQ ID NO: 209645 - DNA, 574 bp, Cannabis indica
ttgttttgagtagcaggtccatttacctttgcatggtttcgtggcctagtacatgagagtgatgaggagaatttggtggaggattcttgttagttctcttggtattctaaggtcgctccacattaggtggaaggcccattggttggcgcccatgagtttgagtcctttcagactcttgctcgaagtttgcttccttctagggagtctcaacacctggtgtttgcttagtatttgcacggttaccaagtgtggtagtagtgttccgtgcattaaggttttctccttgagcactagtccccacttggccagttggccgatggggaatctctcttaccatctcaaaaagacccatacaggggatagtcctgtgattagagagataggcttctctgattcgttgacacaagttatctctttgctattcctgctcaactcgttagctcttaatgtttcgttagttctccacaaaccaattttaaaattgttcatgttgcttgtcgagagagtcttgcagttattattgtaggtcagtcataatttggttaagttgttcaacccaaggatcagcctcctc

SEQ ID NO: 209646 - DNA, 704 bp, Cannabis indica
aacaagatcgaattacagataacttcaaccaggcattcttggactgggatcaacaagatcaactcttgtattcttggctgctgtcttctatgacagaaccaattcttactcgagtcattagctgtgaaacatctgcaagattatggtcagttctgtccacatactttgcttcacaaacggaggcaaaaatcgatcaattcaccactgaacttccgtatctcaagaaaggtgctcatactctcaatgagtattttttaaaggtgcgttttctaatcgacaaactcaattctgttggacataaaacttcaccaaaagaacatatagctgctatttttcgtggtttgccttctccagattacgacacatttgtcatctccgtaaattcaagagctgaaccacttgatgttactgcccttgaagcccttcttctagctcaaaaacatagaatcgaaagaaagaatagagatcttgattcagcttctgtcaacatcgcaaactccaattttcgatctcgaagcaactttggacaatcaggaaataatcactggaattctggacagtcaggaaataattagtggaatccttatgcaaacaatcgatcaaatggaaactcaaatgtccctccttatagaccaccaataccaggagggagaggcaataccttcaattcttttggttctgcaggaaacaccaataattcgaac

SEQ ID NO: 209647 - DNA, 1415 bp, Cannabis indica
atactctcacattcaatctttttgaaattaataataaatcaatttctatataaatctccaccaatgttttacagcaaaattaaattcttcaatatcaatcgttttcattacattttttgcatgaattattattattattattattattattattattattattattattattattattattataaattgttttttcacacagctacacaagaagaagcagccacagcttatgacatggcagcaattgagtaccgtggacttaacgccgttacaaattttgatttaagccgttacataaagtggttacgtccaacaactcaagataacgtccctaacaatattttccaaccaaaccctaatgaagacctaataagtaatccaaactctaaccctaatgaaggactagggttaccgagctcaagtagtgttgatgatttggttgcggtgggggcgccgacatgtaatagtggttgcgcgggggcgccttcgtcggccttagggcttttacttcaatccactaagttcaaagaaatgcttgagagaactaatttgggagtggattgcccatcatcaacttcgtccgagactgagccaccgcgcggccggagcttcccggaggacatacaaacatactttgattgccaagattcttgtagctatacagagggagatgacattctttttggtgacttgggaaacacgtttcctatcaatgcaccaatgtttcattgtgaagaacttgatgcatagagagaaagacaaacacaacacaactattattattattggaacgcatgatctaattataagactttgcgaaccatttttatttacattttgtgaatagagaggaaagcaattagtgatttgattattaaatgatcattgttattaatttacattgcaatatcaagacaaggtaaataaaattcaagtatatcaatttttattagcaacttttatttattaatagacacctattattgtttttaattataatttatttgtctaataatatttagtgttttattggacttcttatgtattattaattgagtattatcaatggtaaaaatacttatttttacactttaattaattaaatgtataaatatttttatatataaactgtgcataaaatcaatctaattcaattaaatatctagttggataagatcagatgttggatgggatgtttaaaaatcacactacaataaattaatttattaggggcgactaaatttggggcgacatatgtcgcctctaataatatgggtattagaggcgactttgatttgtcgcccctaatgtaatcttttttttttttttaattcttaaagctttaggggcgacatatgtcgcccctaaaacgtgtagaggcgccaaaatcaggtattaggggcgacacatgtcgc

SEQ ID NO: 209648 - DNA, 530 bp, Cannabis indica
tttaaattgtaaagaacttggaatggagacaagtttccaaggactggggagggcaacctattaatgagataggcagaagctctaacagcctcatcccaaaagtgaagtgggagagaggcatgagctagaagggtaagaccggtttcaatgaggtgcctatgtttacgttcagccactccattttgttcatgagtggttggacatgatagtctatgagagatgccatgagtgaggagagtttgttcaaatgcttgaaactctcctccccagtcagattgtagggccttgattttacaatcaaactcattttcaacttgggttttgaaattgagaaaggtggctaaagcatcagatttgtattttaaaagaaaaacccaagtatatcttgaaaaagcatcaatgaaatgaatatagtatttatatccacatgatgataacattggggatgcaccccaaagatcagaatgtattaattggagaggcttagtatactgtgtttcagaattaggaaaaggtagtttatgtatttt

SEQ ID NO: 209649 - DNA, 525 bp, Cannabis indica
cacccccactatctacttctccagaagtcatttgcagcatctttgaactagtagaaacggagggaagctttttctgtgcttcaaatatgtctgtaaaacagcacaagttatatagttaagcagtacatcagtaacataaaccaataaacaagcaaacaaaaagccactggaaaatctgctcactggtgaaaagagatgtaaattgagttaactatttgaacgtatatagtgaaacttccacaacaaagtgcttgtgtgtcattttttgtttactgcaaatttattgattgagccaataattttactcttagatctttttaaccacttaactattgaacatatatattgaaacttccagaacaaggcgagaacaaagtgttaattataatatttttttcattaaagattttgattatctatggtatatagttgcaagtattttgtttcctggtttgcttaggaaagtgacagaattttacaacacttttaagaaagttctctaaccaatgatcttataaggtaaac

SEQ ID NO: 209650 - DNA, 885 bp, Cannabis indica
taaaacaaaaagtgtattaagtacatttattacatgtgtcaaattataattagatacacaccttacagcatctactaatggtaaaaaattaagggatgcttcctaagtggatagatgaagtggcaaaatgttgagatgctataccattggagaaaagaatgatattataagaatatgtgtgaatgctatacagtagcattgatgctatcaatattttttaataaaaaattaaaactaaaatattattgttactaattaaaactaaaaaattaaataataatgtgtgagatcataattatagtatttttaaagagtgttataccattggagtgattttagaagtaagagtgccaaaaataatgtggaagagagataaaataaaatattatatttttgaatgatgtggagatttttagcatacttaaaggatgctacaattagagatgctcttaaaacattattttgaataacaaatttattttttttttaaagaataaggtaaagtacattagttgggatatacaataaaatattataaaatagtgcatgaccaagagaatttagccatattatttttcaacatgactatacaatccaatggctataaataacatgagtaatgacaaacctcaaaagtaagtgagggattaaataatttaccttaaaagatttacggtgcttgtataatgcaccccactaaaataggttgtatctgtttcgaaatctataagaattttttcatagtcgtgtacgttatagttaagacatcttgtaaaattttgaaaaattcgaaataatttacaatataaaaatcaatgttcaaaccgtttattgcacacatgtatcaaataaaaatatcacgcgtgcaacaaactctttaaaccc

SEQ ID NO: 209651 - DNA, 1194 bp, Cannabis indica
agtaatgatatatgcttaatcaatttatgcacgtttttctaaatctagtttgaaaggtattgtataatatattgggtggatattttggttgtacatatatatacttattgttttattatcattgaaatatgtcattttcgtatgacaaaatattaatgtatttgggaggtttgtgagatttactttagtgttgaaatgagtttgttgccaaatatcgattcttgtttaattttttttttaattatacaattttattaatagcaatcaattaaaataatagtctgcaatctaatcagaatatttttttccattagagacacaattaggaataaaataaaaaaaatgaatcaaataatcagctacttaattctcaaatctcaaattatttgatttgataaaaaaaaattaaaaataaaataaaattaaaaagattacatcatcacaaactttaaaacacctatattgaattccatctactgttcaaaagataaaataatagaaattgttgcagtaggttcatttaactccttcagtcgcataaaacttgttattcctaattagtaacaacgatttcattgcgagtcatcgaagaaagaataaccaacaataaaactaaattaaacaatgttatacagacaagattaaaacactcaaatcatgtccctaagacaaaactaaaacactgaaaactatgtcacataaataagaataaacgcaatagcaaaaatcaaatcacaatagcaaatacaatcccgaccaaaccgtgcctatgcccagggaaggccggagaaaaaacaacctcctgtaactataaatttaaatacgagaaatccttatttttaaattattttgtaactctaaaaaaagcttcaattttaactttgattctgttgagttttgtttcgagatactaatcttctcgctcatagtttagctaagttggctttggagtccaaagcttgggctagtataaaatagaaatctattttaagatgtgcaaataaaacgtccttccctatatatataggaagtgacatttgcatatagaatgacctttttaggtccataaatgaagaatgaaagtggttttaatttccttgtgagatatgagcaaacagcaggttgccaggtactatgtttatcaggtgtgaaaaatggagagcaattctctgatatgtcttttttttttttttt

SEQ ID NO: 209652 - DNA, 602 bp, Cannabis indica
cattaacatttataattttgataacgtacatttaatctttaaaattataaaccttaattataataacatataataaatacacagtttaagaaaaaagcccttaaaatagtacacttcatgtatttatatatatagtacactttgtttttgtcgagaaactagtacactttctgttagaatgttattttgtatgaagagcaagttattttgtcgagtgattaaaaaagaggatagtttgagaattatgcatgcatgtatatcaaataatgaagagatagtcaagatggctagctaagctagctaggaaggttaatatcaaccagctggacacctggtgagtcaacatttgttgaaattgagtgattattggatttattcaaatcaagtgaaaaacattgccatattttaattattgagtactatttagtgctttccttctcaatgatatatattgagatatatttttcacaacatggcccatttgggaagtaacaaaaatgtaaggtgaaacatgatagaaacaggattgttaaatctgggtttctgtcattcattttaactattcttatggataagttcggtataatatatatatatatata

SEQ ID NO: 209653 - DNA, 544 bp, Cannabis indica
aatacctcttttttattttcattaataaaaaattaaagcaaataaagtaaaatgggtatacaatgcaattttctctaaataaaatgtaacgttaacttaccaaactatgtacaccctttttaaagaagaaatattgttatttgaggtttaagacttgaacaattcaataagttactccattttttattgttagtctgctgaaaactgtacgagtttttatgtcaaaaattggatagcaatactttctattctaaagtataatttcattgctacattgaacggtcttaaatatagtatatacacactcaattgatgattgtggttacataccaaatgaaagtagtttatcatgtttcctgtcaagctctcaacctaataataatgagagacattttaagaagggtaatttactaatatcattggtgcaactaattttaataaatattataaaaaattattaattaattgttagacaatattttatggtggtgctagacataacaggtctcatagcaatgaatcgactataatccttttatatata

SEQ ID NO: 209654 - DNA, 900 bp, Cannabis indica
ctacctaaaggaaaaagaggagtacaatatgatgtagttacaattgactatttcactaattggatagaagccaaactattaaaaactataacttcaaaaaaagtcctcaactttattgtcaagaaaatcatatgtcagtttggactctctcaaaaaattgtgttagacagtgaaaaatagtttgacagggatatgttcactgaattctgtaatagattgacattttcaaaagcttttccacagttgcacacccacaagcgaatggacatgtagaagctataaatcggaccatcaaagacactatgaaaaaatgtctagaaaaggcaaaaggtagttggcccgacctccttcgagaggtactttggccacacaagaccaccgagaagacgaccactgcacagacaccatttacattagctcatggctatgaagcattgtcgcccgttggattggaaccatcgtcccacaggaggataacctatgaccaaggaacaaacgacaccttgttggcataatcccttaatgaaatagaagaaagaagagaccaagccaacttaaagatgcatgcctaccgacaaaaagttgcctagtacttcaataagcaagttaaggagagtaaatactttgtaggagacttagtgctacgaagagtattcttaaattccaaagattttgtagcaggagtattcggacctaactgggaaggaacataccaagttatgaaattacaagtaaaggtgcttacaaacttggtcggtacaatgagaagttggaattagttctcctactaagataatggaatgtagatcatctcaaaaagtactaccagtagctcacttgtaacattactcttcagtggtggttcttggatggctcaccgtacatgaattcaaaaaagag

SEQ ID NO: 209655 - DNA, 744 bp, Cannabis indica
gatacaattatgtgatatatgggagcaggtttttggcacgagatcacctaatcaggtgatgcgattatgtgatatatgggtgctaagctgtggcatgggcttgcctaattaggcaatgcaatacaggattaaaagattaaagcttcgacttccatgattaggcaatgtgatgtaatgaagatggttactttatgaggtaacatatatatatctaatttatattattgagtgaatatgatctctattattgatataatggttttgtattacgaaatgtttgtatactgatgtttattcatggcagataatagaagttattcggatttcatcttatgagtaatgtgggattttttgattttgattgtctaagtataaaataatattcgaataataaactatatgattattgttattacttttcttgctgagtgcttgagactcacgagtgatatgtgtgtagataaaggcatagaaaagctagatcaaccatgaggtgacaatcttctccaacaatgtatatattgaccccaccagcctgtgagctgagttgccaagggttatttggggctgtatctactgcgtattttgatttttgtgttttgaattgtttttgtacatagtctttttgtaaacattttataataaggacaccgaaacacatttttaatgtcattatgatgccaatttttagtattttattttagtcttgtttttaatatcgtcactgtttttaataattaatta

SEQ ID NO: 209656 - DNA, 658 bp, Cannabis indica
atagtgcaaactcacctcttcaaaattttttgaattttttttcaaagtttttgatcaaacctttctgacgggaaagggatcaaaccattatatctctttgattagaaaactgtttgacaagaaaggaaaatcaaaagttataaattagatataactcataacttttgtgtgaagttgaatattaacaggtcgcactgtatggaaaagtattaaacgaggcatcaatatgtcttgataaaagtacttaaacattgtgtatgaatagataatctaactattcatgaaagcaatcaaaaatatacaaagtgataagatcattaaaagtatattcaagtttgcttgaaacagattataactgttattgcgaggcagaattgataaactgctcgtgcgtatagtagtctagtaactactcaatattaaaggaatatacgagcaatggaaatttcctaaagtactttgtatgagatcagatatgattgtttaaatttcaagcaaacaattatgtattaaagttcaaacataaaagtacaaggcattaaataaagataagaaccaggttagtcgtccaacctggaaaatttgtctttacacacaaaaaaaaggtgccacaaggggcaaacaattgtcttggtcctagggccattttcttacataa

SEQ ID NO: 209657 - DNA, 665 bp, Cannabis indica
tttagtttcgattttcagtcaccaaacagctgtttagcacattacacctcagttttacgaatattgtgatttaggggtctgtaaatcgtcgatcagctgttgcactcaggttgacgggcacacctgaatttggaagcgatgtaagattagtataatgatatccatatgtgtttacatgtttagtgtacatatttattaagcctattagataacatctataacggtattaatacacgtagagttatattggataccaatagatgtatgttttgctgaaatactgctcaatgctatcacatcggtaccaatagagtatgactagagtactgagtataggctattattatggtcgaattgtcgtataaacattttagactcagtaccgcctagggtgttgctatagggttatagttgggtgtatgggcgcctaaatgtaattcgagttatatttatgattatgatcagttttcttactgagtctgtcgactcatagttaatgtttgcatgtgttggtaatggcaaggataaggctaagcacccatggatcgagcgaatgaagattgtacatgtcggggcagtcagatctagagcatacgatctttgggacaacttattgtattttgtatattctctaggagacaactattgtattaagtattttaaat

SEQ ID NO: 209658 - DNA, 789 bp, Cannabis indica
cggttctgtttaaattttatgtaaatttttaactgtttttttttctgatatatttttttgtctgttatgactttgtttatttttaaaagaaatgtactttagaatctgattataattttgtatttggaacctgtttcatttaaattttatgtttaattgctttatttaagtttttaactggttatttttctattatatgttttttttgtctgttatgaatttaattatttttcttattgtttagtatatttattattccttatatcctatttcattaatattatttataatcgattttctaatactgtttaatatgaagtcatatttattttagattttatataaggttgtccttactttttttcttttgatttattaggtttctttttgttattttatattgaaatttttcattattatatttgtattttaaattgcagagtttcatttattttctagtgatatatattcttatataatatgttcatatataattatcatcatatataattttgattatttagtgtatatacatgttttgattatgcccacaatcgttgtcgaagttgtgtttctgtgtataattctgtttgattattcgttttatgctgtgcaattatatatgcattgattttcaggttcatgcagtaaagaagaggattagaaccaattgacaaactcactggagctggagaagacaatcggcgatgatgattgttgctgcagctgtgtcgtcaatcattgatatatgttaaggaatcgatgcatattctagtttgtgagattgat

SEQ ID NO: 209659 - DNA, 866 bp, Cannabis indica
gattaccagagaggacaggttgaacactgttgagaagaatagtaaaggccaagaggagagagagtttattaacagcttcaaggacagctttgcttgaagagaatatcaaggcaatttcattgtggaaaatcataatcaaaacccaaaagaagagccctattactattgatgtcacaactgatactatggtcgcaaacttggcccctttcccatttccagctccgagctcatttgcaactcttaccctgaatttaatacataatgtatatatacattcaaaataattagaaaatttgttcaaaacaaaaataaaaaaaaaaaactaatagaaaaattgcaaaatcaaaaatattaaaaaaaaccacagcctctcatttgaaaaaaattaatttaatcatgattattaaatgaaattaattaaaacataggaattttttttcatatttagtattatattatgttataaattcaaagcaattagaaatttgaatcaacatataaaattataacctaaaataattttattaattaagacacaagaagaaggttttttgttttctgaataattagttaatttatatggtatttaataatttacactatgttgtaagtatcataataataataatattgagagaatttagggcaatgtgaaattttaaaatataataataatgaaataaatggagaaataattaaagagtcatacgcgtctcatggatacgtgtaccgagtaccgaccacaaaatgatatgagatgctagtttttcatatttatatattgtcatatatattgtctagtcgagatacataaatgtgtaatcaaattaaagcaatcgcaagggcgcctataaaaacaaatcaat

SEQ ID NO: 209660 - DNA, 722 bp, Cannabis indica
acttataaaataatatgatagtattatatgatttattgaaagtgaaatatataccaccttggaaattctctttgatactagaactagatcactctattatgtactagattttcacatttttcctttaattagttgataaacataagtcaatgcccatttaatgacaaaattaagagaaatgttaaaaaacaccagtggtgtttagtacactcttcggtatcatcactattggtacgattaagcattaggtctcatacaacttaaggaaataacttttaggaaatattgataattgttatccatggttccagaagatagacacgtggcataatctgaaggtaatcattacttaaagttgggtccaaaccttcctgctctcaaaaggccaatccatacctggaataggcctatgcccaacgaagacccagaattttacctcggggatataatgttcttctaaggcccaaaaattaaacctccctagtcgcttgggacatgaaaagaatgaagacctcttaatgaagataatggtacacctggaggcaggccacgcgtgatggtcctggatgcctaccacagactaggagccagatgtctaccgtatggtgagtaccagatttctaccatgagacaagaggcggatgtctccattaaaatgatgtgtccacctctttgacacagaattaaatataatcccctatgtcagatcattgcgcgcacca

SEQ ID NO: 209661 - DNA, 1360 bp, Cannabis indica
aaaggattacctgatccagagaaaattgaaactgattctggtgatggtgatgagttgggtaaagatggtggtgatggtcctagtattgataaggttggtggtgatgttcctgctgttgatgtgattcaaactgaggttgttgcaggcagtgaagagaggtccaaggatgttgaaaatgttaagggcaaagaatctggtataaagggagataatttcttcaatggtttaagccagcttaagattgatgatgaccaagttgtgttggctagtttagaggttgttgctaaaatcaatgtaagtgtactttttattcttttttagatggtgttatcatgttagtttttttttagttgttagacagttttatattagttttgcaacttctttacttttttttttttttttttttaatttttatcttttaggttccagattccaatccaaatgttattgttaaaaaggcagatgccattgcttatgatgaagaagtggatgacacttttacttatactcctctattggataatagaaagcgtgccccgacattgaaatcgccttatgttgattttggatcggttgatttgagctgcactccaatggaggtaatgtcctcaggttctcaatctggaggagatgagagggattttaagatagttacgtatgtgaagggcctttacgctcttaatgattaattttctgatcccgtctctcctgaaattgaggctaagtttgatgataggattagcaaaggattgctaaaacatcctaggtgcttatttttttattctgtttttattttttatttctctgcatatcattttattttgccaattttttgaattgaatattgtttcttagtcgtttgttttttgatataggccttacactgtttacgatgatggtgcaaagaaaatttcccaggggttcagattaggtgtagattatgttgaagataaaacctggttttatcatttgtcttgttgtgacatgtttatcaatgactcggtaatatttcttattccttttacatttttttatagttggtttatcattgttttttagtttagttactgtaatttagtttttgtaataattgttcacattttcttttgtgtttcttttattgtgttgtttcagcatatgaatactatattctattaccttaggaaaaaacggaaatattcttctgctgttactgtgaatttcgctacaccagattgccttttcgatgattctattcaatctttataccacaaattctgcaaagccaagtcaatgaaaacaaagatgtctcacatccatgctgctcacccaatagcgcattatatcagaggcttgtgaattccttgttctaagcctt

SEQ ID NO: 209662 - DNA, 504 bp, Cannabis indica
ataatctgttcaaatactttatttgactaataacaaaactagttatgtatagggtatgccattggcagcaagcagaataacatgaaatattaaattattagattttgattcgatgacaaataataaaaaagaattttaaattttcatgcttaaataaactacttaattaaagaaaatatcaaaaaatatttttttttacactatatcaaaaataaatttatatgaaaaatatttatgtcaaactcaatatttttttatcattttttttgcttatttttttttattattttttttttcatctgatggaacaatctcagcccatataatataaaaaagagagatttttataattaaatagaaaaataaagcataaaaactcaaatttttctaatattattcattcatgggtaatatccattaaaagtgcactcaattttaattacgttacctatcaagattaaaattgagagacacattttttattatcttttttataaggaaggg

SEQ ID NO: 209663 - DNA, 501 bp, Cannabis indica
aggtgaccaactacttgctcgggaatgctattgcataaagctgcagaataaaaaggccgaccatcaattcatcacagtcataacagggaatagccagaaacagaacaaggatatagatcctcaagttcaagatgaaaagaacctattaaaactaatcgaggaattggaggaagttattctagatccagagaatcccacaaagtgtgtatgataggaattgggaaaatctggatgaaaaactaaaataacaactaataaattttctgaaggcatactaggatcagttttcctggagccacttagatatgatagggattgaccctaaagctatctgtcaccacctgaatatcgacctaaattatccaccaaagaggaaaaaaagacggcccttggattcggaaagacaaggggaattcaaagaggaagtggataagttgttgactaacaactttatacgggaggcattttaccccttgttgatatctaatcctgtccttgtcc

SEQ ID NO: 209664 - DNA, 835 bp, Cannabis indica
acgaaactcttctaccgcgtacttgatttagtaccataagaccaacaatatattatattatttttttttttgagataaaccaacaatttattataggtaaatgagagatgtaacatatgtatttgtgaatttaatattaatattgtgtgtttgttacatatgaaatattgaatagtaaataaatatgatttaatatatgaattatatagtatgataataataatattgatagtgatacaataatactatttattatgtagagattattatcattcatattgtaaataaagagatatagaattcattttccagtagtgattttgaaattgtgctttgagaattaaaagtgataattatatcattttgatgtaaaagtgaactatgagagttacatttatgagatttgtcttgtcctagacaagaacaaatggaccaaaagtgaatccaaacttatgaaatgagccataaaatgggaagaacagttttagactcaaataaaattgaatcatagtggattcaaaaatatgaaaagattacaagattggtgaagtaattttcaatcttaaaaaataaagtggtgaacaaaattgatgaaaatttcgctaactttggtgtaatatttgggctaatttcattgaggaaataactttaaaataataagtaaaaataatcacattattctgtaagtggtgatgtgaatttgatatttttattttattgagaaaactaagaatgttaaacgacatttttctaataatgatctctaagagacattttagaaaaatgcttaaactagagttatgtaaataatatggagattatttagataactaat

SEQ ID NO: 209665 - DNA, 482 bp, Cannabis indica
gatgattatcaaaacaaaggacaatattcattaaaaaagatagcaaagcacgataaacctagaattaaaagctgcctggttagccagttatctaaaaatgagaaaacataacccaagtttaaaaattgcttggccagtcatctttgtctctaaaaaaggcccatgggtcgaatagatacaaaaaaataaaagataaggaaaagtgtttaaacagcaggggtctcgggctctctgtatggattggtctggtttataggggcctggtctatgggggccggaggttcaaaattctgagcaacaggggtttcgttgctctggtcggctagaactatagaagtggttgccttgaggtttcctttggctgcctgacttgcacagtaatcaagatacatcctcttggattcaccaaggtaatcaaaatttccttcgggattagccttccaaaattcataaaaaaacctcgagggcagctgtttccaggc

SEQ ID NO: 209666 - DNA, 706 bp, Cannabis indica
attaatttaaaataaaataattccaattgactaaacataaaaatatcttaaatatatctatttatatttatttcccgaaaaaggtatctacatatatttatttatgccttaaaatgctctaaacaactttatttttattctaaaataaaatttaactataataatttattaatgttcaataatatctattaaattcaatagtacaaaagtatatccataactaaattatattatatttttttaaaaaaaatatcttattataatatttattttacaaaaatcttattttaatattttaatttattttcaaaacaatgagaaaaaaaccgtaagaacaatacatatatttttcataacatatatatttaataatttttttttaataatataacatatatcaataacaattattgtatacatataataattttttttctcacatattataatagagaacatatgttattaaaggtaaatagcaccgtactcaaagttttaagtttataaagataaataataattaatgtatacatataatatttcttcttttcatatagggcacacattttttaatcattgagtttagacaaaaacatttccaaattttgttttaataaattcaaaatagagtctaacgaaaattgagaaaagttataattttatacattgaatacttatgatgataaaaataaatgttagatttgta

SEQ ID NO: 209667 - DNA, 1493 bp, Cannabis indica
cctcaatgtttttcagaatcttcttcgggagaatcatcatttgactccaatacgcttgaatggcaatgttttttgcgtataattgatttaactaaaaattaatctaaccttatatatatagatagcactaaaatttttctgtggtggtaagtatgtttagtgaaagaaatataatttttttttattaattaatggaaaaacatcacaaatctttatcaaacaaaccataataattaaatgcttataaataataaaaatattgtgttgaattataatttttattattattattatttaaatattttaaatttaaatttgaagtcaattatatatttaatttttaaaatcaatctaattaattgtttaaggtttttacaaaaatacattaatcttatattgttttataaaataataaagaaaaaataattttttttgacataataattagaatcactcatgaaattgcgatgtatatatctacaattagtgtaagaccctgatctttgaactaaaatagctcattatctaaacaaaaaaacatgcttatcaaactataaactgctataatctcaacacgaatacaaaacagtttcaaaaaatttagataataaaactataacgtctttaaacagcacacccaacatattaaaatacacattctcattattaatagttgttgttagaaaataatagacaaataaaatatcgcaacaccaaatcaaaaaataaaataatattagaatacaatcttcaaaataaaaattaatatacaaaaacatttaaaaaaaatttacaaatacaaacaacctatatcaccagtccatcatttaaaaaaatttgttaggaatagtaacccatttcttaagtttaagataataccctcttctctttcactccttttggctctgtccattggaatggaatctcagagcttactttttcaggtgaaatcaccatcttctttaaggtatcaatcttcccttcccttctttctagtaatgtcaatttttgctgttttagaactcagtttctataaatatatattatatcaaaatcatggtgtttattggctctctgttaaggtacaagccaaaataaaaggagccatttttattgttttatagtcaattttcagaagttttgtgcccacaaatctgtgatgaaatagtttagaaatgtacattgacagtgttcactcttgggttaacttcatttttggttcattctgttgattttataacaagtttactttaatagttcattttaggtttacagatttgcttaattctatactggcaatgttcaattttgggtttctatgctaaattttcttttgtgaatgctttctctggtttcaattttgttgaaaagtcatgttctttggagtaattgacttgaaactgagctaccctttttgggcattagaaaaaacaaaaacaagctttatttgaaattgggcaccttcaatatttgagcaatttcaccacaagcct

SEQ ID NO: 209668 - DNA, 1184 bp, Cannabis indica
aaaagaaattttggagttctttctcaacggtaatgtaatgctttgtagtagtttaaaatattgctaacaaaattgttgaaaatggctaactagccgttaagcagtgagaaaagagagaagaaaaagtgggtgttgtggtggctctctctcctccatgacaaggacgtcacgtgcggggacccctttcctatgaggccaactcacacatgtggaggtccccatccatttctccacgtcattttgacacgttacccttgttgaaactttctcattcatggagacatttttttaaggggataaaagagaaagaaaaaagacagccaattttattctcttgtgcaaaagatgagaaggggctcaagattttggccaaaggccaacaatcctttgcaaataaaaacataagcacataacaacaaataaacaaggctaagaagtagtagggtactagtgtttttctaattacatggttgaacatgttatatgtttctagactttggcaaagactggagagtttcaatgtacatgatacataagaaacgctttgtacaccaccaagtaatggaaaacggctaaaaacatgagatcaaaataaaaaagaaacggctaaaaaaaacaattataatgaagttccagcatttgctttgtccagcgatcatcaacattggaaacctccacatgcaataacccacagtatcacgatcaatacaagtactgctcctgcaatcatcagcttcatttggaggttttgtagccacattttccgtcgcaattgccttccttgcctttggaagctgtcagcctggattcaagtgcagaagttcatgttagcatattacatcaactgtaagtatatttattccttctgaactactaaatcaaaaagcatgtaattacctggaactgcaagttttcagtcttgtcgaccagaatttcgatcctttcaccacggtccaaaacctgcagccaaaagttaggttggtcaccatatatcagttagtaatgcacaaactggtcttactataatttttatcctagttttgaatgccacacatatcagccaaaatgacagatgccattcttcaaacagagtaaacactctttctctttttaatcatcaagcaaaatccctatattcactattactggatatgttcatgtaaattctaactatctcggtaccc

SEQ ID NO: 209669 - DNA, 1176 bp, Cannabis indica
caattacaaattcaatgtttgcctgagacatatgtgaggctaactaaggagaaatcattaccgcattgaaggtttggtcaggccctttctgactcaaggcatctgctacgacatttgcctttctgaggtgatacaaaatctcacaatcatagtctttaactaactctaaccaccacctttgtctcatatttagatatttctgaacaaaaaagtacttgagacttttgtggtcagtgtaaatttaacacttttcaccatataggtagtgtcgccaaattttcaaagcaaatacaactgcaagttctaagtcatgagttggataacgctgctcataatcttttagttgtcatgaggcatatgttatgacattattcccctgcatcaaaacacagcccaaaccctgtctggatgcgtcacaatacaccacaaacttctcttaattagttggcaaggctaagactggagctgtaattaatcgttgtttcaactcttggaaattattctcacacttatctgaccacaaaaatcactgattctttctagttagtttagacaatggcattgcaatcttagagaatccttccacgaaacgccgataataacacgctaagttgagagaactccgtacttctgtaatttttttggcctaggccagttcttcactgtttcaattttccctgggtctaccataattccatctttcctgataatatgccccagaaaagacatctatgacagccaaaactcacactttttgaattttgcatagagtttatgatctttgagcagctacagaaccatacgaagatgttgttcatttgttgcttctgaccgagagtatacaaggatatcatggataaacataataacaaagttatcaaggaaatccttcaataacctattcatgagatccataaaggctattggagcgttcgttaacccgaccaacataactaggaactcataatggccatacatatttcggaaaactatcttcggaatgtcttctttctggattctcagttgatgatagccagatctcaaattaatcttggagaaaactgttttacccggaagttggtcaaacagatcatcaattctaggcaaaggttactgtttttaatggttaatttattcagctcccgatagtcagtacacatccgaagagtcccatct

SEQ ID NO: 209670 - DNA, 577 bp, Cannabis indica
gagaaatatatttcacttattattccaaaattacatatactctctatctcaatatctccacccaaaacccaatacactcttcgcttctttctcactttccgcacactaaaaactcactcatttttaatttcacaactcacacttcttctcacacacgctcttcttctctctcacacacaaaatacatatttatagaaaaaataaacttggacaccaagacactccaaagcttcctctagaagactcttcaaaatttggccaccaaaattttctttttcacacaattaataattacccaaaaataattacaacttaacaaatatagataaattaattaatttgagttaaactccatcaatgtaatgtaaatatatgaggtaagataagggaaaaaaaatagagttttaatgaggtatttgaaatgatagagtagagagtttgttgtgagttctctaataactaaactaataaatttcttagctacatttaaataagcactattcatgaggtaaataattgagttattttagctcatcctatgtatgtgcttttttgttttttacttcttgggttataa

SEQ ID NO: 209671 - DNA, 562 bp, Cannabis indica
atcctccaacttttgcagccaattcttgatagcacgattagttgattgtctctcctcagcatcttcaatgacagcagaaatggttgagagcatgctacacatcttctccatctctttctccacacccaaaacagatccaacttgcttttggatgagtgagctcagattctcaagaacaacactgagaacagcttcagccatgattcctaatgatcagttcagaaaaatcaaagtttgaactcagagaaagatgaagcaaagcaagcaaattggtcagacttgtgaggaagcagcaaacaaaagttgattggttttggaaacaaagtttgaccttacgtacgtaacccaatccacaaaaatagatttattctccttcacaaatttattctttttatcacaaaaaataaaaaatataaaaattgaaactttattatacgtacgtacatactgatataatcaatcatatgcatggtctctactatatatatatactaatactaatactgatatttttttgaatgttttgtcttgtatgaaatggaaataaatgaggactattttg

SEQ ID NO: 209672 - DNA, 606 bp, Cannabis indica
atacagaactagggttcttcacaaaccgtgtattcttttttctctcaaggattttccgtccttttttctatataatctacccctatttataataacataggttggcaattaattacattcaaatttgaatctcacaacaatattttcccaaaattgtgggccttaattatgatccacataaataatgcagttattatttagaaatcaaacagttgtgatttaaactgcttttaaagagtcaatgctgacgtggattaagacacgctggaaagtgtatttcgctgagacatctcgcttagtacttgaacaactttgcttgttcataagtcttccatctatggcatgagcaccagtgtactgagcaaacttaagaactactctttgaccgtaaggccttgcagactggacaatcatttccttagggttctcaatagcaacaataaccctagcaacaagctggagcctaccaggagtgtaacgccctaaataattaggcacgctacctagtatacttatgaaaccctaatcccctaatcgggattactaataaatttagtgtgggaattaaactttaattacaaacggaatgaaaataaacttgcaata

SEQ ID NO: 209673 - DNA, 586 bp, Cannabis indica
aaatttgatcatattatctcattcaatcaaagtgtttttattacaagcagacttatttcaaataatgtgatgataacttttaaagtcatgcactatttaaaacaaaaaacaaaaggcaaaaaagagttcatggctcttaaacttgatatgagcaaagcatataatcatgttgagtgggattatcttcatattgttatgacagatatggggtttcattcgacgtggattgatcttgtcatgtcttgtattacttttatctgctacaatgtaatccatggtggtcatgttgttggccatatcataccgtctcgcgatattcggcaaagtgatccactttcaacatatctttttattatgtgtgctaaagggcttacggcgcttatcaacaagtttgaggcaaatcaaactattcaaggttgtaaggttactcgtggagctccctctataattcacatgctttttgcagatgacggttatctcttttgccaggccacaaaagaagttgctgaaagccgtcaagtactctcctccataccttccaactggctatttgggcagtagaaatttttccaagtcatctgttttc

SEQ ID NO: 209674 - DNA, 1197 bp, Cannabis indica
attgattttcgtcaattaattttaatgtatttgttttttgtaaccggtttcgttatattaaatctttgctcaattattttattgtaattgtttttttgtgttccaattaatcttttgattgttttagctaatttatgtatttgttttatttttttagttagttataatagtaaattggtttctgtggttaattattagttatgttattttacgtaattggattctaaatttcagcttttgatttagtttttcaagtaattggtttttatttggttgatttttgtcactgttttctttatgttaaattttgaaactttatgtaagaaaaaaaaactatattatttcaagtaattggttatcatatgttagttcttaatttgtttattttatgaaactgatttctttattttagatttttaattagttgtttaatgtaattagtttttacaatttaattttatgcaactgatttttaattagatttttaaaagttttgttataattttgtatgagttctacaagttttgtcatggtttcacagattttgttattatattttttatgatttttcatatggtcgaaacaggtttaatgcgttttataggtttgaacttgtttcacagggtttacaggttcagaactggtttcacaggtttgatacttgtttcacaagttcaaaattggtttcataggttttaagtgttttgtcatggggcagctctattttatgatgttattatatattttttatattaagtttctttttttttataattattttgtttctaggttcaaaactggtttagattatatttgtaattagtatttttttttttttgtatttttctgtttgtgtgtgtgcttcttttttttatttggttgattgatgaaactagtttcagtcaactttgttgttcatcatttcaattttgttatgatttttatagggtccagaaactggtttcacaatgttcacatgtttgaaaccggtttcacagatttgaggattctgtaatagggttgctccatattatgatattagtgtatattttttattttaatagtttctttgtattattttgtttttaggtacgaaccagattttatgtatttttaattggtcatttaatatagttagtctctatgacttaattttatataaatttgttttaagaaaattatggtatgtcttattat

SEQ ID NO: 209675 - DNA, 691 bp, Cannabis indica
ttctcttagcttctctctgaaaagttttctctaggattttcaatgtttcgtcgccgattgttgtcgtcgtcgccgttattcggtgtttgcgtccgtccatggtcttcaagtccttgtggcggtgggaaggagtctgtctcttcaacattaatggtggatttggctcttcacgaactgggcaaagcatccattgaagatcccctctctaatacaggtaaccttcacttcagcctttactcctctctttttgtcccatccgattattactaactggcattatcatcacatctgcacttctcttacttcattaatcactcccatttacttcttcctttagccttagataataccaaattaggaaacccaattccctctgcacctccttggacaatcatttgtcctacccaattaggtgacccctactccctgatcagaacccctagattcgttttaggagccactgccatttctatttgcatcattgcttcccctgacatgaagaatttatttccttatttgggctttcccttggagatattgatctctgtacgttctttctatataaaggattttgtggcttctcataaggtacagtttacacaatatccccaccagtttattcccttcattgtccccacttcgtaacctgcatattcccctgactactcaatcgcatcctgcacatccccct

SEQ ID NO: 209676 - DNA, 523 bp, Cannabis indica
tcgaactttcatgtcgtttttttgaaggtttgcggataagaaaagagctccaaataaataatattttgagtacaatatatatgaacacacttataccactttccatgaaatttgtggaaaatggccaatttcttgacaaggtgatgatgatgaggcttattgttattgcccctactcccattccattgtcttttttcttagcaatgatatagaaaggcattacatttttaatactaattaatataataataatggctacatattttgtcttcttttggttttgctatgtaggagaagcttggtttgatgtacttaaattattatttaatgtaatttacacttaaattagcttctatgtacttaagttgtcattgattaataattgtttgatcctctactctctaacatgacataaaagtaggggaatttgaaagaagatgattgatctttggctgttttaaaaaatcaattaattaaataaataggatttatacactttaaaactatgatatttgtagagttt

SEQ ID NO: 209677 - DNA, 690 bp, Cannabis indica
gcaggtgaaacccagcttatcttaggtagtttcacatccaatattgcggcacaggagactgttctaggacattatctagtcctagtactgaaggcacaccacgaccaagtttgaacgattggccacattagcctcaggtacagtacctacagattacactaagaaggaaaagtacctaggtgagcttaatgccaagatccatcatgatttaacaattacaaccgatgatgctatcccatatgcactgattgtacagaaggcttttcgagccgaaggtgcagtacagtttttgcatgagccccgagggactcaaggttcctgtggtgtcagtgctccacctccttctagtttgggtaggactagtagtgattcaattttcgattcaaaaaggaaggctcctttcacaccaagcaattctacgggaaccatcgttagagtagtggtcgtcaaggtggatttacgtacccagaatgtcctcgttgtaaaaaacatcacttgggagaatgtgataagaatgcctgcttccagtgttgtaagatgagacactttaagagggagagccctcagttgactaggggagagccaaataaggagttcatatccactcttgcttgggtatttaccattacaagtcagatttttataaataaatcctattttactgtaatgtttgactcaggggctacacac

SEQ ID NO: 209678 - DNA, 961 bp, Cannabis indica
tttgtcttaacaaatcttgtcttcacaaattttatattaacaatttttgtcttttcgttatttaattaatttgaaaaattatttatttactataaaaataaatcattactatttcgctaattcaaaatatatttttttgaacgactatacaactctttatccctacccttgaccctacccttgacagtgtttcaaggtggcaattcgggtgctatagacctataattctaagctccaataaactagattatttattgagtctcatcaaccaaataattttatttattaattccatgataacccaactataaatatggaattaaactcttaataattatagaatttttattgagttttactatagtgtccatgatataatcattccaatgattagccctccatgtcttggtgcataattaattttgatcaaattaccattttacccttctaattacttgtttatcctttagtaccattaattcactagtggtagtataatttagatcccatgtaaatttgtgcacaccattccagttctagaattaacacttaaagggaaccaacattcaatttgttagaaaaattaggatttcataattgtaaatcatgtttccagccatccacattattagattcctaaaatagaagttgtaagaatcatcttctctgagaaactttaacgaagtgaataaaagaaactaataacatgaacaagaattcatgattactcaagatttaggtcgatctactatttatcatcgttatggtatgaattaggtctttgtgataaacgtcgttttaataaagatagtttcattcatatcggtccttgtcatatataataatctctattatatacaacacattcactttgatgtcgtactacatctgtaatccgaatcgagattacttacaccaaagaatgggcatcagtaaatcgtactagtaactattgattcaa

SEQ ID NO: 209679 - DNA, 1246 bp, Cannabis indica
aacatcattgagaaggacttatatagagtagcaatgctcataaatttatcgctacttttgcatttaatgtatgtctcgatttggacctgcttgacctcaaagcaggtgaggaatatgaaatattatttatgtttaagaaaactttgcaaatacattacgtatgaaatatttactcaaaacatgaaacaagagatcgattacactgcagagattttgcatgcatcaatatagattattcagaaagatgagaagaaaattggcaaactatttcttaccagtactgtttgtttagtaagaaaattgagtctacgagtgagtgattcgaactgaatctggtgccgccgtctacctcgtaggtcttggcttggccaacattggtgagataaagggtcaacatcagtcccttttcttgataaaaagaaaattaagttaaaaaaaaaaataattactaataaataatattttaatatataaggtaattcaatagtacttattatactgatttaaactttttttctctacttatttatatgcccaaacataaatataaaatgttaatctaatattgatataaaccataataattaaacaaacaaataaataaatattaagaaaaaaacacacgaataatgatattattataatataaattgaaatagaaataaataaatactaattacctgagtaatttaagcacttctctcgcagaacccgataatagaggaatctttagtttatctgttgttgaaaacatggccacgttatatttggtttagtgaagctcaaaattcattcacaatccatgtgggactaagtcacttcaaaatattagagagaagaaccatgtaccagatttaccagatttatttccaacatgattctaaatgagttgtaatcaactcaatgcttctttaatgcctattatctgagcatagtaaattaataaatgaaaataaaaatttgaaatggaggacgtcgttgagccgaaccgaaccacttttaaacgactgctcttgaatccttcacagaagaagacgttgatgtgggaatgagaaaaactttggcatcaatcaagaagatcaatacaataatcttctccttcggtaatatcttatcctcaagtttattgtctatactattgcgtgaggtttgccgaaaaactctccaatttagactgtgtgtgcatgaattcttgaataaatagtatcatttattagtataggtaattatgtatttttatgaatat

SEQ ID NO: 209680 - DNA, 533 bp, Cannabis indica
tgtgaattgaaaaccacttggcgtgatccaaacacctatttcggagtttccaaaattaactctgggcacagggctagggatccctcccaggttgactactatgactcgaaactagtcaactccgggatgttttctttcttaccacgtgtcaaacattgaggtccatattaccagagttaattttgggtaaataaaattgatatataattttaattttacatgttttaataattttaattataaaattgtaataatttagtattatatttaagttttattattattttaatttatttataatgataaatacatatttattattaataagaaattttagtgttttttaatatcttcttgtgccgtgtcgttcttaagcacatattttttgtgtcatgtcatgccaatttgtagcatcgtgccgtatcatgttcaaactcatatttttttgtatcttcctaactcgtgttgtgtgagaaccaatccatatttccagcactacctacaaacacaaattgctaccgctagtcaaaggt

SEQ ID NO: 209681 - DNA, 955 bp, Cannabis indica
tgactaagtaatattttgacatcccttattttatttttgtgttctggcaaagctggtcaccagttcttggagatgttgctattctacaaaaatgagagactcgaaactcttcatttttgagtgagtttcccatgttggaaatgagaaatgtgaagttgtgaatttgacttctctgactttatggatcttagttattgtcaaaaactagagggacggtcaaacagaatcataatcgaataagcaaaacccaacgcaccatgttgtttgtcaacctaggcgatgggtactcattcgtgagctcctagatcttattttgatacttccaaggttcttgaacttaaggacaaggtctcctactatgtttttgaccattctggattcattagtcgagttatatttgacatttgagcaattgaaagtagcacactaggtttgttgcgaacttgggcactaagcccaacaccaagtcaacctgggcgctgggccctattttcaggggcttaggtttgtggttttctccccgagtttgcttaaatcttcattatttccaatgacagaaaaaatgcagggaacacttttacgtgatcttgattggaaacagccaaggttgacaatatgtcaatatgggcgctgggtcccaattatagcccttcaaaaattctgtttggtcccaacaaatagttgaatcttaatcttttttgaaaatgaagaatatgctcaaaagatttcttgaaagacatcatcaaaattggtccatgttgataaaatgtcaacctgggcgctgggccagccccaagtgtcaacctgggcgctgggccttgcttttggcacatagaatgtgttgtttcttctccaaaagtaccctacttccccatttttgatgaagacaaagagaatacaaaagttgaattgaagatttaatacatggaaggcactcagattgataaattgttaa

SEQ ID NO: 209682 - DNA, 1664 bp, Cannabis indica
ttttactgggtcaatacatacgtttattaaatacgttgtaacgcgtatcgttctgggacatcttgctggaaacatagcaataataactctggtagcgagctagagcttttcccatgtcttttcgaggtttataatgtaagtctcgtcgtttctgcgcttgaagacataacgctttatctggcaatcgcagttcttggtgacaaggtgaacttaagtagtcaacattatttgaatgtcagcttctatctgagagagctgactcgacggagcagtggatctcattgaaagatgtctagagttgattagtgaagataccaagagtatgccttcccatagcgagatggatgcctcgttgtctgtcactcagattcttccatctgttatgcttagttagtataatgtgtattatacgctaagtattttaacaatcatcatgcctcgtctatgtctcttcatgcgtagcgaggttgatgcctcgccttgcactactgatgtcgtatggtttctcgttaatgcacgaggtaacagttcgtatatctttatctcgcttaagaccttacagtcagcaagttgtaaatatactctgtcagttccgcatttaatgagttattccattttcaaatataattatcattatatttgttgattcatattctcccagtttgacacgtgtcctcctctgaagtgctagccaaatttcaggtataacaggtaagacaatatcttttctactgtcactatctatccagttcaatgtataacgaatacattcgatacaagcttactttgctaatgtcttggaaaagacattccacatataaaagtataagtaaccacatcgttgattattacgtcagtgtaaattcagtgcactgataaatcaagggactaaactagtttatatcatatattcataatcaatttttaatgtgtagacaacactataattataaataacaatatgataagaattcatatatcaaacatatgatcatgaaataaacatgtgagccaagaaatatacaaaatgagtaatgaaataacttatgttctttttattgataatgaaattaaattacattaaaattgaactttatctaaggcataaaatatggatatgtaacgaaattcctagttaaacggtattttcttattttctacgttaattttaacagaatatactattacttaacaaaatattttttattaactttataatattattatatatatttaaaaataaaatttatctagatattttataaaaaaaaataaaaaatttaaatttaaatttaaaatacttaaaaatattgtagatattcttaactatatttttaattttattagtttaactttaaattaaaataaaaagaaaaataatgcagatactttatataaaaaaatttaatttaaatttataatatttaaatattgtagatatttttaaccatattttaatttattgatttaactttgaattaaagtaagagacaattccgctcaatcaagcacacaatgattcaccgcgatatcttatttgagttttattgtacatataaaatatgtatatataatcacatctaaaggcaaactaatgtaggcgtaataactaaaaaaaatcctcaaagatcagaatctcaaatcccttttcaattttttttttt

SEQ ID NO: 209683 - DNA, 546 bp, Cannabis indica
cagaaaagcaaattagcaaagtagggtaacttctctcattctgcatgaacattacaaggaatgtgagaaagctagtctaaaatttaagcaatttcattcattcaatttcagccatgttaaaagtacaactgaactcttcatacttgagagggagtatcacaaaaaccgttctttctaaaaattaaaaaaaaaaaaaacaacattaacatagtaacagtttcactagatcgatcattactggttttccatgtgaagagtacacaattaatcaagctgtcctcaaaggaggagaaacaagaataacaccatctcctctaacaaagagaaaggggaccattcgctttgtagtctgaaataaagaagtgtaaattagtaatcaaatatgttcatccctcagagcaaaagaaatgacaaaacaaagaaccaatgaaaaatactatttctttatttatctaactctgtattcaatttaataggcagccccgtttcctatgcacttcaattcaaattaagcttctttgtacactatagtatagattcaaagtc

SEQ ID NO: 209684 - DNA, 523 bp, Cannabis indica
cgaggcgtgaggcataagatggttggtgttagcactacgatagagattgggtttggagttgcaagttcatccaagttaactcgttggtggaaaccacaggtgaaagtgttgtttagtgtatgttccatttagctttaccagtagcaacacaactcatctcccgaaaagttcaggacctttttgctattctcggtgcgaagaagaagctgaaactcctaagcatgctctatttttctgttctggtttgattccaatgtggcatcggttgggggtgtggtcggtgctccgttgatgtgcatatggaccaatgcaggaaattttcctgttactcattgacaggctatcccgtgaggcttttgaattgatgatgacaaccttttggtggctgtggtatgatagaaactcattatttggcaacaagcactcgagattgaatattattccagacttagccaataaccatctggcagagtttaaggagtatgatcggcgaggccttcatttgggattgggccttgcaaac

SEQ ID NO: 209685 - DNA, 628 bp, Cannabis indica
agagagagagagatttcagacttagtgacttagagcttatgacttagcacttagggttatagagtttagttaaggtcctttatatatgagagcttaaacatttttattaggtataataagtagatatttacatattaaattagcaaaatataaatgactaaaatatgtctcttaaaaatagatatttgcccttaatttttgtggattattaaggcccaattcgtagtctagcttgctgaccacgcattaagttgtacaccaaagtcctgccaggctaatgtctggctggccatgcatctacatgatgcaggctggctggccttgtgctgttcggaagctggccagcctatgatggccatagggacgaccaggggtggccggtcgatctccttcataagtagatgacttgatctttttgttggtgagctgtattgccacgtggcactaatatcaatcacgtagacatgcaacatcatgtggataaaaatcgagaaaataactttaattaagctatcagcaacatttttaatatttttttttacatgagcaataataaattcaaaaaaaaaaaaacgtaagaaattaaatattgaaagcaagacaacgcataagcgggttaggcctgtgc

SEQ ID NO: 209686 - DNA, 868 bp, Cannabis indica
ctctttttttcaatttcaactagaagagaatagataaatggaaaaagacaacaaaaaaaaaaaatacaatcaacattttatgttgtgtgagtgatttgtggagtttatattacttagcagaaactaagttttaatttttactaggatatatgttgataattggattaatatatgttaatgtaattaagttaacaaaaaaaaaaaagaaactttaaactgttaagcattatcaaatattgattaatagtggtaatattaaaaagaaaaacccttaaattattatatattttttttggagagaatagccttagaaaaaaaccaccaaaagagaagaactccaaggggaagattaaaagatttattgatgattcacatcagccaaaataatcttctaaaatcaaggatacccaccaaacagtgctaaaaatagccctaaaagcataatgagcaagagcattcgttgcgccattggcaattctaggactataagtgaaaaacacaatagtaaaattagaatataaatttctaatgtcattaagaagtacactcaaagaaaagttcaaaaggagagagctgttgaattgtaaatatattatttcattttaatgttgaattgtgtttagaaagatgtaaaaaaaaagagagaataatgtgtgatgatctcattctcatcttcctgctatagctatatagttataaaaatacaattcataagttaaaattaaattctaatactatataagtaaattacagtcatttatatggaattgagaattgattttggtaagatttatttatgattaatctatatctaaaaaaataataataagaaaaagttatgtttggtaacaacaataataataataat

SEQ ID NO: 209687 - DNA, 828 bp, Cannabis indica
ctttgggcttgtgtgtacttcattttgggccatcaaaacaaggtatatcaatttgccactttaacattcaattacagatatttacctgtagtcacttgtatttctttattcctttataaaaaaaaaaaaaaaacataggaaattagactctataccttttttatattgtcttcttttatttttaccttcttttttaaagtctatcatttttacctcttttttaaacattgtactaattttgcccctgtcacttcaagatactctccaagtgactctcttatgtcaaggtattttgggtacaatacatataaaaagaggtatgtttcaaataaatataaaattagaggtaaatttgattaattgattaataaaaatggtatttttaacttaccaaaaaacttgaaggttatgtatgataacagattttgatgtatatattaaaatattaggtattagtaacatgtaatacttattttgtattagacttgttattattaaattactaagttaaataatattagtaaaattaaatctaatacatttcaattatattttttaaatatataaaatttaaattaattttaaatttatttatacaaaaaaatataactaactgttgactcagacatttagaaacagacttttaaaccacacctacttgttaatttgacgagaataaagtattgttaagtatacataatgagatacaacaatttatagtagttcactccttgtatcgcgacagtaatgaagctacgtctactttgggtttttatttacacgagatggattacagaagaatggataagtctggatgctctaatttct

SEQ ID NO: 209688 - DNA, 947 bp, Cannabis indica
tttgatggattagtaaaattaccctaatgcccctaagttatttttaagtttaatttttgcatgaggggtagattagtctttttttaaataggtattttgacttttaagtcttatgggctgactattaaattaaataaaaaaaagaagaaaaaaaagaaacctatatatgagataacttatgaaacaaggaaaccaaaagcttcattctcttcttcccctttgtgcaagccaaaccagccagctttgaggattttcttcagcctttttccttcatttcaaagctgattcgtgccccaagtcaacctagaagagctttgaggtaagctctttacctttttggattgaaaactctaggttttgagttggttttgaggtaagttttgcttttctgtggctgtaagaattaaactaggattggggtatgttgagggtaggtttttgagtatgttggagatggttttaagtggtttctatggctgcttgaatcgagtttggtttgttgaagccaaagttgagttttcttcacttcattgtgtgattttgattaaatgattgaattgttgtgttttgaagcttgggatatgttgtattatagttagtatactattttggaaagtttggttaggtttggaggagatttgggttgaaattataggagagaacccaagaattcttatttgccagaaccggtcgaccagttgccctgcaaggagaattcccaggttttcttcaggtttagtttttggcctcgggagttgtgtagtatctgttttaggttgtttatgggttgtctagcctattttggagttattgagggctaggttcttattcggtttcgaattatggttttattccggaatttcaatttaaggtattcattaagtttttgttgtcgtgacgtaggaccaagatcacctagcttgtttttccaatcaagtcggcccgca

SEQ ID NO: 209689 - DNA, 1271 bp, Cannabis indica
aaaaaaaaaaaagaaaatagctttattttgatataatattaaggattattttgtgttattgttgctacctttttggtattttgtatttttttttttcctttagtgtattcttagattctactgtatataaaccgaattgtattgactgcattacctgtaatattgagaggggcattcactaagaatttgagcgagttgattgtatagccccttcaacacagcaatctgagcttttggcctctccaaaacctctacctcaacataatacaattagtgattataattaaaaggctatatcaatacacacacataaatgcagaagttgtatgtaccaggagtggagcgagactggtgaacaaggagaagaccggcttgcatgagcctggcggtggactcaatttccattacaacagctcgaatgcgctctctcaagcttcctgactcctcaagctgaacccgaaaaccctcgaactgcttctccagcgaaggagcatgtgattcacctccctccatagttgtggagcagcagagagtgcggagaaacgttccggcgagtactgtgggagcagtacggatcgcaagaggagggaatgggattttaggagtagggtttaagaagaagcggcaagaagttgagaaggtaaggaaagcgtttcgaaacgccagtttcatattcttttattacctgtaggctgagctcacttctgtttattgtatgttttcttttcatttactaattattaaaataataataaatttacataaaactaggcgtacccatccaattcaatctaacttttttttttcataatccaatcaaatctaattagtaattgaatttaaaaaatcatattatcccatccaatccaattaggcctcaaaattcaatccaatctaattactaattggattggatcgattttttaattaaatattcaattacccacctaaatttaaatattaacttaaaaatataaagaaaaatatattaaaactaaatattacactttatttaagtttaatactccataaaaataccactattataagtgtaaggcaactaaaagtttgaaataactaaaacaacaatattgctcagtaataaaatagaacaaaatatcatgaaaataaatatacaaaacaaccaatcaacacaaaaaaatccactaaaaatataattaatacatacattttatgttttaatattttctattatataaataaatataaataatttttattatagaaataaacataaattaattttatta

SEQ ID NO: 209690 - DNA, 555 bp, Cannabis indica
gatagaggttctactgtataatacattataattaattaccaattttctaatatttcatatcttaagttacccctcaacatttttctaactctttttctctcataaaaaagcaagaaaacgtttcacaaagagacaaagagattctggttttaaacccccaaaaccaaaccaaactccaaaccccaagaaagagagagaaaagaagaaaaaaaaaatctaaaattttcaaaaactaaaccaaaaaaacacactaaataataacatagacaaaaacaaaaaacctaaaaaaaaaacccaaaaacaaattgcagcaacttcaagaatatgtttttctttttaccaccaccacccacacgagcggttctcgaattgcatgcactgcacacacttttttgtttttgttttttttccctataaattaatattttctttcatgagagagaaactaagaaataaaaataagagttacaaaacacattattactactgttatgctaataaagctttgaactttaatataaaatcagtctcaaaataaggaccctgacctcattt

SEQ ID NO: 209691 - DNA, 1080 bp, Cannabis indica
tacgttcttcatcgatgcgagagccgagatatccgttgccgagagtcgtttagacatttcgataaacacgcatctcgattggcggacaccgtctccgggccaccgcacgagccacgcgataatcttttattgttccttggcgcagattgcgccggggttcgttagcccgccgagatttctcccagcaggtgcgggcgggtccaaggagcaagctcctctcgcccgcccaagctgtttaaaacgtgttcacgggtcgttctgctgttgcaggtttcgacaatgatccttccgcaggttcacctacggaaaccttgttacgacttctccttcctctaaatgataaggttcagtggacttctcgctacgtcgcggggcagcgaaacgtcccgacccgtacgtccgtccgtacgtaccgtaacccgaaaccttaccttacccggaaccccggaaccttacttaactaacggttacggggtaagggacggaccggggaccgggggtcgggttggttacgtaaaacgggaaacgggacgggaacggggtaacggttacgtaaccgaaccggacggacgtcgtagtagtacgtaccgtccggccgttacctttaacggtaaaggttaacctttcccgtttcggttaaggaaaccgaaacccaaaacttaagttcgaactaagtagtacttacttacccctacccctactaccgaacgtagaagtttaacttaacgaaagtaccggtacccggcgtcggccgacgacgctagtacaccgttgaatacatcagtgtagcgcgcgtgcggcccagaacatctaagggcatcacagacctgttattgcctcaaacttccttggcctaagcggccatagtccctctaagaagctggccgcggagggaatcctccgcatagctagttagcaggctgaggtctcgttcgttaacggaattaaccagacaaatcgctccaccaactaagaacggccatgcaccaccacccatagaatcaagaaagagctctcaatctgtcaatccttactatgtctggacctggtaagtttccccgtgttgagtcaaattaagcc

SEQ ID NO: 209692 - DNA, 540 bp, Cannabis indica
ctgccaatggatcttggaatccattcttaaactcgttgtcttcttccctcacagttaaactcgatcgtgcaaattttctgtcatggaaatctcaagtcacccctgctgtcattggccacgatctcgatgagatcttgttcacaggagttcccccacctcaacatctcgttgacaacactccaaaccctgtatacattcaatggcgaaagaaagactaactcttgctatcttggctccgctcatcgatgtccgaatctgttcttgcatccgttgcaaactatactacatctcactctgtctggcgtgcccttgaacagaagttcacttctcaaacgaaggctcgtcgtcttcagctcaaaggtcagttttctcatgtccagaaaggtggcctctccatttctgagttcatcgataaggttcaaagtcttgccgactctcttgccatagctggttcaccaatagatgatcaagatcttgtgttacaagttctaaatagccttggtcccgaatttgatctcgttgtttctggcatcacgtcaa

SEQ ID NO: 209693 - DNA, 458 bp, Cannabis indica
taacatatctgcaattaggtatttaggctaactaaggaacatatttgatacttccctaacatatctgcacccttcaattgagattgtgattccaacatcctcttgtagcattttcgaaattcgaacctaggcatgtgaatcatcgtagtctttatagtgaactttgattggaccctcatgctcgtacaaatacgctcgggctacaatattgtcgatactggttgagcagagatatacttgttgatcaagggccctctattcatcgaaattgtataggaaaggtggctcgttgagggaaacaaactcctcaggataaaatttttggtcaaccctcatcctcacgagcgtattgttgtggaacgtacgcctgatcagccacctctcattcttcctcttattgggcagtgtttttcttctgtttaagggatttgatttcggcttttaatttatcaatctct

SEQ ID NO: 209694 - DNA, 505 bp, Cannabis indica
tattttgtttatgaggttttaaaaccgacgcaacatatgatgatgagagtgagtaaatgatgcgaaattgtgtgaaatccctaaacccccaaatcagatgccattgttcacacactcgtccctaacctttaatcgcgaaaaagctttggggaaaccctctcatctcccccgtcgttcccttcttcaaaactacatcgcctcatccactcatgtcccccgtcattctcttctcatccatgaataccctctctccatttctttacaatctccatgaccctcccctccccatttctctttatttcttctttctcggcaatcgttcggcaccaccactttgattcttcaaaattttcatctgcatttacctcctctcactatccccttcggtctcagagatcattgacaattcatcattctttgttggcgctcaagctcaataaatgcctcaagccaacatctcttctttgtctcaggtacgtataacccttttagctcattttttttt

SEQ ID NO: 209695 - DNA, 505 bp, Cannabis indica
ctacacaataggctccctaccccacttcttggtcacaagtctcctctagaagtcctattcaacaccaaacctgattacacttactttaggacttttgggtgcacttgttacccaaatataagaccttacaatagacataagctatagtttaggtctgcaccttgtactttccttggctatagcttaaaccacaaagggtacaaatgtcttgatgccacagggagactctacatctcaagggatgtcatctttgatgaacactccttcccttactcctcatccaaccaacctcaagtctctcctttaatttctgagtctgtttactatcctagttgtcacattcccactgtttcacctattactcaaccatgttccagcaccaatagcactggtccttcaactataggccctccccctggttttgaaagtgtttctaacagatctgtttcagtgcaggctcccacacctggccctcctccaggttttgaaaatttttgtaacagat

SEQ ID NO: 209696 - DNA, 773 bp, Cannabis indica
actctaattgaactctccaccaactcaatttttctctcagattcaagtgagagcataaaacaattcattttgtttgtttgccaaattaaaaaacaatattgggatttctgccaatttcaaagctaattagagcaaatcaaacaaaacccatcacagaaaaacaaatctaacaacagaaagaaaaaaaaaaaaaagtaagctcaatttaaagagataattgagtgtgagtgagtgagaaagagagagtgtgtgtgtgtgtattcataggcattaaattaaaaacttacaccaacagcagaatcaaaatggtctcttttaatcatattcccaagcatcacaaacattgtcaatgtaagtattccagccaccacttgccttaaatcaacacccatctcttctatcttcttttctttcccaaaaatgttttctttttctttctcagatcttttcccaggaaacaaacagatacccaatattagaaaaacagaaaagattaatgggtcagaacccaaatggggagaaatgaaaaaacaaaatcaatggatctctatttccctagttctaaatataaaacacaaggtgacccttataacccaataaataagagagagaataaaggttaaagctttacaaagacaaactatgtaacagcttattctataccacaagattaataatacaaccaaagagagatatttcagtttcataattttctttttcttttttctttttactaataaataaatcaataaaaaaatacctgttttttcttc

SEQ ID NO: 209697 - DNA, 850 bp, Cannabis indica
agtttgctagagccccatattttcatatattgatttgaaaataatattggaggaggctccattgtccaccatgcatcttgcgacagtcgtattccctatttgtgcagcaatgaccaggggtcattgtgcagaaaactgacttgagtagcatctccttcagagaaagagatagtgggctctctgagctttggttgcttggagcccctttctttgacgactaggatatcgcttttaggctcatgacaatgtgtccaagcatagtgttgcctagccttgttggactagcttgcgatgtggggtctgccgataatgacccctaggtgacccgttactggaagtggcatacggtcttcattctgggcactttgtgcctaagtttggtcatttggcatataacaatgaaagtggggattgttcttccttataaggaatttgatctccctctgcaaattctaacactcattggtgtcatggccgaagtcattataaaatcagcagaactttgacatgtccctcttgctcatctacttttgatgggagggggcttcttatatgggacggttccccaagtggccatgaagatggtctcaatttcttcgtcatgagggtgaaacaggtgaacttctcctcattatctttctagcttcatggcatgggagaagtgttgtacttcccctttttgccattattttttccagagttgttgttgttgcgcttgcccccagtgttcttgccaccagaggtttgcgcataggtgctagtgcctgcatgcacctctggcaagtcgtgggactgcagggtgtcttaagactgcctattaccgacttgccctgtcagggcttgtcagaca

SEQ ID NO: 209698 - DNA, 1064 bp, Cannabis indica
gggggactttaacacttggtagtagctagccagctagcctgtataaaactacaatgttcattagtcaaaatggcacaaaggcaaaagagaaacccatgaataaagcacaaacactataactaattaaactaaaatttgtgtaaagagaagaaagaagggagaataaaggaaacaaagaagaaattttgcacatgactatatatgtgtgtaactcttactctctctctctctttaataggaaaagagaattgggattgcttgcattttaagttaattatttatatttatataaatgctatgctttatccaatattatgctaaaacctagagcttgtgaagtaagaaaaaaaaatcaattaaagggtccaaatacttgccaacaagatgaaaaaagttgtacatgtaaaacttgagaaagacaaagatccaaatatctagtgatctaatgacaatacacgtaacccaaagaaaaagaggatctgtctcatgaaaaagaaatactaaacttgtgttttacattctgttattggttggtaaatttatttgacagcttaattatattgtgtagtggcaagttaatctttctctatttcgatagaacacaggttcgacactcagcttttgtacttttatttgagaaaaatattaaaattttacaattattaaatcttgaaccagagacgtggtattggtataaggagcttaattttactatgctaaaggttcagtaagtatgctaaattaattttagttaattaacaaggttatatttaactcttgtaaaactttttgggtccgcgccctaacttctatcaaaattgcaacactcaactcaactctcatgtactttttttgaaaaacaactctcatgtacttgccacaaaaataaataagtaaataagataaaaaaaaaaaactaaaaaactacaactaacatgtgacgagtaggaagtgttgtaaatactgttaggttttaacacggaacacgagcacaactaagcacgaaagatatgaacttgagcacgacacgatacgatactacaaattgacacaattaatataat

SEQ ID NO: 209699 - DNA, 507 bp, Cannabis indica
gagtaggactgatgcacacgggacggaaaattagtggagagtgtttttgggtctctatctctattaaggattttaattcttatctccgcttatttcataagccaacaaatagcctaatgagagtggagacgggatgaagaatctcctaataaaaaaaaaaaatttataataaattttttaatatataaaaatattaaactacgtaaaaattaaaatattatatattaattaccattcaataaattaattattatctgaaacacaacttaaaattcataacaaaagatactaatatactaaaaaaaatataaacataaattataaattatcaaatattactataaatataaaataaaatactaggcgagtcctgttggggcgaagagtgtaattctcgttccgccccatttaatatattcgggaacaaaaattaatttccatccctactttgttcccatttagacggagaatccttacccattagaggtgggtctctgcgggcccatt

SEQ ID NO: 209700 - DNA, 633 bp, Cannabis indica
cttcttcatcttttacaaactctaaaaaatgttggagtaagatttggaactcgaaggtaccttcaaaaatctaaacattttatctggaaagttgtgtctaatgctattcctgtagctttttccctttttgttaaacatgttattgattctcccatttgtcccatctgtaagcttagtcctgaaattgttcaccatgctttgctagagtgcaccagatcgaggaaagcttggaaatcttcaaggtttgtgaatcactactataattataaacaccttgatatcaatgagtttttaatgtgtgttttagatgttttgaataaggactatgttagtattttatactattttttgtgggctctttagaatcaaatgaataatgatctttacaatcatagcattattctagctactgatgtctttgattggtgtgttagttatttcttcaaatatttggatgcacaacaacacaatcactacataagtaaatctgctcctatgcacaccaggtttttggtagcttcttctgagggtactttttcaggtttttactgatgctgccattgatcatcacaataggaaacatagcattgctattgttgttttgtatgagttagacagggttaaagctgggat

SEQ ID NO: 209701 - DNA, 961 bp, Cannabis indica
ttatttatatttatttataaatatcaggacaaagaatgtaagaatttatttatattcaaaaaaaaatatatatttatattttaatactttgtttcatcaaccatgatttattaaataaagagttttgattataagtggattcatgggactaaaagaaactcaaatggcattagcaagtggtgtttctttgtcgaaattaatcttgttttttctttccttttgtgttgatcatttgaaatttttatcttgaatgcataccttgattcaagatcgaatttccatctttgaatgtatacttttatttgagggactgaaggttggagagggaatctcccgttggactggggctaagggagagagttgtcggtggtgccggagctgagggagaaggggagagggaaccgtcggcggcttggagtgaagaagatgaagataaaggttctataagtccaccccaatttcactaagttttgattcccaacagcacctctactataaaaattcttcatttaataattgtcaccaattatattttctgatattggacatattggtgggcccctaaaaggagtgtaagaattttcctaaattaaaagtggctatttgacaataaattttagtttaacggtatttttttttcttccgttaaactttacaattttgttaaatatatatacacctacaaattcttttttttttttttttttttattttcaattttaagggattttagttgcaaatctcaaaactattcttctttaagatttttgttcttgcaaatgatgttttatggggtcaaacttctttatgtcaacatgtctatggaaacccttccaagagtatggaataacttatttgaattttttgaagagtttgccaagaatacaagaaacaatattaacctcgcatgaagtatttgactcaaaatcgaaatgaatatgttaaatttttatcatttgcc

SEQ ID NO: 209702 - DNA, 481 bp, Cannabis indica
ttatttctcacttccttcaccatattggtaccccccctactttcacttccctcatccataagtgtctctccactgtcacctatcaactgtccctaaatggtcagttatcctcggtgttttcctcctcgcgaggcattcgtcaaggtgaccctctatcaccttatctattcttaattgtggctgaaggcttgtctgctgccattcgccttcatgaagaagccaatctcctttcaggtattaaaatttgccgcggggctcccattttctcccaccttctctttgctgacgacagtatggtttttgcccctgtctcttctcaatcctcggaggctataaaccgcattttacttctttatcatgaagcctcgggtcaatctgttaacagggaaaagtcttccatcctcttctcacctaacactccttctgattctcaaacacactttcgatcttcattgttactccagggtgaagggtttattag

SEQ ID NO: 209703 - DNA, 590 bp, Cannabis indica
aaaattagtgtggttcatacatttgaataaataagattccaaattaatttattaatacactaatattacaaaagatttagaaaggagctcattgatggcaaacaacaaaataataaaaaaattttttttttttttagatcacaagctattttcttcattaaatgtagaagacatagtagattaatcgaactaaagattcatttttggcaaaaagaaataaatcaaatatagatagggaaaacatggatagacatggaacctatcaatttaggccaatatggacaatgttgtgggccttacttggtttggtatatccgaatccttatatttactaataaattctactttcaaataatgaccattttataatatgtatttagaaaacatataaaggagtaaatattgcacaacttgatttatacatcaattttcatttattttctattccccattattaataacaaaactctcttctttttagagataattacaaatctatgtgaaggtgatcataaatacaacataatagtattacatctctcaaaatttaaaaaaaaaaaaaaaaaaaaaaaaaaacttaaatgaagtaa

SEQ ID NO: 209704 - DNA, 700 bp, Cannabis indica
aatatattttcaaaattatatatattttttttaatttacacacacttttgtattacacgatacattaacttctttaaaatacatcactaaaatcctacttttttgaaattttattatatttattcatttcaaatatataatattaatatataaatatcagttttttggtaatttttccggcgattatgcatactccgatgattttttccaaaatttgttgtcggtgacggaaaagtcactagagtagctgtcaatatcaggaaagtcgttagaattgacattgttaccgaaaaaatcaccaagaaagtggttacttcatcaagaaatcggtttcttcatcaagttggtaattttttcagcgacaatgccaatttcgacgaattttttggcgtcggcagaaactctaacaacttttccgacaccgaccactattccggtgatttttccgcaccgacagcaaactccggcgacttttccggcatcagtaataaataaaactacctaaacaaatgaaaatattaaatatgggatttgaaaacttaatttacatatatatatcatatcaaatactataaaaaaatttaaaaataaaaaataccattaaatttgtcaaagttaaatgtgtcatatttaaaattagtaattgtaatttgctctataatattttgtgtaatgttttttaaatataatgtaaatgggc

SEQ ID NO: 209705 - DNA, 855 bp, Cannabis indica
tgcagatggatgttaatggtgcaacctgaatggattgcatgaatgagagtttgacagtcagattcaatgtagtttaccccaattgagttcttttgacaccaatcaagagtgagttgaagagcgtgtgcttccattataagcggttggtgtattcctttctaggggatagccaaggcagcaacaacctctgccttatggttgccaaaccccattctgttccggtgtgtgttttgggccgcatcaacattgagttttaggtgaccgattggcggtggttgccactgaaatgggggctgactaccgtcttaaaacttgagtggagctgtgccgtcgttgtgctggtcatgctggtagagataatcttccgtccactggataagagttgaggcatcttggtctggttgatggtgtaagacttgattcctgcaatgccaaactttccaaagaagacttacaaagaactgaaattctttgggtgtcataatatcagtacatatatagaaaacatcatgacaaggtaaggattttaatttaacaatgttatcataaaatgtagttaatttccaaaccttctggacagagtggcaaccaaacaaagcatgtgctaaggtttcctcgtgattattgcatcgacagcaagtaggggatctcactacatgatggcggtagaggttcacactagtaggaagagcatcatggtaagctcgccaggtgaagtattttatttttaggggtatcttcatgttccaagtcatcttccactatttttcttggtgagttgtgatacagggagaggggctcaagttggtgtataatgtcatgggtgaggtgatatcccgaattgacagtgtatgt

SEQ ID NO: 209706 - DNA, 657 bp, Cannabis indica
ctcaatacccttcctcccgattctgagttgttgtgtattatttgttgttattcattttgttgtggaaccggttctattttaatttatatttaagacatctacttctagtgacttttacggtaacgtaactttttcagtattagtgacttttccggcgaaacttattattaaaaattttatcaaatttacgtatcgtcttttttaaagttttccatattttttataagaatcatatatgggttccatctcaaaataaattagtaatgagtggagtagtccatgtttttatatatgactcaatacttttacatttaatccatgtgggacaaggttttcaattaattttaaatattaattattttttaatctcatatgttttttaaattatttatttatgctatataaaaataaactctattaaccttttttttatttatgaataatccccttttttctttctatattgttaatgggactaaaggaaacccagtttaacatgagatataatatacaatttaatagtcttatttattttactttgataatacaaaaaattttacttttaacaataaaatttatgactaattacaaattatcattcttatgttgtgattaaaaaagttgtggctaaaagtacaaatttttgtgactaaatgt

SEQ ID NO: 209707 - DNA, 505 bp, Cannabis indica
caaaaaccaaggtttggttgtttctgtagtaggaaatggttaactatttctacatgatactgtggaaatgtttaatcatttgacccagtgggaaaccccattttttgaaaatggtaagccgtttggggtgtttttccagtacctaggtttctgtgttttgtctatatttaggttattccaagctattatcgatagggatttgatcagttttaagtttagggcctatttcaagtttgattaagttatttatcaagttgttgttgtcatgactatagcgcccaagatcgtcgaacaccattccactcaggttggcccgcacacctgactttagactaaggtaagaaaaatcaattgttatggtaattaccgttattaagaaaaagttattattctcatttggaaccgctgctagacttcttacttatcagctgcttcatcaggcaatgacagtgacattagaaacttgttggtaattaacgaatgtttaggatgctttataaagtat

SEQ ID NO: 209708 - DNA, 669 bp, Cannabis indica
atcaattccctcattaagacaagtaagaacagccctagcaaaatctaccccaagagtggaccaattcttttgataaaaataagcatttagcccatccaaaccaggggccttatccccagaaaggttaaacagagctctccttacttctttggtagaaaaaggtgcatccaggaaagcatagtcaaggccatccaaaggaggacccaaacaatccagaatgagattaacaacatcagcatcactaccaggagaactaaacaaatcagtgaaataagaaactaccaaattactcatgtcattatgatcagaaataattctttgattatcatctttaagaaacttaatggtattattcttttttcgtttagaagcaaaacgatgaaaaaacttagtatttttatcaccagctttcaaccaatgggttctagatctctgcttctaataaatctcttccttataaaggagagcatcaaactgagattgaagacattgaagtcgaaatcagttatcctgatcagtaaaaggaatatcttgaattcgagcaatttcgcgctgaagatcagaaatacgagacttgagagaaagattcgtatttttattccagctctgaagagcagaaatacacagatcctatttagtcaaaaaattttgaaaaggacttcgagaact

SEQ ID NO: 209709 - DNA, 689 bp, Cannabis indica
ctatttctgtgtttctgtgtttgctttctttcgatcatggatgagttccttaacactgtctctaataccttagttttcccctctgatgaaaataatattttcacgtatgatgctagttcttcctcttccactcctgcaaccattagccttcttcttaaactccataccattagaccatacaataggccctctttgatgaaaactctctctggtatttggtcatcacagtgtagatttcctgtctctgtcactgagcatgctgatggtttatttctagtgacatttggttgtgagggtgataagggtcgaattttagagggacagccgtggcactttgctcaaagtatcaccatctttgctgcccctgaaagttcctttcctattacccctgacacccttcattatgtcccattctggattcaagtctatggtatacccttcatgtgtaagtcctttgatttagctcgtttcattgctactgaggttggggatcttatagaggtggataaggatactgtcaaggagggtactgggccttatttaaggctcagaattcttctggatgttaatcttcctattaggaggggtatgaacattaggttcatacgtatgggtagagagtttgtcaaatggattgactttaaatatgagaggcaccctgatttctgtttcttttgtggtaaacttga

SEQ ID NO: 209710 - DNA, 908 bp, Cannabis indica
ctattttattagcaacattggataaaacttattagaagtcttatatttcagcattgtgacatagttcaaagggaatagtaaataaatttaaaagacgatttgataatcgtattaattcgagggacaaattctacacatagcctttaaattaacataagaaataaaatacacctatacaaccctatataataatacacaatctatttatgtacattgaggtaaactaaactaattgtatttctttaataactaaatttaatttttataaattataaatatataaaaaatgattccccaaaatattaagggggccatggccacagtttggattttaaggagaaggcaaattatgaatcttagctcatttgctgtatgagccagagcagtatatttatagcaatattcagaaatacaaaaacagccacttggctggacacctggctgtgattacatgagcaaaagactagaatattcagcataaatattcccctaatgattacacaatgacaaggcataaccgaattcatacaagacaaattacacaattaaaaagggcacaattctgttacaaacaggagatcactgaattgtatggctgcaatgcattttcctggtattgcaggtgtagaaatacagtagctgaattgttattccttgacatcccctctcaaacgaaagggtgagttcctcacgccgagtttgtcaacaaggaaggcaaaaacgagaaggagataggcctttagtcaagcagtcggcaatttgatcatgtgaaggaatgtatcgaatctcaagttgcttctgcagtactttatcacgaacatagtgcgtgtcaatttcgatgtgtttggttcgagtcatggaagacgggattcgctgcaagtttagtggcactgaggttgtcacaccat

SEQ ID NO: 209711 - DNA, 2794 bp, Cannabis indica
ccagtctcttgcacaccgggcgtaattccagccagaggagaggtcataccttgacccgcgataggtggttgtgtgtttggttgttcaggattggtggctagtgggacccttgcattccctggagtgtgcagtgcaaaatctaccgccagtggatccacctaatcgaccacacctctacgagtttgtaccagcaaagtatttatgatcaatcttaaagtaaagagcaaacttgagttcaactttcaatgaaagcaccaaaatattgacctcacttttagccaacgacaatgagtcaaataataagcgataagaaatataaacaaagtgaagtatgaacgaataaataataaagaacacaatgttttaaagaggttcagcctcgttcagttcgataatagcctactccccttgatttgcattaactcaagaacaaagaatacattgtttcctctcttaaagctctcacaatgaaatctttgagtatgctctcttagatttctctcaagtaattcttttgacccccatactaatgagaatggatcactatttatagggctaaatgcttgagagtaggtttttcttttgcttataatgtctataatcggtaagaacatatattacatatttagaatacatagattgtgggatttggatagcttgccatatctctatgatacgatcccagacttatagggattgcttttgtacttcacgatacaagttttgaaattgctaagtgttaatgcgctgctcgaattgtccactgctcggctgggtagatattatctgtgcaggtgtatgttatgctctgttcggaacatctcttaagccagatgtagggaattagtgcgaaaaataggataacaacataaattgcgtttaatttgttttatagatatatagatatatatatatttataaattattgtgtatatttacatttttaattattttaaacattgttaagaattttatatatttattaaataaaaaacataatttaaaaaataaaataatagaaatttcataaaatattctgtttgtcaaaaataattaaagaaattttgaagtattgacaaaatttgaaaaaagtcaagaatatatgttgcatatatctaaaatattataattaattaaacaagaattaccaactacacatacaaaagttatgtaatattaattttgcacaaactaaactgaaagaaatagtgatctataaatagtctctaagtgctataccacatttatttctaaataatgtgggatttttctacaaaataactcattaaagagtgaaatcaataaaattttaataagtaaataaaaaatataaaaaatgagaaaaaaataatttagaatagaatttatagaaggcgtcatgccaccacccataacctggcacccatatatcgcatcacctaaacatgtgagcctatgtcatgacttggcatccatatatcttattgcctaatcaagcgagcccattgcattgcctaatcaggtaagcctgtgccataacctggcgcccatatattgcatcacctaatcaggtgagttcatgccatgacttggcatccatatatcgcatcgccttattagacaagccattacattacctaatcaggcaagcttatgccataaactgacactcacatataccacattgctcaatcaggcaagcctgtgccataacttggcacccatgtatcgcataacttaatcaggtgagcccatatatcacactgtcattgcctaatcagacaatcgacaatcaagaaacctgtcatgccatgtagtacattatactttccttacctttaattccgattcatgcatgccggccaacctaagtagagaaacattcccgatgatatcgaccctaagtcacaacaacggtaaaccaataagtgtctatcccaaaatattgcttaatatttgcaaaagacaatctagggttttataccaaatcttgcggtataaatataataaaataaaagtttatatttagggtctaaaacatacaccatattgtagatttcgtcataagcttcgaaacggtatatagaacgtctaaaatggatacccgattaaaaaattatgatcaaaatactatttttgatctcctcgaaaaaactaaaaacgacaaaccgttttattctgctaaaaaacaatctactgtttttttcacaagagcgaaaaatctcaagcttcaactcctcaaaacctcaccaaaatctaaccaattgattccaaacttcacagaacaactaaaatccatacaacaatctctacgtaacaaaaatcaaaattaagctcttaaacaaaaaaaaatccgttaaggcacaagctttgagcttttaaagtccaaacttgatttctaactcaaaatagtgttaattccatttttggcatatttaattgaaaaaaaatattttattatttattgtatattttcggctggagtgtttaatttggtgtgcatattttgtgtataaaaatttggaaggaaagttgtctagctttcctatttatggaaattgaggtaaaaatggcaagtttgattacacaatttattattatctaaccagctggtatattctgatcttgtgttagttttccattttgttagatcaaattttttgaagagaaaactggagttaaactttccttttttataaaagaaaagttgtacttattgcccacgattctgtaggtatagaaatggaaattcctaggctgattgaagatttattttcgggaagtttttagtaagatggggtcttgttcagaccgt

SEQ ID NO: 209712 - DNA, 1290 bp, Cannabis indica
tcttctctaggatgtcaaagatcatttcccccactggactgttccacttactcacactttctctttgctttcgcagtctatccatcaaccaatatggaacatactctaataatgtaatgattggcttgtctctaccatctaagattgttgaattgaaactctcacataaattattcaacaacatgtcatactgtcattagtcccttttaacacatccaactttctcttgaatttctccacagtagttgccctagcacaagcccatagttgttgcttcaacaataatcctagaaactccttcttgaagttggcataaagatgcctaacacaaaatcgaacctcagatccttcatacactgtccccacaaccctttccaaccctttttatctatatgaaataaaggtgagttctgcagtgtcctccatatctaagtcctctttcagtagttcagcaaaccatactaaaaagtcaaaaaggacactaagggtattttcagaaattctaaattcccgactaatctcgacattcccaatgtctaactatacagcctcgctatactaaaatactaagatgtgattctactgagccatacactgcgtccaatgttgccgagcactgaacatgcaaaattatgaaatttctatatatgacatataaaatgcattctgaattcaaataaatcatcataaataattaatttaatattaataaataattttcataattaaactctaattatctgctaatttccaaatttaagctaagcggtctttacaacgaagttaagaattttgtttggaaaaacataatatgcaggtttggagtgccaaaggagatagtcacagacaatggctcgcaatttgtaagtttaaagttccaaaacttttccagagaatggggaatccaactctcattctcgaccccaagatacccacaagccaacggtcaagcagaatcaacaaataagattgttgtcaacacattgaaaaagaggttagagaaagccaaaggaatgtgggcagatgaattgcctagtattctgcggtcttatcgcactactacaaaaacctctactggtgagacccctttctcactcaccttcggaacagaagcagtcatcccagcagagacgggaattcccacttccaggtatgaacatttgaccgatgattagaactggcaaagtatgaacctcgagctcgactcacttgatgaaaaaagagagaaagccttgatcagagctgcaacattccaacaaaaggttgctcacacttcaacaaaacatccga

SEQ ID NO: 209713 - DNA, 1255 bp, Cannabis indica
tttttacacttatattttattttagatttttgttgtgcattatatattgttttgattatatttgtgagtatttttttgtgtgtgctttttttttttttcatttggttgactaataaattggtttaagctatctttactgtttattatttatgttttgttatgatttgtttgtggcctcgcgaccgcagagaaactttggataactctgtctttgtcgcagaagtctgtgaattcatcacagtcgaattgctttctattgtttgggactagtttgtgaggcaacctatatcggcatacgatgttctttatgacaaagtccaaggctttcttggtagttatagtcttaataggttcagtctccatccactttgtgtaataatccactgccactatggcatatttgaccccaccttttcccatggggagagacccaatgagatctattccccacacaacgaagggccacaggctagtcattaaagtaatttcattgggcggggctcatgggatatttacaaacctcttatatggatcacacttaaggacgtagtctatacagtttttcttcgttgtgggccaaaaatacccttgtcttaatattttatttgagaggcttgggcctccagtgtggtctccacagaatccctcatggacctcttgcatgatctatctagcttcagaatctgacacacaccttaaatatggcatgctgagcccccttcgatagagaacaccgtcgatcattaagtatcggtgagcttggtactatatctttctggacacgatacttccttgaggcagttctcctgttgttatgtacttaatgatagggtccatctagctcgacccttgttcattagtagccactacttctttggtcataatgctaggttccgtaaggtgttcaacaggtatcacccccagcttctctatctcgctatctaaggctagcttagccagacagtttgcatgggcattctttctcgtggaattcgttccactttgtattccttaaactcttgcagcaattccctaacaaccgatatgtaagtagccatcttttctccccaagtctgatattcccctaatacctggttgaccaccagttgcgaatcactgtacatttctaccctgttggcccctacaaccttagccaattttaattttgctaccagggctttgtactctgcctcattgttagaagccagaaatgtgaactgtagggtagactggagtcttagcctgttaggagaga

SEQ ID NO: 209714 - DNA, 543 bp, Cannabis indica
ttgaccactacaacaacaaattgtcagttcagatttaagaaaaaaatggaaaactaacaaatttaaaagtcaagcatgcttgacctggagtgattacgagataggtgactttctgagaggttttcccaagaagcatgcaatgcaagtgaggataaagcatgttaaaaaatactcgtgttagtttgtagggtcagtcatcgttctaggaggcagccaaagtggtagggcgccaaagtggtcggccagccagcttctcttctggcagacacttttggtgtctctgcagctttcaacctagacagcactctcagctacgagttggcttcaacaacccacgaaaataaaagttcaacttcatatttactattttttaggaataattaataggttattttcttatatatttaatatgtaacaaataggtaatatcttctcattttaagggagatcaaacctctttaagcttagatcttctgtaagctctctcctatataaagagcactaggctaagtcattctagtcattccatatgctacaaaaggc

SEQ ID NO: 209715 - DNA, 755 bp, Cannabis indica
gatgaggagtgcagcaagatagttgattcgacttggctagatgtttcatattggggctcggctattggacttcgggggagacttaaccagtgtggagagaagcttaatgaatggaataaggataaaaaaactgagttgggagcaaaaactaagaaactgatcaaagaggatttaaaaaaaatatcctcttcggatggagagatagactgggaaaacaagcgaaggattgagaaggaacttaatgtagccgaatataaggaggaaatactatggaaacaacggagtagagctctatggcttgcgcacgggggtcgtaacactaaatattttcatcacaaggcctctcaacgaaagaagaagaatactataaaaggtttgtttgatgagcaaattagatggtgtacatcgggcagcgaaatggaagaaattctggttaattattactcgaaccttttcacctcttcaagaccttctctcaccatggaggatatcctcaaccagagtgttccttgtcgcctttccttccaagataacaacctactccttgaagatttcacaaaggaagatgtaaaagctgctattggccaaatacacccgctcaaagctccggggaaggatggactgcctgggttattttaccacaaccattgggaagcggtgggagatgaagtcataacaacttgcttggctgtgccaaacaacaatgaagactgtaaatgcattaacgacaccttactttgtctcatacccaaggt

SEQ ID NO: 209716 - DNA, 754 bp, Cannabis indica
gatacaaactagggttcttttctttcaagaattttttatccctttttctgtacattctgcccctgtttataatgacatagggtggcagttaattacattcagatacgaatcccataataatatttccttgaaattgtgggctttgattatgcccaacgtaaataaatgcagttattatttgaaaatcatatagctatgattttaacctcttttaatgggtcaactctgatgtggatttagatacactgcaaagtgtacctcgccgggacatctcgctaggtgcttgaacactcaataacaacaataaccctggcagcgagctggagcttttcccatgtctttccgaggttagtaatgtaaatctagtcatttttgcgcttgaagacatgctccatctgacaatcgcagttcttggtgacagggtgaacttcagtagccaacatcatttgaatgtcagcttctttctgagagagctgacgcgacgtagcagtggaattcattgaaagatgtctggagctgattagtgaaggtaccaggagtatgcatttctatagcgagatggatccctcgctatccatcatttacgtccttcaagttgttacatttagttagtataatgtatattatacgctaagtgttctaacagcctacacgtctcgtcaacacttttctacacattgcgaggttgatgcctcactatgtactatcgatgtcatcctttacagttatatcctctgacgcaaaatggtttctc

SEQ ID NO: 209717 - DNA, 787 bp, Cannabis indica
atatattacagtaatattatttaggcatactattttattttaatatgtaaatataaattataattttatttacattaatatattagtattactgtaaattattttaaaagtcagattttttttaatactttaattttaccccaattaattattttatgtttatttatttatttaaaataaaataaaatatgatgtaaaataacatattaaaaagaatttttcccaacagtttataactgttgggaatactaagtatacccaacggtttataactgtggggaatacttagtattcccaacagtttataactgtaaagaatacttagtattccgacagttataaactgttgacattcattgtttttttaaaaaaatttcatttagtattggccacagttctccaccgttggcattagttttttccaacggtttttttgcttcagttttaaaccgttgggaaaaacctccgcttaccttttccaacagttttcataattgaccctcttattaatcgttgggaaaacctaacttcgtagtagtggcaggtgaatgtgttctggcctatgggactcaaccgagaaccactcaagccaattttcccagcaatcaatagtactcgcggttgttcggacttgccagcggcatccaaaccacaaggctcttgcaaagttacattgccaaaagaggtggagtgaagtttccatctcaccattgcataacgaacaattaggatctatcgagggaagaatataacacagtctatctttggtgagtagaccattggaaat

SEQ ID NO: 209718 - DNA, 721 bp, Cannabis indica
gtaataccaattctctcttacgtaatacatattttggcagcaactaataattcttggtattcacttttttttaaaaagcatttgatgatattttaattaatttaaatattaactaaaaatcattaaagatctaaaaattaaactgaaaattcagaatttttaaacttaaaataaaaaaaaaattaatcaagaaaagttaaaaatataagtttagaaattatatttacattaatttctttttttggtttcaagattagatgttatatacatatattttttttttttcttaaacttgctttgagtatttgtttactttttagaattttaatgatttttacttttataataattattgaattgaaattatttaccaatgtgttattttagtcaaatttaactcaacactgaaaagagggtagaagggtggtaaaaaagtattacaaaaaggattattcgctattatccttttagaaaatgttattcctcgtctgtgatatggtaatgacacttctaatgaatcaaaataataagactgtttttaaagcaaaattatcaatgcaacttcaaaaattgtagtgtgtcagaaacatcattagtagaaagacatataatgaagaaaaaaatacatgcactgaatgaattgttgaccaagatgcatacatatgtggtaagaacaaaaaacttacacactagcatcagtcagtcagtcacacaacacaag

SEQ ID NO: 209719 - DNA, 950 bp, Cannabis indica
actttggagccccatgtaacctctctatttctttaatatatattttgcgtactgatccactgtaaaggttgtttttactcgtagaaaatatgtggatttagtaaatcaatccaccacaacccaaatagaacgaacatccacgtggttctaggtaacctaaccacaaaatccatagtgacatcttcccatttccactcaggaagagttagaggctgcaacaaccttaggtctctggtgttccaccttaatctgctaacaagtcaagcaccgggatacaaattctaccacattattcttcatcccgcaccaccagtagaagggttttaaatcctaatacattttagtagtgctaggatgtaatgaataaggagtggtatgagcttcctcaagaatctcatttctaagttctacattgttttgtacacacactctggttttgaataacaacatcccattgtctgacactgtaaaatctttagcttgaccagctaaaacctcttctcggatcttcaccaattctgaatcagttaactaagccgctttaattctgtctaacagatcatattagaatgtcaaattattaagttttcctacaaaaaacttaatgcctgatatgatcatgtattttggtaggtggggtgaaatcataatcatactagttacttactcgagaccctttctgctcagtgcatctgccaccacacattagctttctcgagatggtaaaggatttcacaatcgtaatctttggccaactccaaccaccgcctctgcctcatattttaatctttctaagtaaagaaatattcgaggctcttatgatcctgtaaatctcacacttttctctgtacagataatgctgccaaatcatcaaagcaaaacatatcgcggtaagttctaaatcatgagttggctgttcataccctttaactaacaggaggcataagaaa

SEQ ID NO: 209720 - DNA, 1557 bp, Cannabis indica
aacttttgtctttatttccaacttctgagatgttttacttactgtctttgggctcagactgagcaactcagaagaaatggggaaggatttgtctgggctattagtaatatctttggaggaacaccaaagctcatcagcagcaaaatcatcacttgtaaggatatttagtcagatggctaccattatgcataaaatatatgagaaaaagcaagaaaaaacagatgaaaatgagggtaaataaatgctatgaatggaagtgtagcagaaaatttatcaacacatacacttgggagggtaaataaatgctatgaatggaagtgtaggagaaaacaaatgtcttttttacctttttttttattttgagtatgatttgtgttggtattaggtatactttttttttttgaatgaaatcaacactttattcataaagatccaaactaaggaagaaacaaacacaggaagagtattcaaacaaaaagtactatctgcctcaaaatgagaagattgcgctaacatgtgcacaccttgttagcagatcgcttgacaaaattcaaggaaaaagaatttaaactattaataatagccttacaatcatctagaacacagccataaggagagaccgtgtttttattattattcaaatccgctactgctgtaaggcaatctgattcaagaatcacgtccgcccaattattgtccttaatccaacttagcgcttctttgatgctcattgcttcgactaaaagtggttcaaaaacaccatccctgctaccgcgcttagctttcaccaccattccaagtgagtcctgagctacacatccatacccaaaacgcctactatccaagaacactgctccatcaacattaactttgattcgagggtacaccggttttgtccaacgctctatctcaacctgcctaggcacaaggttggtaactacagaaagtttttgagcattaatccattcctcaaagctgagtttagcaaacagagtaacatcactaatagtcggctgcttctccttccaaaccagttggtttctgtgatgccaaattgaccaacacagcataaccgcttcaacaacttcagcctcctgccattgttgtaaacctgcatcgaaccagctggaaaaaaccatagcagcagttccaactgttgctacccgagatacactccagcaattttgtgcaaaaggacaacgaacaagaatgtgaaggatggtttcaggagctcctttacaaacaggacacataggattgatgttaacatgtcttcctaccaattgaaaacaagttggaagactattagaacaagcactccacagaaagtttagtacttttggaggaactttcagattccataacttcctccaaaaccccacattatcactaccactccaatttaatttccatttctgcatcagattataagcagacttaacagagaataggccggttctctcctttgtccaataccacgcaccttgagtattcccactaatcggaacatgccaaagcaattctctatctcggatagaaagcacatccatcaccacc

SEQ ID NO: 209721 - DNA, 991 bp, Cannabis indica
aaagtttcagcaattttggaaaagggctttctctattcttcttgaagcatgtttggaatacctacttcggtacccgtgttgcggtgactcttctgtctcttatcttttgtctaagactatcattagtgtaacgttttaatgctaaggcacgttacagtgatatttcaattgcagtgctatttaactaatcaaagaattttcatgaaaatcgtgtcaaattaaaacttttaagattaattatgaaactttataaattttataagaatatttacaagtgttaggatcccgttgataaactttttacaaaatattcagattacaaaagtgaggtcgcacaacgactacaaaataataacctcagatgtcccaagaccgaacactctaggtcgcgccgccatgacatgtacaacctcatcctagctcaagcttactcatgttcagccttcatctttccttcacctacacatgaaagtagaactgtgagtcgacagactcaataagaaaagcatataacatatcacataataatgacttgtatctaggcgcccatacacctatttacaaagcttaacaactgagtaagaacgttccatactaaggtacatccactataccacatacacttcgtaccaacattgtacgagtgttggtagggtttattttgtacccagagtaccactaagtgatataccacagacaccctgtacctccccgtacttgtgctggtgacaccgtaatgtactctttaaacaatatacaatataccaatgcactttgtaaaatttccgtataagtgttggtcctgtaccaaccataacatgcatgcatatacatttcacacatacatacattcgcatatatatcacatattatacgctgttcttacctcttttccaaattcaaatgagttggccgacctgaacagaatgtctcgtgctggatggatgccctaatcaaatattaaaaccaggtaaataatgcgccaaaaccc

SEQ ID NO: 209722 - DNA, 566 bp, Cannabis indica
actgtaggatttttattcctagtatataacctacacacagcaaagactagtcaaagaaatggtcaaatctgacctttaagacccagtcaaaccacctttgttgactcccttttgatgaacctaaacgacagcccctagttaataactacaggtcgtttattcaccaagctgaaaccctaaatcatatcatatataagcatcattttcttcaaacatacacacggcacacacaaataaaaaaaccctagcagagtgttatttccttctccattcttctctgaagagtacagagataaccacaacataaacccagaaaaatccctttgcccagtttgaatcaaacccgattgcacccaagatcaaacccaaagaaatacaatcaacacaacctatatactaatccattccagatcataaacacaacccaaaaaaatagtctacagcccaatacgaatcaacctcaaccaagctttcttctatgttcttctttgaagaacatgaagaacacaaagagaaaaatcaagcagaaaatagtataaacacaatagtaaatgcagaaaataaaa

SEQ ID NO: 209723 - DNA, 561 bp, Cannabis indica
gattaatggtcattggtgaaaactgaaaggagtctccatctagtctttcagtgctctctctttatttgcccccattctcccgctgtctcgcatttctacctttttggttctctttattcccctctatctctcttctctcctttttttctcttaccctttgtgcgaaatttggggtttttgaatggttttcgttttgttttattttgtgaggaaaattcatgttggtcttttattctgaatatgggttttgaagattgtgtggggaagagtattgggtttcgtttacttttgactcttttggactgtgattcttgggtttgtatttgcaaatttttaatcttgtgattgtttgaggaactgcttttggtgaattgggattattttgatgtgggtttcggggtctgggtttggatttggacacatttacaggttacgagtatagagaataaatcagaagcttccactagagatcttaaaaaactgtagtagcattgtgcagctgaattggtgtataaatatgtgtaagtgatggtgaaattggtaggtgatgtgtaaagcata

SEQ ID NO: 209724 - DNA, 650 bp, Cannabis indica
atatcagtaacttaatattttttataattaatgatattttttaaaaattattttttaaactcgatacttaattatactaataataatataatataaaaaataacactaaataccaataatatattttagcaattctctacttttaatagcctaataagtatttagatatgtacaaatttgtacacatatgaaatctcattgttcatttcatttatattaactacgagatttaattatttatatactcacatatattttatacaatattatgttgagtactgactattctaaatgtatactcacatatttatctttgggtattcaaatgacttttgaatactgatgttgtctatattcctcccacaacacaccactaatatatatatatatatgtatataggtgtaagtatatgtatatgtattatatgagagctaggggtgaaaaatggagtagtagtacgtagttgttgtaaaagtagagtgtgagctttgggtgttaatgctttgggcagtccatggcagaaggagagattccctcattaattcctctccactatcacaatcacattatacatcattttacatgcttaacaaaatttaatcttaattaatttataacaattaaataatattatttttaatttctactc

SEQ ID NO: 209725 - DNA, 501 bp, Cannabis indica
ttaccacttctcaaggtaattgtattacagttctcctttagatttacttcagtagtgctaggcaagttaccttgagccttgttagtgttttgagcagccaactgccccacttgagtttccaagactttaatggaagacttaatctccgtcatgaattgcagtaacatgtttaattgaggattagaccctccactagaggcttgttgttgttgtggatattgctggctttgctgaggataaaactgcttcttgaagttctgctgacgaccatacttattctgttagtttccaatgacgtgagcttgctccattggcaaactatcgacaactatagggcaggtgttagtggcatgagatcctccacacaacttacagacaacttgagcttgttttgcttgtgcagtcaccagctttgttaatgcctctacctgggctgtcaacttggttattgcatcaactgcatgcattcatgcaaccattttagttgggcctctctctgtt

SEQ ID NO: 209726 - DNA, 1342 bp, Cannabis indica
gcacacctttcgatcattacctggtaacagatacccttctggttgttccatatatatggctccatcaagattgccatttagaaaagcagtcttgacgtctactttccatatctcagaatcatatgtggcaggtatggaaagaagaatgtgaatggatttaagcattaccacaggagagaaggtatcttcatagtcgataccttctggttatgtgtagccttttgccagaagcctagctttaggggcctctaccttcccttcaacatttttcttcttcttaaaaattcacttacacccaatgggggtaaggtcctcaggtggagtttcatatacctagactttgttggtgcgcatggagtccatctctgaatctatggcattatttaacttgtctaagtcagggtcatccattgcttctttgtaagtcaatggaacatccttgtttgtgtcgaacacacgaacaagtgcttcatgttcatagtagacacgctgtctcacaaccctcccactacgacgatgtacagggatttcctttgcaggaactgtggtaaccgatgttggtcgttcaactaatggtgctgaaattgtaggttcaaaactctcagttctaatttccttgataaccactagactacgtggcttgtgacttttcatatagtcatgttcaagaaaagtagcatttgtagaatcaaataccttattatcttgatgactatataaataagcaccttgagtctcatctaaatatcctacaagtatacacacttcagtcttaggagcaagcttccataacttgggtttaagagcatgagcaggaaaaccccaaatacagaaatgtttcaacttgggttttgttccattccataattctattagagtattgcttatgttgttcgagggtactacattcaaaatgtaagtagccgccaaaagtgcgtatccccagaagttcagtggcagtgatgagtagcacatcatcaatcttaccatgtctaacaaggtccagtttcttctctctgcaacaccattttgctaaggtgttctaggtgttatgagttgggacaagatctcttcttccaacaaatagtctttgaattcaaaatctagatcctcaccaccacgatctgatcaaagtttattcctgatttacctaatttcttttcagccatggccttgaattctttaaactttccaagaatttcagactttttggccattaggtaagtatgaacgtatctagaataatcattaatgaaagtgatgaaatattcataaccacctcgagcttgaatattaataggtccatacacatagctgtgtacaagctcaagttgtttttttt

SEQ ID NO: 209727 - DNA, 545 bp, Cannabis indica
aataagctagctttccaaccttggagttgatcccgaatcttggaccgaatggaatcaaacacttcttttttccttcttcctacagttgctggtaagccgaggtatttggtgtggcattccaccaaatttaccccaagatcagctgctagcatagtttcttcggtttgagtgatctttcttccaacgcacaattctgatttttgaaggttgatttgttgtccagaaagggaggagtactcttctaatatggctttcatacttctacattcggttgggttagcttcaaggaacacaaaactgtcattggcgaagaataggtgagatagcttaagaccttctcttccaaacttaacaccgtgtattttatccgctctttcagcctcttgtatgagacaagagaaaccttccaagcaaaggagaaacatatagggagagaggggatcgccttgacgaaggccacgttggggttgaatgagaccactaatttctccattcacaaggaccgagaatgagactgtagttatacagttcatgactttatccac

SEQ ID NO: 209728 - DNA, 933 bp, Cannabis indica
gttctgttagttgatcaataaagagccacatataaatatagtaatggccaaactaataattcttttagaaaaaataatttaaaaaataaaaataaattaaaataaattcatattattcaaaatagaaaaaaatattatatgcatattaaatgaaataaaaattaatttttccatctcatattatctttacagattaacaataaatttttttttaaggaaattaataataaactttgattctcgattcaaatgctatctttcaattctattttaatatatttaaaattctcattccataaactttttactaatatttttcaatcaatgaaacgaaaaggcaaactttaattcccgtatgaaaaatcgaaccctcaatcccaataatcaatagaaatttaagctctcaaaatctatagaaataaataaataaataacagatctcataaatacaaactcaaatagtagaacccgagtaaaacactaaaactccaacattaaaaatacacacaataaaattcgaacccaggacttaacacatatatcagaataaaaattaaatcataaatgaatcaaacccaaactcaagtttgtctttttcttattctttggcttggtctcctttcaagaccattaaattggctaccaataaaattataaaaactgttaagtttagaaacttgaggatttatactactacttttcaaattctggtatttattagcaataaatttaatattttaagtatttatgtcacaatttttttaatagtaaagttaaaattttaatataattttagtaagtaattattattaattaatatgcataatttgttttttatatataatttaaaatattttatacatccgtcacgaagcgcgggaagtttagcataaaatagaataacgtaagttaatcttagctctctctctctct

SEQ ID NO: 209729 - DNA, 704 bp, Cannabis indica
ttttttttttgaataaattttttttaataaatagaataatctcagcttatataatgtataatttttttaaattaaattaagttaattatatttataattaatgagtaattatttttttttttttttggacaatgtaacttcaggagacacaaagagaaaggaagttacaaaactgaaacaaaaccattcgagcttaactctttatctagcctaaaacttttctagccaaacaatacttgttaaaagtacattcatatataacttaagaaagaagacacaagatcattttgttacattacattatataaaataaaaagaagaataattgataggacaaggtaataaaatcaagcgaatcatatattgtacgcatatatactatttacttttgtatgtacattagctaaaattgttgtcttaattatatgctctatctttttcggagacaacgaagcgcaccactgagaaaataaacaaaaattattaaagaagtcatcaacccacgctgccaattttattttattttttcactatcgttactaatacttaatcagttaccaccatattttcacttgatctcatttctaatatctctcctaaaaccaaacaaatacccaccataaatcctcttttaccattcaaaaatatccattagaaaagaattctctctctccctcacacacacacacacataacaaacacat

SEQ ID NO: 209730 - DNA, 556 bp, Cannabis indica
tttagcggtagaggatctttactttgttagtaaaaatagatctttgagtaggattaacataaaaaaataaataagaaaaatcagttagagatgatcttcttatcaatttgaattagtactctgaaatgattcatcaatttattaaattaaacaaataataataaagtagtagtagcatacatatccatagtatcctaactggaatataaatatataaaaataaaattaaaaaaaaaaaactatagaaagttgagttgtatgtgaggaaaaaaaaaaaagtgaattagaatatacatgaacatttgtttttttaatttaaaagtagaaaaataaaatggtttagaagggcacgagtggagatttttgatttggggaatggtaagaattaggaaatggagcttgggagacaaagaattgggtgtggaattttgtaggactttatgaattggtcatctcttgtctctcctttttcccactcacccccccaccaaaagtagggaaaaggatatgtattgccatttatttatttattaatttggagaggtttcatttttct

SEQ ID NO: 209731 - DNA, 656 bp, Cannabis indica
ggtatgacatactgaacccaaccttctctcacataaatcacctagattgtgaaggtgtgatagttagtagtcccgtgatctgtaaggagaaataccgagtaagctctgcaattccataccacttagggaaggttaagtgtgacgattccgagactatgtaggtatgggactacacagttgaagaagacttaaatagattgattggtactacctatatcaacaaggtgcatcttatttttcggtagcgcatcacaaaagaactccatggttaagcgtgcttgagttggggtaatttcaggatgggtgacctcctgggaagtcaggaagtgtgcgagtgaggacaaatcatgctggaaacactcgtgttggtctgcagggtcaattgtcattccatgaagcagccaaagggatgtactcgtgtataagagccattattgagtgggtgtaagggctcaatgcaggcttgaagcgaggatgttataaatgatatgagagccttgacccagccagaagtgtgattgacgaggacgtcaaaacattgagagacaataaagtaagaatctctgaaagtgacctatatgttagatgataggggtgtatactagaattttcacatctacaccaactcagaacttaatatcagagatggtggttac

SEQ ID NO: 209732 - DNA, 884 bp, Cannabis indica
gtgactaggattaccagaacttggtcaggagcactcgggaatttggaatcttcacgtttgcgggacatcaggtaagacaatagttagcacgtacagttaagcgcggtggtgctcatgttgaatattataattgtgattaattaaaagatcgggattagggttataaccttagagtgagcggttgtatagcctagggttattaccctagtgattattaatgtttaaatgttatgccatgttatatatagttgagattaagaattatgcgttcaaggcataatttagttggactcggtaattagaatcgagatggaccgttctaaggccttattgtaaatagacgtgtgagcgtaacacgtgggtctatgccacatagacgtatttaggcgtgtgagcgttattattgtatgtgtaatatatatatatatattgtgattattgatatttatattgtcttgctgggcttggctcatggtgctctactgtgcaggaaaggtaaatctgtttgtgatcagccatgagtgcgagagcttggcggtgcttgtacatgttcaggtcacactagaccaagcaggttggagtctactagtgatgtattttgtaatctctgattttgccgcttaggtcggcacgtgacttaagcttgtaatattttgtgaaaatgtttatgggatcccgaaacataacttttggtttatttgtaaagtttaaaattattacaaattttattttcattctgatgtaaataaagtttaaattttctgcgcttatattttcaataattctgaattagtggaattagggtttcattatcgattaccgtgacgtgcctaatcattaaggtgttgcacatatttagtttctttatcttaaatgagagagag

SEQ ID NO: 209733 - DNA, 551 bp, Cannabis indica
taaacaattatatgataaaaaaatcgtataatgtaaaatgtagtactactcatctatatttgattcatgaacaagccattgtaaaatcagtcctctaagccatcatctatattgaaagtagtactatactagatatatcaaattcatatataatatatatatatataagcaatttatatatttataatatatggctctcaccatgctgaagatcatataccctttgttcctatcttctttactcattattgcctctgctaattactatccaaaagatggaaatcacaattcatatcatgtgaattacctgaaatatgaccatctctttgaccatctgaagccacaacaaacaaaaacaccattgatccaatagttggaggagtaatccccaccatgatccataccattgggattgaaggagttattctttgccacacagcacttaatacatatattccaatccaaggtatccttacccaatcatatttttgcagagtatataataagggaaagtaaattatttttacatgtataattgagtaatttctaat

SEQ ID NO: 209734 - DNA, 513 bp, Cannabis indica
ttaaagtctacaagctatcataaacatcactatcattaactgttacattatttttactatcactatcactagtgtcttcatcatcactataaacaataaaatcatctaaatcttgacggtcacactgctcacagtccttgttggtcacttcaattaggtcgacatcatcacagacatattcgacatcatccatttgtgaaagttgaatgaccaactggattctcgaagagtttctttcttgtatagtcgtggtctcatcatcatcctcatctaggaaattccaaacattgtggggtagaaaatattgacaagcttccattcaactccattcttcaaattgggaacgtaatatatcaaattttcttgggatgcaagtatgaatggttcattttggtaccatcgacgggcgacgcagacactagtgaaaaaaccatcattttctgttctgcaaccatttgtgtcccaccgcttgcacctaaactaataacagtacaatccttcaagtaagtgaac

SEQ ID NO: 209735 - DNA, 619 bp, Cannabis indica
atttttgtgaaccacaaatggcatgtaagattagattactcaataattaatttctaaagcaaataacatgatccagttccaattacggtatcccaaaaattggagcataggatctacaataaaaaataaaaagattcacgggcatgacaagaaaaactctttaatgcaaatcccaaccgagtaagtatactacaaacccatttttatagaaatttcccaataactaaattcattatttgaatcaattgtaacatttctaacccaagaaactcaagagcgattactgaaagttctaattctgaataacccgtgatgggattaaaactaaagcatatgtaacctaacatctacaaattcaaaacaaattaattcgcaattgagaaggaacaaaaaaaacacttcgatcattctgagccaaaacagaaagtattgaaagcgtagaaacaaaactcaaatatagattgagcaaccataagaagaagtataaaaatagtgcaaaatcaaagatttaaaaggaaaattataaaccctaatccaatgaagctgaaagtacctgaatgtagggaagaaaaccaaagcaaacgaggctgagaagcagtcgttttaggcaatctgttgt

SEQ ID NO: 209736 - DNA, 755 bp, Cannabis indica
ctttaacacatttagggtaaaattaactatttttatatagaaatgtaaaaagaaagtcaacaaaaatattaattttttattgaaatatataaaaatcctattaaatatataaatgaaatgtaaaaaactgattaattatattaataagcggcaaaagagtaaataaaaaaatatttattatagtatgaaatttagctcatcatgctatattttgtgccaaaattagtacaacttttagcacgtgctaaattttgactactttatacacattagaattcacttttatgaacatgtgggctaaaatatacatacaccacacttttagctcttcattggagatgttaatatctacatatcattattcacttcaattaaaattttaactttttctttttttccaattatacataactttataagtttttttttttacttgttgtgcaccgcttaggtgaaattttcttatagtccttacttttttgtattttctcaaattaaataagattatcttatagtaatttgtgctttattttatttgtaccatttattaatatttttgatctttttttaaacctcacacttttttccctaatttttctcaaaaaatctctctttttttttactccattttctcttttaaaatatatattttaaatttttttaattatttttttctcttgtgtattttactttttttttaatttttctatcttatttttttaattagtaaatatataataatgtagaaatatata

SEQ ID NO: 209737 - DNA, 482 bp, Cannabis indica
caatgtctctgcctcacacctctaaataacttaaccgatgaaaatgttgacttctgtctttgattttgactttgactttgactttgtagcgatgatgatgatccagtgtttttcattggttgagtctttgttgggctaagccaattataaccattgaacccttttgattgttgttgttgttgattgtgatgattagagagatttagaggaacaaaaggaagagaagaagaagaagaagaagtgttatgataagtagtagcataagtgttattataagtagataccataactatttttttcatcattatcatgatcttcatgatcaagataataagttggtgttaaagaacttaacaagtttggatctttgaaaaaatttgacccatttgaggatatgccttgaaaataagagggcattaatcctttaggtagtaaaagtttcctagttttgggtagtatttgattatgtatcatgatcatcc

SEQ ID NO: 209738 - DNA, 831 bp, Cannabis indica
aagattgtgtagagctatggttacttaacatgaaactattatggaacagaattgtgtaaagctgtgtatttcccctgcctcgtaaaatgtagagaagcgttcagatcttcatgatgattttagatattagctaatgctgtgtaattgttactcagtcctctaatgtgattaaatgaaacatctcgtgaaggccctctattctgtgttgtagaaaagaaatttagagattttaattctcccaaattaatttgggataaaagcacatgtcagggatcatgatggaaaaattaactatgtttatttcaactttagattttccaataccactcaatttacaagctaaggggaattcataggaatttgagaattttttgtcaattatcattttgctttcattaactctttttcaggttatttcacgagctataaagtaacagcctgatattacatcctcatccaatttgcatttctttttttggttttgtttaagaaaacagctctcagtaattttaattccttatgactgatggttgaacagagaaaaggaaaaaggaaaagaaaaagaaaaaaaaaacttataaatttacaagtacctttaatttgaatctgatttcaattttcttttttaaatgtcagattataaataaattaagaagtaaatatttaaatttaaaaaataatttctaaaatatatttttaggaaagaaaatacctagaaaaaacaaactctaatttttttttccaaatttttttttactttttatccaaaaaaactcctacaaaaacttttgggtgattttacaatgcaccccttaaaatagatatactgat

SEQ ID NO: 209739 - DNA, 580 bp, Cannabis indica
aacagatacaaaaataataaaaaaaattgaaatcaattgtcaactatggcttttagcaataggaccgactatcgattcaagctataatttaataagtagaatttatatgggaatttaaaattttatttaataaatatgctatttttcatttgtatatttttttatggttatttattgtttgagggttttactagaatttaacatgacatatttatgtaaatttaaattttaaagtccatatattatgtttgtgcattgttttccatttagtttattatttttaattatttatttagatattttgcctatttttttcttttattttatttcttttattactttatttattttcttcagtttgatggtccaaccaatttttttttcttttgttttctattttaatttttgtttgttttgtattttttaatttttgtttccagttataaatttattatttatctttattttttattttctatattctatatagattagatttttctttaatttttgttattcttcatttttccctttacttctcttctctatctctatgttcattttacatttttttttcttg

SEQ ID NO: 209740 - DNA, 753 bp, Cannabis indica
aaaaaaaactaaacatcttctttacaacattaacaccatatgcaagcttagtcttgaaaaattagaataaaaaaatactaaaacaaacctaaacaaacacaaaacaaatgtaaaacaatgaagcagaaataactatttagaaaaacataaaagaaccacacacctcaaaattcttttgccagtgagctcgtcaaatttatttatgggagaatcaaagtaaaaagaccacaaaaataaccatagaaaagaagaagaaatgtatttatagcctctatcttccacacctacagacagatccaccacagcaacacgagaacaactggaaagtaaccattaattccggcgacatagagcaagaatagtaaaatcggcatcaaataactaaattataacaaaacaaccgtaaaacacactaaaaaaataaaataaaaaaaaaaagaaaagaaaaaaataaaaaaaactaatcatcttctgcgcaacctcacaccaaatgcaatagatgttaaatttgcaagtccagttttgaaaaatcaaaacaaaaaaataacactcttatttttctcaaaaacgtgattgaaaattttaaaaaataaagaaaaaaatgaaaacaagatgaagaagaagaactagacaaagaaatcaaataaaaaaacatatatgttattaaagagaaagagagagtttttgatgaagaagagagtggtagattatgacaaaacaacgtaaaacaacgtaaaacaacactaaaacaaa

SEQ ID NO: 209741 - DNA, 510 bp, Cannabis indica
atctcactaaatagcacaaggcataagatatgaaatgattcagtaagcactccttgctgaaaatagtcttatatctcatttttagaaagaataataattcagaatgactatgctaacgtgttagataacaaccaaataaaagaatagaatgaaacttaaatcttttgatcaaatccattctatttacacagccaaataggaccttgtgtgataagaataatgcactagagaaatatattaatagtttataattgttatattagataagatttagagatgaaaaatatggctgactggattgatttaattggcaagaacttgataaaaatcacaaacttcaagttcttaaaaaaaatggaactactaaaagagagattcaatccttgcttttatatttattattaggtgaacatgaacttgcaattataatatgtacaaaatgggaatatcagaaagtaaaaaattagctgaaaagatcagaacacataccgaagggcagcttcccttgca

SEQ ID NO: 209742 - DNA, 789 bp, Cannabis indica
tctctctctctctctctctctaggttgaaatcgcaccaccacgaatccccactcgaagtctcgaacgatgaacccaccgaactcaccacctcacggagggaacccatccactgagtacgcgacgagcaaggttaatttttttttcccctttcggttttttaatttttttttcttattgattatggtgaaaatgttgtttgttgatagatttaggttggatatgtgcattcttgattagatctagggttagatggagtagatctagggtctgtgatctttctgggcaagaaaatccgattttctagtttgatatgagcttgaagatgaaggcccgatgcatggcccgatggtccgatgcatggcccgatgtagggcccgatggtctgatgcccattttggattttttaaatttttttctatttataggactggcccgatggacccgatggtcagatgcccactttattttatttttttaatttctttcttttaataggactggcccgatggactcgatggtcagatgactggcccgatgcccactttaatttttttcttttaaaaaaaattattttctgtttttaataaagagagaagaagagagagaggaggcggtaatgtatatgggagtattttagagatattctaaaatgtgttatatcccacaaatattaaatgttatgtgtttagagaaaaaatattaaatatatataagtatagaaaatcaaattttccattgaaaatagtccaataatatttagtttttaataatatgaatgcatttatagg

SEQ ID NO: 209743 - DNA, 546 bp, Cannabis indica
ctccataacgttttaggttctcttagatttttacttcgaggatgaagttcctaattttgaattgaagcataaagttaaacctaaggtttgtatattcttttgcattttttttaagttgaaatttttgatcatctatttttttcattttttatgttttacctgtttgtattcatggttttcaaatactgacaggttttgcttcctgaaccgctcatacaacggctccaaacgattccctgcatccggtggcactaccagaggtgctagaggaccaagattaaggtttggaacaggctgagctcgctgctccctcagctcacggatttgatcaccctactgccggatagtttcttgcatggcagcatataattcttcccagttgggaagtggtagagggttctcaccctcaccagcaaccccgagcccagctagctcgcagttacctctaccaaactgcctcgggtgcataatctattcacttgcgatcacattccaagtaacgataattagcaaattatctaacaattaaagcttactaaaccatga

SEQ ID NO: 209744 - DNA, 696 bp, Cannabis indica
acaggccctgtaaaactggctagtcggtttaccacagaaaacccaaaacattcccaaacctaaccaaatcgattccaaactttaccaaaccttctagatttgcctattataccccaatagacatattccaagcaataaaacaactacccaagctaagaattgaaaaacaccattaaagagccaagcttgagttctaaaactcaaagcttgctcaatcaacaaactagctatcaaaacatgctcaaatcaacatatctaaacatatttaaacttcagaaacctacttcaaacaacaatagcaactaaaatcacaatttcatgcaaaaatctattttcttacaattcaagaaattaaagaggagattactaagagcttacctagaacttaaatacactatgatcttgctgaactggcttgaattgagaagaaaattagagcaaaccctagctggttctagggatttcgtgagagagaagaatagagttgaaagagagagtcattttcttatttttttcaactttgtataaatgaataaaaataagcttttgttttattgagatatgagccaaaatcaaattaaaaacgtgattgtattacataattaaatccacaaaacgacaaaatacaaaatgggcaaaaagaccaaaatgcccttgcccacacttaacaatcataaaatcacttatgggtatttt

SEQ ID NO: 209745 - DNA, 631 bp, Cannabis indica
aaaacttgaaaaaatctacttaaattaatgtccaacaacctaatacctataaaactaaacatcacaaagataaaaaggaataaagtccaactaaaatgctaatccatgtgtagttatattggaacactcttaaaaatttagaataacaaatttgttatatcatgtaataatgattcaaaattattgaaaaataaaaatctcaaccgctaaagtggtgtttggtaacacttttttaatcacttttctgtttttaaaattagaaaagtgaaaataatttttaaaaacttattctataaaactgtttttactttttaatttttttaattgagaatcaaaattttaaaaacaaaaaaaaaatcactttcaatattttttaaactaattttttttctttaatcaatattttagactccgactagactcggacctaaattccctcccatggccctagcgctgaacccagcctctgacccgaacttaattaaatctaaccctagacttaaacccgacttaaattaaatcaaaaaataattagcaactgataaaaattatataatcttaccaaataaataaaatgtacattagtaggaaaaagaaaataatcatatcaaatattaagtatttttgtaaa

SEQ ID NO: 209746 - DNA, 618 bp, Cannabis indica
tgtaatatatcaaattttcttgaaatgcaggatgaatggttcattttggtaccattgacgggcgacacatacactagtaaaaatacaataattttctgtcctactactaccgtttgtgtcccactaccatgcatttgaaaatgataacattacaatccattaatagaaagaagaattgggaggtgtatccattaatagaaagaagctagtgttgtatatcttatccaattcctaactgaaagttagttattagttactaagcaaacaaacaaaacaacctttggcattataacagttagaagtttccaatctcggatacaacttgaatctgagttaagtctattctcacttagccttagattttctttctgttattacagttagaagcttcctaactagctaactcaactaggatgccatctaggttaagtgtcaccccatatgttgtagagatttcttgatgaagagattattctctgtctataatatgttgttaataagtgagttaatattctcaattgtacagctcccttttctttcaataaagattcagatattcaattcattgtctcaaatacgattagtgtgtgaagaacttgaagattgtgctgtgttcat

SEQ ID NO: 209747 - DNA, 833 bp, Cannabis indica
tactaaaactaagcaataataacacttctactatcacttccaagattaattgcttgacggacatggtaagatctttatggataatttaatatgactcgtgatttagagtgtaataactctaataatgaaacttatgagagttgtttgaatattgaagaagtgtcattagttgaaacatggaagtgatagatcctacaattgaagatcaagatccttttgaagtagcattaactcatcaaaatttgactgaattggatcttaattgacaaataatgaatgtggtgtggtgaatgaagtaaatttcatccatgatcatgaaagaatatgaaatcacaagcaaggtgatggaaagccaagtgaagagtgagcaacaaaaagaagggttattagatgtaagtgtagataatgtgacattgaaggatgaggaagcacatggcatcatggattcgaattcatcaatgatattgacttatacaccaccaatggatctatattttccattaacaccattcccaccatattatatcctctacaagctacgaaaggcttctccccaagctcatcatccaaagtcttgtgttgttggcattgcttttggtccaaactcatcatctcatgccaagcttgaaggaaattacaacaacaactttcaataagttgtcttgcttgacgattattatgggcgttaaccacttgttgatgtggcatggttatcaggtaagtctttctctccttgggtttatgtcatattgggaacaatgtgatattttagtttgggggaaggacttaattttaaattttgttgtttgtctgattatttagttgtttagttt

SEQ ID NO: 209748 - DNA, 602 bp, Cannabis indica
aaattttacattttgcattcaagatggtctaaacctaatattatacatatataccaacaatacaatttttaatcctagaaaactcaaatataaatataatattataccagcagtgccctagagatacgaaattttttctcatttgttaaaacaaattcacctttatgacttgttttcatatacgaaacttagagtatattgttattaggcattagtagtacctagcacacttttctcgatatatcgcgttgcgattggttagcgatattttctaaatttgttatattaaattatatagaacccgatatttagttagacaaatagtaatatttagacaaatagccatattcacacataaaattgctaagcaccactagttcctttttagcatttctcgaaaaattattatttacatataattccatttcacatggttggtacaattaaccaaaccatttaatgatatgagagagagagacacacacccgtatcccatatatatcaagttggagagagtctggactcgtaaatcaatcgtggatatgaaacaaatgaatagtcaattattattaaggggaaatttagatgatgtagtaactttt

SEQ ID NO: 209749 - DNA, 1028 bp, Cannabis indica
aagcgaaagaggaaaggtaaagagggttacatggcactcaagcttgacatgagcaaggcgtatgacagagtcgaatggtctttccttgaagctatgctccgaaaggtgggatttcaagagaaatgggttcaacttgtgttacgttgtgtcacttcagcaagatacaaagttgtgtatggtaatcatgaagttggcccaattattccgacaagaggaataagacaaggagatccactttctccttatctatttatcctttgtgcggaggggttatcggctattctaaagaagtatgagcaaagaggttggatccatggttgcaaagttgcaaatggagcgccaagaatctcacatatgttgttcgcggatgatagctatttgtactgtaaagcaactgaaaatgaagcctctcgaatcaaggatgtgctccaaaagtttgaaaatgcttcgggccaaaaagttaattttactaaatcatccatattttttagtgccaacacggaggagggggtgaaacagagactttgtcagagtttatctatgagaactgctccggatggtagtttctatttaggactgccaagttctatgggccgaaacaagaatgcatctttgggatatctgaaggagaaggttcggaaaaggctgcaaggttggggaactaagtttatctctcgtgcggggaaagaagtattgataaaagctgtagctcaggctctcccaagctatgctatgaatgttttcctaatccctcttgaaactactagggaaatggaaagtttaatagcaaaatactggtggcaatcctcatctacaaccagttcgggtatacactggatgtcatggaaaaggttgtgtcaacacaagtcaaaaggaggtatgaattttcgaaacttaagagacttcaatgtggcacttttgggcaaacaatgctggcgtctattaatcaatcaagattccttagtgtcaagggttttcaaagccagatattatcccaatggtactttcacttcggcctccctaggtcc

SEQ ID NO: 209750 - DNA, 577 bp, Cannabis indica
aaaaaaaaatgtaaggaacatacaaaagaaccaaaacttaatacgatgtagttttaataaaagcaatcaaaaatggcagaaccaaccaaaccaaggttggtttgttgcataggcgatatccatggcttccccaccaagctccaaaatctctggtccaatctcgagtcctcaatcggcacagctgactttaacacagcccttatcatcttcttgggcgattactgcgaccgcggccccaacacccgcgaggtcattgattttctcatctcacttccttctaagtacccacatcagacccatgtcttcctctccggaaaccacgatttcgccttcgctgctttcctcggcctagtccctcagccgccggacggctcggagttcgccgaggcttggaaggagtacgaagaaaatgaggagagagaagggtggtacaaaggagaagggtatgaaaatatgcatttgcagggaaggagatggtctgggaaaatcaaggccaagttcaacgtagccaaagggatggactataaaggatccatttatgacgctgccccaacttttgaatcttatggtgttcctc

SEQ ID NO: 209751 - DNA, 640 bp, Cannabis indica
acaaaatttaagtctaaatcttgtaatgaatttataagttgggaactaaatttttctcattattttgttgtagcagccatgtcaatttgttgatatgagaaaaaagaaagtaatggttgtcactcatctaccaacaatcaacattcaatagtcttgtttttttcgggtgaaactaaactacttgatagataagtatttgttatttgctctagcccttctctttcggcttaggaacaccactaggatttcccccaaaatagagctaaggaaaaaaaaaaaaatatatatatatatatatttttcacttatttgtaaaatcattcttcgagtgtggttatttataggataatttttttaaaaaaaagaacacaaaatatgtatatatatatttttactgttaaagaaaagttagattttattccatctttaactcaaaaaaatataatatacattatattttagttttgtgggatttttctgttatgttcgcatgaggtgccgttattaggtcttttctgagaattgtgagtgcggttttgttttcgcttaacttgatgagattggtctcgttctctttctctgctaaattttagagtaaattacaaattttatgagattttatactatttgtacaaaaata

SEQ ID NO: 209752 - DNA, 606 bp, Cannabis indica
ctgttggagataaccagctctccaataggcagtaaatttcttaagcctcttgaaagcacatcactaggtctattcaagttcttaattaccctactcgaaatataggaatgcgtcgcaccaaatcaatcaaaatggtcaataaagtactagcaacagaaagctgacttgtcacagtggaggggccagcatcaacctcggcctaggtcagggaaaacacccgagtaggaacaagtgtatcatcattcttctattctggtcgcagcaactatgggcagtttcttttcaagtgacccactgcaccacactgaaagcaggccctaggctgacactcaccttgatggtgcctctttcaccttagacattcgggataagtctgccgattctcgtgtccaccacgatggaaaccttgattactttgaaatctcttatttgggcctgtagctgatggatcattggaccttttcttgcgatcaccagggtcactacccttaccagaaccagcatcagacgtctacttccatgaatcccttcttgcaatatttttctttcgtatctgatcttttgcgccctcagcagctacggtcaactcaactatctgtgcataag

SEQ ID NO: 209753 - DNA, 847 bp, Cannabis indica
gctcattaggaagaaggccagaagttgctgaaaacagtttcaagccctggagcattaacaagatggagacataatctccattgctgaatattaaaaggtcatcagcaaaacagaggtgattgagtttcagacttgagcacctatcatggaacttaaaacctggccattctcccaccttcttaaggattctagacaaatattccatgcctagaacaaaaagcaaaggagacataggatctccttgccttaagcctcttttagcactaaaaaatccacacaaggatccattgagaagcaaagaaaactttggggttcttatgcaattcattatgagagtaatgaactgatgtgggaatccaaaagctaccatcatttcctcaataaaaccccattcaattgtatcatatgccttccgaagatcgattttgatcatgcaacttggcttacaattcttccttctatataatcttactaagtcctgacaaattaagacattatgtgcaatgaatttcccatgaacaaagccaccttggttatctgcaatcagatcaggcagtatagttcataatctattgcaaatcaccttggtggcaatcttgtacaacacattacaacaggatattggtctgaaatccgcaacagtttttggacaagtcgacttggggataagagtgatagttgtggtattaatctcttttaagattttccctgagtttaggaaagaaaggacagcatcttccacttcagaacccattattccaatatcctaaaaagcactcccaaatccatctcgacctggggacttcaaaccaggaatggagaaaagagcctccttcacttccttggg

SEQ ID NO: 209754 - DNA, 915 bp, Cannabis indica
ataatttgtttacatatgttgagtcatggctttggtgaggcttacgagtgtgtgcttcaaaaattaacatcttacttagtgtaaatgtgaagtaggattttttggtattattgtagcatcaaaatctcacagcactcgtaccagtagaagtaatatattttaataatgtgggtgtgattattcaaattagttgggaatgagtctaaggttgaggtaacgtgttgaaatgtgtgagatggattaaaggaaaaccttgacacgtggacttaagtcttatgaatctttgtctgtgagaaatcccacctatttctggcaataggagccaagagaaaaaaataatgctaaagtttattctaccatatatcacatgacctagggagaaaataactcttagttgcttaaaattgagaaaagagcgccaatgagtgtacatttctacactccttcctagtcatttattagaggatttagtatttatttcttaaagttttgaataatttgatatttttcctttaagtgtgtaagtttgtgcttaaaagataattttgtgatggactgagatctttaagccaattttatgcaggatagaccttgctactagcttttcaaaatatattaaatcatctcatttggagtttggacgcaaaagttatgcatgatttactgagcaatgtcaaagcagcaaaagaatgacgaaaagtggcctgtggcactatagctccgatttcaaaaaaattagtttttgcgtgaaaaatgaaacctcaaaaaatattgcatggcgcaatagcgtcgcctgtagaattcgacaaatatcttattttaaaaatgtcatatttgtcatcttttctgccttataaaaagaaaattataacttcggcttttggatgactgtagatatacttaaagcaactttga

SEQ ID NO: 209755 - DNA, 548 bp, Cannabis indica
catatttcgagcggtaaataatgagattggccacatgacatgtgtacgacgaaaggagtaaattaactcagttaattaaagagtcgaggtataaatagtctcatcgtagtatgaagtccatacacattcttctcggggtaaagcataaacttgcaacattaagtgcaagacgctcaacacattcctagtatacgactaaagatgctaagcttgttaaggaatttaggaacattcccggggttgacattgttaacattgagaggcttaatttgcttaagcttattcaagttcatcacctcaaaaatacaatcaatatgttttctaaagaatatgttacccgaaacacacatctaaatgttggtgtattccccaagcaccatacatcaaacaatcaagcgcctcgataattgcatgatacagaatacaaagaccaagtcaaataaggcagttatcttatttaaaatgaaagtggttacatgttatttcccacctaccagttgaaatatatgaaacgtgggaaatgttcacattttataactattgtacac

SEQ ID NO: 209756 - DNA, 506 bp, Cannabis indica
tattttgattggtaggcttgacacacacgggttcaaactgataaagtccttccttaagagtcccttgaagcaccttcttctttgttactttgtccttcacacaacaattatcagatgagaattcaacaataacattgttatcacttgttaatcttgaaatgctaacaagatttttagtaatttctggaacatgtaaaatttcttgtaacaccagaacattgctatttttagtggataaagaacctgaaccaacatgtttaatgggcaactgatttccattaccaacagtaagaagatccttaccattgtactttgtcttctggttcagattgttcacatcagatgtaatgtgattgctaggcccactatcagcataccaagcaccatcttcaagcatttctggtgtagcaatgaatgcagcagcattttgattggttttgtttccatctatgttgtttccagcaagtgcagaacccatgtaaaactcatcataacgattgtaacaa

SEQ ID NO: 209757 - DNA, 512 bp, Cannabis indica
ttttaattattagtataggtggccttgtaggaaactggccattttatttattcagccaatattaacttatggatttaattaagttagaaaaaagccaagaaattaatagaaatttcccctttctctctctcttttgctaggctccaacacaactagaagacaacccagcaaagccttcaatttttttggatttcagcaaggtctcaacaagattggaagtagttcaagccaaaggtaaaccctagaacaccacctttgtgatgtttaagcatttagttgggtttaagcttgtcattttaagatgttgtggctatttaggttagcttttactgtagggtgttttcagaggttgttttaagttgaaattgattattttttgttggttttgctggtttgtttgtgagacgggcaagtttgaacttatgatctcatacgtggctcattaattattgaattagattatagggttgtatgttgcttttagtgcttgaattttattgttgaatattact

SEQ ID NO: 209758 - DNA, 661 bp, Cannabis indica
agagagagatcagagagagagagcatagacagtaaaaagatagagaagtcgaaggagaaagagaaatcgtaggagaaaaagagagacatcgaaagagaagagtgagagagagaaagaaattaccttcgaacgattgtggcggcaacgtgtccaagtggttgggggtttccattatgtgcggcgacgacttggctccgattcgggctgagcggtttgggacttacaaaataaaaagagagaatgagagttgatgcagaaagaaagaatgttagaaatgggggaggcggctggggtgatgtgaatattgaatctttagggttagggttttcttaattgggcctgaagcccgttattatgtctgattttgtttttttaaaaaaaaataggaagtttgcgtcggttgtgcaatgaggcaaaaagtgagatttttgcgtcggtgcactaccaacgctaattctctaaaaactgacgctaaacctacgtctgcccataaccgacgctaaatttgaccactgattatttgcatcagttatgtaattttctcgatgttatagacacaaaatgtagtatttgtagtagtgtttaaaaatcccaagcgtatttattgtccatgtgtagattgttgtaatggatttattagaaatattacaatgattaagga

SEQ ID NO: 209759 - DNA, 823 bp, Cannabis indica
ttttttttttgataaaattgtgcatttagagtttgtttagaacgtcttattaagtcgtattatattgtattggattatatatcatattttatataatactgcgttaaattttaatttatactaaaatattatatatttaagtgttcataaaagttaatattatatatagttttacataaaatataaaataatataagagtaatttgcggcaaaccctccaactatcaatttacttgtaaaaaactatccaacctcatattttaatgggaaaacctccaaagtactgttccgtttacatgtgtcgtctgtccagcctcgttaagtcctaattttgcccacgtgacaatgacaggtcactaaaaaaaattatcctatgtagccatattttacaaaaaaaataaaaacattaagagtaatttgctacaatttttattttgtaaaatatggtaattttttagtgacctgtacacatgaaacaaaattaggacttaacgaggttagacagacaacactttaaaaatataaacagaacagtactttggagagttttcccaccaaaatatgaggttgaatgattttttgaaagtaaattgataatgaaagagattttgctccaaattactctcaatgtaataatatacaatgcaatacgtttattactgtctaccaaaggaatccttaaaccattaaaaccatgagctttatcacagagattttaaaaaagcctcttcaacttctttagtaaaaacatcatcaagtgaacaaaaatgttctaagaaattctgcaatcaaaatcccagatatagcatcaggatccacacat

SEQ ID NO: 209760 - DNA, 698 bp, Cannabis indica
ttatcaatgaataatccacaatagttttacatcatttattttcgaattggatgacataaatagtgaaatcgggttcttttgtttgttcttagttttcagattgaacacaatccgatctatcctttttacgccatttataactgaaattgatcctatagactgattagaaattaaatctggacaacgccctacttttcccgttgttttcatcgtgtctttggctggaaaacatcttcgacccgcctacgcacaaatcgtgtcacgcgacccactggagcattggctggaggttgaacatgaactcagccgtgaagcccactctcataggaggggtgtgggggcacgtggggccacaccgaatatttttcggggtttcgtttttccagcatgcttagaatttaattttaatttttttatgatttttaaatagttttttgacttcgtttaataattattattaatttaatgataattatgcagttaaaaaaacattaaaaataatttttgatgatttttcgaaatccgtaaatcatagaaaattttctggattttcttctcattctgtttgacatagtcactctcttatttgatttatcttgactatgtagtctctaccaatattcttacattcacatcttctcactatttattgttctaaaatttgtaaaatttgattgtttgatgtgaagaataatgtg

SEQ ID NO: 209761 - DNA, 1080 bp, Cannabis indica
gaatccttttcttttgaaatgggtatctttagaatcttaagttatgataaagtgtaattataagaggtatctattttagaatcactacttttcatacaaaagcagtacttttcatacaaaagcagcaccaactttgattagcataaagtacaggagattggatttctcaagattcttaagtggcgtttgatttggttggaaataatgaaatagaacggaatagaaagaaaataatttttatttcattcctttgtttagttatattttaaaatattggaatgacatttcaatggaaggttctttccaccattttggtagaatgactattccattttaaaaagaaaagaaagaccattccaatgtaacaagaaaaaaaaatttaataatttgttttatcaatttttttatgcattttaaattttattccattccatttctattcctatttttattctcattcctcccaatcaaatgccaccttatagttacacagaattttgtgccttagccaatgctgctgctaaagtgaagtggccggtgtctcttctttctgagttacaggtcacatttcttgagtctcctattctgtgggttgacaaccaaggagctgctgctcttgccgccaatccagtatttcacgcacactttattcgtgatcaactcctagctcagcacttaaaaaaaaaaaaaaaaaaaaaaaaaaaaaaaaaaactacctagctcaataaactacaagtgcacaatgttccatctatcgaccaattagcagacgcactcaccaaacttctattcattgatcatttcaactatctcaaaatcaaacttaaagtcaatctcaactcccttttgtttttgtttaagggggggttaataactgatcttatataatcaattagtttagttacaaattgttttggttagctaattacaaaagtagtaaggaattttgttaaacagtttgtgagtgagtatgtaagctagctcactttgtaacaaactctgtatcttgtggctatataaataaaacccttgatcaacttcagtgatcaagtttccatagcatattccattgtgttttta

SEQ ID NO: 209762 - DNA, 1514 bp, Cannabis indica
atctataataatcttatttctcctccaaactcaacctcctcaaaattattaaagtttctcatctcaaaattgaaccatagcgtgggatcacaaaatttgtaactctttaattactggagtatacagtaaagtatatttccttactatttttgaatccatattccttttatgaggcttataagatctcatcttaatcgaacatccacaaatagaatatatctatatgttacactattaatctaatcacagccttactttataaagaattttaacttatacattacttgatactcaatttaggatttatgttgcaatcttaagtgtttctccccaaaaccaatttcatgaagaagaatgaataatcacacttctagccatgtccttaaataaatgttaattacatctctcaaatacccttcatgcttggtttgccttacaatttgtattgaaagacaaaattacttgattcctcatacctcccattgtagtattaaccaccatagttagtttcatcgactttaattttcttgcctagttgattagtcaactatggtattgaaaatttaaaagaaagaacgtttgaagattaatgcccttatgaataaaataaatttcattagtctaaatacaagatactattattgatcattccatgaaaccatgaggaaatatctacgaaatatagcttaaattcttagataatgaaactttattttgtcacttgatttcttcatgtttgtttgttacccctttacaaaatttaaaatttattaaattaaggggtataagtcttttgattttccttttgggagatataaccttaatacttataccaaagtataatagaattctcatgatgtttctttatatgagacaaatttcaataaatttataaattaaagaactagtagaaccaatattggaaaagactttcaaattctaattgaataagaatgacctaacttattcaaaatagaattcaaaaccaaaaaatcatctgggtgatgatactgtataagtcttttccaaacacaaaaataattagtctttaatcatagtttgaatatccttatagcctcaactataggtgttttcctattgccctgaaagatgaatatttcaacatcacttgacttttagtttcacagataaccttccatagttatacttacataagcaatatcataaaattttgtgttgttacaaactcacttatttatcctaaagttgtataacactactcacagagtttgacaaatatacccttacatcaaatacaacaaagatcaagattaaagaacataaaatcagttacaactgaaactgttacaaaatcagttacaaatattacactagggctctgccctagttcagaatcatagatcagtataaaaggaagtattttttctcagatacagagaaaaagagatacaacaagtagagaacaacatcagaaactacaacagagaaaaagagagccttttggatgatagttgtcccctcctagtgagctc

SEQ ID NO: 209763 - DNA, 1113 bp, Cannabis indica
gagtgactaatgttaaaaagaaccattagtacctaacactttcttatctgtcaatattattatttctcaaattaagtatcgggttccatataatttaatgtaataaattttagggatatagttaatcaatcataaagcgacatgtctagaggtctagaggtgatagacaccactagtacccaatagtagtaatgttctaataatatctaataatgcttaagttttcatgcctataattactacgtggcgcatctaccaatagactaggttgaaaagggtggaatggaatttggacaactatatatatatatatggagaaataggcattggtactggtgtcaagcaccctcttacgtgttaacatcgctattgttctaattaagtatcgagtcccatatagtttaatataataatttttagagagtatcgctagccaatcacaaggcgacacgtcttaagggtgttagcaacactggtgcccaataacaatactcatatatatgcttcttataattatgacacttattttttaattttttttttcataataacttgattagactatgtaactgttaagcatgaaagtgaaagatattacaaaacaattttggaggaatttatttccttttcaaaagtttaagcttgcatgctttgagttggttcgtggcataacttgatcgggaattcaagtgatggctagctagtttgcttcaaagatttctgatttcgatgagtttttaaagctaacgaggtgttatattagaacttttgaacaccgctttcattagcatgtttgtgtatatatacacaaaaagctgtgtgtatagatttttttcaaatacacaaaaaatcttacacatagataaacccttgataagcggagctgaccttaataagtaataatattctaagaattaacataaattttctctgttatgggtaaaaagagaaatatgaaagtgatgatgtatttgattcataatataccttaatattgaatgcatgttatatatatgattattaatttattaaattttatattttaaactttttttggggtagtatgtctctaactcaaaaaacttttttaatgtctttttttcttatcctaat

SEQ ID NO: 209764 - DNA, 745 bp, Cannabis indica
ttgtgcaaacacgtgggaagcatcagatctacatgaccccgctatcggctgatcactttttgaggtcaacagtttggtgctttcattgagagcgtggatatcgtatctgagcaaatgccatggtgaacataagaagaactcttgtcgcgcatctgcatcttcgggtctcccataagtactcaggttccagtcacaactggaatccccatgaacactacagatgtggtgaatgttgtcaccacgacaggcgccaccagtctggccactacaactgaccaaactgatacatgcatcccggtggatccaagttgcaggcccctatctccaagagaaaacccaccattggtgcctcctactgaaggaaggacccaggggcgacagccccctagaacaacaactggatctgaactcttgttctacgctagagagacaggccaaggaattagtaagcttagattggtgagccccatctggacttaggagaagatcttgagttggccagactcagggaagctgtaggccatgcaagcctaactgaagaaccatgcgctgttgattgcgatgtttttgctaagtagagatgcaaatttttgagatggatggatgaccaggagtacatccttcgatctcaccaagcagagttagatcgtcgcaaccgagagaccaacgatatgataagacggttcaaccagagaaccgatagaagaggttgggatctcctcagggatccacttcaaggaagact

SEQ ID NO: 209765 - DNA, 774 bp, Cannabis indica
ttagtggcaaagtgcttactcttaagtaattttttaaatgaaataaaagtcattagttcaaatctgaatagggagtcttaaatgtaagaccaaatcagccccttgaaatatcttatgaatatttatgcttagtagggatcagactcaaaagaacttagagcatctctagtggtagtattttggagagttaatgaggtaaaaagtttaggtaagaaaatatagagatgttatatcattggaaataaaagaatgttattcttgaaatttatattggtatcacacaataactttgatgctatattttttttaaaataaaaaattaagtaagtaatatataatatagtataaagaaaaagatttatatataataatgtgtgagattataattatagtatttttaagtgttatactatttgagtgtttttagaaataagagcgctaatattgatatgaaaaaaatataaaataaaatattatatttttaacacctttaaagaatgggtaaatggcggcaaaacccccaaaaattttgttttggtttcacttaagcctcaaaacccaactttgtgcgggataacccccaaaccactatactgttagcaaaaacacacatttgtccccctgaccccgttatttgcctacgtggctcaatccaagtaagcaattgcttgccatgtcattaattattatgacgtggaaattaaaaataaaggttaatgaattttttttaataatgcctaattaggaaaagtaaaagacaaaaaattaaaagaa

SEQ ID NO: 209766 - DNA, 547 bp, Cannabis indica
gttttctttcaatattgatgaaactggtttttaaagtttgtattatttttagattatatttttttatattattttttttaggatgatgttgatgaaacttagtttttttttttgctgcttttaataaaatagttagtttttaaacaaaaaaaaaaggaaaaaagaaaagaaacagtagtttaaataaaaaaaatatgtttaatttctagaaaaaaaaaaaaaacaatctacagttgagatcattttttatttattttagtgttttattttttaaaaaaaaaataaaaaataaaaaaaacaacacaaatttaaagtttttactgcattcctcatgacttttttaagttttttaaaaatatgtcatatttagagtaattaaatttttatgccatttatatcaaaatatatattcattttctcatatttttgtaaatagcccaataataaattcctggaaaagccaaagcccaaactcatacaaatataactgataattttaaaaaagaaataaggaataaaagattaagtgcccacatgcaggatcgaa

SEQ ID NO: 209767 - DNA, 805 bp, Cannabis indica
accctgtgttttgcaaaagttacagattggaccctgtgttttgttaaatgacaaaatagaccatgtattttctaaaatagtaaaaataggatcctgagcttaatttttgacaacttttttttttaattacaacaacttgaagacaatgcttaatacgaacatatacaaaaaatgtaaacagttttgtcataacacttttagattggattataattaaattttattttgacaaaaaatctattcagggtcttatttgtactattttagaaaatacagggtccattttgtcatttaacaaaacacagggtccaattggcaacttttgtaaaacagagggtctaaaatggtatttatccaaaaaaaaaatcacttacgttcaaagttttattttttttttacgatattttataaagacacaacaaaataatatgaaagtaacaataaaacaacaacaaaataataaaaaaaagaaataaaaaatacaaaaataaaataaacaagagtacaatagaataatatatcaaaagattatatttttactttatgtaaataaaatcttaaaaatcgtaaaaatgtataaaatttcgtacaactgttatttttataaatttttttgttgtttttgtattttttttttttaaattaatccccatctgtatttttggtacttgaagaaattgtaacttaattttagggaggaattaaaaaaatgggtgcaaaactgcaaacaaattaatttaaggttccaaattgataataactatataaatatatatatcttacatacaaaattagggctcttttt

SEQ ID NO: 209768 - DNA, 964 bp, Cannabis indica
ccaagatcttttagtgcaaaagtgtgacagatttaagaaatcatagatgaaacaacttgatcattgcttcctatgaccaatatgtcatgaacaaccatgagtgaatatgtaaagtaagagggggtttcttgtataaacaaagaatggttcactttggctaaagagaaaacaaactggagtaaagctggaatatctaaacaagctctaggagcctgtttgagaccataaagagcctttcagagtttgaaaactctatttagataagtggagtcaatgaagtcagtgttgacccatactcttaactctccttattttgatgattaacaaatatttgattattaattacttgccactaatgttttgttgattttgtagcacaaataattaaggattttttaggcaaaattaactctaaggacaaaatggtaattttaccaaaattctcgaaagtgacccaaagttgattctaagactcaaagaactcaatacaagactttatgaaggtttatttacatttcctagtgttgtacagtgatttacaagtccacacttaaaatttctaagtatgaaattcggctcactaacttgtgtgacatgttatttcacaaaaatgatatctaaaatttttaaattgatttttaaggtcacttatcattaaactaagagaatgcaattagaatttttaaaattggataaacgagctaggacttatgagcatttaagtgccgaaaaatggactttttaccattgtaaggttttgattaactgtttccaaaacagcgaaccgtttctctgagaaactagtttaccgtttggaaatggttgaccgaaactcctagtggctatctcgttttttgtgtctaatagttataaacggctatatttcactctaacactatataaactttgtttgtactcaaaaataaatgctgattgagcacttattttgtataccaaacacatt

SEQ ID NO: 209769 - DNA, 1232 bp, Cannabis indica
caaaagtgaaaactagaagagctaaactgattggctgctacctaggttttgtttataaaaaataacaaccttagagacagccacaaaatcgattccatagtgtacaaactttcctaaaaaaatcctaatttgcagcattagagtcggatttctggagcaacaaatcagactagaaagaaaacttgccaaataagtgcccgatcatgaacatggacttcatacctgccaaaaacagtgtgcgatcttactaagacagaatcgaaaacatcaaagagaaagagcaaggtcaaagtttttaaataaaatcaactttccataagagaattcattctcttacaagagtttccaaaacaagaaaatggacagctgaaaaagaaatttttcatttgaaagaaaagagtaataaatacacaaaatcaaagtgaacaaatcgatctaattgcacaagaaaattatataataaataaaaaatattttgacacttaaattgtcaaaaaaaactttacagaaacatcatgatgtattgtatctaaacttatatttttttcgtatctaatcatgttcgtgtctctgaaactcgtgtcgatttcatgctgcattaaaaaaaaaataatccgaccaatatttaaaatactaatccatattgagatggtttaaggtaggaaacgggaagtttcctttagttttgaaaagtgtatttacgaagaatctgtgtccgggtgcagtcaaaagagttgattctgagtcacaaggccctcactttcaccggcatttgacatcattgccatccccaaaatccaagagatccttagaaaagacaccaagacacttgtccttttttcactagctattcaaattgactaaaaagttgattacttataataatatacaataatagtatcctttttcggcatcattataataatttagtagtcaatctttattacttagtatctgtatgtgtattgcagctgttctccttaattatttgtgttttggtaattggtccaaattaaaatatatattttcaattaagatgattaaaatattttacagcacccctttaaaataaatacatatgcacttttatttatttttgatatctaagataacgttttagttaaatttttactcataatcatgtacgttataattatttaagacatccaacgaaatttgaagaaatttaaaaaattttaacacgctgaaaatagagtttaaaaagtatattg

SEQ ID NO: 209770 - DNA, 237 bp, Cannabis indica
tctctctctctcaaaccctctttgaatttcaaatttgatttggtgaaaattgcttggtgtggagcttggtatttggggattgattgaggttaattgcaagatattgttgtgggttgtattgttgagttttggatgagattttaaggtattctctaggtttgaatttatgttctatttggtattgtgttgctggaaaattaactgagttgggttactttgaagctcaagttcatgagc

SEQ ID NO: 209771 - DNA, 845 bp, Cannabis indica
aacagctggagtcctaggctctgagttcagatcttgcgggacggtaggagctggaggatctgttgtttgaacgggaggtacatcagcattttggccggaggtagaagcagccacctcagtttcaccataagccacttgcgaagtgcataactcgagatacatgtctttggcttcacccaagtaatcaaagtttgcctgagggttagccttccaaaagtcataaaagagctcgagaccagctgtgtctaaggcatgaactttctctcctagcctcgccacctcagctgtaagctcttcctccttagaattcttctcctcttctaatcgacggaggacagctcgaagggatgtcctttcatcttgaaggctattcacttcacagattaagtgtcaatggtctcttcaagtcggtcagaagcctcgagatccttagtcaactcggttattttcttcggagcagtaaaaagcttcttgttgacttcacccagctccatccgaacagctccaagttccaccctggcgtcatcagcgtccttcctggccaagtccacctctgccctcatggtattggagagagccgcgttctcggaagcagcagacttagtcagctcggttatttctctgaccagtaaaaagcttcttgttgacttcaacccagctccatccgaacagctccaagttccaccctgacatacatcagcgtccttcctggccaagtcccacctccgcccttatggtgttggacagagccgcgttctcggaagcagcatacttagcttaggagtatgtgtaaaccaacttcagaccagcctgcacagagaaaaaactttgaatctgagccaaat

SEQ ID NO: 209772 - DNA, 680 bp, Cannabis indica
aataaaatggattttctagcatgtttagatattgtttaatataaaaccttatgattggcatgatggcataaaacatgttagcatgcctaaaaatctggtgagaaaactttattctgataagatattttgaaagtatatatgaaatcaattagagtaatccaaaaaaaatatagataaaggtagggagttgattatttatgatttcatttgagctttgaaacatacaatatcctttatcagaatatgatttggttctcacaccattgttctgttgtgcattgcagcaatgtgagcaattattatgatgaggaatcagattcttgcatatgcaccataatgtagataacttcaatacaccagttatcaggaatttcagcttatatatacatcaaatttcaaacaattgagcattctctacatcctgtttcaacgatttttgttgtcgaaggagagacaacgaagtagcggatagggactacgttgttttgatcgaattcccatccaatttcggttttatctgttaggttaatttccagtcaaggaagatgaagagtgtcttcctccatgtgttacatatttacagccaatgagttatttccatgttcttatgtattttatgtatatatatataatatagtacaggtttcactttgttcaacttgattattgaatagtgagag

SEQ ID NO: 209773 - DNA, 1756 bp, Cannabis indica
cggactaggactaggataaggactaggacctaaacttgaactcgaacccagattaaaacccagaccgagaccctaaccaaaaccgagacttggactcaaacccaaacctagacctggaacccaacccaaaccagaactaggaattggaccaagaatcaggataaggacctaggcaacaaaactaggaccgggacctattacctgaacctagacccagactttaacctagcacccagctcgtgacccagcacccgaaatggaacaagaccgggactcaagattgggatccagatctggactcgaggcatggactgaacctgtagtcagtgtctggatctaggacacagctccggacccaaacccagacccagacttgaatccagtcccagacccaaacttgaacccagtcccagacccaaacccataccttgtgacccaaaattggaaccgaaactggaagtagaccgggacccaagattaggaccggaactaggacttggacctagaactgtaactggacctggacctaagccccagttctggtcctagtttgggggcccgtttcccgggtctgggtcccccatctatgttcgagtcctaggtcctatttcgggtccaagtttgtgttctagttcaggtaaaggtctctggttcttggcccgactccaggtctcacttagggtttaggtctgagttctagtcccagtcccagtttaggtccaggttttgggtcccaagtccgagttttgttcttgggtcctgggttccggccctaatttttgggtttgggtttgggtccgggtccaagactgggtctaggtctcggtcttagtttaggtcctaagtcacagaacccgatccgggtccttgtcgcggtatgggttctggttgagtttgggcttaggtttgggtcctgttacagtcccaagtctgggttctcgttccaatcctagttcgattctgattgtgggtccaagatcgagtcttgatcccggttcgagtctaggtctgggtacgaatctaggtccgtgtcttcgatataaagactgattacgggtcaagtcaaagcctcaggttcaaattcagatctcggtcttggatcccagtcttattcaagttcgtgtcccaggtcttgggccgagtcctaagtttgagtttgggttcgagtttggggttgtgtcccggtagtcaggtcttgggtttcgggtctaaggtcgggtcctatgtctcgagtttggcgtcgagttttgggtctcgaaccccagttttgggcgtagttttgggtccaagtcccccatctaggtccagatcattggtccaagtctgggtccaggttcaggtttagggcctaggtcccccatctaggtcatagagttcagttcccaggtcccaagtctaaatcttgggtcctgggtctcggtcctgatctagggtcccaggtcccgatcccaatccaagttctagtcccagtctaggtttagggctcggtcctagtctaggtctgtgtcccagtcctgatctcgatccgggtctgagtctcgggtttgagtctgagtcctacgttcgagttcgaattctagtatgagtctgggtttgggtttgagtccgagtttcggtttcggtttgggactaggtcttggtcttggtctgggtctgggtctgggtccgggttctggtttgggtctaggttctagtctaggtcctgggtcccgggtcctcggctccatgttcagggtcccaggtcctggcgcaattc

SEQ ID NO: 209774 - DNA, 442 bp, Cannabis indica
  modified_base (370)..(370): a, c, t, g, unknown or other
aatgaacaaaatcaattcactaagcatagctacaaaataccaaatcacaatttttagtcaacaaaataactctagcaaaaaaaaattaactcattaataaattatgcaaaacttacaaagttcaaaagtaacgatatagagaaaaaaaaaaaaaacaacatatagagtttgtcacaatactccaagttcctcttccaaatttctcttcttcttcatcttaatttttgtcaattcaaaattaaaatacaaaactaaaatcctaaataacactcaaataacctcctttttttttcttcttctttttcttcattttgttctctgtaagcgtccttgagcttacaactgccaccctcttcaattcacgacgacnctttttttttttttttttccatataatgacatatatgcatatattatatatgccttactttttgggaaactt

SEQ ID NO: 209775 - DNA, 586 bp, Cannabis indica
ttttttttattaacgttttgccgacgagtttaaaaatcaggcgccaaatgggtgccaaatgccctgattcgcgccaaaatttttgccggcgcattacatcgctggcaaaacgtcgtcagagacacatcagtcggcagaagcgagtacgttataccggcaaacaaatgcgctggtgtaaatacttttgccggcgcaagtctttaggtcgccggcaaaaggtcattcgccgacgagccattgccggcagcttttgccggcgacaaatgacgccggcaaaagtttgccagcgagttacacgtacttttggtgacgagcttatgcaccggcaaaagtagcttttcttgtagtaaattacttaattcatttcaacaaaaataatatatttaattcaacatttaataataaaaaataatatatcctatacatgtatatcataaaataaaaacaaactaaataaatttacaaaaaagaaagtactaataaatataattaattatcgacaatgtaaataagacaagcaaaatagaactgataaaattaaacttacaaagttatgtataatatttaaacaaaaagttaaaatcta

SEQ ID NO: 209776 - DNA, 781 bp, Cannabis indica
aaaatgcagaaaccagttgtcgagcgtcttgttattggacatgaagcccaatcagagtcggagaaacctctaaggtgaagagaagatgtagctgaatacaaaatgccttgaccaggactccctttgagatatctaattaggtgatgcaaagcttgcaaatgtggtgttcttggtgaagccatgaattggctgagaacattaacagcatatgtaatatctggtctcgataaagttaagtacaacagcttgcctattagttgtctgtagtttgatggattggttaaaagttcgccttgttgatcgtcgagtttgtgtctagggtccataggagctttggcgggtttgcttcctatgtaaccggtttcttcaaggagggtaagagtgtacttcctttgggagagaaataaattgtttttagttctagctatttcaaacccgaggaagtatcgtagtttcccaagtgccttgagtttgaatttgtcatgcaaggaatcttgcagttgttgtaaaatggcaatgttcggacccgtgatgactatgtcatcgacatagacgagaagggcaataaacttgtcatcttggcctctagtaaagagtgtgtaatctgcctgtgactgttggaaaccttcttgaaggagggctgcagtaagtttcttgtaccactgtctcgaggattgtcgtaggccatagatagatttttgaagtttgcaaactaaatttgtacctgcaggagtagaattagaaagagtaagtccagctggcaatgtcatgtagacctctt

SEQ ID NO: 209777 - DNA, 578 bp, Cannabis indica
ttttgcagacaagcttgtccaataataatatcatgttactattattgttgattatatattttgtctccaaagctcttcaggataaaataatgtcttcaaatgtttcaccattcaacaaaaataatctacttcttgataattcagacaatgagtttggagagttattagttttgtttgcttgagcggagtacaatcaattatatctatctaaagaagtgtgtagaaattcggccttttcaggacgtgagtatgtaatggaagtgttgcatggtcatgaaagtaggtgttatgactcttgtcggtttttaatatttttcttcaagattggacaactattaattcatattttattatgacttttgttggttttgtgttataaataatgagtttcgtgatttcaaaataccagtttttttaagatgttgatgagtgttttttatttgatttttaatctttatacatttatttaaaaataaaaataatattcataatttttttatttaaaaaaagacaaaaaaaaaaaaaaaagaaattcatgtttttgttttgaatattaaaaataaaaatgactacaaaac

SEQ ID NO: 209778 - DNA, 628 bp, Cannabis indica
cttgttagaataaattatcttatgttagagcactcccaacatcacaaatttttttttattattttacaatacatttttacattacgatatataaaagcttcttaaaaatacattgttaaaatcttacttttttaaaaaaaaaaaaaataattattatattttatttattttaaatatataatattaatttatacacgtatttctataaaatataattattaaatttaaaataattaatttagaataataaataatattctataaatcaaaattctcttataaaaaaaatacttcttttgctcatttattctgagtcttctgtgtttggtcctgaaacattattaaaagtaaacacgtgaccaaattcaccaattgggtaatccaaattacctttcggccctcaacaaaatttcagaccatgtgctgggaaaccaagggcatttaaggaataacacgtgtctaggtgaaaacaagtgcccagaaaccttagaatttagagcaaaaccatcaaactctggacacccaaaaatgcttaataaataatcataaccaatccaacatcttcatcaattcatccaaagcttaaaaaaatcttttagacctattatctgttgttataatttctttc

SEQ ID NO: 209779 - DNA, 845 bp, Cannabis indica
tgtcttttatactatttttcgtcagtttttaaaatcgtcgactatgtgtgttataataatacgaaacttttaatgatagttcataactttcgggaaaagttatttcaaataacggtgtataattatcgagaaaaatcactttaaatgatggtttataattgtcgagaaagacttctgtcgagcggtaactaacaaaaaatgttactttaaatgattgtttataactatcaggaaaaaaattcgtcgaattataactaacatgaaacactactttaaatgtcagtttataaccgataaaaaaattactttaaactacaatttatagtcgatagactgggtcttttttatatataatatatatatatacatatatatatatgtaaaaaaacataacctggtataaaaatatttattttcattaattcttgaacaaaaatcaaaagtgaatcacataaccaaaacacatatttgactaaattccattaataataataattacttgaggctagctcaagtggccataagagggtgcgtgtgtgttggaggtctgggttcgaatcccaaacattgtgtaatatataaacacttaaatcaaaaaaaaaattccattaataatataaaaaaaaaaaaaacttgataagggaatcattaattgcagagtgcataatgactacaatagtgaaatatataattcaaatttaagatgttacataaaagttgaacaagtaaaatgtttttaaagagtgattccattaaataaatatgataaaaaaaaaccaagttactgtaaaagtcgtagaccttctatagtgtaaaaataaactttattaattggtattgtagta

SEQ ID NO: 209780 - DNA, 610 bp, Cannabis indica
tggtccatagtgggagaatcggtaaccaatgcggttctaagtgtgttgaatgatggtgttgatccaacaagtctgaataagacgataatcacccttattcctaaaatcaaaaatcctcaaagggttcaagattatcgaccaataagtctctgcaatgttgtctccaagctagtcactaaagttcttgttggtcgcttcaagaatgtccttccttatgtcatatcagaaacgcagagtgcttttttgcccaaccggttgattacggataacattctcgttgctttcgaacttgttcatgccatcaaaaataaaacagagggtcgggctggtattgctactttgaaacttgacatgagtaaagcgtttgaccgagttgaatggcgtttcattaaagaggtcatggttaagatgggttttgctacaaaatggacagatctgatcatgggttgtcttactacaaacaccttcagttttcttctaaatggtgaagtaacgggttcactcactccttcaagaggtttgcgacaaggctgtccactttcaccatatctttttctcatatgttcagaaggattgtcacgtttactgcatcaagaacaagtgttgggta

SEQ ID NO: 209781 - DNA, 668 bp, Cannabis indica
ttttatttttgaaaatttatttaatatctaatttttattaaaagaaagataaatattttaagtttaagtatttcaatgtttcttttagaattatcaaaatactattcaaactaaaagttaaaaaaaatcataaaatgaaataaatgcaccattagttcaacttgtacataaatcataaaatttgtgtcgtacaaacgaattcgattataatttattaattaaatttttttggtagatgacaatcgataagacttgggtgaccaagagaaatcgtaaagatccaacttactgggaaggtctccaagtctttatggcacttgcatctaatcacaaaaattgtgacagaagattttttgtccttgtgttagatgtaagaataccagactgcatcctttgaacactgtccagacacatatctttacaaagggttttgaaagtagttatgagaggtggatttactacggtgagtcggatgaaccagtcgaggccaacaacaatgttgatgttgatgagatggttgatgtaattggagatttcttccctcctataaacgatgaagaaagagccatcgatgatggtattcagaggggtcaatattatgatgaaatgtttgaggagatcgaggcagagttgtacccgagttgtgattggatatcctcccttaactt

SEQ ID NO: 209782 - DNA, 539 bp, Cannabis indica
gcataacagtagcagataaaggtacctagcctaaggttaatgtgagcttgattatgccaaggctagtgatgctgtctccggtgaatttgcaaaggttcaccatacaagaccttaatgtggccttttcgagccccattttccgtatagtctccttataaaggatatttaccaagctcccattatctaataacaccctcttgatccatttattggtaagttgaatggttatcaccaatggatcgatgtgagggtatctcatgtttttctcatcttcctccgtgaatataatgggagtctcttcagtttttaccttcttggaaggttctggggcaaatgctacctgctcgttctttatctctttcacgtatcttttctgggcattattcctttgccctgggatatgtggcaaaataggatgtcctccccttcaataggaataggttgtaaatcctggttgtttgggttattgggcagactgggctagttgtatttatggccctgtcttttcatgtacaccttaaaatggcctcgagcgatga

SEQ ID NO: 209783 - DNA, 504 bp, Cannabis indica
tatatatatacattgtttgagctttgatctccattatttgtatttcggccaaaatgataaaatgtagcccatgttgattaatgatcttggagtgaatgaaagttaatcttcacatcattgagacattttatttgggtctgaattgattgggcttctcacaattcatttgcttacaccataattattatttactccaaatctgaaacttaacacaaaattaaagtaaattaaatatttccaaccaatataattttacaattaaaattatgaaaatatctacttaaattaattttatgtatacaattaaaggcttaaaatgtacaaacttgagccttaatcacaacccccaactagcttattgctagtctctagcaattcaagcgaaaagataatgtcaacataatattttcaagtcaaaaattttaaaaatggcacaaatatttaagcaaaatattagtagccagtcaataagaactatactaaattaccttgaataaatctaga

SEQ ID NO: 209784 - DNA, 730 bp, Cannabis indica
attctacccattaatcatatgaaagtacagttttttttttctctcaatttcaccatatcacctctcatgataattgaaagaatcttcttcatcaattccataaatcccaaaaatattttgttcttcctcctgtttctattagccacaagtatttttcattatgtattttaattttaaattgttgtgtacaatgctgttatggaaaaaaaattcaccatacatattaagaaccaaagagagaatgcaatagatatattttttatcaaaggaatgcaagagatacttcaatgaaaaacttttttttaactgtggaaaacacgggctaaggccttagatggagtggagatattgaaaaaactaagattgaaatatattcaatttatttagaaaaaagaaaagagaatcagattgagaaactcattgtatattttttatcaagaaaataaaatcccactaattaactctttcattaaagtaaaaaataataataatattaaaacaattaataacatgttctacaactcattataacactatacatctccactatccaaccaatcaaaactaaaaaataattccctcatgagtaagagcaaaagtggtgctctcaccaaattttttttctatgaatatataaatattaatattatttattttagattaattttaatatataaatattaatattattttttttagttaattgaatactaattttaaattaatttaa

SEQ ID NO: 209785 - DNA, 524 bp, Cannabis indica
ctaaaattgttctcaaatatcaatgttttgtccaaaagaaatattaagtatatatataataattatacgattagtttggtttgaaccgctaccaaaatttttaaaaccgtgaccgaaccagagaatttaaaacagaagttgtaagaatcgtcttctcttctctgagaaacttttaacgagtgaatcaaagaaactaatggcatccaagtgagttcaagaagtactcttttggacccctcctctagagggatggctatcttgtaactcaaatatatcacttgctagtgactattctatgttggctgttgtaattaggaatcatcagggagaagtgcttactccaaaaaccatgaaatctttttttacagacccgaaagtgggagctatttgcatggctactgatatagcagtaaaaaattgattccaccatgttaagatgttaaggtgatgaataatctacatgcatctgaggtggaatacagtctaaccacaatcccatcaaattttaataagttatgtaagat

SEQ ID NO: 209786 - DNA, 902 bp, Cannabis indica
ggtccaggtctcgatccctatctttgtctaggtttaggttcgggtccttgtcagggtgtggatcgtggtctgtgttgcgagtctcaggattcggtgagcgtttaggaccaggtcaggtacaggtcccggtcctggtcctagtccatgtacaagtattagatcttaggtcctagtcctagtcaaggtctccgtccaggttttggtctgagtttgagttatggtttgggtttggttatcgtcttaggtttggatcctagtcacacttcgagttctaattctgggtccgggtttggttccgggtccgaatctgggtccaagttggtgtcagggtaccgagtcatagttcgagttcggttaagggtttttcaaatctcggtatggatccaggtctgagtcaaggtccacgttcgggtcttggttgtgggtccctagttcgtgtctaggtctgcgtcttcatctgagtctaggtcccgtgtttcaatcccggtctaggtctgggtcagtatttgggtccgtgtatgagttcgtgtccatgtctacgtctgaattccaatttaggttaggggcttggtctgggtctgggctcgactcctgagttcgtgttcaggttctggttcaagtctcagtcctagtctgggtccgggactgggtctgggcccgagttttggggctaggttcggtttagttctgggtctgggtcaaggtccaggtcacggtcccggtcctattccatggtcctgatcaccttcttattcaagtttcgattttgggtcctaggtttgggcctgggtctaggtccttgtccagcttcgggtgcttgtccgagttcccgatcaagacatcgactatgggtcttgtccaagctccgattctatgatcacgagataagatctgcatcccaa

SEQ ID NO: 209787 - DNA, 525 bp, Cannabis indica
caaatgtcgaccatgaaggatattaccatcagcaagataatatcccatcgaatagtcatgtccatttattgaataattgaccttcggagcacgtccttcagtaagctctctaaaaacagaagaatgttctaagacattaatatcgttatgggatcctggtaatccaaaaaaggcatgccatatccaaagatcgtatgaggctacagcttctagaattattgttggctcgtgaatgtgaccacaatacattcctttccatgcacttggacaatttttccacttccaatgcatgcaatcaatacttcctaacattccaggaaagccacgactttctccaaaagcaagcaatctagcaatatcatttttgtttggtgatcttaaatattcattggagaatatgccaatgacagccttaacgaatttcttcaaacactcggttgctgtattctctgcaatccttaagtattcatcaacaaaatcaccagatactccatatgctaatattctcatcgcagcagttatttt

SEQ ID NO: 209788 - DNA, 644 bp, Cannabis indica
actatatttcttttcttattttcttttttatacaaaacagaatacacttggcaactactacttcttaaaattgttattataagaatgtaacattggaaaacccaactacatattgacatattaaaacatagtattatatcaagaaagaaacgaagaaaggaaatggtaagaacgagggataagagaggtagtagagagaaagtggaagatagagtactgaaaggaaggaaggagaagtatggaaagcagaagtagggaaaaagagaatgagacaaggagatgacaaatcaaactcatttgacattacatttcaaacttaaaaacaaaaatgattacaaattaaaacaacaaaatgaaaagacataacaaaaaaccttctaccatgaatgtttttgaaaaaatattcagatttttttaattcaaggaaagaggaaagagaaacacaaatgtttgccaaacagcctcaaagttgtcaatatacagtatttttttttaagctaattagactaacaaattacaataacccgtaaacacaatccaatacatcatgataattataggagggtgaaattaccaaggtaaatgcaagcacttacatttccaatgtgacatataagaaacagtaacgttttatcatattacta

SEQ ID NO: 209789 - DNA, 506 bp, Cannabis indica
gaataggacattttgagttgtgggaatggcaagttcgagtctgtcttgaaagtgattatttgttgcttagactcacctgagaaacattttgctaaggtaaatttttgtcttgtcaaaatgtgttgtacttttattttgtttcttacatgttgttacatgacattttttgagtaccgttaccaggtcattagggactccattattgggtttggaacagatgaggactccctaagtagggctattgtgagccgagccgaaatcgatcttatgaaagtgagggaagagtatcaaaatctgtacaaaaccagtcttgatgatgcagttgttggtgatacatcaggagactatgaagatttcttgatgacattacttggagcaagaaactaatgtttgaacaaaagtttttcaaatgggtgtgacaaaataaaaattgtgaaaccttaattattccaaacattataatttgatgtaattgatgaatgtttatatatatgtttgttgttcct

SEQ ID NO: 209790 - DNA, 514 bp, Cannabis indica
aatttttcactcattgtatcttacaattccaaaactaatgctaaatccataaaattcatattatttagcatatttcttctcattttaacccacatgatatatttgactattaaaatctgaaacaaaaagaaaaaaactgtaaaatctgaaataaaagtaaaataaaaactactaaaacatatactaaaatggactctaaaaatgtaataaaaataaacctgacaatgatgtcctcttccataaaattaaccagccaagtcatcatcatagagttctcagcagcccatgcaacatacgtcaaatcatcttccttgggagccttcttttctctggtgaggtagctcatcttcccatgtccctcgcatgtatatcatgaatgattgagacagtctaaaaaaattatcatcattaagctaaatggcatggtgatttgaacagatattaggaatgactgaagtgttaaaactcggagaatgttgtggattcatggatacatctgaaaatgatggtggct

SEQ ID NO: 209791 - DNA, 553 bp, Cannabis indica
ccagttttttttttatgtttttgtaacataaaaacagtagcatcaagtgaccactcggaccccattcggactaccaaatttctttttagttttttttatatttttgtacataaaaaaagtagcagtttagttgtactattcggaccaccattggacttacaagttttttttattttttttttagtgtttttatactaaaaaaatttgtgggtccgacaggtccgatggggaccctgatggagtccaatgcatgtgctgaaatgcgagagagatggggttgagttatgagaggggtatttttaggttttagataaagtggtcatatattttcaatggtgatatgtattagtttaaggataaaatagtttttttttgagggatttagggataaaatataagtatatgtatgtataaaaaatcaaattttcctatttgtattttctactttttattctagctaggtccccatgtaagtgaattgtttattttactgtgaataaattgtatgtgataacgtcaacaaaattgcagtatttatgaaaaaggttattat

SEQ ID NO: 209792 - DNA, 621 bp, Cannabis indica
taaagtaggcgaaatgtagcctagtgcttgggtgccatgtcacctaggactgttaccgctcaccatctttgagttttaatgctcctctttgagccaactcagcacccaacgtttcaaaactcatttaattgatgtaattgaatattttgatagttttaaacttttgcaaaacgtctccatttggttttcacaatacaacacaaaatacatacatatatactaaaaaagttaaattttttactttattaccgtaatctaaccaccaatgccgaccaaaattcggccaccacacacaactataataacacaatcttaataatatagaaaaaccttaaaaaaatttataaaataaaaaataaaacagtgtacactactaaaattagtagaaattagatttatatcttaatggacgttgagatacaatattttctccactaaaaacagtggtcggaggtataaccacttcaaccactacatgtagcttcggtttaccctaaaaaatgagaaaaaaatatgatcttttcaggtatatagttttaggtatggaaaacagaagatttgaaaaaaaaaaaaaaaaacgaagctaaaataagtgaaaaaaaaactaaggtaggtaaataa

SEQ ID NO: 209793 - DNA, 676 bp, Cannabis indica
tggaggtcaatggtggagtcagcccgcgttgtgggatggtgagtagcaacttggctttgctagccagcacataacatggccgggttgggattgtggccaatggttgcattagggatagggctgaaatacaaaatgaccataaatcttaaaattaagtaaatgtctccattttcaaatatttaggaaaatggttcaactgttaaaaatttaacaatatgaatgtacaattataatcttaaaagttttaccctagttttctatcccttctcagtcttgtctcgtttgtagtgtattgatttatttgctatgatataacataaaggaaagagaaaagagaaaaagaatgtagaaatttatttatttttgttgactcaatctcttaagtctttttgttttgatgattaacaaatattttattatttgtcacttatgagttatttgattttgtagcataattaaagataaaataaaattttaaggcaaaattaactccaagaaaaaaatggtaattttatcgaaactctcaaaagtgagcaaaagcaaactcaaaagctcaaggaactcaagataattctctatgaagatttatttatgcttcctagttttgtacaatgattttcaaatccatactcaacaagttctaagtacgaattttgggccactaacttgtgcgaca

SEQ ID NO: 209794 - DNA, 626 bp, Cannabis indica
ttttcttttattttatgaaacaatctcatcaattatttcgagctaggttagagtttaattaattttgagttttaaatataaatcaactcctttgggttcgaactcatacttacatgaacactatattccatatccgattcgtgcatttgcgagtataaatatttaaaatacacatcaccattgggtgtacaacatggagccttaccagaagacaataatgaagcaaaaaagatgagaacaaaagttgctaggtatctaatcctagacgtggtaatgtagagacggagcttttccatgtcgctcttaagatgtgtcaccaaggctaaagcagagcggctaatgatagaagtgcatgaaagcttctgcggcaaccatgttggggggcaaagcctatccaagaagatactccaacaggggtacttctagcaaataatgatcgaagactccatggactacgacaaaagatgtgacaagtgctagagattctgaaaaattctaagagctccacctaatgagcacactatgatgcagtctccttggcccttcacagtttgggggatagacctaattagtcaactcctaaagggaaaaggaggagtacaatttgttgtagtcccagtagacta

SEQ ID NO: 209795 - DNA, 964 bp, Cannabis indica
atagtaaaaataggaccctgagcttaatttttgacaactttttttttaatacaaccaacttgaagacaatgtttaatacgaacagatacaaaaatgtaaacaattttgtcatagcacttttagatcggattataattaaattttattttgacaaaaaatacaattcagggtcctatttgtactattttagaaaatacagggtccattttgtcatttaacaaaatacatggtccaattggtaacttttgtaaaacagaaggtccaaaatggtatttaaccaaaaaaaaaataaaaaaagaaaaagaaaaagaaataagacaatagtgtaaaagacaaaaaaggtgtaaaaatattactatttcactatcattattatattttctcaactttattactactatatcaacaatcaaggactagaaaagtatccctatcatagggacaaaaccaatatctctacgatagatatttcctattataatatacgttcaggattatgttagtgtattatttatgaaattttagttttaatgtaaattaatattgtatttcatttaatttctacaaatttattttttcaaaaaaaaaaaatttacaagacttgccaatgaagttttttgtcgccaaaaaaaataaaaaataaaaaaataaagttaaaaaatagtattgctgacgcattttgatgcaccgataatacattttcaggaataagtattaaagcggaaaagtttttccagcacattttgtcgtcgaaaaaatatttcaaaggcggctcaaccagggaattaatgtcgatagacaaatttcaccagcaaccttttcttgccggtgaaaacaacaatgccgccaaagttcatattattcgtcgaaaaaacaatattcttccccaaccgtaaactttactggcaaaaatcaatgctggtaaaactttgccgacatgaaatgtcgccgacaaaagttcata

SEQ ID NO: 209796 - DNA, 524 bp, Cannabis indica
ctcttcctcgcaccaccgagaccaaccagatccaggcaccgagaccacccaaccaccaccaccaaacctcctttcctccaccaccgaacctccttatctactcaaaaactcagacgaaacccagaggcccaagactggtcggacctccatagcactcaagcatcaaaaaacccagaggccccgaatttctgtcttcgtcttcatcttcatcttcgtgtttattttttttattggatttatcgaaaggttatcgatagtttatcgatatcatttatcgataggttatcgatagtatatcgatgacatttatcgataagttgtcgataggttatcgataggttatcgatgatttctgtttgcatacaaaaaaagcagtgcgtagacaaaaccatcgataaactatcaataaagtatcgataacccatcgataatcccattttggccagaaaatcataccttccaccaccatctaatgtgtcaaacaaataggaattcaatgaacttctggttgggggagggttagg

SEQ ID NO: 209797 - DNA, 991 bp, Cannabis indica
ccttgtaacaggactaacatgaactgattaacccgaaactaaaggtttccagtctcgagttaagttcattacacaaaaaacaaacacagtatcggtagtgattaaaataatacctattgtaataattttcctatatttacgtatatatatatatatattcaagagttctgacacactttttttaaggattaatttgtcattggtaaagcttcatgaacaacaacgactaattcaaatatatactaattaataatactcacagaagcaaactcatgtcccggaagaatcccactgatctctcccaaagccgaactaagggtcatctcgggacaccggcgcaagaactcgcaagcctcggttgccttagccatggcaataggctgatcctcggccgtaacgaatggcaaaattggggcctcaccccacccaacgcacccatttttcaattcgattcgaatcgcaacattctcgaccttttcaagccgacatgtcgcgatcgtaaaaggtgcaatcagaggaacattcaggggcctattctcggctctgtggacgtccaccatgatagtctccatcaaatccttaaaaccaaagttcgtcggagccgccacggccattctgggcccgaatctcaatgtaggactgatctttctcgggttggaatgggaatgaaaagcagaaatgggaaagggagcgtcgctgggtagtgtcaattttagagagagcccaatcgaagacattgggcgaatagaggtttatgaagggtttttctttcactactcagatgagtgtgacgttctgagcctccaattgggtcttcacaagtgacggagatgtcgagaactgccattgtcgttggtttctgtagtgaacagttgatagagagaattttttattgtcaattttttatatattttttaatggcgtagaacctcaattgacttttgagatattacatacctcaacacattcagtccgttggataccaaaaacc

SEQ ID NO: 209798 - DNA, 564 bp, Cannabis indica
atgatgtatggtaggaaatgtcaatccccaattcattaagacaaaactagagaaaggaagtatataggttctaaattagtttaaaggaccgatgaggcaatagacaagatcaaggtttagatgcttacattgcaaagatagcagaaaagttacgccaatcagaagcgtagagacattgtattttagataggagaatatgttttcttgtgatctcactgatgaaaggtatcaagcgcttttgaaggaggagaaagttaagccctaggtttatagggtcgttcgagatactcgagaaggtcaggcaagtagcgtataggctaaccttaccaccagcattgtcggttgttcataatgtattgcatcttgaggaaatatgtgtcagacctaactaatatcttgagttatgaagccctataactacagtcggacttatcctaagaagacaactagtgcaaatcctcgacaggaaagagaaagttcttcgaaacagaccatagctttggtaaaattactttggaaaaatagcaggacggaggaatcttagagtctagtatgaggactcaa

SEQ ID NO: 209799 - DNA, 518 bp, Cannabis indica
atttacacacaaaaatttatatatgtgtaatccactattaaaaaaaatcaatataaatattaatttttaaaatttgttctaataaaataatattcttaacattgtatttctgtacaaaatatattcatgcctaactaatgaaggattttattgttattaaaatcttcttacattttttttaacgaaaatctcttatatttatactcgcatataacaaaaatatccttagaatatacaatttttcgtcatcgtcctactcaaactttgcaccctggtacaagtgctttatatatatagggcaaagatagtgtagtgtatatacaattaatctcggtcgttgaaatatttttgcatgggatcgccagtgacagatcttttttagttatagaaaaaaccattctcaatactgttggagcagaaaaattcagaaaaacactacttgggaaaaggtcgtatataccagaagataaaaatcacattcataaatcataattacactttccaaatataaattaaaa

SEQ ID NO: 209800 - DNA, 753 bp, Cannabis indica
aagaaatatttagagtaatgaattatacttaggaatggcaaattggatctttttcgcggatcgggtcggggccccgacccgatggggcagtcccgccccgagacaatcgggtctctattcgggttttcgccccgccccgattatgtttagttttgtcccgccctgcccctccccggttatgtttattttcgggtcgaaaccgccccgatccgataatataattttttttttgacaaatgaactttcaggattcgataatacattaatagtctccaaaggacaacaaatgaaaccagtatgatcatcatcatgatcacccagttaattcgaggttgaaagctacttattattagaccaacaaactccatcaaaaatatatatacatatgttctgcagaataatatcgatcaattggaataatcatattcctaatgaaattagaattaatattattctatcatctgccctatatatatataagtagggatacactaattaagaacagatatttaagaaacctacattaccagataacacacgtagtaaatatggataaccaaatttttatttacgactattttgccaatatttatcaaaatcatttcccaaactgatacatctgatgttatctatgactattttgccaatatttttcaagcatatatatgctattaaccagttagcttttcatgccatactaattactcaataccttctatggtaacacctgtcatgcatagtgaactcttcaaa

SEQ ID NO: 209801 - DNA, 536 bp, Cannabis indica
gccttatgtaattatcattttttgtaagaaaattacatagatattcctctaccccaactagtctcctccacctcacacgcaaacccagctgatcttttcctcctccactgtcgtgtagttcgaaacaagatattcctctctcgctcttggttttttaggcgagggaggctgattatttaggaaatagctttgtggtggctggctaagaaaataaggatggttgagatctcattttgtggtatttgaaaaatcgtggttatttggttttggtgatgtaaatctggttccgacagtaagatatggttttaaatctgtaatttttttttaactttgtgactgtttagaaccgttaggacataggcatatctgattgttttttattgacgcattttttcattttatttttgcaacggtagaataggcatcagttacgtggctcgacgacatcttttcctgactatttaaaaaaaatcgaaaaattaaccttttttagtagtgaaagttctttttgtaagactttttatttggacttacat

SEQ ID NO: 209802 - DNA, 504 bp, Cannabis indica
aaaatattatacatatattatttatttttttttaattatttttagttgggttgggctggtcggcccagtttgggttgattgggttgaaaaaccatcaacccgattatcaacccatttggtgcaggttgggctcttttcaacccatgtaaggttcggcccactaaatgtgaccatgtttcggcccatttcgggttgggttggccgggttggtcggcccatttccaacccatgctcacccctacatatgatcgtattgactggaaatttcttcagggaaccctgttaaaagtggggttctacctttacttattaaggttgattatgagtagtgttacacctattagatattgtattacacatggaggacaaaggttgggcccgattgctcctacttgtgtgattctctctcttcttatttattcatttagtgtgctgaggattttttgctttaactaggaagttcgaaatgaataagtggttgcatgagtgtaaggttgcttagga

SEQ ID NO: 209803 - DNA, 643 bp, Cannabis indica
aaataattttttaatatgtataaatgtaattggattggatcggtttttaattggattttgagattgacatccaataaccgatccaatccaattagaatccaacttttagcatccaatccaatccaattgtaattggatatccaactttttgtaattggattggattggatcggttcggttcaattggattggattggatgatgcccacccctagtatatatgttttatttcatttttttcatttgacaaagtacaatttatatgttttttttaattaatttatatgttttgtttaaatgcattcaatcataaaaaagtgcattttaaaaatatacataaaaaataaagtgcattgtatattttgttttttgtttttaagatatataatcgtatattcatgtttgtttgtttttttttatgtagcttatttgtttatttattgatcatctaattatggtgttggattggcctttggaggttctaaaacggcgtctatgtgataaagcttttatgacaaaatatatatacaaaagatactttattagtttatttcctccaaaaaaaaaaaaggataatactttattttgagaaaacaaaaaatagttctcgttacaattaaattaaggagtttttataaaaaaaa

SEQ ID NO: 209804 - DNA, 539 bp, Cannabis indica
gcaacaactttttaatctggacccttagatttattttaatcaattgtcaaaaattaatataaaaaattgtgtttaatgaataaattccaatagtatgtaagtttttccttttcgtaggcactttattattttaataattaaaactttttattggataagtatatattatttaatgtctacactcaaaaattatataaactaaaaaactattcttatgctatttgaacaaaataaaaatactaccataaaattattttatatatacatatatattatttgttatctttccttttcatatttctaatgaacatatataaatctaataatttttttttaaaagaaaaaaagtaaaaacattatcagttatatagatcatctatatatttatatgtaattgaaaactttggcagatcgatcttatctagggatgcacatgaggcggggaattagcggggagtgctctccccatccccattcccgttaaagattttaatctccattcccgcttattcaggagtggaggtacattgcagccaagg

SEQ ID NO: 209805 - DNA, 726 bp, Cannabis indica
gcaagataacggctttctcggtactgcccatccaccagaatttcctaagagcttgatccatttcatggcacaaagattttgggaggaggaaggtcgacatggagtacacaggggtactagcggccacagaccgaatgagggtagaccgacccgcttgggagagaagtttacatctccaaccttcaattctagagcagagccgatctttaatgaacttaaaatccttcaccttactcttcgaccaaaggatcggattgcccaagaatttatcttctctatccatgcaacgaaaacccagcatactaacaatctcaaccttacaagactcatccacattcttagaaaagacataggctgacttcctcacattaagactttgcccagaccaagaacagtaggttcgaatacactcttgcactatctaaacttcctccttattcgctttacagaatataaaagtgtcatctgcatacattaaatgagaaataggagggctacatcggctaaccttaaatcccgtgatacgacccaaaccttcctcccgcatcaaaagacgagacaagacttcgctacacaggatgagtatggcgatagcgggtcgccttggcggagaactctcttaagtatcttatataattaaatataataagctagacgaggatagtcctaaaactacttgcggaataacaaggctctttatattgtatctgaatagccaatagccta

SEQ ID NO: 209806 - DNA, 654 bp, Cannabis indica
aaaaaaaaaaaaaaacaacgttggaggttcgaacaaaacccgaagcgtaacggcgaacatcgttgagtgccaactcatagtgggacctacatccacgtgtcgctatgtaaacttattttcttgtccggtctgataaaagcagcaaggacggtcggcattaacgccgtttaaacttttaacggatattttttacctcagcaaatttccaccgactgactagtgactacaaaccagtcagtagagtctcccatttaagggttttaacggcaacattgacagtaacagagccgcctttttccataaatgcccccggcatgctcccttgacgagtcgctttcaccctcgtaattactcatttccctttgtccttttacatacctgccactcttcacgatgtttttaccttcactcccataataataataataatagtaataataataataataataataataataataatactaatttctgttctatcttatttaaataaaataaaaataaatgttactgaacacttgaagctcccacattgttgtttccttgttgacaaaagctgaaattatttcaaagcctaaaatcataaattatagttacatagtttcttttaaatatcagttttgtgttgttatttaagtaaaatagacaaaa

SEQ ID NO: 209807 - DNA, 1049 bp, Cannabis indica
ctaaagattgtttcccactaccaagaatttatcaactagtggacgcgacggccggccatgaactcttcacattcatggatgcttattctggtttaaaccagattagtatgcacacactagacaaagaacacacgagagtttttgaactaacatcgggctttattgctacaaaataatgccttttggtcccaagaatgcgggtgcaacttatcaaagactagtcaattgtatgttccataacttaattgggaacaatatggaagtctgcatcgatgatatgctggttaagttgaaaaaatccaaagaccacatcaaagatctagaggagtgcttcaacatccagcaagaatatcaaatgaagctcaaccctctaaaatgggccttcgacgtccaatcaagaaagtttcttagattcattgttaactctagaggtattaaagtgaatccaaaaagaatcaaggccttgcaagacatgaagccactgtcgtagataaaagatgtgcaacgcctcacatgacaaatttttgcacttagcaggttcgtctctaagtcaatagacaagtgtgttcccttctttaatttactaacgggaagcaacaaggggtttgaatggactgaaaaatgcaaataatccttctaagctctcaagcatcatctagccaagccacatatcctatcaaagcctatagatggtgaagaaatatacatcttggtcatcaccgagcatgcaaccactactactctagtgggtaaggaagaaggagtacaacattctgtctactacatcagcaagcatctcattggggctgagtcaaggtatcccccccattgagaagctagcctactacttggtccaggcccccaataaactaaggcccgtacttccatgcccacacaatgaaggtgctcaccgaccaaccacttaagcaagttttgatgaagccaaaagcatcagggcacctactcaagtaggcagttgaactaggtcaatttgagatcacctaccagcctcgaacaacaatcaaaggataggcattagcatacttcat

SEQ ID NO: 209808 - DNA, 641 bp, Cannabis indica
aaaatgagaacagaaggtgacccgggaccagtgaaaaagaaatcccttgagagaatgaggggaatcttaggactcaacctaggacaggtgggctgccagcgaggcatcgccaacacccttctcgaaccaacagggaaggggcacgtacaaaccccactagggggcatacaacgacccgtacctaaaggagaaggccaggacgtgacaaggcgagtgccagctcgggatgcacaagaacccatagtcaatcaacacgcggaggggaaagaactcatcgcaatactgagcgagagagtacaggcacaattataattgaaagttactcaaggaagagatatatgagtaggacgaggtccatgagtagggcaaggtctgttagtaactataaccagttgcaactggatctctgtaatcacttgaataagaaaaaacctgaccttcgccaacaactcagtcaaaagtaagaggatcctatccaattacgaattgatgagttggaggacaaattcagaaggtattaagtcagggaatatggaaagctgtctggatacgactccgatgaggaactggagcctttccatccatgaatactgaattccctaagcgattcaagaaccatcacatctcgtcatatgatggga

SEQ ID NO: 209809 - DNA, 1105 bp, Cannabis indica
taagaaaaggaatctttctcctgatcttatgtcaatacaagtaacggggattaggctattaccgaactgctcagggctgaacctctataaaatccttgtgtcttattattgctttatatatatgttattatttatcgtttatcgcttataaaatagactcattctcgttggctaaaagcgaaatcaacattttggtgctttcattgagagaaggatcacaaatcgctctttattccacatccaaccgccaatacgatggtgcaaactcgtagaggtctgtctgatccagcaaattcacagacggtggatccgacatcacagaacccagggattttaagggttctgcctgctgttaatcccagacagacgggaagcgtggggaatggtgaaacagttgctattaatggaattgcgcctgttgtgcaagagattgggaataacagttccgcactaaaccagggcatccataatacgactgttctgcctggaaccaaaacccaaacaaccatcagagacgccaccaaattacaaaatctccatgacacgctcggactcatggagggtcataacaacactctacatcatgatcaggacgaactgcgtgttgtagtaaatctcgcgttcgacgaacaaaggaatatgttcgctgaattaagggctcaccatgcagagattgaagatcgtagtcgacaagccatcgtgctgatacgaagagcctaccaaactgtaggtcatcaattgaggaacgtcattcccctgggagaaacagaagaggacccaacgatgaatacttcccaaactactaatggtcagccgccaaatgcccgatcacgagttctgctcatcggcccagcggttggcgagcagaccttgtccgataattcatcaggaggagtcacacctgatggctccaactagagtaatggtgccattccacccgtcaaccaagtgaatcaatcgctaaggcaaccaggctcttctgtgttcgaaaggttgggagcaacacatgacctaaggaacgatctaaacaaaagaaagggaacggatgaacagaatactacaaggatcgtgcagcctagagcctgtactcaaatccccgctcaga

SEQ ID NO: 209810 - DNA, 959 bp, Cannabis indica
agagagagagagattgagaataaatacactgtaaatacttaaaggattactaatcttacatgtgatttggaatccaaccttgtaactcatttatcttgaagatcttatagtggaatcgagctattgaggcgagctcgaaagaggatgtacccaacaacatttgggaaacctctataaaatcctagtgcaatctctcttacttttcttgctcttactgtttcatatatttgtgttttttgatctaagggttttggttttgatctgggaagggcacaaggctcaatttggggttgttagcagtcttcaagtttcttgagaagaaactcaaagctttgctagggtttcatttaattcgtgtctgaaagagtgagtgagttaattcaagagggtttcgagggttaagggtattcaccaaatgacaatgcatttggaagagtcaacggtcgtttgactcagggtgaaaggtcagttttgaccttaagtaatactttatttaatttcttttgtgtgtaggttatattggtaaaattcctatagcggtatcagatgtcaatcaaggcaaaggagctctaacagaaagaaagggaaaaatgaagtaaggaacaagaaagactcagaacatcaaggactatgctgcacttcacacaaatcacaagattggtatatttctaaacctaataccttttcaatttcttgactcaaatcttttacgcaattatgagttctatcaaagtggacattgacagctttgatggttcaggtgactatcgaatttggaggaagaaaatcagagccttacttgcctagaataaactactgaaagtcctaagtgatccagtggaatgaccagctgacacaacaaaggctaagcaagaagaattgcttgaaacagcaactggtttaataattttcaacctacctaatttcgtaatcagactagttgataaagaagatacacc

SEQ ID NO: 209811 - DNA, 612 bp, Cannabis indica
aaaaaggagtctcttatggagcaaaaccaccggaggcaatgaaggccagggataaggttgttgctgcaacgaggagggatctttgagattccagggaagaagttcaagaactagctgtcaagctaaaatcattggaggagctgcaccgaactgatttggaaacaacaactagcctgactgttgaagtaaaggagctccgtgagtctagggagcaggcttgcaaagaagaagctaaagaaaagagggatgccatgctggccccagttacttgttaacaatgtctgaagcattttgatgacggtgtgttcatgtgctagaaagctaacaacttccaacctcgtctccctttctatcctaatcctgaggaagtattggcccgtttccgggagaagaacaagaaacttgaggccgttttagaggaacgcaggggtccccgtcttcctctccgggttgactaaataatttgcatgtttattttatccttcccctttcttatagaacaattctatttccttttaaggggagacattttatggcccggcctcaggcccctttcttttttggattttcttgtctcttgaacaatttgtgtgtctttgaatctatttaacc

SEQ ID NO: 209812 - DNA, 606 bp, Cannabis indica
aagttcggattaaaatcaagcagtgcagttttcaaaggcagaaaccaatatatcaaatacatactctacaaacagcaaccacatttcagacgctacattttctcaaaacagaatattaaatattcttaatacaaatgtgttggaaccttgtgaaatattacaaaaataaagtgtgtgagtaagagtctcacatgggataaaaacacttcatttagagtgtataactagtgcaagtttgagatatggatttgggccccaaggggtacccagttttgtgcgcataggtgaggactcacacaccggaccaccacacacgagcgcgccgccgaccgtgccgagcgggcaggtgtggtgtcaccttatttttgggaaaattttatttatttaattaattgaaacagatttttttaaacgtgtttgattaatcattaaacaaaggtttcctgattttgtgcatcgttcccacgatctgttccaacgttcccttccagtaacgtatttcttcccgttactactttcagcgcattccctatataatgcgactgaacagtggaagaaaaatatcttttttccactctgaaatattatacgatatatttacatact

SEQ ID NO: 209813 - DNA, 559 bp, Cannabis indica
cgttaacaatagggtactacttaattacttaatggtctttttctaaagaaagagacaaccactcttgattaattaattggtgagtagggttaggactattcctatgtacaaacataattgctttcattttcaaagtcttttattatttctcaatttttttcctacaaaataaacaaataattcaactcttcttaaacttttattattattattatttatttatttttgaataaatcatacaattttattaataataaccagctaaaataatagcctgtaatttaatcgagatatctcttccgttgaagacacgactaggattaaaattaaaaaaacgagccaaataattagatgaaaaaaattgcaacaactaactttaaaaacacatatttactgcttagaagatacaacagtagaaacgggtgcagcgagttcattattcaatcgtaataactcgagtcactcatttattgtgcatggtacgtaactacacacattaataatcctttcagtcatgagacttgtattccaccaatttcagcgattgaggcaagtcatc

SEQ ID NO: 209814 - DNA, 564 bp, Cannabis indica
aatataccaaaacaacaaataaataaattacaaaggctttaaagcccaaaaccaatcaatatctacaccttatatgggaatgtacctaatagcttatcctattatgtacaatagtctttacatttttgacaattacctctcttcttgtgactttgtgctcctaaaagcaatatttctagccgttcatattatgtacacaacagcaagaagaaccgcaaagaatacattcttccgaaatttgaaatttttatttcttgacaaccaacgctgagaaatgagattagcaggccgaatttaccaccccaaccaatccttcaacaatccctaaaacaaaattcactcgaacaacaattgaaccaaaggtgctcaacagtttcttcattattatcacaaaaaaaaaaacgtctgctatatgcagaattgcgaaagcatttacgtctatctctagtttgtaatttcttgaacgcagtaagccagccaataaatttacgctttgacatagtactcctttccacacccaatcagcctaaaacactttttcaaactcaaaatttaacagcttat

SEQ ID NO: 209815 - DNA, 549 bp, Cannabis indica
ctctctctctctctctccttcatcctctcacatgcccagctgaggctgtacaacaccaggttgtccaacacttgagttctgctagaatgattcatacattgtaatcctaaaggtactatagcagatcccacatatagcgatctggatagtaattctctcggtttaatataactaaaatgggatgtcattacccgctatcacaaggttgaacctctataacaaatctcattgtctatttctttttattcttatttgtccacacacttggcaagcatcagatctacacgaccccgttatcaattgatcacttttcaaggtcaacagaattcgaatcattagaaaccagaagaacagatcacttgctttctcacaagcagcttacattgataaggtgctagagcatttcttaatgaacaaaaccaaaagggcagttatgccttttagacatggagtgcgactatctaaggaacagtgtcccattggtccccaagagatagaagataggagaagatttccttatgcctgagcacttggaagtcttatgtatgc

SEQ ID NO: 209816 - DNA, 634 bp, Cannabis indica
cataaatagttattatttttgctgtctccaaaatttttttgatgctagttaaaatatgacaatatatataaaaagaaattaattgtctaaatttttatacatctctaacccatatgaataagttttgaaattttatttttaacaaaaatattgtgtaaatgaagcataaatttcacaactctatcccgttaataatttttctatttgccttgtggtatatttcgccatggcagccattttccaagagagtgggtgtaaaactaaattgtgagtggtttcaaaaaaaaaaaaacaacaaaaaaaaacttcgattatggtgtaggtttccatatgatacatactcatttgcttattttttaatatacaaagcttaactaataagaggataatgttgtgaaacttttgcttcatttaacacaatgtttttgttaaaatgaaactttagaaattataacacttcacagtgctcatcaaatttaattagaaataactttggtagaaaaaaaataaataataataataaaaaaactttaacatactctgtatatttgcatatactcaataataaaaaatactcaacaaattttcaaaaaaaaaaattcaacagtaacatattattttaaaaaaaaaaata

SEQ ID NO: 209817 - DNA, 523 bp, Cannabis indica
ccaactcccatgtacggtgtcctcagttgtcctcttttgaccatctccccttgatttcgcaacaaaagcttcaccctttcaatgggtgctgctgcactctttgatatcaaagcggcaactcctccaatggcgatatctttgtcagatttctttgtctttgccattgccataactaacactgcaaattatttataattactattagtattattattaaaatcttttcgtctataaatgcatacacgtaaatcatggaacatataattcgctcagataataaaataccattaaaatgaattaaatttaaaaattaatattacctacaaaagaaaagaccaatgaaagaaaaaatagaatgtaacgaattacagagtgttcaattacctaatatttaatttattgaatagacgagaatggaactaagggtctgttggaagtttatgaatattttaagtaaaaataatataagtagtcttagtgtgtgtgaagtggaacctgactactagtactaaggtatattatt

SEQ ID NO: 209818 - DNA, 649 bp, Cannabis indica
acagttaagcgtgcttgacctggggcaattttaagatgggtgacctcctgggaagttttctcaagaagcgtgcgagtgaggacaaagcacgctggaaacactcgtgttggtctgtagggtcagtcatcagtccatgaagcagccagagtgacgtactcgtgtataagaactattcattccgtaggtgtaaggacccaatggagacttgaaatggggacgttacatatagtcacttaaaaaaaaaatagagcaagagaagagatgaaatctgagaatttggacttgtacgtagttttactgaattggcttatatactatggttgattatattcaaactgggaataaaagaccttggttttgttcaaattactttatttgtttattttattttagtttagagcactattattaattttaaaaaaaaaaacaaccaaattctacaattatgtattttaattggatggtacggacataattatacatgactgatagtttctgaaacatgaattaattatttttgtaatgattaatttataaataagggtacataaattaaataataaatctttttttttttcattgactataggatcgtatgtttagcgagaataatgttcccgctgattttttttttattgtaatggttgaa

SEQ ID NO: 209819 - DNA, 607 bp, Cannabis indica
ggtatcagagccaagaaactcttaagctcttcctctgttcttctctgttcttctcttcttctcttcccatctctgcatctgttgtgtcccagctgccatggcaagaggaggaggagctcagactcgaaatgcttccagttgtgacaacgattctggtaacaataatcgtttttccgcattagatcaagctactcgatatgacgatccacgaagcccttattatctatcgcacatagaccatcctagtgccatgctcgttgcaaaacttcttactagaagtgagaactatggatcttggaagagatcaatgatggtggccttagctgcaaggaacaaaatgaagttcgttgatggtagattgcctaaaccagatgaggaagacgaagaccacgaatcttggtgcagatttaacaattttatcatttcttggatattgaaagttgtatccagtgaaataggagacaacatcatgtaccatgataatgcttccaccatctggtctgaactgcaagaaagattcaattaaaagaaatgcccctcgtgtttttgaggctaaacgtgcaatgaatctccttaatcaagaatcgagtagtgtgacttcatactt

SEQ ID NO: 209820 - DNA, 621 bp, Cannabis indica
tttcaccatgagctctaagcttacatatacatatatggaggcagttttaatagttacattttttttagccattgaatcactattaaatggttgtgattaatttgaaataaaaataaataaaaaaaagacctataatctgatattaacctgttaatttatttcttgataaaacttcaattaagattaagtatattttaaaattaaattaagtatagttattaatttattttttgcaatttattattggataagaattttttaccaattttttttacacttatattatttaaatttttataacaaaacactttataatttaaaattatatacatattgttatacccgaaattcggtaaacacatcagaggaagacacatgtcgagctgggaagaacgaagaaatcaaacaggcaaacgaaagtacacttagcatggaacaactcgttggaaacataattcgcagagtatgtttataactcagctggttgaatagccttctgctagacagaaacgtacgaactgctaacttatgtattgacgagaaatcatgtgggtgcacgtgtgccttacgaggcctcaatctcgctgcgtgaaagaggaacgataacaataaaaacactta

SEQ ID NO: 209821 - DNA, 530 bp, Cannabis indica
tgatttatagcaatcgatatatacgatgtaaagacccaagaattttatagaggttcagccccgagcagttcggtaatagcttaatcctcgttatttgtattgactcaagaacaaggagaaaggttccttttcttatagctcttacaacagtatctctgaataagaattcttagataatatctttagggtaaagtcttgactaaactgtttgccccttttgcccagtgaacatgtatcactatttatagggctgtgaacttggagaggaagtctttcccctcttgttaccatggatataaacagaaaagattgtgggataaatacagaatacactgatcgtgggatcgtgggtatgccatatctctgtaatctgatccccaagttatagggattttgttgatgactcacaatgcgaaagttgaattcgctaagtgttggttgctctgtgcggatcgctgatcgctttgcttcgagtgtgccagggaggcatcctgttcgggttgtactctccgaggagatactcaaagttg

SEQ ID NO: 209822 - DNA, 1102 bp, Cannabis indica
gggaagaacatatatgttttattacatttggagaaatcgttacataatacgattgcccaatttgcgttgtcgttttgagtggatgctcatacaagcttgcccttgtggtcattttcgttacgcacgcttcatacgaacctttaattaatgtcgtttacgtctgtctatctggattgtgagaaaagaaggagggaagcccatccacatttctcccaggcccataattacattatataccaatttttttattttttattttattttttatctttattttgttactttttaatttatattcaattttttaggtcttattcccattatgtgtattaaaatttttaattttgataagttatgtaagattatatttagtaatttgattataaaataagttatttattaattaaaataattttagaaatgtgttatatgaataggtaattttcaacttatcgttagtgatactttgcaggcccatttacttagttttgatatcattattcatcgtcgtttctgaagggccacaaaacgcaaaaacgcattgtcgttttcggccatgcctcaatgcttttccctcaaatatttatcaacacaattaattttttaaaaaaaaaaatcaaatcaacacaataaatttaagccactaaggctagtttagtggtgagggaagaattgaaaaaaagagaggtcatagttcgaacccaaaccttttaagctattaaactattaattgattataaaatactattaaatttgtatggcgacataagctctctcaacaactcttttatcctattttttaaaatatatcataaatttatttattttatagtacacttttatattctaccatacattaatttttttatatgtttctttacatcattatattaatattatttttatcttctacactattaaaataataatttttgaacatatatacaataaatataaataaatctttatttatatattattaaaataagtttaaagaatacactattcattctatacatgtagagcaagttgcattaatcttagtaaatttctattatacatatatgatttaaatgagctaatgaaagctttttatatcaca

SEQ ID NO: 209823 - DNA, 500 bp, Cannabis indica
aaaaaaaaattctttaaccaaaatagctctaattcacttagattcaaatatattaatattttttttagtgaaacctaatactaattatagaataaaaaaatatatatttatttagtatcttagttttaattaaaaaaattacaaatatatttttatttaatttaaccaaaaaaaaaatatagaaatacttggactatactatcaaatgttttctgattttgttttagtttattcctcctgaactatttaaattgttgtatttaaggatttgtaactaatttcattcatttttggtaatgtgtcgattgtccttatactaaattgtaccccttgaactttgatactactacatcatgccctggaactttaacatgtaacaaattgtgctcttaaattttcatccacgtcagatttcttttagtaaaattagacaaaagttcttaaatccaacgatctcaatagtttgaggataatttttagcgacttaaaaagttcatgag

SEQ ID NO: 209824 - DNA, 689 bp, Cannabis indica
catgataggacaaaacacattgaaataaaatatcactttatcagagataaagtttcaaaaggacagatcgggatagacaaagtgcttactgaagtgaatccagcaaacatgggcacaaaggttgtgtccctcaataagtttaagctttggttaagcttattggggattgacacaggttggtaaaacccttaatgggtttgagctaagaccctcagttacactcaacaacaacaaagattacagtgcacagttcacaagggagtttaggtggaaattgttggtataaaccccgtcattccatgttcactgtaaaaaccagaattttaaaagagattacagacagtaaaaaaatatttcctaggtggccttcggcctctaatatacctaggcagaacacttttttaaccactttgtaactaactctcatgtttttctgcattcctctataatacatataaataccagatcagtacaacaacagagataagatcagatcagtacaacaacagagataagatcagatcagtacactagaaaaatacagcaacaaaatcagaactgaacaacaaaccaagggctgttttcagagagaaaatacagacagagactgagttgaaggaggtttacagtgggtatccttggaatcctgggacgttgggttcggagtattcaactcgagtggagggttg

SEQ ID NO: 209825 - DNA, 659 bp, Cannabis indica
gcataaacgtgagtctcaaatttggttagcgaaaatctgcgttaacagtttggtgctttcattgagagccttagtaaaaaaaaaaaactcaaaaaagccttcccttcttttagagaaaagcattctcctttatggctaaaaatcccgagaatattagcaccccacatgaggaaactaaccgtcgtcctagaaaagagcctatgggctctagaagatcaactaatctgccatccagaaggagcacccgttcaaggagggccaaacctgatgatggtcccaatgctcggaccacacgttcccagagaactcaacttgatgttggacctagtacgcggacaacacgctcgaggagaactcagcgtgggaatggccagaatcccgaggcgagggatgaagagctcaaccttggaggtacccaatctgttggagaaagaacttatgaaatggagagtcgccatctggaagaggcccagcgtcgaaacactgagttagaatgagaggcagcctcgaccagggcggcacaggggaggaagcccaaaatcaaccttaacctacagtgagaagactacaaggtagaccttgtggctcacaaaccaggagataggaaaagtctcgggaagaacaacccaaggaaaatgagacaccccctgagaatcagg

SEQ ID NO: 209826 - DNA, 798 bp, Cannabis indica
tttttttttttttgtatttacagcagtatacttttgatatgtttgtgcatgctctttataaggggctgataaaaactgctaatttttttccagacagattttggcgcagatgagattttacgcaagtatatacgatatgctttgaacgaaaggccattcaacccagatttggttgttgatttaattcagcttagaaaagcttctggcttggatgattcccaggttactgaggttttaaatgaaatctcgagaaggattgtgcaagataaaggtaactaatttgaggctgcattgtcttgaagttgtatgctattgtagtctactttttattatgaataatagtggacggttaaagaagaacttttatgggtcctggatcttatatgatataaaaatggggaaaaaaggttttaggaccttgtattgcatggagttggggttcctatcaattaaacgaataattatatcatttccttatgtctttacttggaccattaatctaatggcttcaagaattttaatttgacttaaattattcatgcatcttgtagttgcaaaatttaaattagtgttttagttacatttactagtaacaaaacctgtgcatgtttttccatatttggccaatagtagtcgtctccatgggagggatgcaaaactgaatttcggatcattcaacgtgtgtaagtagagtagttcttaaatttgaatcactgtgggaggcagaagatccagttgtgaacttaaattttgacatttatggtgtaaatgaaactgctcttttttattacgtacatt

SEQ ID NO: 209827 - DNA, 533 bp, Cannabis indica
ttttgcgagggcagtgtggttcggttgttggtggcagataagaacgaattcaattaatattgactgctgggaaaggtggttagattggttttctatagattctaatcgtcttgatgggctttaactgcatctttttcttggcggggctgccataatctttgaaagcatatggcgagaaagaaacaacttgtctcatgggggaacgcctacccctcttcacaccatcctctaacacatcaatacaagatttcttgaaatcacggaggatgcgcgaacacaacaagttggcatcattgaatggcctccccccccgcccctcgggatgggtgatgtgtaaatacggatgtatcgtattgggaaataccaggacaggggctgtcgattttcagaaatgaagcaaggagtttcatcaattgcctttaccgttccggttggctgtgagtcgagccccttagtcggagagatcgatggtgctagtgtaagggagtcgaggaagcgttaaagcaaggttacaagagattgatttttcgaga

SEQ ID NO: 209828 - DNA, 1102 bp, Cannabis indica
tactgctgttaatcttttgcacatgaaagtcattcaatctaatgcttgttcattatgcaatttctcaagagagactctgcgtcatgctctcttcttgtgtactcgagctcaacaggtttggtctctgttaacttctttcaaggctgtttcgaatatttcccatttgaatggatttgaaatttttttcttcccttgctgctgccacttcgaactctgatttggagagaattttgtgccgtatgtggagtatatggactgaaagaaataaggagattcatggcactaaaccaaaaccggcatcccttattggctcttttgcctacacttatgttcaacaatacatcgattcctctttgcagcaaacctccttagagtcaagctcttttgctcagccttgttcaagcggtttggagcaaaattacgggaactctcgccctactgttgttgccaaatggtctccccgcctgctggttctttaaattaaacgtggatgcagcatatgatgctgttggggcagttattggtcttggggctgtgattagagattactttggcgatgttgttgggggccttctctaacatcgttgcatggttgctattcggtgaaggaaatggaagctatggggattattcacaatttgcattgggctaggaataacggattgaacatacatttcatagagacaaattctcttattgttgctgtaaagaccgcatatgaataatattttgaattattaaataattagggtttatgtgtgagattttattattattaataataatacaattatgggaatttatttgagttcgtatatatttattatgctatttatgtaaatttctcaattactgtgtttgtgttcggaagcggtggaaagcggcgttgggcctttagagggttgtattttgtatgttatagtcattgttttattccggggtattagtgtaggtttaatagtatggttattagtgggagtattatggtgattaaaaatgccttagaaacctttttattaagttgttggtaatatttaaaaggataaattattaaacctttaattcttttatttttattcttgattataaagaaataattaca

SEQ ID NO: 209829 - DNA, 1547 bp, Cannabis indica
taacccattagtttatgcaacttctcatttatcttctaacttaacttagagtttcatctgtttaatttgggtatgggaaagaattttacacacttttattttggtaagctcaatctatctctctatgtaagttatagcatttcacaggtatattataatttttttttcttatattatcaatttcattttacataaaaatgagtgggtttgaattacaatttgctaattttatttttctaggtcttattttctttattcattttcttattatttattatatcatgttttttgttgcttctttgttgagtattattttgggagctttcatcttgttctcttttgatgccatttatgtataactcttcattttatttttatctccatgtcgacttaagtgtagaggtggctacaaattctaaatgctcgagtgtttggattgtcattggtgtatttgttaaatttgtgcctgtgtggtgttactacttacaggattatttgcttggaaagtataaataaccattaagaaagtacttttaatgtaaatcaactatttttttttttgtgggagtacttttgctttgtttctatcatgctactaaaacgttttagtttgtctatctcttgtttgtctatagatccagcaacaattcgaaagtacatgtaagaccatatatttttaaaaaattatgttgtagtttctttaatagatttgagtgttatatgagtaaaatgagtctcaccagtttagtttgaataagagattataagagcaatcttcaattaaaggactaaggttgttcacctttaaaggacttaagaaatacagttgtttttagttgcgaatgacaatattggattctgaggatatggagaaggttaattgttttttggttattagtgtattttaggtaagaggaagaagtaagttaataaatattagaatgggttgggatgaggtgactgttttagtataaaaaaatttataagacgaaagtgcttagataattaatttcaagacattattatgaaaccaattgcatttgataaaattattttgtattcatggaattgtgagaagaaaagattggttagattattatttgtatgaaaatatgtataaattaacttattcaatcacacttactctttgacacgaaaccatacatcttactgcttgttttcattttttaataattactaccaattgtataggagcactttgaacatgaagccacaaaacaaattgcatgtttaattcaaacttagaacaggtagcaccacatactataatgatgatgataatatctatatcctatgaatattcactccacatatatgtctgtattttgaaaccgttttttcagtttgtattaatcctataatatgaatcaagtaacatcactaacctaagacaaacaaacaacaagatgttgaactcaaaaatcaaatacacaaatttagctaagtataaaatggtgcaagaagaagacctcaaaacgaaaatagtatggatgtgtttttttagtctgggtttttgtcgtactgat

SEQ ID NO: 209830 - DNA, 1042 bp, Cannabis indica
tataaaagacaatctcttatttgattcatgtgtctcaatctcaatttggttcgaactcaaataatttagtctcaattaattgtatgttcattcttttgctttcttccacgtgtcatcttcatcctttaattttacctttgtcacactaacaatgccatagcatattagattctctgaatcttatgttgtctcttgattattgtatatatctaggggaaataatgttatgtaatacaattttcaatttttaaaaatcgaacacttgtgtcctgtataaattatttcttattgtcttctatagatgtacaaaaggtttcacattcaaatctggtgcttgtgaattttttttcttacatcttatttttgaatcattaatttttgtatagaacttgcaagtaagttttccaaaaaacaaaagttcaaaaaagaaaaggttaaataagtaataataatacaaacattgcatagaaatgtaaataacaagagttgaccaaaaaaaaaaaaaggaaaaaaaaacactccatgcattacatattgtcccataacttgaaataaaattccaaaacattttttgtttgatacacacaaaatccaaactttgaattcaattaatttggtgcttctaatttatggaaaaagaaccaacatcctaaaggggtccccaatattgttatgcaaagtgacaaataatttggaaattgaatggtaataatataactttcaaaacaatatcgatattatactataattataataattatatataaattgcctttaatcacgcggacataaaaaggatttttacctttcaatattggaaatataaaagtttgtccgaagttggagggtccaatcataatgattataaatatacatgatttattttcttaaatcaagttgtatgtgacgtacccattaggctaattctatggaaattattaaactttgtattctctattaattcttgtgagagtgatatgttataatttggttacaattgccattaatgactttgaactaggcatttgagttattatgcctc

SEQ ID NO: 209831 - DNA, 521 bp, Cannabis indica
tcctctttgattcactagacttcagtatataagttgatgtgatatataatcaaaagagaaaagaagagactaatattcttatgttgtcaatttttattatagattttttatatttatctttgattcattagacttcaaaaaaataaatacgatatgtgatatataattcgaagataataatatgaatctttatggcgttatgatgcttgatttatttggtttcctttttagttcattagactttagaaaataaatcaatatgtgatacataactaaaagggaagagtaaaagtttttttttttaaaaaaaaaaattgttatgcgatcaaatgtctttattctaaaatatgtatcaatgtgaaacgataaattgatctcatgatttactgaaaaaaaaaaaatcaatttatacattcacagaagaatttgaagatatcattcttcttattcttttattttttcaatgttgtgattaagagtcgttctaatcctctttgattcattagatttcagtatataag

SEQ ID NO: 209832 - DNA, 912 bp, Cannabis indica
ctttaccaagatcagattgcacttatttgattttagtttgaaattgccttttcataaaggtattgaactgtataaagatgttactagcctcatacttatttttcataggaaataaccatgtaaatttggtgaaatcatcaagaaaactaatgtaatatttgaaaccatcagctgaagtataaaaggaaggaccccatgcatcatttaaaatcaaatcaaaaggttttgtggttttattttcaatacttttgaaactaaactggtgcaattttccagtttgacaagcattacaaagatctattggcttgcactttacatttggaacaacatgagaaagaactttatttaatataggcttggagggatgaccaagtcagcagtgccaaacattgacaattttggacttgtcatgaacatgattacttgtagttgtatgattgagacccttgggtttgaaactgacagaggcagggacaacaccttgagatttggatgctgggacttgaagcttatagagaccttcactgagatggtcctgcagaagaacttgcttggttgtcttgccctttatgagacaagacaattcattaaattcaagaatgacatgattatgcttggtaaattgagaaatactaagtaggtttttggtgacactaggtacatgaagaatatcttgcaagaccaatgaattattaggaaaatttttacaaacagaacttgatccaatatgatgtatgggaagagaggaaccattacctacaaccactttgactttacctttataattagagacagaattgagatgatcagcatcatttgtcatgtgatgagttgcaccagagccaagataccaggtagaagatgaatctgatgtgggagtggatttagacacaagggcttgaggggtatcac

SEQ ID NO: 209833 - DNA, 600 bp, Cannabis indica
aaaaagggtgtatacacatttagtaccatttgttttatttaaatacaaatatagtaccctatattttcaatagtacttatttggtaccatgtattttaaaaccatacatatttggtaccttaaactcaaaattttttgataaaattttattaatataattaaattgtcttcaattttacaaattctagattcaaatttaattatttaattacatataactgagaaccgtttggccaaattaataaaattatattgattaaattttactttagggtaccaaatatgtattatttcaaaatataaggtactaaataagtattattgaaaacacaaggtaccaaatgtgttttaagagaaaaaatagggtactaaatgagtatatttcctaaaaaaatgatgtcgtttaatcatcaattttccattaattgagatgaggtgagaaatatataaaataatcttaagctcaacattcaaagtataatctctttattcatctccaatactatttttttatttttttagtccaaaataaataaaaaaataaatagagaactatttttattgttagtgctctaattatattctctactatagttagta

SEQ ID NO: 209834 - DNA, 674 bp, Cannabis indica
acgaaccaaaaagcaaaagctctatagtcaaacgtaacccagtcagggagtaaaaagagttcaaagggtccaaactgaagtgattctacaaagaagagaaagacccaagagtcaagatacacttagtacaaaagtcttgtagatactcgagagaatgtgtataaggaaacttgtaacatggtccattacaataagcctccgccaatgtacaaggacagaagacaaaaaagagatccaaacaataggtgcaaatatcacggcgatattggacacaccacaaatgaatgtgataatctgaatgatgaaatcgaaggactagtacgaaatggacatctatctaattgggtaagagttctagtcatttatcctggacagggggttgcacatggataatttttcattacaggataatatggagccataaatcctcctcagggagtagaccatccacaagctccaaaaatccaagctccaaatgcataagcccttcaggaggcccaacatgctccaacaggaagaattgttatagccctcggtcccgaaaacccatatcctcttagagcagctcagcctgcactagatggtcacgtgaaaactatttttggtgggccacacattgttggaagcacctgaaatgcacagaagtatggtgcttctttaacttattttttttt

SEQ ID NO: 209835 - DNA, 579 bp, Cannabis indica
atttaaattgtaaaataataattttgaccgactctaattatgaactaataactagaggacaaactacttataatgattatatcaatggactactagttagaattctgtaaataaaattctatattgtcaaagattacaattctataattatagtggaataataatagaattaataaactagactattttatttgtgagacttaatagtaattaagtatttattgaagtttcgaaatataggtctatggtccatatcacatctatacaacattgtaaaggagaagatataatttgtaagatgaattgagaaagaattaatttctaagagaaataattcttgaggacaaaatagtaattttgtataaattattattttgtataattatgttaattatgaattgaataattaaaatagaatttaaatatttagttttatttaataaaagtatattaattagttaaatataatattattgctaaataatattatgagagagaaacttattattttagtgaaaataataattattaatccaagttaaataagagattaatgaaaattaatcaattattaataat

SEQ ID NO: 209836 - DNA, 546 bp, Cannabis indica
gatgctaacaactttgagatcaatccgaccataatgcaaattgtctaatctttagtcgagtttgtggggttgccaacagaagacccaaacatgcatctcgctaacttcaaagagctctatcagtcattcaaggtgaatggagttagtgacgacgccatcaggctgaggctgttcccattctcattaagggagcgagccaagagttggttggtatctttgccacccaattctatcaacacatgggaggaattggcctaattcatttccaagttccttcctctaacgaagattgcaaagttgagatctgaattcaacaacttcacccagcatgacaacgaatctctttacgaagcctgagagagattcaatgagttattgaggaagctccctaactatgggataaaaagtggctgcaagttggttaacaacactcgaacattcatagaggccttagaacaaataccgcagatggtggggcttttatgagaaaaagtgcgaatgaggctttttgtactacttgaaaagatggccatgactaaccaataa

SEQ ID NO: 209837 - DNA, 546 bp, Cannabis indica
cttgacattctttccctttattttttaattaaagtgcactatataaaaaatattaattaatatcatcatatatatgtattgtgaattcaataaaacttgtacatgtctatatgataaaaatatatatcaatattttgtgagttcttattgcatatatgaattcaatataaaacacgtgatattataacgttttaaaatacaaaacccatcttttaaaaaatatactcttacctatatataattatatattacgtacgtacgtaagtacatacatataagatgtagcggtataaattgtatattgtgtaagtgatcacgcacaaatttaatgatatagtattatgtgtggttctttttttttttttttttttttttttttttgaagtaactacatctacaaagagaggagatgattataattcatgtctagctttaaagcagtccttgcattagaatgtgcttctagatttttagtatgcacgacggggagcagggccggccctgaaaatatatagacccaagacgaattaaattttagagccctaa

SEQ ID NO: 209838 - DNA, 520 bp, Cannabis indica
aaaaaaaaaactatacataattgaataatgatcactcttattatcgaattctttaagttgagcccgaatgtactcaacagccaatactttaaagaaaatgtggcaaagttcttcatcaggatagcataggggttttctctcttctctctctctcgatacacttttaagtgccgtttggttgggaggaatgaaaacatagaaatgagaataggaatggaaatgggaataggaatggaatgaaataaaatttaaaatatacaaaaaaattaataaaaaaaattaaattttttctcataatgcattggaatggtttttccttctatttcaaaatgaaattgtcattccaccaaaatggtagaaagaccattcgattggtatgacattccaacactttaatatgcaacaaaacaaaggaattgaatgaaaattattttatttcttttccattccatttcattacctccaactaaacgccagagactaggaattttcctccattgcagtgcggttttcgcagttt

SEQ ID NO: 209839 - DNA, 940 bp, Cannabis indica
aattcttctgttgtggctaaaggacgtttgttagtgtggacatcttatagagtaccctcaactattcattgtaaagtgagtatcagtgggttgcagattgctttttttgttactgcagtgtatgggctcaattctataaatgaaaggaaggacctttggagaaagttacagagtcttgggcagaatgtggaaccttgggttatttttggagatttcaatgcaatgttcagctataatgatagaattggagggaatcctgcgtccgctaaagatattgaagatgctcaacaatggctctcgaatggtcaagttgaagaatttaaatgtgcgggatcccactacacctggtccaataaacatgatgttggggataggatttactctaagttggatagagtgtttactaataataattggtatcaatcatttcaagagggccaaagaggatctttgccaagctcaagaggcgcttgctaagaaccctactgatatcactttacagcagaaagagaagctcagccaggtaacttttaccaccactcatgctaagtatattatctatctgcgacaacaaagtaaaataacttgggtgagatgcaatgatgagaattctaactatttccatgctagtatgaggaaaagaaaacttgagaacagaattactaccttctctattggaagccatctttaagatgattatgggaaggtggtaaatcattttcttaatcactttaagagatttatgggcagcaggagctcagtcacagctgagattgatttggactgcattcaatatggtaacttactgaatttggagcaacaagttaatctcatcacacctttcactgaaaaagatgttaaaaaggctttgttcatcatacattctactaaaagacccgggttagatggttatgggtcaggcttcttcaagggcctttgg

SEQ ID NO: 209840 - DNA, 798 bp, Cannabis indica
aatgaataaaaagaaaaggttttgtttgcttacattcagcctaagcataaactgataatcagttattaacttaaattaaatccacaaaatacaaaagacaaatggggtaaaatgaccatttttcccctcccacagtaaaagtaataaaatgacactaaggggtattttgggaaattctagaatcccgactaattctgacattcccaatgtctaaactattgtcccgctataccaaaagtactaagatgtgattctaatagccaaacacagcgttccaatgtttttttttttgaacaaaaggaactttttattcaaaaaggacaaaacaaatacaaaggctaggcaggaggaacaaaccaactaccacaaaaaaaaaaaaccacaccagatactgagctattaccagctatttacaacactcaacacatattgatctttattcttttggttcttacaatgagccccaacaactctagccttaacaatacacttgatttccttactaagggaagaaacattgttacaaacatcgttaaagaggcaatcattcctattcttccaaaacatgtagagcacggtagatatgatagcatttaggactgctgcaacaagatcagtttttgcaggtttgatttggtgaaaatcacttaaatagctcggccagttcagaacaccagaccaaccttcaaccctattaatcaacttttttgcaaagatacaatcaatgaatatgtgattatgggactcaagagccatatcacaaaccacacataaaccagaagcaataggaaggaacct

SEQ ID NO: 209841 - DNA, 795 bp, Cannabis indica
tatataaatatatacaagaaaaacatattgcatgtgtagttaattaattaatgtacttcttggtaagtaatcttaatctaacatggcatctggaacatctaagtaagatgattttaattaagactgtcagttgaagaatgattaaatagagtggtgggtataatattagggtggatgatttcctgagaagttttctcaaaaaacgtgtgagtgaagacaaatattagtttgcagggcaagtcgtcatgattccacaaaacaactaaagtaatgtacccatgtatatataacagccataagtctagcagttaggagagttcatcaaactgctcaaacgcccgcaccgcaaaaaaaaaaatgtggtttgaaattctttgctgcgatgcggtcgcgatttgaatttttcctaaaccatgcggtgcgctttgcggttttgaattgttaatatgctattcaaaccgcaccgcacattatataaagactaatttttatatttatttaggtccaatatgtgaatgttcaactcaaaacccactaattattgtattgttaaaacttaatttttttttatatatttattttcaagccttatatttgtgacaattgttgctcaagctttattatatttgtgatagtttaattatttggtgatagtccaaataattagaaaaaccgcatgtgcaagttagtttgaaaaatgatcaaaaaaccgtattacccgcactgcgaacactcctatcaaaaatggatacttaataaaggcttaaagcgccaaaattacaaatccaatcaaca

SEQ ID NO: 209842 - DNA, 632 bp, Cannabis indica
gatgatcacggtaaccatgtgtttaaagagaaggagaagggagttattcttaacaagtatttccaacagttatttgaaagttcgaatgtgagtttgaatgtagatcttcatgagtttatcagtccaacggtgactaatgaggagaatgcattactcattgatataccgtccttcgatgagataacgaagcaggtgttccaaatgcatcctctaaagtctccaggacccgacggtttctcgggttgcttttacagaaatttctggggagatatcggcctagaagtcacggagaacattcagaatttctttcgaacaggtcatctaagtccttccctgaatcacacctttctgtgcttaatccctaaatgtgagaatgctgatctggtcgagaaataccgtcctattgcactatgtaatttcatttacaagatcataacaagaattatttctcaaaggcttcggtcgatgatggaccgtatcgtttctccactccaatcggcttttatcccggggaggtggatagctgaatcctctatcctttctcaagaattggttcaagtcataaaaaagaaaaaagggaagggaggcttgatggccattaaagttgacatgaacaaagcctatgataggct

SEQ ID NO: 209843 - DNA, 824 bp, Cannabis indica
taattttagacgttataaatttgttcataccttgtgagactttattttaacttgtttacaaagaaaagtattaatatgattccggtcaatttgggaacacagtacaaaatcagaaatattgaaatgtgtggttataataattctcttcaatttattcacagtttcacacttacatataaactgaaatttttatagtaattacgtgcgtcttataacattgtgtttttccatttcaaagtgtacattttctttgccccaatatataggtaattaaaaaagtttataaataataaatattgttgattttgttggtgttttttataatgtgtcatatcggtgaaaatgagttaccatatatattaattggcttgaaatggaactgaaaaaaaaaaaattattttattcctttagggtccatttgaaattcgagattagatttgactgaaattcgagattagattagattatgctaaaaataatcttatattctgttttagaataggctaaaataaaaatatatataataaataaataaataaataaaaattatattgtaaataaaataataaatttttataaaaaaatatatttttataagtaatatatcacatataattatataaatatatgatagttataactaatttcatattttttttgacatgatttcatatttttatttaataaataattaaaataataaaataaaaatactttaataataaaaattatttttgctaaatgataatttaaactaatctcaaacttataggactgttgatttataataatattgaaaaatttcttaaaaaaaaaaaaaaaaa

SEQ ID NO: 209844 - DNA, 690 bp, Cannabis indica
gatggtatgtgacattatcagttaacatcaacacctagagtgacttcaaaccccataggttgataaatgcaatccgaaaattaatcatgacactaacgaagagtaagcaattaaatactttaaaattaaaaacgccaaaaacccacggtaatattaataatttgaacatacacgttaaaattaatattaaatggagaaaaacgtctccaaatgtaaaaattccttaaatatatatatatatatatattttttaaaaaaataactgactttttatttaaatatttaataagactctaattaataataaatatcaataattttatttttatatttaagtctttactataaatattttaataattaagtcatttaattatattatttataataaaattctattattttataaaattaaatttctatatcttttaaaaaaaatttttgaataatcaattgctaaaagattgtaatttagtaacatgttgaaaataatcaattaataattattagtaatttaattttaaatataattaattttagaaatttttacactaaaaatacaaaatgaaatttttattacataaatgcttacacacagttatctcaacatttttaccttttctctttattttattacatatataccacatgcacactccctacatgtatatgacacgtgcatctccccat

SEQ ID NO: 209845 - DNA, 1017 bp, Cannabis indica
gttttctggttttgggggtttactcgtagaaatttgggttttgagggtttaatgaaaccaaaacgaaagtattaggagttttgccgccatttacccatgaaataattctattgtaagccttctacataagaaagtattgtggacattgttccacatgaaataaatggtagagaagtgagtcatatataagagcatgggctactccactcattgtcaattgggtttcagatgaaaccccatgattctcaacatggtatcagagttatatcccttgcgggcaagtgattatatccgattcgcacctatacagataccaccatcttgaggggggatattgtggacattgtcccacatggaataaatagtagagaagtgagccatgggctactccactcattgtcaattgattttgagatggaatcccataattctcaacagaaaacaatgccagaaggttaattttttctaacaaatcccttctctattggagtcttagttcagattcctctcaatatagataattttttctactttttttttgtgtaataatggattgttttaaattcaaaattgcatttgtatttgtagaaagagatgccatattaatataaccatctcagatcagaagaaccaaagcaattcccattggtctctctggttttggtagttgtgctttcctagtatatatttaattatatattaaaacacagtaattaaaaagaaaagaggccttgattgtccaatccccaaaacgtgcttaggattatattggcttttctcctatcctttctgttattattttgaaatctctggtcttcatctctcttttacactctatctcaagattctcgaaaaaaaaacctattgtcttcttagaggttttttttttgctatattattagttttcaattttaaaaattgtgttttcaaaagtgagaaaagaatataatttttgtcatgttaaaaatttaatggtgtttggcttagtttttttaaactatttttagacttttttaa

SEQ ID NO: 209846 - DNA, 1326 bp, Cannabis indica
tatcctgactgacaatttagagaacatctatatggatactcagccagtagctctgtacaagaaacctactcccatgaaaaaggacataaataagagggacatttccaagttttactgttttcatggagattatggccatgacaccaatgaatgcaacaatttgaaacgagaaattgaatttttgataagaaagaataaaccacacatgaaaaaatatgtcaaggccgatcagaatcagagggccgctcaggcggacaataaccaagatttattgccaccgccagtagatgggtatttgcaagtcatcattggggtccacacatagctgaagattaaggcaaagcctgagaaaagtatgcatgaaacctatagcacgagcaagaggaagtggtcttggctgtcgaagaaaggaaactaaaattaccgcgggtaggggaacccaccataacgttcaataaagacgatgttgtcaagattaacttcccgcacaacgattcgttggtcgtggaagtacaaatagctaacaaaacagtggcctgaactatgatttataatggagcctccgcaaatatcttgttcaaaaaaaacaccatatgaaaaaatggggctccaactcaaagatttaactccctgtcttcagcccgtatacggtttctccgaccggagtgttgcacctttagggaaaatttgcctacccctcactgttgggcaagctccgaagagcataactgtaatggcacaatttttggtattggatgttccatcagcttttaatgtcatgttgggccgaccagccttatatgacctaaaagctgttacatctatatttcaatcgtgccttaagttaccaacaaaaaatggggtagggtgcttgagaggaaatcaacaagttacacgggaatgttacaaccttgccctaactaaggctaaaaaggaggaatcccctagtcaaagttcgggcaagggaaagaacatagctaaatagggaactgcccaaggcagggacgaagatgtggatccccgacttggggaaccaaatacaaatgttgggccaatggaagaactagaagagattgaaattaacccaaatgttccgatcaggaaactcaaaattgtaaaaggtttgtttctcgaaataaaattagtactgataaaatttctaagagcaaacctagacatttttgcctggtcgcatgaggacattgtcggaatcgatccctctataatttcatatgccgtaaatatcgatccaaatttttggtctgttcaataaaaagaagactgttaaacaaagaatgagccctagccttaaaagaagaggtagaa

SEQ ID NO: 209847 - DNA, 764 bp, Cannabis indica
acaccagcataagtatgtgtgtatctgggagcgtataaatcacgaaccaagtcacttgctgaagggacttcctagataggaaagagccatcttgagtcgactttttataactcccttctaggaggaacatatagccatccagaactcctttctggaggaaggctagctttcccgaagatccttcttgaaaggatatgaaagccttctaggacttatttcctcgagtcaacaattttcaaagaaagataataacttttggagaccttttcatttgaggaaatataccacaaatttcacctagttttttcaaattaaaaagtatgatgatggtgaagaaagaatgcagccatcatggttggtgttccaggaatctcagtatactaacttctaagattgatcaagttcaagcaattcttgaacaaattactgtcaagaccttagtcccaacatcaacatgattatcttatgttctaacattctctaaattaacaagccattcatctgtattctctctaatcctatttagtcttatatctatatctttgaaatgatagactgagttcttacaaagatggatggatgactaactgtctgaatacacagtcactccccctttaatttgtttcaattcgtgaagaactctccgaagtcataatgcttccttaaatccttccgttgtcaccatgaattctactttcacggtggaatgagcaaccacagattgtaactgggcctttcagtcagcttatacagttccagtttgt

SEQ ID NO: 209848 - DNA, 551 bp, Cannabis indica
ggataatcaacaaaaagattctcttacattatattacttgcagcaagctatggcagacaatctttttctacgaattatgtgcgcagcaacgacaaaagaatcatgggacacgctacaggaggagttgcaaggaatagttaaggtacacacagttagactacaaaagcttacaagaaattttgagaatcttaaaatgaaggataatgagactgtaaaagattactattctagaattaaaaaaaaaatagtaaatcaaatgggatatatggaaaaataatttctaacaagaatatagtacataagatactgatttcttgtacaaaaaaaatgtgattcagtagtttcagtgatagaggaaactaaagatttagaaactctatcaccaactgaactaatggcatctcttgaagcatatgaaagtagacgggaaaggtataaagaaagtgaagctgaaaatgcctttcagtctaaactcaattcgtagtctcaaaaaccaaaagctaatgggaaaaagacacaagcaaaacgaaaagaaaataacgacaagtatc

SEQ ID NO: 209849 - DNA, 601 bp, Cannabis indica
ataatcaattaatagtttaatagtgcaagatattagcggctaaattacctatactttaaattttttaacacttaagcacaaaaattgattttttggggcaaaactatgtaaattctcattctgttttgctctgtaccaatccgttcaaaaatcactttaagtaccacagtggactgcccatgtgtacacacatgtacacgtggtacatttttagtggcccacgtaatattaattttaaaaaataataataaatatttaaaaaattggaaaaaaaataattttaaaaatatttttttttatatttttttttccttcttctttcttcttctctttcttctcgaaccagaaccccccaatccaacttcttcttcttcttccttctcccgttatcaccaccaccatcccaccacaataatttttaacctcaaccattattatcaccactgtcccaccattaccaccaccctcatcactaccacaataccattatcaccaccactattatctccaccataccaccatagccaccaccacatttttactaaacctaaaacattttaaccacaattatcaccattacaagtattttctctaaattaaa

SEQ ID NO: 209850 - DNA, 772 bp, Cannabis indica
aagaccgagagaagaagggtagggttcatcacctaacgtcttcaacgattgatgaccggagatggggccttgtggcacactaccctttttcgtcaaatagattgatagacaagagaggagagtgagcgcgagagagaccgagagaggagcacatgaccgagagagaatcggggtaggggtttttgggtcttgagattttctggatataaggattggttgttgatttggtattgggggttggggggttcgttgatggctaacagagaaggagaaggagagctgggagatagagagaaagagagagattaggatttgaagaagaagaacaagaagaataagaaaaaaaaaggaaaagtaaaaaatatatttttaaaattttttttctgattctttaaattttatatatttaaatttcttttttgatttttaatttttaaatatttataattatttttaaaattaatattacgtgggctactaaaaatgtgccacgtgtacatgtgtgtacacgtgggcaatccattgtggcacttaactgtgatttttagacgaaagggtacaaagcaaaacagaatgaaagttgaggtagttttgctctcaaaaaattaatttttgtggttaaagtgttaaaaaatttaaagtataggtagtttagccgccgatatccctaatagtgccttagtggcttgtggaggagttttatttacatcttaaaaatttaagcaccttatttaataactagtaaacaactcgcacttcgcgtgcggttata

SEQ ID NO: 209851 - DNA, 586 bp, Cannabis indica
atcttaggcatggatataagaagagaaaggtggaaaagactattgtacttgaatcagacaagctacatcaaaaaggttttgaatacctttgaagtgagtaactctaaggcagtgagtacttttcttgcacaacacttcaaattaagtgttacttagatgtcggaagatgaaactaagaagtcagagatgccaagagttccatatgctagtgtcgttcgctccttgatataggtcatggtctgtataagaccaaatattgcatatgcactaagcatggtgagtagatttatggaaaatcttgaaaaggagcattgggaagccctgtggattctacgttatttgaaggaaactgctgagaagggacttgtatttggtatgaataaccagaatgaagacttggatgttattaatggttatgtgaattctgattatttaaggtgtattgatactcgaaagtctttgatcagatatgtgtttactatatttggaacatctattagttggaaaataaaccttcaaaaggttgtggcgttgtcgacaactgaagtagaatatatggattcgacggaagcagtcaaagaagcac

SEQ ID NO: 209852 - DNA, 1043 bp, Cannabis indica
ccttttctatgtctgactatcttccctggctccgatggttggacttagatggccatcaaaggattgttcgtaaagccatgaaagtgatcaacaagctccatgaccccataatcaatgaaagaattcgagattggagagaggttgagatgaaaagtagaagccggaaaagtgaagatttgcttgacgttctcatttcggttaaagattcaaatgggaaaccacttttgtctgaggatgaaattcgagcacaagttatggtaaagtctatatatataaatgtgtacatatatataaatatatatatatgatagattacgtgaagatatcttgagataataccatatattttcaaatagatcaaatgaaaatctaattaaattgagcaacaacaaaagaaacgtcacttaataagtgttataattaatgatatacatgcaaaatcaatatatatcatttcgatcttattttaaatttataataaatttgatatgcatgcatgatttgatttgcattaagtacttgccaaataatattaatgctatattagacattaagatacccctaaatatttgtatgtaggtagatcaatttattaaaactaggcatcatttaatttaataagttatatgtttggcacatatggatcgttaggtttatggtttcatgcatatagcaatattaaaatagaaaaaagatatattatacttatccacaatacattattatggctctgaattttatatgttgttttaaaagttactacttctaaatcgtgatcaattcaaaattcaagaattcaattcgacgtacaagtaattttatagtgactaatactttgaagtttgaatggtgtatgtaaattagtaacatgtcaatttccatatttattataatttaaaaaaaaaaattatgttaatatcatatctcataaataacttctttaatatacgtagtccttaggaattttttatttttaatttatatataaataatttttatggttagccatggttttttgtacaatatatatattattgttttaa

SEQ ID NO: 209853 - DNA, 631 bp, Cannabis indica
agccaactttaaaccaacttacacagagaaatacattagagtctgagccaagtaaagaagtattaaaggaaactttcaagaaagactcaccctggtaaattccctcaagactcctcccatcaacagctccagggaagattcggtgtcaacactggataacggattactcacctaaggaaccaaccggttcatgtagtgagtgaacatctccttgcctctcttggcctctggatgcactgacaaaggtggggtaggagccgcatctgctcagatccactcttggccagctcggatacgcccttcgacagtttaggcttgtgcgagcttcctcctcgagaatctttagacttagcagctatcggagtagaagggtccgccatagttagctcctcaaattgatcaataacatcgctggccggtgccttttccttggatggggtcacctcaccgcgcttagaattcttggtcagaggagatgagcttgagcttcctccaactctcttcttcaaaacatcgagcatcttccgagacatatctgcacggaataaaagcaacatggtcagaagaaaaaaggcatcagaagtataaaagcatgataatcaagaagtttaaaaacaagacggagtatcct

SEQ ID NO: 209854 - DNA, 963 bp, Cannabis indica
tttgtgatgtggattgctgctgagttatcacaaaagagtatagatggcagctgtatttgtatgttgaaatccttaatgatagagtgtacgtagccatgtaagttcacaagtagcatttgacatgaccctatactttgcttcacctgaagagccagaaacagttggttatttcttgaatttccatgagatgagtgattgtttaaggaaaacgcaataccttaagataaatcttctagtgtcaagacaagctccctaatcagcactggcaaaggcctaaaattggggagctgaacatgatgcataaagaagagtcctagggagcttttgaggtatgtaagacccgagttgcagcatgtaagtgaggttgccttggagattggaggaattggctgagtttattactgtaaaactgatgtcaggtcttgtgatggtgagataaagtagtttccctattaagcttctgtattgagttgaattttgtaagagcgtgccatcatcattgttgagactggtttagagtcgaggcaacatgagtcttttagcagttggagtgtgaagggtctttgactgactaatattcctttggaacatctggctatctcgagaccaaggaagaaatgtagactgccaagatcctttagtttgaattgtgcatcaagggtagagatgaatttgttcaatgttgtaatatttttagtagcaactataatatcatcaacgtaaatgaggaagatgtggtggttctatacgtgttcttgctccatctcgccaaattaatggttattttccaagtattctcgtgttgatgcggtagttctatacgtgtgtggaaaaatgaggggctataaatatattttcttcttccttctctatggtctgttttttgtatttttttattctgattctcctataaatcatttgacaagctcattggcaaaaaaatttgagggtgtggttctttat

SEQ ID NO: 209855 - DNA, 1552 bp, Cannabis indica
cttctccaattgtaactcgaaattcttcaacttaagtgtggcaagaacatctgtccaacgcgataacatcactgccatacttgatggcttccttgacttcttgatatgaaattggaagtgatctcaacgggatgatggtctggctttcatcaaccttgtgattcatattagccaaacctacaataatctcattaaatctatcaatattctcatctaaagaaagggaagaaattattctaaaaccatataatttttctagcaaataatcttgctagcaattgatgttttcaagtataattcttccaatttattctaaactccttttgttgtcttctctgcaatgagtttccttcgaacattgtttgatagatacatgatgatcgtgtagtatttcatctcctccatttctattttttcctctcatatctttttgcaaacaattctcatctccaaggaccttggagtctttttggtgctctaagataccttttagactttctcttcatagcgcaaaatgcctagttctatcgaatttatccaatttgaatctcgccattgatgacattcaaagttcttcaagaattgtagcggaatgaatcttgattctgcgttcttgatcgattaccaagctaatttgtggaaaaattacgactaataatgtagaatcaaaaatgtcaaaactttaaacaatcaaacgattagcaatgacaatattatcaatcaaaaacaaaaatcggatgaaaacagtggcaaacagtggaatgaaaataatatagaaaataataaatgcaaaaattgaagaaattaataccaagatatatactggttcaagtgctatagatcaatgtgatctatggctctactctagttttagaacaccaccgaaaatccttctttattgattaagaatatgtacaatacagtcgtgacgagattcattgttgagtccttactaagtgtttcaactctcacacttacacccaagagtcttcttcatctacagaatatttttcttacaaaaccccaaacccaatctctcttttttctctgcacctctctctatctctctctaccactcaatcgtttctctctcaaactctcaatctcatctgaactgagttctaaatctcatctcttgaaataacaagtcaatgtggtagttataggcttaggatcaagatcctatagtcattggctgcaagaaacaagcctgttaagtttgttagaaataactaacttaaccaacttctctttgagcgaagtttccatgtcaccttgagtatcagagcctccaggaacatatacgagctttcagattcacggaccaaggatacttgctgatgatgcttctggataggattgtgcttgctggagtcgactatctggaactaccattccaagagggacaactagccaacaagaactccattccggaatgaggctagcattcctaaagattggacccagagtggatatgatggtcatttggggaacactcttccagactcgactatcattctacaagactctttctgggactggcttctatgag

SEQ ID NO: 209856 - DNA, 802 bp, Cannabis indica
cgatatcactcacattacgagaagaaaggtaccactctactcacatattactcctattttacttatatatatatttatattattaattaaaaaaaaaattactgtgttttttttattatattattatatttatatttattatattatatattattacataaaaaaaataaataaaataaaatgttatttcaaatttgtaacctacccgaccttcccccccagcccccaccttcttcctcctgaaacccagaaacccaacccagaaaccatcgaaacccaacccagaaaccatcgcccgaccaccccatcgcctcctcgccaccacccgaccgcaccccacgatcagccgacccaatcgccgccccacctccgtcctcaatcttcccaggcgaacccgaccaccgcaccccacagctgaacccgaacccctccctgtccgacgaaccccccgccccacctccgtcctccatttttccaggcgaaccgctccagaacctccgctccagaacctccgctccagagccacatttgctcggacccgaccctctttgacctccaccccacaaacagtccatctcccaccttctctaggcaaacccgaacccacctcaaaaaaaaaaaaaccattgtacctctgctcttgcttcgattctcctgcaaccgagccaccatcggagtgtgaatccccttttgcatttaaggtatctagtgattttttcatggctaaggttgtagtcttttgatgtttatatgagggtggtccaatgcttcaagtgtgttgttgttgttgttgctatgtggg

SEQ ID NO: 209857 - DNA, 949 bp, Cannabis indica
cattatttatttatgctatgaaaaagtaaactcttataattttcccatatattatgtaatttctacttatataaataatttttattaattgaataagttcaatactaattgggcctatataaaactatcaacatgattattttactttagcaacctagtcgatttaaatatctaaaagtaaatgggattcctatatgcatctaagcccaatagaaaacatataggctcacatagacaattgatttggatggccgtatcatgttactaggtttatcacatatgaaagaattataaaattacctgttacaaattatttatttgatctattgccaattagactataaataatagaatatttctattttaaaatagaatattttaaaaaaaataatcttaacttgaattcaaattaagttgtttaaaaatatttaaaatctaacaaaacggaaaatatcttaaatttaaaatttaaatatccaactaattactaaatattcagtttgattaaataatttcaattatttaaatatctaattagataatataacataatatcttaatttgaaaatttagatatttctactgtcatatttcaaatcttataatttagtaaattaaatttaaacaaaaataaataatttgaaaataggatattttgatggttaggatattatcaactttattaaaaaaaataaataaaatacaatattctaagtttgaaaattttatggttagaaaacataagatatctattcaaacaaaaattaacaacttttcaaaatttcatgttattttaacaaaaatataaattttaattaagataaatatctaataagataacatatcaaaactaacacttttcgaatcttataatttaaattaataaaacaaaaataacaaatttttgaaaatctaatatgtttaccaatttaaaattctaactagatta

SEQ ID NO: 209858 - DNA, 603 bp, Cannabis indica
tctgaaaatttagattctacacaaaattctactaaaatgtgaattttgtttcattgaaaaataatttttaaaactcaaaatatctcaaaatcaagtttggcacatgcatactgcatactccccgcgcgcgcacaaggggaaaatggcatataatgaggcttcatgcagccttcttgaggggcgattctcggtcaactggggattcaaacagccctagttcgagaaaactttgtcatgggcttgtctgaagctcggtcatgatcgagtgacacccgtagctgcgcgcgcacgtgcaccttcccttagatattttattttcaaactttaaaaaatcataactaatttaataaaaattcaaattaagttttgtaagcctaaattcattaatttttttatctactttccaaaaaaaatattttaagtaggaaactaaaaatattttatcgaaaaatcataatttacataccttcatcaaataagcatataagcatgaacacatccaaatcatcacaatcattgttttaaattcatattccatgaaagtaaatcattatcatggttctgataccagttgctgggtattattttattaggatctagatt

SEQ ID NO: 209859 - DNA, 621 bp, Cannabis indica
gactaattcttttttttaagataatgactagacttttcgattggagctctatggaggggtgtgttgttaacatataaagctaagtaaatattgacaaattaaattgcatataaatggcttgagatagttagtggtactaccgtagtgtagagagaagaatgtgggaagttaagtttaatcatatatatattcgattaattatttaaataggttaggagatttttcgttagttaaccatagataactaaaaacgtggctttggtaaaaccaaaaaccttaaccttattcaatttcattgattcaattattccacactaattaaatttggaactctaatctctcctgttactttcgagttatactcttaggttccatagttgaagcttcgtacgtcaacattcatctccactttccaagaatcttagtgaatatactcaatacttcccatctcttttcaagcctgaaaccaatgaatattttctctcatttataattttgaaattcaaatcagcattcttttcaattttttggaactcaccatccttgttctcttaaccgtaactatcacacaaagtcaagttcatcttcctttgaactattgaaccccatttagattttatt

SEQ ID NO: 209860 - DNA, 696 bp, Cannabis indica
atttgaactttacgttttgtaacacttaattacaaaaaccaaaattttggtggcaaaacctactgaactcccattctgttttgttctgtacctctccgtccaaaaatcacagttaagtctcacggtggagtgtccatgtgtacacacttgtacacgtggcaagtttttagtggtccacataacattaaatttaaaaaataattataaatatttaaaaaaaaatcaaaaaatcaaaaatattttttttttacatttttttctttttcctttctttttttttaaaaaaaaatatttaaaaattataaaaacaaataaattataaaaaaaaaattattttcttttacttttttcctttttctttttctttccttcttcttctttacagaccaaaaaaaaaaaaaaaaaaaacaaaaaaaaaaaaccctaagctgcctcccctctttcatcagccgcctcccccctccaccaacaaccgcctcccccctctctccccctctaagcccctcccctctcttctctctcgctctcagaccctctcctctctctctcgttctcgttctctctattaacctcctcctcggccaccattaagctagaacaacctcaacagattcgtattccgatggaagcatgttcgggacttgtcttcaagtttgggagaaaaaatggatatagtgaaagagagagagagagaga

SEQ ID NO: 209861 - DNA, 752 bp, Cannabis indica
cgtttttagttttttttttttagtgtacgtaagcctcacgcacagaggacagaagcaatcaaaatgtaatttgcaatgtaaataaaggaatttttaagaaaaatgtgaagttcgtttttaaatttttggtatgttgcaataagtgacctaagtaaatttttttttttggtatttgtaaaggtgtgtggattttgtggaataatagtatttggttatgtatgaaaaaaaaaattctagaatgaatgtttgtaagttgcaagtgtttcatatatgctaaaaataatgataataataaaatatcaataaaaaataaatgatacttgcaacaatataagtgtgggagaattggtaagtttaagttgaaaagaaaagaatgaaagattgaattattcaagggaataagtgaggaatacaaatgggaatacttggagaagaagatatatgcatattctatggtgtgatttgagcctaaaaataaccttcttacccaccttacaccttagccaagcattatgagcctataaagtcctattgatctttaaattatgtatgatttcattagtggagaatgagtttgataactaagcctatggaatggaatttcgttgaaatacatatgtatttagagttgagtattgatggttgcatgcatgagttgatttggatattagtaatgagatgatttaattaagcacacaaaaaaaaagaattgagcttgaaagttgttatcctatgttgaaattttaaagagt

SEQ ID NO: 209862 - DNA, 911 bp, Cannabis indica
ggtctgggaccaggtccgggactgggtctgaactcgagttttgcggcttggttattgttatcccaatttttgcactctgacatggcatcacatgattgtgacacgtggaatcaactttgagtatcttcttggagggtatagtccgaacaggatgcctcataggcatgcctggaacaaagcgatcagcaatccgggcagagcgatcaacacttagtgaattcagctttcgtagcgtgagtcatgaaagaaatccctataacttggggatcagatcatagagatatggctagctatattctgtaagagctataggaaaaggaacgtttctccttgttcttgagtcaatacaaataacgaggattaggctattaccgaactgctcggggccgaacctctctaaaattcttgtgtctttacattactttactatatatcaattgctacaaatcacttatcgcttactaaataagactcactgtcgttggttaaagcgaggtcaacattttgctgctttcattgagagatagaatcacgaatcgttcttcattcaaaatttaaccacaagtacgatggtggtacaaactcgtaggggcctggttgatcgagtcaatccatagacggtggatcctgcattgcagaacccaggaaacgccagggttctgccagatgttaatcctaaacagccggcaaacgtgggtcacggtgtaacgactcctgtagatgaaatcgcgcctagtgtgcaagagattgggaataacagttcagcagcaaaccagggcatttataacacagtcatttcgcctgttaccaacactcaaacgaccattagagatgacaccgagttacaaaacctccgtgcagctcttgggctcatcgagggtcatgcatataccatacatcatgatcaggaa

SEQ ID NO: 209863 - DNA, 529 bp, Cannabis indica
ctgtttgtagatcgaaaataaagtaatgaaactttaagccaatttttaactattatccattcacttttaggaaaaacttttcaaataaagttatagatctctctttcacctttctagaatatattgaatcgttcaattctgagttttatcgagagagttataagctgaatactatcgatcatcgctggaagaaattgaaaacgaaaaactgccaaaatcaacaaagttttgaaaaaaggaaatcacttgtaaggccacggccttgcaagcaaggccacgaccttgtaggttttgggaaaacttgaaattttgtattataaaaaaggggctgatggcaagctttgtacaccattcgaaattttagaaaattgtgagtgtagattgagggcaaggagcaaaaggcatcattggaggattggaggactctaaagagtgttctatcttctctatctctatcttttatgtttttaattggatttctattattttagaatatcttctagtatctaatttctttttaaggattatt

SEQ ID NO: 209864 - DNA, 655 bp, Cannabis indica
tatatatttttttaataaattcttaagtgagcattattattaattgacataattatacattagagcacaatagtaaattagttgatgtaaaaatatcacaaaactaatttttgtcccaaatataactcatttttaatatcttcaacattggagatgatcttatatattgagaccttgcctcgatattatttatttttttgaaataaacttctttcctatttttttttttgttttttttagacagtgattagaatcactcatgaatttaagacgcagatatctgcaatcagcgcagtacccttcttgaactaggatagctcatcttctaatcaaaaagcatgctttgtcaaaccatgggctgctaaatactcaacacgaatcacatgggacaaaattgctcgtaaaaatttagacaataaagttataacgtcttcaaacaacacacctagcacattgaaaaaacacatgcccattattaataggtgtcgtcatagctagcgaaactgaaaaaaaataaaacattgcaacgccaaaccaaaaaataaaataatattagaatgtcaatattcaaaataaaaattaatatacaaacttagagtttaacacacaactcatactagctcaacattaccaaaaaaaaacaaaaaacttaaaa

SEQ ID NO: 209865 - DNA, 612 bp, Cannabis indica
ttatttgaattagttataattttatgaagttttgaaaaaacataggggtggtgtcaccccatacgcgcgcggatccaagtgatcactcggtcacgcgcgcttcagacacgaggttgtccgagttttctcagtctgaagcctcgattttgtctgaaccctggggctccgggcgcggacgaggctgctggcagcctctctggccatgctcccaccctgtgcgcgcggatggtaccatccgcatcaaatgcaattttttcaattttcttcattttttcatgctttttcatggaattaatttcgaattttttgtgtgaatttgtatttagatttttagttctcatatttcaaatctaattatcagaattaaattaattagtattttttaaattaatttaagatattagtgaaatttgaattttaaaataggtaaaaatctatctttttgcttaattaattatcttattttttaaattttgattaatttatcttatttttaaatttaaggttagatatttaatgttttaattttttttaataaaattaccttatttgaaatttaaaataagattaatcaaagaattttaaattaaaataacatattttgctaacttt

SEQ ID NO: 209866 - DNA, 940 bp, Cannabis indica
gatatctcactatcatcatcgttgtctaataagagaaccttgacacatatcactgatatctgaatgttactgtcattgtcaaaccagacaacccagatacgtagccactagtatccctgataagagaaacctaacaatagtttcagtttatagtcatgatatttgatacctaatctttcagtatccaaatatcatttcctaaaaagacaaccttatcatcaatgcctaataagaaaacctttttatcattgcctaataagacaaccttttcatcattgcctaataagataaccttttcatcacataactgtaataattgtatcttaatcttgataacaatcgattcacaaatgataataatcgtatcttaacatgacatgttatatagtacaaatattattttcttacctttaatccagattcatgcatgccggccaacccaagtggagaaatgccccaaaatcctgaccctatgtcacaacaatggtaaatcgataagtgtctattccaaaacactacgtaatacccgcataaaaaaaatctaaagttttctaccaaacgtcttggtgaaaataacctaaaataaaatatatattttggctttaatttatgtatcatactttagagctctccccaagtttcaaaacagcatatagaacatctaaaacagacaaccgagtggaaagttatggccaaaatacaaaaattagcttttcccaactactgccaaacgaaatttcggtttgggtggccttgtaccatccataattttaattcacaacagtagggcctcaaaaaactcaagttttctaagtcctaaaacttggtccaatcaatctcaaatgctaccaaacttcacaaaacaattacttaacatcaaaatacattctccaattaacagaaatcaaaatacgaatcacaaatcaaaacttacacaatt

SEQ ID NO: 209867 - DNA, 942 bp, Cannabis indica
ggaaagaattattaatacttctttgataacttataacatgcgtataacaaaatttgtcatcatatcataaattaagtctttttaataaaacattaaatataactttagttacattgtagttactataaggttaaaagttcgtaattaatgtcaaacaaagaaaacaccaaattgaatttagtggtgtaataactaaagtacctcttaagtaaatacttatttattacacaatgtaattaatatctatcaattgatttttgcttctacatgaatctataaataaccattttgctaatccaacttttcttcaaagtctcatatagattaattaaatatgagtgattccatgatgataagtgcccaacaacatgagaatgagtcatatagctatgaagatcaaaacaaggaaaaagagtcatttgtttcccaactccctaaaccaaaggatggttaggatctaatagtactctttgcttgtaccaaaacttttggtgtccaccaacaattgttcccaacataatttcattccaaaatcacttccaagctcttgatgaagacataattatagcctcaaagccaaaatcaggcaccacttggttgaaagcccttttgttctcaatcgtcaatagagccaacaccacactctccaacacccctttgcttagttctaaccctcatgagcttgtacccttttttgagtttaatttgtatacaagaaaccaaaaaaatccccctctaataaaaaatatttcatctccaagactattctccactcacataccttacgactctttaccaaaatctattacaaaatcgcagtgtcgaattatctatatctgtcgaaaccctcttgataccatcatttctcattggcattttgcaaatcaagctgatgatagtgatcatctcgaccattgttcttcaaagtggactttagaggag

SEQ ID NO: 209868 - DNA, 508 bp, Cannabis indica
gttatttcagcattcaaccaaaatttgatatgttgatttgtatggtcaaatttggattgaaaaatatactttgtatgttgatgccaaggggaagatttcaccaatgggtagatattaggatgtaaacttgaatatttttaatattactctaatatagttacaatgaaataaatgtcagcctgttacgttgttgtctttacatttttgccatggcaaggcaacattttaggtgtttgcgtatcattatgattcttataactcctaaagacatctttaagttccccgtgtaaaatgagctgtatatttctgtcaactattagtattacagtgcgtctttcaattttcatgtggtttagccctatcacttgatttgcaatccatatggaagtggactacactactcacatgttatgtgtgaaacttttttgctttacatactatagttacacatatatatgttgtaggtttcggaaagctatgaacgagcttataccaatatggtccgtgt

SEQ ID NO: 209869 - DNA, 429 bp, Cannabis indica
cgtgtcaataaggtatttgtttttttttcctccaaaggttactcgggtcttttactttcgtatgaatatgtagaaaattatgcaacattagtaaatttgtatgtattttttatggctataatagattgtgtgatttgtattgttttaggcatcacaagataaaaagagcttggatgttggagctaatctcttcattggaaaccttgatcctgtaagttaattagacactatcagaaaaaatggattatatatcatcattggtattctcgttttttaacagtatttttaatttttttttcttggtcaggatgtggatgagaaacttctttatgtatactttagtgcttttggagtcattgtcacaaatccaaaggtactgcatttgtcttttgttcatagtggtagttcttttccttttttttttttttt

SEQ ID NO: 209870 - DNA, 654 bp, Cannabis indica
gttattagaaattagaatcaagttaagcttaggtatcaagatcacttgaatcttttacctttggttatcatttgttacatagagtagttatttcaaatttcaatacataatagtagtctcttttacacaagattattagtacatttgactttactagaaaggaaaagacctagctatatgtacacgttaattgcatggctaattttgtaggttgatgaagaacaaactttgtctagtgggagtttaagtcaaaatatttgtttatttatatttgcaaagttgtaatttttttttaaataattattaattgtgtgaaaagaaaagttttgatggccaagttttgaaaaaatttcttgggaaaactttgaaatgtcttggtgcccaagtttattttttctatatatatatatgtgtgtgtgtgtgtttgtgtgtgtggagagaaatagtgagctataaaaagagaagtgagtgtgagtttgttatgtggtgagagcgaagaagaaataaatggtgtattgaaatttgggtggagagattgagatagtataagtgtgtaattttgaagtgataagtgaaatatatctctctttgtggatttggtaattttacataaccaagctaaatttctttgctttgtttatttgttattctgtt

SEQ ID NO: 209871 - DNA, 675 bp, Cannabis indica
aaaactcattaaaaaagtgttacacaactacgtactgtatatatataacaaacccctcactcttcgacttactaaagtaacttaaaagaaaccatagtaaattttgaaagaatcacttttcaccatattgtgttccacccaattattttagtttttttttttttttagaaaaaaaaaaaggggaaaagaacgaagacacaaacacaagacacatattatatataagacctctcaaagcatcttgtgaaaaagtacactacttgtggccaaagtaaggtagaaaagtaacactctcaagcccttttctttttttaaccatttggcattgagattgagaatcattataaactaatgtgaaaattaattaaaatacaattaaaatttttgttttatcaataaagatataaaaatatactcatttggtacttttcatttttaatggatgtttgtttagttatctgtattttgaaattgtacacattttatactctacgtacttttaatcaaatttcaaatttgatccaattactcttactaattaaattttaatttaaatttaaaattcaaagacaattatttcaaaatagacaatatcaaatatatattattgaaaacataaaatgcccataaaaacatatttgtttatgaaaggtatcatgttcataacttaaattt

SEQ ID NO: 209872 - DNA, 440 bp, Cannabis indica
tttagttgttatattgaatcttatttaattaactacatacattaaggtaaagagtgtataatggttatttcatagttttttttgttttttggtaagtatggtaatttcatgattggcaccagggtcggctataaacttgtgcatcctgatctattacacagggcccatttaaataaggacctaatttcttgccttctttttaggttggcttttttgtttttttgttttttttttatgaaatgaaacattaaatgaaataaaacagtatgaaaaaaaaaaacaattattactttcaacttttcaagtattgttctaaatcccacatttaatagtaatttataactattttatcaaaccttttttattctattcatttttttttttaaattgcatattctattcattccaaggattttttttttttatcttctatataattc

SEQ ID NO: 209873 - DNA, 1590 bp, Cannabis indica
gcggagcaagttgacgctgacgctgatgtcctggttgctaggtgggtaagcccttcgtccaaggtcactgagccacaaaccctgagagggggagtgtgtgcctggtcgggtgctcatgcaaagcaaggggcattgttgcctttgcacccatactttaggaaggtggcagacttcttccgcctctgtccgacccaattcactcccaagggcatcaagtatttgtctgccctgttcattctttacgcctcccagaagtgggacatgccctctccccatgaggttagctggtccttttgacttaaagtctacccccaagcatggcaggtcggggtatatttctctcagccagactacaagtagttaacgggcccggccatgaggccatcaacaaaattgggcattttgttgatgagtatttcatggtggaagacatgggcaccacctacaatcggttccaacagatccttgtatatcaccgcccacccttcacacttgctcttaaggatagagctcaaaggcttgctcagctgccgggtgctgcccagaatatcactttgttgacctccgaggacaactttgtggagtacgggctctacccaaaggatttcatccctcagcctatgaaggagagaaagaggaaatatggtgcttgccgggctgagggagcttatcaggagaatgaacccattcaacttaagcgtgaggctaagttgaagggaggtgcggtgacaaaacagtatgctcatgagcctctggatcctgaagatgaggctgaggaagagtaggtgactccgctaaaaaggaggaagaaacttcctgccgagcacaagcctgttgaacatgcaattcgaatccaggagcccagtctacctgctcggccatccactcctgtactactaaaggggaaattcgtcctggcggagataagagacttgtcaggtgatgagccttcaagtcttccccgggcaaatgcttcgcaaaatactccgtcttattttcaatcttcttgattattatgatttcatacttctagtgcttttctcttaaccatgttgcccttatttcgtatagacatgtctcagaagatgctcaaagctctgaagaagagagtggggggaagctcaagctcatctcctccggccaagaagtctagcggcggtgaggcaacgccacctagagaaaaggcgctggttgaagttgttatcgatctattcgaggagctaaccgtggtggacccttctgctccaaaaactactaagtccaaggtctctcaaggaggaagttcgggcaagcccgaacagtcgaagggcggatctgagcagatccgggctcctaccccacctccatcactgcctccggagaccaaaagaggcaaggagatgcccacccattacatgaataggtcggcccctgaagttaatgagcagctggccggagctgacaacgagccttccctggagttgttgatggtagtagtcctgaagaagtttatgagggtgagtctttcccgacagtttcctttaatcctcctttacttggctcacattctaacgtttttttatgcaaactggtctaaagttggcttacact

SEQ ID NO: 209874 - DNA, 1189 bp, Cannabis indica
taaaattatattaaatatttatactttttaaattaattaatatataaaactatttaattaattaaaatatgaaatcatttaattaagaatagaaaaagtaaatattttttcatagtaaatatttatagtcacaaacattacaatatcattaaatactgcttacttaaatatataatgagtcttcgtaaaatgtcaataaacataaaattgatagttcgtaaaactaaaataaaatttttaaaagaagtttgtagtagcatcgtcatcattactagcatctctagtaacatctggcatctgtgggtaatatggcggcatttgcgaactcgtcatcatctgagatgtctactgcccatgtggtgctggcatcatgagagatgtctgatgtccttgttgtgtcgacatcatctgagatgtctgctgttgtggttgtgtcgacatcatttgcgatgtctgctgcctttgttgtgtcggcatcgtctgcgatgtctgctgatattgttgccctcgtgtcgacatcatttgaacattttgcggtatctgtgacatatgttgtgtcggcatcatttgtggcatccgagactgtgacacatgagacgtctgaggcgattgcatcatcatattcatcattacttgcgaatattttggcgactgtgccaaaaactacaagaatgactagtcatttgactgtgaaactgttcaggggttaatgatgcagacaaaggaacaggaggttgctgtagcagttgctgaaacgaaataggagtctgctgcgactgctgatgatgaaaacccattgactgaagatggaccaaattatctcgaggcatttgagagtgagacggttgtggacgcattagttggattagagctgcatcattcatctcaacatccattgattcccgatgttcacgtgacaattgttgagtcaacatctgtatttgtctctgcatctcattaactattttccgtcagttaagtttatcagcagttggaggttgtgagcgtcatcttgatgattgccctttcaatttttgacccactcctcgctgatggccacacctctcttcaagagtctgccgaagtatcttaagctcaaaaacttgtgaagattcaggttatcaccatctattactataataagaataagttagaaaccagccaaacttacaattatttgaacatattt

SEQ ID NO: 209875 - DNA, 521 bp, Cannabis indica
tatatatagaagaaaaatagaagaagaatatgcataaaatatattatctaacaaatatgtataacaagagaagaatatatgtatactctcactcacaaccttgagtgtagattagtgaggatcaccatgacttgaacaaggtataatcacatttttctaaaagtttatttccccctatccctaagcactaagggaactctaaaagaaatagctttagaaattatcaagccttaggattttctagtaaagtattttttttttttagatagaaaattaggtcatctcaatatatgagcaccttagacttctttgtttagtgtttaggatatcaccatttgaaattctaactcataacctcccatggaggttaaggactcaataaatgagtataaagctcattctcctaaaactataactcatatagcttttaagagtttcaaattatgatgtgtaacaccttttacactcttaatattagtgatgattgcctagcttggtgagaagcttggagagaaggaagg

SEQ ID NO: 209876 - DNA, 520 bp, Cannabis indica
ccaaggtgacaagaacaataaattagatcatcaaaagtctcaagcaccgaagaaaggaaggcccttctgtactcattgtaacatccatggtcatactatagaaagatgttacaagattcatggatatcctccagggtacaataaaaataaatcaaaagatgcagtggcaaaccagatccaatctaatgaagaaaccagtgtcaagaataaggattcccacactcttttgcctcaactaagtgccatccaatatcagcaactcctcaatttgcttgctaatcaacacaacaaaatgcccgtgacagatccaaacacttccacagacaattctggtataatccttacttacacttcatctgaattttttgatacttcttggattgttgactctggtgctactaggcatatatgcaacaacattaaactttttcaaagtatctgtagtgtgcctgccactaggctcattctacctaataatgaatcattattagtaaaacgaagtggtactgttcttatctca

SEQ ID NO: 209877 - DNA, 1531 bp, Cannabis indica
cccagagataagattcattatatataactcaaaaatacaaagtattgacttatgcataaataaactctctcttattgtataccacaagcttgatgtatttcaccttctaactgaatcttgctgaaacttcaaatggtcgaactcccttcgatctccttgaagagtgcttgcttcctcccaaggcaagacttgaaaagctatctcccgaaagcttgtagaaccttcttccaaaggtagcactattgttcttcatcttttgtagacttgattacagactcgagatagtataaaatacataaacacagaggaagagacaaacaccccctcctcatttcacttttaatagttatagaagctatagattctatatctatgattagcgcttccactcaattgtactaccatgttctcaagatgtaagtattggaccgatccaattggtcagctttaacgaacaagtcaaagaacacaaataatacatttaagccaaaacctaactatctcaggattaagatctattgacctaagatcaactaagtgatattaacttagaaagatataacagaaagtttatgatatattttccactgtcaatatcagttcggtccgatgtatacccaatacatccaatactaatatactttgctaataccctggaaaggacattccacatattattgtgtaagtaaactttattgctaattatcacgtcagtataaatccaatgcactgataaatcatgggactaaagtctttaaaatatataatcatgattattttccactgtgtaggcaatactataatcatgaataactatatgttcatgatttaatataatttatatattaaacatataatcatgaaagaaatcatatgaaccatataacataaattaatttctaattagtaaacctgattatattgaaatgagttttatttaaggcatagaatcccaacaaactctcatttgcactaatataaaactaaaagtgtatttcaattaatctcttgatgtccaaataaaatgtagtatgtaatattatctttataatagtatctgacaagttgtattcaatatcaacctttcccatcattacacctccttagtcacaaaatccttaatattgtaaaattccttttgatatgtttactcctcttagggtattgtattctttactatttagaaactatatctatgttatcaggaagtaacattagtagttaatctatgactggaataattccaaaattaaactatatagaactttccataggttgaataattatcaagtagccttctgggccactttaacattcagtctcattggtagaataaaagacttttgataggtttttagacttctacaaaaatcactgctccagagtaatcaccatcctaggtttagactttctagcattaatgcaaatctaaaaatctgagtcagtacagcctaaagagtttcgaaaacatcacccttatagactaacatatagatctttcttaatcttaagatttatttaattgtcttcc

SEQ ID NO: 209878 - DNA, 1338 bp, Cannabis indica
agtgatgttaatacaagcttgcgattggttaacaatattaatatgttctctctcttaatggagcatttatctttttcaaatataattttgttacgataatactcttttggtattttgtattttgaaattgttcatatttaatattttaaaataaaatttattaatttaactaaaactcgtataacaaaaaactttttgattgtataaatataatttaattaaatatgagtttagagtattaaatatgtataaatataaaatatcatataaggattattgaaaatgcaagttaccacaatattattttatcatactctcattttggaagggatgcaccattgatttcttaccacgttttttttaccaataatcttaaagaaatgatttcgcttacgctgagaggctgagaggatgttattgtgaggctcaattagatctagcacgagatagtgatgcgttggtaataatttagggttgaagagatcactcaaatctgacgagtgacgaagagatagaattagttttagggttggagatgggatgtggtactctgtcggtgaacatcctaattcccataggtgggagtttgtccatgagatgaagtgggtgcataggttttgtcaggcttggcgaagtcggttgtgccctctttctctcaagtgcgagcaagggagacgatggaggtgtgtcacttacctttgactctgcatggtgttgggttgggttttcctttgtgtggctagggaccaagtggtggagattctaatgggttccaatgtgtgtgtgttttacttttttgtattgactttgtttggttagccttttgtggaacttatttatattttgtaccctgttcttgggacttttgtttgatctatacttagctttgaatccagaggccatcgagtcttggaattggagcattgtaacttaagatagctcaaaggggagcttcagattgttgttaggacatttttcataggtcatattactctttaagtataattggtgtgatttgctatttatttggtttgtcatctatctgtgagatttatgtggcattatttctgcttgaccataaaactttgtcccatcaaagaatctcttttttttttcttttttttttccaaaagtaagatgatctcttaataatgtgtacgcatactaattattgttagggcaccaactcaaatctcatattggaagaataagtaagagttgtctttaatattagtgttccacctacttcattagtacgaaaaattttgaaaatgtgcccaaaaactaaaatacgtgaggacttagtcataaatcaaataatattatactaatgtggga

SEQ ID NO: 209879 - DNA, 706 bp, Cannabis indica
ataagaacatagattctggatgaggtcataatgaaatctaagggggatataaatagtggcgtgtgcaccctgcacttgggtctgtacacgcagtagtaaatggttttatttggtcatacactcttgtgtatttgttttatttttttaagcaaattgtgtgtatctggtttttttaaaagagctttttgagactcaatcatgctctttagtcctaccaagttaaattctaccactactcgattcatttctttgactttccccctaaactaaagaacagcaacactacaaaaataaaaattaaaaaaaaaagggtccttgagtgtccattgaatttttttcccactgctgcatgtatgtaatatatatagatataataattatataatttgtcttgaattctatcatttttattacgttatatgcatatcaaatctaatgaatttggattcaaccgattcaatctaattatttattggatattaaattttggcatccgatccaattcaattgaattaggtcatccgatccgatccgatctgatccaattcaatagatgtattgaatttgatcggttccaaccattgaatgcatttactaattttttattaaattagattggatccatccaatccattttaactaccatttaagttgattttattaaatatatatataagataacttaaaacctaataatttaacatac

SEQ ID NO: 209880 - DNA, 592 bp, Cannabis indica
cctttttttaaaagaaaaaatattcaaccaaggacagctcataaaaaataataacaaaaccacacaagcacaacaaggtaactaataactaataaataaatggaaaaaaccccatatattttacgtaattagcaaattgcccaaattaattattttttttactaaccaaaccaatgcttcagagtaaaaagttaaatccaaatatggcattgttcaatcaagttttgatctttacatatatagatgatgaatgagtaagtgggccacattcccaatttacgattttttttttttttttgttttagctttgcttccatgcaaggatttctacaccttaccaatatagaataaaaacctttgagagagaattaactcatttgttcagtaaaaatgaaaactttgagagaaaaatagagtattattagtccaagaaatccatatactgactttgtagtcggttttttctttttatgtgtctattaaaattcattacattgtgaaaacaaggggcactataaccatttctcttcagttatagagacctgttggttgaagattccaagtactgagttagtgagtgagagagaatcaa

SEQ ID NO: 209881 - DNA, 732 bp, Cannabis indica
atgtgttaggtgccaaagcaagttgtactgagtttaaaatccttgtagcgggacagcgtgaacttgttattccctctttaatttcataggcttgttctttgtaaaaaaaaatatatatttcatgcttggctttatgcattgggcttgtccaatccaattgtcttatcccgtgcatacctatgaaagggagtcttattatatcatattacatatgttaaaacttatcctttttagaattaatgacatagtatgttcactttcaagattatcaaacattcatgtatgcttcttttgaagtatttccacttaaaaggatatcatattgacatatattccacctcactaggtggttcactttttctgtttgatcggaatgttttaagatactttagaaaggatggacataactggaggaagaaaaaagatggaaagaccgtgaaagaggctcatgaaaaattaaggtaaggttctttaaattgtattgttgattattttaattgccttactaagggtttatgttttttcgaaaagaaactgaccagcataggatctttattagctatttgggcctagttagttgagtcctgggagtaccaattccaaagaaagtcaaaacaatttttaactgatttttttacttatttattcaagttatataaccaatctagatacaaatctgagattaaagctggattactcaactaaaagaaaactgaaattcattttgtaatc

SEQ ID NO: 209882 - DNA, 579 bp, Cannabis indica
aagggtgttcattgatctcaataaatgtcccctgttgaccttggtggttgacagggatttcgatcggaggcctaatcggcgtgtctcctactaactctctcgttttaagaggggttggtgaaggtgaagttgttgtccccctcctgccatttgttgccttcctacctctccgaggttgagaagtcggtgttgcctcagtttcctccgcagagataaccatcactgaggcgacagtgggcaagaaaataagaatggaaccaatcaagatatgctcatggccccattccttttggatcattacgggggagccaatcttctgtggcctcccttctgtcttgacaactattgccgcggacttttttattgcccgggtttgcctctttttgaagccctttgctgccttgcctctcaaggcctgcgtagtcttaggggtactcttcacacttttccctcttccagtctttctaactggtatagatgtcttcacattctccacaggttcgagtaccttgcatgaaatgggtgcttcatcgatagagaatgttgccaagaagtggttatttttccctccttgggcag

SEQ ID NO: 209883 - DNA, 957 bp, Cannabis indica
caagtctagatatataacacctccggccctgtgttgctagttggtctcatgtttcagttccttgtcgtttacaatagttttcaactttccaaatatcatgtgttatgtaattgatagttactgaaactattatgtttggctgaaataaatgaaaggtagattagtgattgacagtgacattgttgatcactgaactcaaatagtcaaaaaaaaaattcaatctcagatcttattctcaagcaaagaagatcccaacttctaagtcttcagatgttgtgtctgataagttaaaggacgagaagttgaaccaatatgaggaatcacttagaacagtcgtgtattttagctgttggggttccaacaattgaggccccttttttgtgcaatatattatctcaatttttagtgcaatacatacatggatgaaatcacttgatttcctttcaaagattgagcataattccatttagaagtttactaatcatgacttgaaaaccggttttgggactgtggcttacctagatctatgcacattattaaggggtcaagcagatacctccgggcagagctttctgatagaatgaaacacatctttaatccatgactttggactcctcattgccataactaattggatttctgcttagggggagaattatctcaattcaagcagtatgctcaatttggtgtttggtactgcattttgtgatgtggttatttgagcattttctcaccaactttgtgttggaacaactatatatgaaaatgtcagcttagatttgtgacatggttgagtcatagtagggatttgttattcatcattcaaaatgttacaggttggcgaggctttaccactagccgatgcttctgctgatgccgttgttggaacacttgtattatgctctgttggtgatgttaacttgaccttaaaaggtaataaagcttgtagcacagagt

SEQ ID NO: 209884 - DNA, 505 bp, Cannabis indica
ataaacaaatagaagctattctaaaagcgcttcctaagaagatcttaaggataaaagaattcaacaagatgttataataattttgtttaccttgaagaaggagaatatgatattggccattttgtggatcctgtcacttatagtgaagcacttaatagtccacaatctttaaaatagataaaaaaactatatatctggagttagttatattatctgatggttttaaaccaataagttgcagtagattttaagaactaaaaaatataataagggacaaattattaaaaggtataaagtacgcttaggggcaaaggctttacgcaaagagaaggtattgattataccataactttctcgtttgtttccactaaagattcattctgaattattatgactttagttgcgcactttgatttagagttgcataaaatagatgtaaaaaactactattctgaatgaaaattgagagagcaagtttacttgtctcaaccttaaggctttaagg

SEQ ID NO: 209885 - DNA, 580 bp, Cannabis indica
acatggtctccatgcaagatataacgaaactgtcaagctgcaattgaaaggagtaaattgagccatcaaggggctatcccaacatccttggctggccaagagaaggttataggttggccaggatctgggcagaagctggccggctaaaaaagtgacttccggaccaagagagctttcgttcgaccaaggaaacctggcctctaaaaggaaaccgtgtacaaagctatcctcaacttacaaaaggttggcctcctcttggtaaagccataataccttcaggatcctagcaagcacatgatgtgccaggtcttggcaggaccatggctggctaggattgacaccatggccagccagacctcccctgtaggtctatgggtggccaggattaaccaagcatgactctatgtacagcccaaaatgtgtacaataagctacctacaaattgggcccgttacagcccaacaaactgatggaaaatatctacttttgaggggcagtttagtattttgtatttaatcaatttaatatgtatatgtatgggttttgtcgtaaattaagattttaggcttcctatataaag

SEQ ID NO: 209886 - DNA, 978 bp, Cannabis indica
tggtagagcttgtcacaagctttaaaatagtatacataacgtccaaaacggatttccaagtgaaaaattatggccaaaatacaaaaactaatttcctcggtaaagtcccattctagaagctcctccgatcatggaagcttctccggtcattaaagctctttgatcatggaagctccttcgatcatggaggctacttcgatcatggaagcttctccgatcatggaagctctccgatcatgaaagctccttcgatcatggaagctcctccaatcatgtaagctcctcgattatggaagctcctctgatcatggaacctcctccgatcatggaagcttctctgatcatggaagctcctctgatcatggaagctctcccatcgcggaagctctcccatctcggaagctctcccatctcgaaagctctcccatcatggaagcttttccatcccagaagctctcccatcccgaaagctttttcctacgcagcaagggctcacaaatttctaacttttaggcccccaaaactagctcccacctaaccaaaagctaccaaaattttcaaaatagcaatttggggtaatctaaacataacacataactcaaaagcatctaaaacaacatgcaatgaaattcaccatggatgagcaaaacttgagttctcaaaatccaaagttcctcaaatccgctacagctgctattacttccaaaaacaagctataaacactaaaatcaagctttaaaatagtctctaacacaattcaaccttaaataaaactaaacccccgaattccaaaaaatcacaaagagaaccaagcttaaaacttaaaaaacaacaggaataaagtatatagggcttacctttgctcttggcttaaggttctcatcaatccttgctaaaaatggctagaaaatggaagtctaaccttggtttttctttggttcttctagggacgaaggtgaaggagagagagagagagag

SEQ ID NO: 209887 - DNA, 700 bp, Cannabis indica
atgtaacttacttcgtttttgatacttaaatgtgtgttttttttttcaaaagaaaatctatttcacacaaatcttttttttttttattatatataattgaattttcaaatatctttaacagtataatagcatgtggacctagaacattatattgaaggaaatatcataaaattggcattgatggtttgcttcgcaaggatgttaatttaaatgtgtccacacgtacataattgaatatttatgtcatgtttcttttttcccttctttttttttaactttttattgttgcttccaattaataatgcatttagcctatcacatgtgtaggccaactcccatgcagaaaagtacctgtttcatcatatcaaattcaaagaaataattttaccttttaatactataaaggaaaaagttatattacacctcgagggattttttctataataagtattttttttttctataataggaaaaagccctttcgggaaaattttaaaatttttaactgtttcaacccacaaaaaactttctattttactttatttttcctttttattgttgcttccaattataatgcatttagcctctcacatgtgtgggtcaactaatatgcagaaaagtacgcgtttcatcatatcaaattcaagagagagtgtggctactactttcttcttatatattaatatccctattaatttag

SEQ ID NO: 209888 - DNA, 569 bp, Cannabis indica
ctgtgcaatctctaataatgactccagattagtgttttgctcattttattatcatcttattttcctttgatttaacaagagttttatgaaatatgatttaagattttttatatcaaaatacttttggaaatatgttattatttgatatttttagggggcgtttggtacgaggtgttcaaaataatttgattatagggaatattatgaaagagaatatgattataggaaaatgtataaactgtgtttgactgtggagggtaatatgtaatgatattcttattaattaaattacactgtttggttaagtacatggatcttatatattattttaaaaattaaaataaatatattttttattatatctatttaatgttaattatatataaaaataaaataattatttattaaaaaatatatttattaattagtaaatattaaattttattgtattttttattaattaaaatgaatatttttatatattttatcactatgttatttatttttgttcgcaatgtcatttatgtacattatccgcataaaatgtatgtataatgaatatatatata

SEQ ID NO: 209889 - DNA, 589 bp, Cannabis indica
gagatctgagcggaaggagttgttatattccactacgatcgacctatgtaagattttcttaaactcttatgtgtttaatttcattgttttagagatattcatatttaggatgttaattcaacatacttgttaatctagatcctagtaaaatatttccaacatgccctggaaagggcgtagcccttatccaaggggcaagtaaactacattgtagattatcctatcatttaaactttgtgtattaataaatcataacaatacatttaatcacacaagcttgattacttttcactgtgttgacaacacaataaataagaatatcaatgtgataaagatttggatgaatttctaattcaaataactaactaaatgatcacatgaaccaattaacacattaaataagtaataaaactaaatatcttttttattgataaatgaatagaaaagattacaaaaatagagttttatttagggcaaaaagcccaacaaggggttccctcaagtgcgcctatatgggttgtaaaaggacttggaatgagttgtatccccgtacgaggtcacatgggggctccatccgtacctgttagac

SEQ ID NO: 209890 - DNA, 800 bp, Cannabis indica
tttttttgagattttctttctttttattgttcaaatttatttattttaggatttttttttttacattttaaagtagtttttttggtcatttttttctaaaaatttacaatagcaatctaaatcgcaacctaaatccatacaacaacccacatatatatatatatataaattatcatagcaactcaaaccgtaaaaagttaaaaaaataggtatataagatgattcccctctatattattaatgaaatgggtgctttagcaccctttacatacaaaaaaaataaaaaaaaaaaaaccttaaaaaattaatttaaaaaaataataataaaaattagttagatagtttcttgattattacatttctcgtaattattattagttttttttttttgaaatgaaaataaacacaacaaggattattttataattttttcttaattatatttctatttttttatactttaaaactcattaattattaataaatattataatttaaactaataacaaagctgtgaagaaatgtattcataaattttaactacaaaaacagcatatccactaataaatctaataatttaaatatttatatcacaaatatttaatttatgtatttataatttcaaaagatttaaattataacattgttaaaacaaataaataaactatctctaaaataaacaaaattattaaataaacaatgtggtaccttatttacttaccactataccactttgtttgaagactgttatgagtataaattttagtgaaagattcttcaaatgcaatgtcatcttcact

SEQ ID NO: 209891 - DNA, 1217 bp, Cannabis indica
attaaacgaatggtggagttgttgatcttatcacggatgaaatgacaatccaattcgatatgtttggtgcgttcatggaaggtgggattgttggcaatgtgaatagccgagtgattatcacagtaaatgaatgcaggggcatgttgtggaacttgaaagtcttggaggagatattgcaaccaagtaagttcactggtggtggctgcaagagcccgatactctgcttcagctaaacttttagaaatggtgggctgtttctttgttttccaagagaccaagcaatcgcctaagaagatacaaaagcctgttgtagatcgtcgagtaacgggacaagaagcccaatctgagtctgaaaaccctctgagatgaagagaagaattgctggggtataatagcccctgcccagggctgccttttaagtacctgaggagatgagaaatggcttgcaagtgtgtagttcgaggggctgacatgaattggctcaaggtgttaaccgcatacgtaatgtcaggtctggataaggtaaggtagagcaattttccaattagttgtcgataggcagatgggtttgtcaagggctctccttgttgatcatcaagtttattcctaggatccataggtgtttttgctggtttgcaccctatatatccattgtcttcgagtagttgcaaagtgtattgtctttgtgagaggaaaaggccatgtgaagcacgagcaatctcgaagccaagaaaatacttgagctgtccgagggctttgagtttaaattgctgatgtagggtagcttgaagctgatgtaactcggcaatgttaggtccagtgatgacaatgtcatccacatagacaagcaaagcaataaacttgtcatcctttccacgagtgaagagtgtatagtcggcctttgattgcaggaatccttcttgtaataaggctgctgtgagtttcttgtaccactgtcgtgatgattggcgaagcccgtagatcgatttatggagcttacaaaccagattggtacctgtagaatcacaatcagcaagtgttaatccaggtggcaaagccatatatacttcttcattgagatccccgtttaagaaagcgttatttatatcaatttgtaaggtatgccattgtttaattgtagatatagcaagcaacaatttaaaagtaaccattttggctacgggggaaaatgtgtcaaagaaatcaaggccttcttg

SEQ ID NO: 209892 - DNA, 640 bp, Cannabis indica
taatatccactaaaatcccgacaacatgtgatcctaaatatatcatagggattaattagttctaaatcccagcttgcatctatatgacttgccctatctgccatggtaccgtactcctcggctataccgtagtacgactcagtacaattaatttagacgtggaacttgggataccaactatcaaacctatgtgtaatgtgatctatgaggaggggttccaggggtaaaagttatagcggctatctcaaaataaaactagagtattacgctcaaccctaagcactgtgggtgaccaaccacattgattacctcaggatgctccttctttgtcttctcgaggggtagtattttggaggtattgtgcctgagccacacaatcttgagctttctcctcatctgggataggaacctgctgtcaagaagaatacttgggatatttataatcacaagtaaactccttgtcagttaggagatccacagaccttaggttgaccacgtttagaagaaagtcacatgatctaagaccgtatgggagagtcaacaagagcttgtgccgctcggccatctcaggagtaatcagaggtctttttgagacaattgtctaaaatataacaaatatacaattagctaaactcgaata

SEQ ID NO: 209893 - DNA, 574 bp, Cannabis indica
tcaattaatggcaggatccccataattatttttcactcaagtgaatgcatgatctaattgaaagaagaaaataaaagctctgaaaatataagatattaaaaatggaataatcagtcgcaatatagcaaaaagagtgtattcatgatttactaattaatgaagggtgtaatcatttacaagtatatatttgtgaacatttttttatagtacactgtcaaaattttagatgtaataatttttcatctaattgttgatgatgttgagaatggaaactctggttttgattaaacgcctgaacaagcattctagtctctcttcaaaatcttgaacgcacatttctagactttgcatctctatcacagcctggtcagtcttccttgtctcattactcatgaggttgtgtagtgcagcatccacctttgcaaattcattaacaacatcttcatcacatccaactcttttgctttgcataagcttggaactaaagaccaaccaccaagcttagagtgtgtctttggtccagaaataaaggacaacaaggactcaaacgccgcaagagtgacagcctccacct

SEQ ID NO: 209894 - DNA, 897 bp, Cannabis indica
  modified_base (708)..(708): a, c, t, g, unknown or other
caatctctgaaattactgaagcaatcttttgctttattttttgtagatggagcaagtgccccatctgaagatgcaaccgctaatgaaggtataactgttagaaatcttgttggttagtactgatgctataagctttttattttctgcaatctcagaaattactgaagcaatcttttgctatatttttgtagatggagcaagtgttccatctgaagatgcaacccctaatgaatgagagactgcccgctcggcttgaacattcatatcattagtatcattggcctgttatcctggtatcattgactttcatatgattaataaaccaacgatgtttgatattgcgtataagaaaatgcagataccaatgtttctgcaattgtgatctagaacaatatggatcgttacttctatgttccaagattttttttcgttagtggaacattacgaccccattttaacgaagagctatttgaaaagaatagaaagatatgcatttttcaatatgttcccttgtcttcatgcccgttatgttataggactaaatgattacatcacaaaaaactgtttcgtttacataaaaggttgttctttatgaggttggcaacgtgtgtatccctttccacgtttacatcattgttttcctatactatctattttctggtgctcatacataattgttttttcaatagttctttttttttttttttnttttttttgtgaagcaccatgggctattttgatttccatctcatattctcatactatataattattatgtttttccttccattctaacattttattgtaattggtttttttttgttattttctttggtgcgtttatatatttatgtattagttaaaataaaaaaaggtgtaatattttgtaaaatcata

SEQ ID NO: 209895 - DNA, 662 bp, Cannabis indica
tacaatcacccttgagctctggactcactagtgcttagcctttaccgtttttttacctacacaagcaaataatatatgtgagtcgacaaactccgtaagaaaagcaaaaaacatataacataataccgacttgtatataggtacccatacacccatttataaggctttagatgcatgcagaatattcttaaaagaagtacgaaccttgtaccacatgcactaagtactcgtctcgtactagtgttggtagcattgaaccgtaccctgaggaccactgagtgttgtaccacatacactacatacttgtttcgtactagtatttgtaacactgtatcgtaccatttgaacatcatatattttaccgatgcactctgtaccaccactgtactagtgttggtagtatacgaatcataacacacactagagctgagcataaaatccagagaatcaaaaaaaccgttcaaaccgacctaccgaacaccgctggaactgaaactggcagaaccgaaaactgaaaaaatcgccaatagtcggtcgattttttttggatcgtaaaccgaccaataaaatcgaaaccaaccgaaataccttctatataattttttaattatttactttatttattatattgtaattgtgtactgataagtaataatatataa

SEQ ID NO: 209896 - DNA, 940 bp, Cannabis indica
aagaggagaccgtggtcaacactaaaggagagcaaaaatttgtccttctcatcaaagtagactcaatttaaaaatctttgtggctgatcacatttttcaagacaaatagcaacattccttttatttttgtttcatttatttattttttattttatttgaaattgtctttcttttagttttcctttttcttggttgtaagttggctatataaagccttgtaaacactttggaaaatcagattattttttaataaaatttcgagaggttttcttcttgagttattgagagaactattcaaacttatcaaggagtatttcttgtggcgttcaaccgacttatcaaacggacttccaccaccgtttgtggcatcttcctttataccaaggttcatgcttaactaagcattgggtcgtggttccacatctaaattttgagaattcttagaggttgccatatttggtgtgggattttatcacaattgttggtgtggttcgtatcatttggtatcggagcttaggatcatcgggtttggcctatctatcttttgtgtttttttattcaattcatgttctatactcttgtttaacttgtgttctatattcatgtcaattcgtgtttcatatcctctatttttttctttgtgaaatccaaaactgttagtttcacatctaataatttttgtgtcaaaatcgtgtctttgctgtcattagtttcccttaatttttttctccttaaaaattcaaagttttataaaaaaatgaaaattcaaaattataggcccataatttgatttcttgtttccaaatttttattgttttcattagttttccttatttttttctagcaattcaaaaattcaaaaactccaatttgttattgctgaattttttgtttctctatatgtgtcacaaattcgtttctttttttgtttttttgtttc

SEQ ID NO: 209897 - DNA, 623 bp, Cannabis indica
cctcttgcgcctcgcatgtttcaaaggtgttggctggccaaaaaagacttcttgtacgtgtgcgaggtagatcttttcccgagtttcattgagctcagtgtattcggtataaagaggaatatacttgttgggtttcttgtcgttaggcaaccttttggaatcatcttttttcattgattctgaggcttccgaatcaagttttttaacagtatcgtgccccagttgtctcttgggttttgtgatttgatgtactctggacttccaacccgctcattcgcaaatggaatgaatccttttttcttgaatcgaattgttgacggaggttagcttttttcaggttcaaatgctctcgtagatcagtctcgtcatgattgtggctggaccctgcccttcctctcaaggtttgactcacttttttcttcctacaagggtttgcacgagtttcattcttatgagactgaatagtgggttggaaatttttgtccgatgttccacatatcccaggctgtgcccttagtctgtcctcagtttcctcaggttgcatcttctgagagctctgagcatatccctgggttatctcctgcctcttgtcttgtgaggcacaaggtttgcctcgtaaatct

SEQ ID NO: 209898 - DNA, 847 bp, Cannabis indica
tttatttataaatagaaatgtctctaggcttttttggggaacaaccctaacaaatccttctaacctccaagaagctttgacttcactagatactgagttgtggaatgaagctattaatggtgaaaatgacttttttaggtcaaatggaactttatatttagttgatttaacacttggttgtaaaataataagttgtaagtggattcttaaaaggaaattgagacccaatggtactgttgaaagttgcaaggcacgtgttatggttaaagggtttagacaaataaaaaatgtaaatttcttttatacatattcacttgttactagaattatatctatttgtgtgcttagtgctcttggtgctactcataatcttgttgtgcagcaaatggatgtaaaaactacttttttgaatggtgaattagaacaagaaatttacatggaccaagctaaaggttttgttgttcttggtcaagaacttagataaatatttgtatggtttgaaataggcacctaagaaatggcatgcgaaatttgataatgtcatctcacatgattttaaagtaaatgaaagtgacaattgcataaatctgaaaatagtgtttgacctattatatgtctacatgtggatgacttgctcatttttggatcaaatattcatgtcgcgaataatgtgaaatttgtgttatgtaaacattttgacatgaaagatctaggtgaaacgaatgtgatctttggtgtacagatcactaggtcaaaaatgggaaatctttagatcaatctcattacatggagaagatcttgaagaaacataattacttcaagtataaacctgcttgtacaccatatg

SEQ ID NO: 209899 - DNA, 658 bp, Cannabis indica
ctttgttcatgctaagaagaaggtagtaagtggttatgaatcaccttcagagtttcctgggaggatggaaagaaaaagtagttgtttactgtagttgtgaacacttttgttgcttgttgttttgatacttttgtatgggttattgttgactagtttggatagtcattatagttaagaatattttgagcgttaaacaagtttaatttttttttgtctggtcattttgttaaacccatgtatggatatttgaactatttcagtacctttaatatgatattaatgcaggttgcttttggagttaagtttgaagtttattttttttttccagacgtgtaatacaatgtaagattactatggaagtttatcagtttggtttttttgttacctttagtatgtattttttttttttgttgtatttagttaaataattttaaatattgttgtattagtttttgagtttggtttgattaagtcgttattttttttttcaggttttgtaaaccgttgcatatatcctctgttttttatttatatttttttagaaaagagatacacattttcaaatcaaatagttattttgttttttttttctaatttattatgtttaagaaattaagttaaagaatataattacaatttgttactatcaattaacact

SEQ ID NO: 209900 - DNA, 528 bp, Cannabis indica
gccccttcagataaatcgaattgatccacttcacccaaaggttgtcttgcttgctagataacacccataaatgcttagctatcatggccatgtttcactttttaccttcacggaaccctattcctccaagctgcttaggaaggcaaactttttcctaaaaggggagatgaaatttgcttctattaccactcgaaccacaaatgaaatctctgcatcttttatcaatagcaggttaattcattgttgattatttgtaattttttgttgttgttttgatgttatttagatgttattttcatgttacttttatgtagttttcgtattgtttttgtgtggttttatgaaaaaccgtaaaaatgttaaaaaaaatctttaaatgtaaaaatgtaatttttttattaaaaaatagtgggcatatgtaattatccttagtttattgttgttttattaaaatgtaaaaataaataaatgtaaaagtgtaattttttttttaaaaaaattaactaactttgttgtaaatttttacta

SEQ ID NO: 209901 - DNA, 516 bp, Cannabis indica
ctgatgtttttgttactccaacaattgagcacttggatttctttggttccgatcacagagcactacgagtacatatttccgtgccttctgcaacacctgttcagagatttaaatctcggtttcgctttgaaaaaatatggctgaaggaagagcaatgcctcgacatcatcaccaacaattggcttagtatcgagactgatcccaccagcaaccttcttaataatctgtcaaattgtgcttctcagcttcagcaatggcatcgctccaagtttggtgatttacctaaaaaaataaaaatttcacagcaaaagattgaagctctcaataataaacacgatacaagcaccagccattttgaagagattaaatttagtgagtccattcttgatgaattattaactcaagaagaagagtactggaaacaacgttctcgaatctcatggttgcaatcaggtgactctaacacccgattttttcatcaaaaagaatcaagtcgcagaaccaataatactatcc

SEQ ID NO: 209902 - DNA, 548 bp, Cannabis indica
tttttatggttttgaatttatgtatattaaattcttattgtagtgtgatttgttatttttattgtttttgtttataaattttttaagtttcatttatgattcattattttttagttgatattcgtgatgatttatagattgttgcaatgtactatgtattttggttttctagatattttttagttgttctgaatgaattttttaagtttatttatagttttaatacagttttgaaactctatatgttataaaatttaattttctatttttgtgtttctgtatatctatgcacgattcgaaacacaaatatcatcctttttattattgcagatctaggtgtgtcaattattgcacttacggtgttattaagaacatcaagaaaaaattttggaaattgtgatgaaaatgttttgtgatactcaattaggtcatttcttggatgcctctgaggacaaatttcatccccaagttgttcacattcttttgttgaggaaagttcaacaagaaaatcagaaggaattttgggaaagttagtcactgggtttttg

SEQ ID NO: 209903 - DNA, 178 bp, Cannabis indica
tctttagcttctctcttgttttccctttcttttatttgtctttcttttcaattattattattattattattttgttttagaatctttgaggctcaccctcctcgattatgcgagcggtagaagaggagagagaaaataaaagagaagactattcctttctatttttgatttctaatta

SEQ ID NO: 209904 - DNA, 517 bp, Cannabis indica
cctattgaggaggatgtgtgccccttgtgtggattacagacagaatcaagtgagcatctgttcttatcttgtgatgtggctattcatctttgaagatcctctccccggggcatctatcctatttgtggttctggtatccggatatgggattgggtcaagttcatatgggatctcaaaaataaaggcctcaattctgatgaggtgttcctttatgcctctttaacggttgacaccatttatcagaaacgaaaaggtacataatactacattgtttgatattttttagtgcattgacagtattcgctcttcttatgcagttcaccatgcttcggtgttcccttgctctcctccttgcttggcggttgcctggagtcctcccacgcaagactgggtcaaggtgaactgtgacgtaaaagtggggattgactcaatgtgtatcgcagtagttgcaagggattatctgagcaaggtaaactgggtttatattgctagagtggatttggcggatgctttatgc

SEQ ID NO: 209905 - DNA, 663 bp, Cannabis indica
tgctagcacaaaattcctcaatccaagcaaacttcaagtaatttctcacaaaaacaagagaaaataataagagcgtttgagagagagagagaaggtcggccaagaaggaagaaaaatccagaaattctaacttattttcccaaaaatcaatctattactaaatgagaaataaaaggtcaaaagaccattttgcccctagggccaattctcagatattcaaacacacaagggcaaatttgcatttcgggcccgaacccggttcagcccaaaatacccggttgtgactataccgcgccaacctgtaagaacacacctgaaaagacaacacaggcataccatataataatatagttccattaagcacatttaatttcatcaatttacccttcttgggtcataattactaaaatgcccctggctcaccaatgtggtcttaccatataattaattaaataaattctcatatattgaagtatatagtaatataatacctcaattatttaaaattatccaattaggatttagctaatccattacttaattctagggtattacaaagacggtgttggaaactgaaaccctaattagggatgtcatcttgggcactaggtgaaaccctaggagcccaggttgaatttcaggggtgcaggttcatgtaatttc

SEQ ID NO: 209906 - DNA, 1006 bp, Cannabis indica
ggctcccttatgcgaatcacatgctcaacaggcctacggagggctgggagtttcttcttccttttcagtggagtcacctgctcttcctcagcctcatcttcaggattcaaaagctcctgagcatactccttggcccttgcacaccccttcaacttaccctcttgcttcagttgaatcaactcatcctccaaatgagctcgttcggtccagccaacaccagatttcttcttcttcccggtcccgcatttaggagtaaattccttgggatagagcccgtacctcacaaagttatcttcggaggtcaactggataatattccggtcttcccccggaagctgggcaagtttttgagctctatcccgaagagcaagagtgaggggagggcggtgataggtcgaaatctgctggaaccgagtgggagtgatgcccatgccatccaccatgaactactcatcaacaaagcacccaatcttgcttatggccgtatcgtccgtgcccgtcaaccacttgaagcctggctgagagaagtaaaagtaccccgacctgccttgcttgggggtggacttcaaatcaaagaaccaagcaacctcatggggagagggcatacctcatttctgggacgcatagaggacaaagagggtagacagatacttgatgcccttaggagtgaattaagccgagcagaggccaaagaagtcttccacattcttgaagtattgatgcaaaggcatcaacgctccttgttgaccatgggcacccaaacaaggcacacatccccttttcagggtttgtgtcacgattgttgtgggcgggaatgtagcagtccaactagcccagatatctgccgcggtcaagagttcgaaggcgcgcctttgtaatcttggacagagggcttacccatgtggcgcccaaggcaccctgtcttctatgaggaactgccgcagcaagctcctcactgacgtagtcccacgccctcaccaggcgtctccgtcagcatcgactggct

SEQ ID NO: 209907 - DNA, 1386 bp, Cannabis indica
caaaatcagagggccgcccagaaggataataatgaagatttactaccaccaccggtggacgggcatttacaagtcattattggaggctcacacatagctggagattcaggcaaagcatgaacattacagcacaagcaagaagaggtgattctggccatcaaagaaagggagccaaaaataccaccgacaggagaatccaccataacatttaatgatgaagatgctgtcaagattaatttcccgcacaacaatctgttggtcgtggaagtccagatagccaataaaatggtggcccgaactatgaaagataattgagcctctgcaaatatcttgttcaaaacaccatatgaaaaaatggggctccaactcaaagacttaaccccctgtcctcagcccgtgtatggtttctctggccagagtgttgcacctctagggcaaattcgtgtacccctcactgttgggaaagctccgaagagaataactgtaatggcacaatttttgatattggacgtttcatcagcctttaatgtcatgttaggctgaccaactttatatgacctaaaggttgttacgtcgatatttcattcgcctgagaggaaatcaacaagttgcacaagaatgttacaacctttccctaaccaacgctaaaaaggaagtatcctctagtcagagttcggacaaggggaaagacattgccaagttgggaactgcccaaggcggggatgaagatgtggatccccgacttggggaaccaaatactaatgttggtccagtggaagaatttgaagaaatcagaattgaccgaaatgtttcggccaggaaactcaaaattggaaaaggtttgttactcgaagtaaaatcagcattgataaaatttctgagagcaaacctagacatttttgcatggtcacatgaggacatggtcagaatcgatccttctttaatttcacatgtcctaaatattgaccctaatttttaacctcttcaacaaaaaagaagattgttgggcaaagaatgaggcctagcactcaaagaagaggtagaaaagttgcacaacaataatttcataattgaagctttctacccagcctggtttgctaatcccgtactggtacccaagccaattaaaaaatggtgagtatgtattgacttcaccgaccttaacaaggcattcctaaaagactgcttcccacttccacgaataaatcaacttgtggatgcaacagcaggacacgagatattaagcttcaaggatgcctattcggggtacaatcaaatcaagatgcatccaccagaccaagaacatacaagtttccgaacagatatggatctgtactattataaggtcatgcaatttggtctcaaaaatgccagagctacatacca

SEQ ID NO: 209908 - DNA, 643 bp, Cannabis indica
ccaaattagaatgtgaattgaaccatctgcactatggttggtttgatctcaaaattattggtttcgatgacaggtagccttatacaggatctagcccctgtcatatttggtagcacataatctctcaggctacggtcaggtggattgcgaccattagcctggtcttctacaacacctctattattgccattgttaccaatattagcattgtcagccatgactacttcttgttcaacctccactacactcctttctagcctcttgtttcttttgtttcttctgcatgtcttctcaatttcaggaacaacagacactattatactttgtccttgacgtcgcataaatcaccaatacctgaaatagagtaagagaaattgcaaggaaaccagttagctagaagcaaaaagaaaaacctaagtagaatttaatctaattattataatatcaatatttattcaattcctcggcaacatcgccaaaaatttattgcttaattttatagtctatgcaagtatatgcaatctattatagttaaatactcacacaagtgagatcgattcacgggaattaatattcagtaccactaaattagatttatgtttctatttagtaatttgaagttataattgagcaattaataact

SEQ ID NO: 209909 - DNA, 1029 bp, Cannabis indica
attcttacaaaaatattgaattttggacaaaattttataattttactggcacacagaaatttttacaaaaatactgtctcttcataaacaactgtaaaacaacaaaacaaaacaattaaaaataacagtaaaacaactaaaaaataactgtgcaataatagtgaaaatttaatatagtagacagtatttttaataaaaaaaaattccctacaataataataaaaaaaaaaagaaataaaaaatgtaagtatgtggtatataaaaatctctttgggctcgtttggaatgtcgtattaggtcgcattaaattttaatttatactaaaatattagatatttagttgtctataaaagttaataccacacatataattttatataaaattattatataaaaaacaatttaatataatatttataatatagcttatcaaactaacccattattttttttttgaaacaaatttaactcaaaatttatacaatctattagaaatagtctaatataacactttatagttggttaattattatttttattatttattagcttgtacacaaaacttttttttttctcaaaacaataataataaaaaaaaaataataaagcatactaccttcgagactcctcctcgtctattccagactcaactagattttcgttcattttatacacctaaagcacgaacgatctagaaattaaatcaaacaccgcctatatctatatatatataaccccctctgatccctatacgtcactccatcaacataccaacaatcaacaaatctcaaagctacattttacactcatttatatatacaatacaacctctatagttgccaaacaaacaccccaatcaacactaattaaaatggccaaaccaataatgaaactccccattgcacttctgatcctcctaatcatcaccgtccaatccacttctgctttagttccctacgcgggaggatcgctttgggacgtgatgctaaacaacattccctccgacgaccctttcagaatcctcgaaca

SEQ ID NO: 209910 - DNA, 687 bp, Cannabis indica
cttcttctcacactgacagtattattcatcttcgtagtattattagttagatccaaattaatattacaaattaattataaataaaaaatattaattatggtgtagtttccaaaagttaatttaagccatttgattaaatcaatggctataaatcattatagctatcaataggtaaaaattacaatacctattatattagcttccatatatatatttataccaaaaaagatttattcggtaatttcatcaattacagaagagtatttatgtaaataaaattgtatttacctttgtgtaagtaattatctctaaaattgtatatgacctttttctattttaaggatagaaattttattagaatggaaataagattaacttcttatacgacaatcttaaataaatggatcagacactagtgcaattgtaagctatattgaggtatgttttaataatactaacgaattttattgaaattaatcttgattcatttgctatgagaaaaatgaagacttgctatatatataattttttatgataaatagatacgaagacactgtaagatcagtagacaaaaaagacacgttatttcacaattgctctagaaataacattatataaactttcaattgagtatacgaatttgtatccttctggttctctccacatcgctctctccctaaacctaaa

SEQ ID NO: 209911 - DNA, 655 bp, Cannabis indica
ttcgaggaacttgtcttttgcagagagaacagttttgataaattttgtcctaatggcgattcaagcatactggagtcaaattcttatcttaccaaagagaataattagaggcactaaagcagtttgcatagcttcatctttggaaagggcaatcaatgtttcagggggctggagcaatcaattgagacatggtttgcactctaaaatcagcaagggctttaggtatcaaaagagttgaagaatagaacaaaacatctatgtgtaaatatgtttgggcaatcgcgaataacaaggagagtttgtggatgaagtgggttcatagtgtgtatttgaaggaaggggattgatggagctacactccttctatacatgctagttggtattggaagaagttggtggctctaaaggatcaagtgaggagtttgatagatacaagagagtttgtagcacacaaattctctattacagcaggctatagaattctaactccctcactgaccaaaacatactagagtaaggaggtttgggctcgtctaaacttacctaaacattgctttattctatggttgactatgcatggtagactgaagacaaaagacaggctgataagaatgggaatacagatagatgaaggctgctgcttgtgacaggatgg

SEQ ID NO: 209912 - DNA, 678 bp, Cannabis indica
tggtattgggcactagtggtacattaccttttagagatgtctccctgtgattggttaacgatatttcttaaaagttattatatttaaattatatgagatctgatacttaaatgttcgaatagtggtatgacaacgaagagcgtgcgaaacaccattagtgggttttagcatttctcttataaataatacaaggtgtttctacaatgcactctattaaaagagatgcacctcctatcagtcccaacatccaaaaatatgtttgtttaatttttcatattcatgtacgttatagttatttaagacaacctataaaattttgagaaatttaaaataatttataatataaaaaatagtggttaaacagtctatttcacacgcatataaaatataatagttacgtgagttccagactgtttgaactaggggtgttcattaaaatacatctaatattgcctatcaaatccgatccaattatatattagatgttaaattttatcatccgatctgatccaattaatttcaatcatctaatcaattcaacaactattaggtgttggatttgatcggttctatccattatatgtattttatgtatatctattgatttaattcgggtctatccaatattttagtcttagtattttttgaatcgaaacggatccatctaatattttaaat

SEQ ID NO: 209913 - DNA, 729 bp, Cannabis indica
ttgactgatctaagagtagaagatattagagcttttaactttgactaacatatgctcatgtcttttgattctttaatttcttaccacattttgcttgaaattgtccaaattcacccattcgtgggtttccaaagaatttatagatattcttcgtgattttaaacatttggatttgagaattccattttggaatgaaattccttctttttttatttgaatcgatccaatcggcatatcagatatgttttcctccttaattccccatccagctctcacttttgtctccctctttttgtaggtgaaccctagtgagtactaggaaggtggtcatcatatcgaccaggatctccttcaactcctttatgagaatcatcttcggttaggtgcaaattcatcttcttctaatgaaagccttttaaattctagttttgaagattcgaaagttagcagtgacccctcggaatccctaaagcccgtggtgcagcaccatcaatacccatactagatacgtggagaagggtacaaccattttatctaggaattgaagaaaggttgtaggtgttatcttcatgcttcctcgacgtatagggttcgatatggtgttgttagacacattaccagaatcttgaccaactccctctgccaggcatactgccgtagctgacgttgtcgtgaccattgcaagacacacatatgaattaaatcttccatccaaacatagaatgatgg

SEQ ID NO: 209914 - DNA, 590 bp, Cannabis indica
aaggagtttacaaaagcagaagagctctcagaaaacatcctcgaaattggcccagtttgacaaaatataacctcggcactaggccagccccaggtgttaacctgggcactgggccttgcttctagcacccaggaaatgttgttgcttctttgaaaatacctactttctcatttttgatgaatacaaagaagatgcaaaagtcggattgccgaattgatacttgtacgtcgcccagattgacagattcttaacctgcgcagtgggtgctcaaaaatgaactttcttcgaatatgattttgatgcctcaaatatgtcagtggtatgtctagttcatgtttaatgtaaagtttgactcatttgtactaagacggtttcaaaaactgacactctagttgaggatatcaacctgggtgctaggtgaaactctaggtgcctaggttgacaagagtgtacgcataagtagttcatgttagcagttaagtgtggaaaataaatgagaatttaaatttactaacagtttaataattttgaaatttttactaccaaaatttaaacttaaaagttaagtacaggtgaaatgataattgaga

SEQ ID NO: 209915 - DNA, 750 bp, Cannabis indica
agcagtatgtattcatgattaccacattctcataataacttggaaaaaccaacaaggaacagaagctgtagataaatccaagtgcttctcttcatcttatagagatctttaatctatatactcatagtttgcttattaaagactgccctttctagttgccttctacttttggctttagtttcagagatgcactgcagagatagacataaacaaaacacaaacaaagaaggttcaatttagaaataaccacggaactggatttgggaaatgagaaagaaaagaccatgcccaggccttttaacatagctgtttaaaaatttacctgttgatacagaatcgttttccagtgggtggtggcccgtcatcaaagacatggccgagatgagcatcgcaaacttggcaaagaacttcctggcgtggcatgaaaataactgacaaatctaattttgacttcacattgtttcctataggctggtaataagatggccaaccagttccactgtcaaatttcgtcgatgatctgcagcagaaatttcaggtgaattggtgtttacaaaaaacagtaaatacgcaagagtaaagtttgccttaactaaaaatacttactcaaagagtggtgtgtacacaacataagcaatggtaagttcctggtcgttttggtattccagtactccctgaataagaagaacaaagtagcattaagatggtttgaagtacatagaccaaaatatcatcagtgtgcatcaatat

SEQ ID NO: 209916 - DNA, 268 bp, Cannabis indica
catgcatatctctatcgaaattcaatgcatcgatcatgatggtgatggttttgttgtgtgtgccactagcatgaatattaaaatgagcattgctattaggtaccagtagtgcctaacacttttgcgacatgtcgcgttgcgattggctagcgatactccttaaaaactattatattaaattatatgggacccgatacttagttaaaccaatagcgatactgacacataggaaggtgctaagcactactggtatcatttagcatttctc

SEQ ID NO: 209917 - DNA, 1103 bp, Cannabis indica
ttttatataacatttcaataatattttacaaacaatctacaataaaatgtttagaattattagaattttaaatattaattaataaatactcaaatttttaagttaatctaatattaagtgtcaaaatattgcatattttgtagtataaaaatacaaagttaattaaattttaaataatattttcatgaaattaaagttatatatttgtatgttgaaaatattttatttagaattaattttatttttttatatagttaatataattagtatttatgacattcaaccgggtcgaggagtctttctcaaagaagacgtatgagacaaagtcattacacactacgagaggaggtctgcaagcctgttcaacatcctgagaaggaggtccttgatgagagcgtttgtaaattaaaaaaaaaaagaaataaaaagataaaaaatgtatttcttttattaaatgatttatatttttgaataaatattttcattgaaattaatgcgatatatcttacgttgaaaatattttgtttagatttaattttgtttgtgtttgattgagaaaataatatttgtgataagaaagaaaagatattaaaaaaagtgacaaaagatgacccaaaacatgaaaatggcatttttgacacccaaaaagagccgaaactagctcaggcggccaggcccatttggcccaagtcctctcctccacccgacattcccgccacgtggcgggctcctactcgtgcgtagtagctgggccagggggttgtctcccctttctctctgagtcccgtcagcgggccccaccaaaaataggcgtgttagcacctttgtttccctccgcgccccacccacgcgtgacgcgcacgactcctcctggactgtgcgtgcgcaccacctcccgggcccgagaatgggccatttttcctcctttcttcatcaaccctcagagaactaaaagattcgctaagtggcactatttcatcattgttgctcaccttttacaaccaatcagcaaatgagacgtggcaactctatcaactttgattaattgtatttttactccatgaaagttgtaataagttctaattgcacattagtcattttac

SEQ ID NO: 209918 - DNA, 655 bp, Cannabis indica
ttagcattgtaaactattaaaaaaaattatcaaaatttataagtgaccctacaaaattataaacgtacgtgattattatatatataattctcctaaatactgaaacactttggattgttttagtatatataccctttatctgttttggtattcaacagaattttttaatttatttttttcatatgaatatgtatgttatagttatttaaaattatctgtgaaaaaatttcaaaaaaaaatcagtaatttacaatgttaaaaataagattttatatattttattacgcatacatgattatttttcttacatacatgataagcaacagttaaaattttaattttcatcattataaattatttaaaaagttttacaaatttacaaataattttaaatatgtaaactataacgtacgcgattattaaacgaaacataaagaatccagtaatctactatagatttaccctttatctaaacaagaacatccatatatactatatagtgagtcggtagagagatgatgatgaacattatgaattaatatataaagatattataggtagtgatgagtaaataaatagtacaacaaacatgtgaggttgacaggtatgaacctgcatgagatgttaacagcaccatgattgagactcactgttc

SEQ ID NO: 209919 - DNA, 775 bp, Cannabis indica
ataaaataagaaaattttgaaagttaacaaaatatcttgttagtttttctaaattttctagattaaaataatcttattttaaattttaaataaggtcattttataaaaataattaaataatctttagatataaaatatctaactttaaatttaaaaataagataaaataatcaaattttaaaaataaagttaaccaattaagcaaaatatcagattttatcctttttcaagttcaaaatctactaatatctaaaattaatttattttattttgataattagatttgaaatttgaaaaaataaaaatataaatacaaaattacacaaaaaattagaaattaattccttgaaaaagcatgaaaaaattgaaaaaacgaaaaaaaaaatagcatttggtatggatgcataccttccgcgcacccagggatggggtgctgctgagaaatcacgcacacagaccctgcacactaggatttttgcgcgcgtaggaggggcttcagacagcacatgggcgagcatctttggacaatcccctgtctgaatgcgcgtgacacccgagtgatcactcgtgtctgcgctcgcatgtgggcatccgattcctgatttttttttaattttaaaaaatcataactaattcaaataaaattgaaatcaagttttgtaaaatagtgaattgctttttatactatctaaataaaataaatccagaaataaattcaaattatttacgtaaaaaatttgaaaacatccatcaatcatcaataaacacatagatc

SEQ ID NO: 209920 - DNA, 567 bp, Cannabis indica
atgccgctcattggtggagtagttgttggtagggttctcaagagctggactccgggcgcataccctgctattctggtcggataatatcccccataagccactatttgggccttttcaaagttgatgtacttttggactctcttctagaaatcttgaaggttggaggctccttcttgttgtaattcgttccagaatggagtccttgtacggatccctacttgaagaagtgcaagctgttgtccgtcatcaactttcttggtcttcaaggcttcttccttaaacctctatataaattttttcaatgtttctgtgggcaactgcttgatgttagtcagggcactgacctcaagattaacctttctcgcggtgacaaactgtctccgaaaactaactttcagcttgttccagtagtccactgatcctggttccagcttcttaaaccattcctccgcgaacccactcaacgttagcgggaaacataaacatttggcatcattgctgactctcatgactgtcataacacggttgaaccgagacaggtgagcgctagggtctgagttcccggta

SEQ ID NO: 209921 - DNA, 572 bp, Cannabis indica
tcaatattgccccaatacttgtcgaaattgatctacaccttagtagccatatcctttaagattgatctgtcactagaacactatttgattagtttcccacgaacagaacacacttcatggaaatatgaattcgaagtaacaagtaaagaggtactaaactttagggtggcttcataaaatactctcaaaaacctacaaaaagtgacacaatttttccaatccttggaattcggtggctcctctaatgttctcccattcctatcttcatcattaaaatattgcatataatacacatcttcttcttctaacagtttgaaagcatcaacatattttaatgcacgatctaacatcatatgcaaaaattctccatcacaaacaacactcttccaaatttgcaatctcttcttaatgtggataacagccacattattagaggatgcgttatcaatagtgattgtaaacactttttcaataccgcaatcttttaagcatgtctcaatagctttgcctattgtctctcctttgtgattagaaatttgacaaaaattaaaaattctcttttgcattttcca

SEQ ID NO: 209922 - DNA, 1311 bp, Cannabis indica
ttttgacaatcgcaattcttattaatagagagtacttcagcagtcatcataattcgaatgccaacttctgactcgtcaagactataagtctcactgaaagatgtctaaagttgattagtgaaagtaacaggtgcacaccttcctatagcgagagaggcgcctcgcttattagggcttgagtccacccaactgttatacttagtttatacattgtatactaagtgttttcacattcaatatgcattactttcatcttcccaggtgcaacgaagttgatgtctcgctttatgcatccaatgacatatggtttctcattaatacactaggcaacagtttgtatatctttacctcgcataagaccttatagttggcgagttgcaagtatactatgttacttacacaattaatgagttattccattaaaagtgatttcatcgattcatattccccttaacttgacacatgtcctctattgaaatggtggtcgaatttcgggtataacaatacttaatgtgtttgaagaaatattgattctttttttcttgctttgtctatgtgcactaaaaattagatgaatatgcattagtaattatgtacaaaaacatatgttaattgccctgccgacacattttgagttttattttttgcacttatatttagtaagctgatacataaacctttgaaattattatggtaattggtaggtgtagtttctattgtatgttctaattgatgctgatagttcttttaattttttttcttttttgaccttagttgttattcaatgtttgctttgtatgtaggatttaggtgctgaaaaatttacttctgatgattctcgcatctatgttgcatgtctatggcacgattttatttgtataaaaaagtttctaagcaattcacagctacaaaagttgagagagtcatgttttggatatcttttagattttgatgaatctatcaaaccagcacaaatgattatgcactatctcttacttcattaggagtgcaattctaatggaaatgagcttcaattaagttttaatagcaataaagtgaagttcagtattgctgagtttggcatcattacagggttaaattacaatgaatttccaccagattctgatatcattaagcacccaaattgattactcaataagtactatactgacaataaatctattagcagaaaagagttggcagaatgtcttatgaaaactcgaattgatgatgatgatgatgttgtaaaattgacaaaagttttcattatgcataatattttacaaaataagcgtggccaatgtcatgtag

SEQ ID NO: 209923 - DNA, 506 bp, Cannabis indica
tgccaccatgtaagttctctgctctctttctctactctcttttgatctcgttggtgaaacatttttttttgtacagatttttgagtaggagacgaagtcgaagaggacaaccattgtctatttttgggttttgatttcatgacggtggctgttgtgttttgaacttggatctgttttagattttctttgtatgtttacttgtgtagatcccagtatttatatatttttattttagatctataaaattaaaatgaatattaaaatctctgtatttgtttaagatttgggtgtgacctcgagatgaatatcgtgatctattttttttttggttttttggttgtgtcggtataaaaccaacatgaatttataaagtttgatttttacactatctgcgattattttcaattgtcgccaattttcgataccgactgtttaaaactgatgcaaaataatgtagtttttgcatctaacgtatatacgtccgttttaaaaactgacgctaaaag

SEQ ID NO: 209924 - DNA, 588 bp, Cannabis indica
aaaaaaaatgctttggtacttggataatggaaccttcattcgtgtgtatggttgattgcccaagaaattaggatcaagaactagtttgttgctttccaaattagatgagggctttgaacattccatctccactactgacaaagaaaaatattaaatgaattgcttttacgatagggtttcaagtagcgatgaatggtgcaagtgatggcatctcgaatcttaattttttttcttttagatatgggattggcaaacaaaaaaccatcaaatgggtttggtttttttttttaaaaaatctgggtatgaatctgtgctatagtaatttatgtttgtatactggtggtggtgacaatggtggtggtgacacagtggtgatgatggtgagattcgaagaaaggctaattctgattaatttttgttttaattatttgttttgagttaatttattttatttgttacttgtaatgccatgtcagctacttaaaattatattcatcattagtatgatttggcatgtgttaaaatgagccacgctggtactaaacggtggataaggaactaaaccttaatgttggataaattcccata

SEQ ID NO: 209925 - DNA, 575 bp, Cannabis indica
tttagagaaaataaaataccaaggttgagtagggtgatggaatttgaccattttacccctagttttgagaaatacctaaatttaacctaaggggcattaagtcattctttaaattgtggagagtggtggcaaccctaggtttaattaaataaacccttatttcatttagaaggaaaataagaaaaaacaagctaaaatcaaaggaaaccctctccttcctttctccctcttcaaaccagccaaggccaagagaattctttgccggattttgtgctttcagcaagggttggaggaggaatcaatcaaggtaaaccctagttcccctctagttatatttttctcaagtttttagttggtttcaagaggtaactttgagttttaggggctgttagagttaggttaggttctaattcgaattctaagtctattttgagttggttttagcttctagtagttggtttggttgggttgtgatgaatttatgcaagtttgggtttgaaaacctaaactttgatcttaaatggcatattttgattcactgggtttttctacgatttattggctggaatatgttg

SEQ ID NO: 209926 - DNA, 833 bp, Cannabis indica
atgatgatgattctcctcttcttaactacaaatagggcagccagtagtatcaagctctatatggaatctagtaaacatatcccttgtaaaacgatggccatgaaccacctgccaaagaataaatctatgcttgggcagagaaacattacaccaaacagctttgtaatacatgtctgcatcatgtggaattagcccattatagagcctagaagctagaaacttacctcttcgaacagcagcaagtaaattaaacttgttgaatttcttcctgagttggcaaattttcctccaataccaactaacatcccccttcaactcatactcccaaaactcagctcccttcatatagatgttatttatccatttaacccaaagaatgtcatgcttttccatgatagcccaaataaatttttccaagaataaatctattcctattaggaccccttttgaacccaaggcctccataagatttagggagacacaccttgtcccatgaagccaaatgactcttgcttttttctcccttaatcccctataagaaacccttgcaaagccactcaacttccttgattatactctaaggaagaaaacccaaagagcacggagtggatgagttgaattcgctagcataagagagatgcctagtggcccaagaaaccagcctcattttaattttcttaagaatagcatcacactcttctcgactccacttggttggccttaacgggaccccaaggtatctaagagggaaagacccctcaacaaattgcatcatgtccaaaatttcagctttatcattagaggagacacctccaaaataaatctgggactta

SEQ ID NO: 209927 - DNA, 682 bp, Cannabis indica
aggtatttatagctcacatacccctaagtacacaacactaactgaacttaaaaagtattacaagtgactacttagactaattacaaaggcacacaaattcaacaaccttcctaaggtgccatatcatcgaaaccgttcaaagtctgtacaagtgtgtctcatgacagaggcgtctcttggttttaccatgccatgtgtcataatcgcaacaggacaccatgatttctataaaatccctaagtatgaaaatgagtctcgctactacaaactgcacttttggtgtcaattttaaactgacacttatacttttagtgtcagttcataaaagcaacacctattccacagtcacaaaaagtcaaatgtttggtgtcagttttaaaccgacactattaacttttagtgtcattttacaactgacatttaaagtatacatatatatattttcttttagtgtcagtttaaaactgacgctattaagttttagtatcgttttataaccgacacttaaagattctttagtgtcatttataaaacgacaccaaaagactattttatggatttcttttttccttttccgttgctttataattgatacagtttttttagtgtcaattttaaaacaacacaatattattagcagtgagaattgtaattatatgtcaatttcctcacctacaatata

SEQ ID NO: 209928 - DNA, 504 bp, Cannabis indica
ttgattctattcttgatgttgttaacttgcttgagaatcttcgtcttaagtggtcttgaatattttgcagtcaatttttttattatttatgaagctttcaaaactaactaccgatctttgagttctccatctgggaggatagaaacacatgctttatcttgaaatgtaggctctctatattcagtaaaaagttgaaataaattttcatccgttccttttgttccagcaacttttgtacaggatttcttatttttgtattgtcttttgcgatctaccatttcaggtgtgttctttaggtctctatatgccatatttttcttcaatgattttgtctttctttagttgaaaatatttatcattatgcaaaacatatgtttgataaaatgacgaagtttttgtcactcctgtcaaattgtttgaattgatttattataattgagtgtaatttgtaaaggtaaataatactgtataatactattttaaatttctattttgctaatgttt

SEQ ID NO: 209929 - DNA, 800 bp, Cannabis indica
tttgcattcacgaatatacaagacatttgttaagacaagttggttagtaaattttaacggtttcagatttgttgatatgaatctgatgaccattaggtaatgtaaccaagttagcaacattatttttgttttaaagatttaaagcaataaagagagtgacatatgtgatgagttgcgcaactatctacaatccgtaaaaaaagaggaaaaaattgtcattaccaaagacgttagaaaccacaggaagattttcactggtggaaggagtgccttggatttgttgattgagtagggagataagttgttgactgagctgaagttgggaagagctagtcccaaaggggttaggagtgggaggcaccaaggcatgatttgcccaagcagtggtggtggtctttttcttgtctccatattcgggaggaaaaccgtggaggaagtagcatttatcaacaaggtgaccgagtttaaggcagttagaacaagttggatgtggtttcttgctccgatataactgtttgggatttttttggccgaagtagcagcaacaacgccagtattaccaagacagcattggcgctcttgttgaacaaccatggagaacaccttggacagtgaggggagtggatcatagagtataatctgagcccgaataccctaaaaagactcattgagactaatcaagaacttaatgatctggttcttgtgtaataatcttgaactttttgcatcatactgcaagtacagccacaggtgcaggggatatttgcttcgtactcgttgagctcatgccaaagagcttg

SEQ ID NO: 209930 - DNA, 1008 bp, Cannabis indica
ataataataataataaagttttaatgagttgactgtgcttaatattattgttcaaacatgatcctaaagtaattaataattaattagtgaagcatctcaaccaccaattaataacaaattaatagtcaagagcattttcaacagcttgtctattccatcttttaatatacatcactaaaattttctttattttacagtacacttttacattacaccatacattaagttctttaaaatatatcattaaaatcttactttttaagaaaaaaattatatattgtattcatttcaaatatataatattaatatatacacatatcttcatacaaaaataattattaaaacccaaaacaattaataaaatatgtttagcaatgaatagtattttataaatatagagcatgaatagtgtattttaaagaaaatttaaaatgaagaaagagtttaaagcatctaataatataacgtgtttttagtacgattctttaaattttttaaagcttctctattttagataagttattgtgagtgctctaatggtataccttcaaaccttaactatttatgattacattaaattacatcagcattgctatacgtattaggttagaaaatactaaaagataccagttatatctagcacctaaagtattatatcattattggaacaattaagtatcacatcactactacagaaactactattcctgttggtcctcaaaataattttttttggaccatcgctaataaaattatgagagtgtttaaaattgtcggctatagtggactatccctgaaaattttaaacattcgtgtacttttcttgacagtttaaaagagttgcaagcttaaaaacaaaggttttaaagggcatcttaacagttttaaatcgtcgaggattcccctattaatataaaaccccaatctttgtgcactagggtctcatttcaaagtttgatacctcgctctctatatcttgttcctatcctctctctctctctcactctc

SEQ ID NO: 209931 - DNA, 1279 bp, Cannabis indica
tttatcaatctgcaaaaaatttaaaaattactccaaacagctacatcaggatcaatccattcatggctaacatcttcattgtcatgctcaattccactgttactcatgtcagagacatcttctttacatttctttttcacaaaactcatgaaatgaaaaaaattatcttcatcttcggacaaatttgctataggttctatgttttcgttgtcaatcattttcgatgtaagtgtggtggagagtgaatgaaagaggataattgcaagtaagactttagttaattagaatttataattaaaaaaataaaaatcaagactttaaagattaattaggttttaattaagtgtcaatataatatcatcatgttttttaatttataaggacacatcctgcaaaaaagaagcagggtgtgttcttgtaaaaaaattcattataaggacaaaattttaatttatataaaaataattttaatttttgtaaaaaaaattgtaaatattataattaaatagcttaattgttaaaataattaagctaagagatttatatataaataaaaaaaaattaattataaattttaattgctaaaaaaagtcttcttaaatatttatttgattacttaaaaatagttaattataattaattaattctaaaaaagaatttttacctattagtaaccttctattataggtaaaaaaaatgtaaccatatggttataataaaaatgtaactattgaatagtcacccatatatatatattcgttaatatttttgttaatttttggtatttttattctctaatacgatatacatacatgggtatgaatcattttcattcattttctatcactgaaaaaaacttcaaatatacttattcaaaattaagtaacatcatctccaacaaaattcataatttggtaattactcatttgaatattttttctctcttatcaatgccatttagattcataaccttttatacttatctatgttgtttttttttctaaaaaaaagccttttaatctctttaatcttacttgactttttgaattccacgaacaaattgtcaatctcatatgattcaaagaatatattcattccaacaatcatcatcaaatttattagagatcataataagactcgtgaaagtaaaaaaaatacatatattaataacaaatattattacttttttgtaataattaatattcagcttatcaattgaaacataaatataaaagtggaaaaaaaagacataaatactgatgctattatatttcaacat

SEQ ID NO: 209932 - DNA, 626 bp, Cannabis indica
atgctattgttgagtagtgttctgctatataggattgctctccacataaccgagtcgccaagattatgctcaaggtcaagaaaattcatgtttttcaagtatttggctttgatcaccttactccagagactagtgtcgtccgttaatgccttccaagcccatttgagaaggaaagccttgttaattgtttccacacatctgaacccaagacctcctctaagctttgattggcacagggagtgccatgcgatagtatgcaatgtcttcttttcctctgtatctccccaccagaaatcccttaagcatttgtccacttttcgtgcaattgacagggggataacatcagatgcagccacataggtggccatggatgaccccactaactgaacaaggcaagcacgtccggccttagatagcattcttgttttccagctttttgccctttgaagcacacggtcgacaaaaatgtagatcagttgttttctttagggagcgaaataggggtagtcccaaataaaccgcatcacatttcattcattttattccaagaagttgggatatttcggaggttgtatttggtggaacacctttggagaagaacactgttgatttgttgtagttgaccg

SEQ ID NO: 209933 - DNA, 551 bp, Cannabis indica
tttttttttatttaaaaaacatttagtatttcagatagggaataattctatactacactttgtagaacgactgttttgacatgggttttagtttttttagtaattatttttaggctaaattttttaaaaaatcaaaataatttacggtgtcaaaaaaagttcaactacatattttatttttttatactataataaataactatttattctttcatttgatactataaattatttaaatttttttgaatatttataaattatcctaaaaaagaaactagaaaggctctcgtaaatgggaaaaaaaaagaatagttagtgtaccaaaaccactttttggaagtctacttgagatttttttcaaaatatactcgagtcgaggtctctttttatttaataagttatttaattacagaattagttagttttttttttctttttttaatggtagaaaatcacgtaagttttatgtggatttttcatcccgtacagtacaggtacgggtatgaaagtggagaatgtaatgtaaaagtgagttttcttaatattttatt

SEQ ID NO: 209934 - DNA, 577 bp, Cannabis indica
tgttagctttgatatttctgttactacatgtttggaatggtcatgttattagaaatgatatcctctctttctttaatcttttcttctttatttgtttatttattattattattactttttaaaaaattggactttaatctttatgttcaaaaagaatgaaattgtttcagaattctgtattcatcttttccaatcacgtggtttgaattctctttttacttttttagaaattaagcttaattaatatatgagaattgctaatcgacaccttaaagtgttaatcattataaaaagcggtatatctaatgctattagtgcaatttgatattgaattttatatatttctatttaataaataatatacaaaactgttaactacttacaacgcgttacattaatatagtattgcacaattttcaaaaatacacattttttatattttatttacatttttacgacctaaaatatttatttataaaaatatatttttcttaactaaaagtataaaaaaatgagaatttaattttacaataactataaattaactataaaacaaatagataaataaccacattac

SEQ ID NO: 209935 - DNA, 359 bp, Cannabis indica
gaataaaattttattaaataaattttgagtttatggtatgaaatatatataatttttaaaatataagatgctaaataagggttatttaaaatatatggtaccaaaaatatatttaaatagtacaaaggataccaaatgtatagatacccattcaaaaataagctagaagcaactatatataaaccaaacaaacattaattaccatttaatccaaatgagttgtttagcaaaaaaatagtttgattaatgaaagctgaaagtttcactctctaatctcatagatgatgaaagacaatcagaatataggtgacgtttggttggtagaaataaaaatataagaataagaatgagaatataaa

SEQ ID NO: 209936 - DNA, 690 bp, Cannabis indica
aaaaaaaaaagaatattttatattgcttgtactcatgaagttgctctacatttaaaaaaaaaaaccatatttcataagagcattattattggtgcctaattagttatcgatatttcttaaaaaatgattacattaaatttatatgagattttaatactttaattacattaataataatattaacacgcaccactatcaaggccgacccaagcgttagttagcttgtgccactgtacaaggccccctatatattaaaaggtccctattttcttttatcatccctatatataatataatatattttttataatatatacataataaatgtccataacactaaacatatgcacttacaaacaaaaaaaatccaataaaaccttatggtctgaatacatatgattctaaaatttttgtctattctagaattaatgaaagtttttttttaaaaaaaaaaaactaaatttataaaataatgattgcttattgttgaccgaggttttcggcaaccaataaaataatagaagattaaagagctgtaagaaattaagagaaggatttttacgtggttggggcgttaatgagccttagtccacgagtctgtgtatttatgagtgtattaaatacagagaatgttcttggtgagtatttactctttttgcacttatgcaacccaaatctcgaccccattaa

SEQ ID NO: 209937 - DNA, 903 bp, Cannabis indica
taaaaaaataaagaataagaatgaagaataataaatatagaatagaaataaaatttaaaatacaataaaaaaattaataaaaaaattattaaatttttctcttgttatattgaaatggtcttttcttacctttttaaaatggaaatagtagaaagaatattctattaaaatatcattctaatattttaaaatacaaaccaaacaaaagaatagaatcaaaattgtttccttactattctatttcatttcattacctccaaccagacatcaccataagtaagaattatcagagtaacaaaaagttataattcagttgtattttttcccaatccaacacttataaatttctcaaacatttgattaccaaaaagaatttcaaaaaaataaaagaccaaaggtaacatctcatctactattagtactagattgagtcgtattactcgtatcttaattacattctacgaattcctttccgtttggtaatttcccaccactttcgttgcccctttttgatcaagtattaccacaacactagacgtggacatattggttcattataatatcgaattctacataaataatataaaaaagctgtatggtattaaacactttaaggtgctaaataacaatactctacgagtcaccataccttacctttcgcttcattgagctacttaatttgtgtatttggtatttatgtaattcttgcatataaaaaggtatttttgaaaaactaaggaacttctttcatatgtagaaaaagataataatatttcttttaaattaagaggccttattacgtgggatcctaagccttactaaatggggataagttgagaacttatttttttttattacatattaaccaaatattactatcaaataatttaattgataaatatt

SEQ ID NO: 209938 - DNA, 702 bp, Cannabis indica
gaggtagacaactcaagattaaccagacgagctttctctaaaatatcaagccaagattgcgtaataatatgcatgccaagtcatttacaataaaaagaaagaaaatcctaacaacaaccttaacgaaagatccattaagccactagtgatcaagcataaaaaagaagtgtgaagtaagctaggtttccaactcaaataaacatatgacaacatccacctatcaatgattattagccaataatcttccactaaaaattgagacataagtaccccattattcacacgtgaaataagagaaataatcaaacgaacaactatgacgaagcacccaaaaataagagaacatgctaccacaaaaatatagggccaatagacatatctggccgagaaagagatatatattactcctactaaagcaaattgatccatacaatgaaacatcgacgcaccaattaagaacatgacctgctccaactgccataacaataaaaaattctacttatccagtagatcgctgacaaatcaccatcattatagaaataaaattaacataaaatagtataaaaattaaaacaaatgaaactaggcacaaaatgaggcaaaccaagaatgaatcagacccaaaacaatcaccaatctctaccaaactcctaaactgagaagatgatgatgaacttttgccacaaattcgtgcccaaagcc

SEQ ID NO: 209939 - DNA, 607 bp, Cannabis indica
cgcccttccttccatttacatcaacagagaagcaaccttcgaaccccaccttgactttgaacctctctacaacatctttattacataaagtctcactgagaaataaaaatttgggtttcttttggacacaaatgtcaataaggaattgttgggcccgtgggttcccaagcccacggcaattccaactaatggtactcataattcttggtgggcttggaaaccaagacccaccttgtctacgttttttgaatttaccaccttagttgaatcatttgtatcattgtcaccctctgtttccattatgtcatttgcgaaaataacaggcccagtgtgtgagttagacaacaaacgtttcctttttaaatcagagatttccacaatctcttcagtggaaaattctgctgagttgtcattgaccacaataacatggtcttttatggcagttttttgattcccaaaagcacgggatgtggcattgacttgtgggattgattgactgctgtgatgatcacaatcttcctctatcattcccctgattttcgtatgaacattaatagctggagattctggtgtcgtctgtccggttgtgcatgaaccacccttgccg

SEQ ID NO: 209940 - DNA, 471 bp, Cannabis indica
atgagagagagagagagagagagagagaaaggggtagcttttatttatcttaggatttatttatagcgcaatggcttctattataaggcaaaaagggtatgtgttttcgccccaataaaaagttaacatcattattgttttattttattatttttgttctaacaattaatgttgccaaaacgtaattttgtttttgctttaactatctatcaagtaaactctctgccacttaattcattgtggtaaataaatggaagttgctaggtatttaatgctttcttttttctttttaaaattttcttttctttatcaatgatcagatcagatgagcgaatttttcattcatttattgtgatataaattatgataagaaactcataaagaatcccaactgaatagaaagcgattcaagaaaacttctgtctcaccaatttctcacaactaagagagctttttccacattgagaaaaa

SEQ ID NO: 209941 - DNA, 503 bp, Cannabis indica
aggcgtgcgttttctctccaggacccttccatggcgaagaggcggcgagcgattcgaaagccagcaatccgagagctgagtgtggaatctggtacacgcagtgagggcgatggtcgacagagggaggttgataaagaaatagaggatttgggagttgcagatgcgattgaggaggaagatggtgcgaacagggagacgattgaggctgaccaaggtgttgggcaggaaagtaacgaggagcaaaactgggcggacaaagtggaggccgatgacctgcagactcaatctcagagccattggaggaagctttcggccagaaattttcaggaccaggaaggccggctgagatttgaagaaccattgataaaggaaggtattaaaatcgcacaaattgatgcagaggaggtggttatgcaggcggctaattggagtgcagcagtaatttgtatggttctaggtgcaaatccaccttttgctgtgtttgaaggttttattcgaaggat

SEQ ID NO: 209942 - DNA, 616 bp, Cannabis indica
ctgtggtgcacgataacccatggtcctatatctattgtgacccaaattcaggatagaaagggaaatttgattttcatgacttagaaaatcaaatttccctagaaaaatgtgaatggattcatgaactgatgctgtgcctttttagaagggaatttaaaaaataaaattaatttacataaatataagtaaaaaacttaaaaaaaaatatggtatttaaaataaaaacttaatatgtatagtatagtataggatatgccacctttaattactataaaaaatattaaaattctcttcatattttttttttaaaaaataaaacaaataaaattacagtgattgtcagaagtcaccggagtttgctgtcggtgtcgaaaaagtcgtgggagtagctgtcgctatccgaaaaagttggcggagttgcttccgaaaaaattgtcggaattggtattgttgcgaaaaaaatcactaaatgaagaaactggttcctcatcaggaaaccatgaggaaaccagttttttggtaatttttctggtaattttcggcaataatgccaattctgacaacttttctagagtttgctctcggtactgaaaaattcgtcggagtagctgccggt

SEQ ID NO: 209943 - DNA, 510 bp, Cannabis indica
gaactcatacaggcaaaaaaaaaaattctttaatacattacctttattattgatttttaaatagttgcataacagttgatttaaagttacatgtcatttcataaatattatcagaaatgtaaagcattagcaacattatatttgacacattaatgtgaagttccaaaaattttcttattaaattgactaaaatattgaatcttcaactagttgcgtaacatgtgttatacataacacattaatgcaaaagattcaagtaacactactacaaaataaacttttagaggcaattttttttagcaaattaataaaattttaataagaacacctacggagtcagttattttgtaataatcgactccgtaggtgataattttttttaattttaatgaaataaccgtacggggtcagttattttgtaataattgactcagtatgtgatttttttaattttaattaaaaattttaattaagaaacacatatggtgtcggttattttgtaataactga

SEQ ID NO: 209944 - DNA, 504 bp, Cannabis indica
ccctacattgttgcacacctgacacctgagtaagcaatagcaatgatcagaagtaacttcccatttaaagcaagcttcagagttcggaaagtcattcagccagatgttattcacaaaaactctatcaagctttgaaaatatagtatccccaatttcatgcttgttcgtccaagtataaaaggaaccagaacaattaaactcctcaacttggcccaaagcaagccaatcttgagcatccgcaatgtctctactttgaataggcctacctccccatctatcttgatagccaaacatagcattgaaatccccaacaatcatccaaggctcattcggactaccaagactcgcaagggaatcccacagattcttgcgatcctcaatcttattaaagccatacactgccgtgacaagaaaaatcttcttttgcccacaaactttaactttgcaatgaaccaattgagaagattcatagagaatttccacattcacaaacttatcctgcca

SEQ ID NO: 209945 - DNA, 910 bp, Cannabis indica
aaaaaattatttatttattatagtaaaaatttatttagatagttaaaaaaatatttaaaattttaattttagtaaaactaattttatgggaataagcttctaacttttttttttctttaaaaaatctagatttgtttaagtaaatataatattttttttagtttaatttctaaattttttacaaaataattttatatttttatagaatttttaattattttttaagatatcagtttataaatataaataagtttgatttttcttcaaattatttattagattgtgaataattttagtttcattttgtaaggtgcgtgtttataaataaaataaaatttaaaaatatttttttaataataatttaggtttattttaagtaaacttaatattttttaaataaacttaaaatttttataaataatttaaatttttatcagtttttcaattgttataatttttttttaaaattaatttttttaataaaagagggtaaaattttgcattggtcaaagttcaaggggtaaaatactaacttttaatggcaaaagaaacagaatctaacaaaaagagcataattatgcaactgttatattttaagaagaattttaacaagctgcatattttaagggacaaaatcaagtaatatcgaaaatttaaaaggtaaaaatactatttttttttgtttgtgttttaggtgtataaacaacttttttagctaagaataagatatttaggagtgagctactttatacacaacttactttaaaatttatagttgacccccttcattttaattacttctttttggcacccctaaagttcaattctaactccattttttaagatatattcatattttcataagatacatcataaattttgtgttgttaaaaaagaaaaaaacattaca

SEQ ID NO: 209946 - DNA, 699 bp, Cannabis indica
aaaaaaaaaaaaaaaaagtagaacatgatgtttaggaaccatactctgtacagcaattgagaatattcttgaaaatattattacacaacaaacgtgcaatttttattttattgggtaaattaggctgaatgcctaatgttttcgaagtgttacaattttatacacttttttttttccttttgtggtaaatatactaaaatatattttcaacaagttgacttcaccatcctaatttccatccatcacatgaatttaacactacccaagtctatatgcaaatttttagctttcacacaaagatgaaattataatttattttttattaaaacaataatacacattgtaattatttataacatgtcatcgttagtatttatatgactgaataagattttagatacttttgaacatgtgttaaatttatattagtacacataatattattattttaaaaatataaaagttattttaaaatttataatttttattaaatattttattttttatttttttttataattttgtttaattttaaaatgaatttgaaaaataatttttaaatgataatattaggtgtactaatataagtatgtcacgtgtaataagcaactcataatgatagttaatcaaataatactttaaatttgttactagtttagtattttgaagagttttaccgttaaaatttaaacttagaaa

SEQ ID NO: 209947 - DNA, 509 bp, Cannabis indica
gaccccccaccccccccttcaagaagaatctgtgctaattatgatgcagctattaaaccaggacaggcggagtgtgggcgttgggtttttatggcgtggctgggaaggtaatttgattccagctgggatggtgtacattcccagccagtgttcggtggttgtggcgaaggcctgggtgatcctggaagctttgaaggtgctacctgggattgaaactagaccttacgagatacaattggactgcaaaatggtcgtggaggctctcaagaacccgaaaaaccagcttagtgcagtgggcactattctacaccagataaagtttctaatggaggactctaatttttcaaacattacttttgtaaatagaaactatcaaagttagttgttcagttagaagaatggcagttagattgccaactgtatgattgtatttcttgagctatataagctcagtcactgtacacattcacaattaatgaaaaatactctgtttttctcattcactttct

SEQ ID NO: 209948 - DNA, 565 bp, Cannabis indica
ctgtgagagacctccttgtgtctgtgcaaccaacatagtctgagtcaacaaagccttcaatttcacagccttctttcttactggccttatagattaaaccagtgttttgggactgtaatatcctggaaaatatattgatattttaattagacatattttattaaatatgtgattctgtgggtattagagtaggattataagcctacttaaactaaaaacgagtcgattagggaaataagaataaataaagcgtaaattattaattacgaagattatattggaagatgtgggtatcgtagataccataatttgaataaaatattttcaggcttggcaacagtggaacttgacggggtggtcaaagatgtcacgacggtataagatgaattatttagaattggaattatatcgggctagtttagaagttgtcggtgtagtggattagttagaaaatttacctagatacccctaagctttatgttatggaatgctttattggaagggcaatatggtcttttactaagtggaatgtttgactttataagagttgatatttttggctgaa

SEQ ID NO: 209949 - DNA, 683 bp, Cannabis indica
ttatattggataccatgaatgatgattggcatagactcattacactatcacatcggtacgactagagtagcgagtataggctgatattatggtcaatagtactggcgtacgaatgttttagactcagtatgcgtgggacacgagatagggttacgattgggtgtatgggtgcctaattataatttagtttatgtttatgatatatttatactcttcttactgagtctgttgactcacagttactgtttccatgtgtaggtaagggcaaagctaaggttgaataatagtgagtgcgagcagataaagattgtacatgttggggaagttagacctagagcgtacgatctttgggacatcaagttgtattttgagtagtcattaggcgacaacttttgtatcaaatattttgtattacagttgttaaaattttaaatacgggacccggtttataaagaaattatttactttcaatttaagggtaattaagtaaagttttgattaatcacgattttcaactaacccgttgattaacaacaggttgcatagttaatataaaatcacgataacacgcctaaactagtagggtgttacaatatatgattatagctctctatacatatgtgaatagaattataagaagaaaggtaaccaccaaaagtttccccaccctaatgaggtgcttg

SEQ ID NO: 209950 - DNA, 533 bp, Cannabis indica
ctttctttctaattatatatataggttaaatggcggcacccaaaattttaagtttgttaacggcataaactcaatatttatttttagcggcataagtacttaatatttgtaaaactgtaattttcctccagttttgtcaatacaaattctgttttgaatttattaaaagaacatttaaaaataatttatactacatgtttctgtctagacctaatgatcaagaatctagaccttatttgtggcctgtttaagaaaataatagagtttatgtcactaaaaataaacattgaaaacttacgtcaataaaaataaacattaggattatgccatttacaaacttaaaactttgagtaattatgtttcaatttttatacacttaatttatttattttttggacaaaatccctttaatttttttttaaaaatttaaggtattcgattactattgtatcgacttcgaggttttattattacatatacacaggtatatacagtagtcatcatctagtcaatatttaacgataatatttaat

SEQ ID NO: 209951 - DNA, 765 bp, Cannabis indica
taaagtcaaatgcattaagacacaaatttgactgaagcagtgaacggagagatggagattgaacattgaagtgctccaatgtaagcgttaatttatttaattctagctatgagttatatgagttccaatgtcagctctgtcatcgtatatcagcagcttctcacacttcctcagcccccacctagcaacggaccaacttctcttcacctccactcgaacaactccacattcaattaggtatatataatgctatcctatcttcaaaatattattattgttattgttaatattatttatacaattttatatattattatcagttcaatcagtattcccttctatcttttcgattaaatatattgatgccttacttttttttatataaaatatgactttctataatggttgttattgtttctgaagaatataattttgtagttatggtgtttgattcaatgtctcctaggaatatatattgggaatgttgtcatgaatataaattgtttactgcaacaagtgtagggaacctcattttattattgggatttaataaagaagtagcctcattttatttatcatatgttggagtgccataatttattttcctttaaaaattattgatatattgggagttcttcttggtgattcaaccacactttatcctgatataaaagaaacttacaaaatatttaaaagaaagagtaccataatttttcttttctcatttcagtatagtagtcttctgtttatacttgcaggtttcat

SEQ ID NO: 209952 - DNA, 1175 bp, Cannabis indica
aaggcttttgatcgtgttgagtgggcctttctttctgccattctccatcattttcactttcctagtaagtttatcagtttaattcataaatgtatatcttctgttaccatttgttttagcattaatggccagacctctgacgaaattcaccctatctgtggaattaggcaaggtgatcctctttcccctatcttttccttctttgctcagagggtctcactacttgaacaataaaacataaaaaactactaaaatatgttctaaactaccctaatgaacgagtataaatcttgtttatcatgtatactcttctttaacctaattaaccttataaatcaatttctactaaaattattataaaattttaatatttaacaatttaatgtaggcacattttggaggggttacatgatttgagataaatttttaagttttacgatccagaaattctcacagtgcacggcaacaacgatttagagaaggaagagtcttttaaggttgcatcagaaagattagctcattgattatcattgatgaatagccaacactaaatattctttatttcttgaaatatcgagtaaacactacttaagagataattttttttattataatttgaaattatttttacactacatatatgtatatatatattttagtgctcattggatgctagatgtcgttgcgctagggaaaactatccatttagaccctatagacgaccacaaagtttcccaacaaatacatgaaacatcgaaaaggtaataatttaattactctttatgtaacaaatcttttaatcaactgagttatatatgtgttaattaattgaaatattaatataatttttaaaacagtgcatacgagattttagcggaagcaaatatgtttattagggtctctccaggaatttcactagtaagttgtctaaaataacctaaaaactaagaatgtggtttttatgtattgaaatacatgagtgatatcgttgcacgtgcaaaccctaaccattatttaaatgatcaaaaaattgtaagtcttaattatcaattatcttatttattatattaataaataatatatatatactaatataaatatttacttctttttacagtttagagaaaagaaaacatatgatgtaaaaattgaagtggatagaacaattgctggcg

SEQ ID NO: 209953 - DNA, 564 bp, Cannabis indica
attttaatttttacctttaatttactatccttcaatttatatccaattttataagtcatattctcatgatatgcattaagaactctaattttgataactcatgtaaaattatatttagtactttaattataaaatagattatttattaattaaaattatatataattaatgtataataaaaatatgggactttttcatttttatacttcaaaaaagttttttttttttttttttgtatttttacaaaatacataaaaactcctataacaactagccttgcaacttaaattgcaacaaaaaatcgtataaaaattttaactgcaactagagctgcaaccactttagaaacttaaactgtaaattaaaaaaaaaataatatataaagtaattcccctataaatagatattttcaacttatcccattattacccaaccaattttcatcctagcctcaaaatacaaatgcccaatattattactagatccaattcagagatctccttcattctcactatctaccatattctctcttttctctctaaaaagacaagagagagagagaga

SEQ ID NO: 209954 - DNA, 703 bp, Cannabis indica
cttgtaagagtcagccagggattcctcacagatttcagattcatctgaatcaaaaaattctttttttatttaatggtattattcagatataccaatctttcctttacttgtgaatcaaaaaaaaaaaaaaaaaaaaaaaaaaaaaaaaaaaaaatagaagaaatagagatattagtgcaaaattattagaattctcttcatcaagtttcatcatcactccaagcgacattgaagcttttcttactttttttttcagagtatttgcacattcagattgaatatgtccaaaaccttcacactccttacactgaattccttttttattattagttactaaaggtttaaaataagtatttccttttgaaaatttggatgaattctttttagtacccatatttttcacatatttatgaaagttcttggttaaaaaagcaatttcatcatcgcattcatcatcagaactttctttttcaacaacttttaatgcaatacttttacctttatcagttgtggatttgagtttgtccttctacttgatttgttgatttaattcaaaagtacgcaaggaacccattaactcctccaccttcatcatgctaaaatcttttgcttcttccatatctaaaagtttagtgtctaacttgtctagaagaactctaataatttttctaacaataactaattcatcaagcttttcaccaag

SEQ ID NO: 209955 - DNA, 1326 bp, Cannabis indica
attaccttatcctgaaaaaagtcttggacaagtctaaccacaccttgaccaacaatatgccaacatttataatagaacgttggtttcataacatcggggcccggagacttatccaggtgcatctgaaaaatagtcgaacgaacttcctcctccaaaacaggttgaagcagagcaacattatcctcataacttatcgagggctgaatcttatcaagaatatcatcaccatgagaccccaaggaatggaagatatcagtaaaataattaaccattacctagggtaaaccagtttcccacataacccaattgcccacctcattcttcaactggtgaataaaattatttcttctacgagagctggctgcagtatgaaaatatttagtgtttcggtcaccctcctttaaccaaaattgcttcgaccgttgtctccaaaaaatttccttttggtgataaatctcagcaagcaatctttttgcctcatggtactgagaaactgactcagtatcagtacaacctttaagaacaccaattcttcttttgcaactttaaatcctctctttaaaattaccagtcaaatgttttccccacaagctaagaggttcttgaagagccactagtttatcaataatgttgctagacccacaacctgcccactgctcctgaaaaatagaaaagcaagactcttctcggagccaggaattctcaaaacaaaacgatttcgaagagcctgaatgaagccaaaaattatggcctaaaaacaaaggacaatgattagaggtggtgaaaacaagattgaccagccaggaattcaggaataacttcacccaagccgagttggcaagagccctatccaaccgaacctcaatccaactatcagagcccctaccttgatcctaagtaaattggtgacccaaaagatccaaatccactaaatcacaatcgaaaacaacttgttgaaatatctcaataagccaattaggatagggatttgcacctcttttatccacctaactcataacattgttcaaatccccaataatgcaccaagggagagtcgattcttcctttaacaatctcataagattccaagtgttccttctaagaacacgattaggttcaccatacatacctgtgagcctccaatcctgtaattatgaaccaccaaatcaatgtgactttgggaaaagtctctaatttcagcatcatttttatctttccataacatagttaaacctccttccctgccctgtgcatcaacagaaaacattctctcataaccaagccgagtcaataaaatctccagtcttggtttcgaacataaggttt

SEQ ID NO: 209956 - DNA, 774 bp, Cannabis indica
aggaagagggtccatgagaagaatgctaccacggacttgcgaaaagtggtcagataatcccatgagaaatgagatgacatactccatatgatggtgttcttgcaatctttttacaccactacaggtacaacaattgcaggtacaagcaggactgtaattagatagttcttccttaatggtcttaagcttagtaaagtacatactaatgctttgattttcttgtctcagattcatgagacttttcctcaagttgtatatatgaggtctatttctttgatgaaatcagacctttaaatctgcccaaatggctgtcgcggactcatcgtaaagaatgctggaagaaatatccttagaaaccgaatttagaatccatgatatcacaatattattattcctaatccaagcattataaagaatgtaatcggaaggaaggggtttaggaatactaccatcaagaaagcccaatttgttcttgactgagatagagagatgcatagctctactccaagagatgtaattatcttggccagttagtaattgagatacaagaacattacctgggttatctccatggtgaaggtaataaggatttgtaggatcttcaagagggttctttacgcttccaatttgcagactggggttggtttgaacggtgggatttgtgttgcagagggagttgaatccccaatttcagttcgagaaggagactgatcttcgcttgacatcgtgaagaatcaacagagaaggatagcaaaccgttagattgtgttgcgc

SEQ ID NO: 209957 - DNA, 1110 bp, Cannabis indica
atcggtaagtacttacttttatacatacgtgtattattctgttgtaaattaattaagcgaaccattagttagaataaaattaattaattaattaatgatctttaattaaataaagtagaataaaagatgaaaataagaagagaatttaaagtagaataaaaaaattaaaaaatgtaggagaaaattaaagagagaataaataatatataatatatagatagatggatagatagattggtgcaattaaatattgagtgttatgtattttcatttaataataataatagaatatttctgaccatcataaagtgttattttataataatattaaatattactaatacctaataataatgatctaactcaaagtataatgacaatcctcatatttcagaaattcaattaaaaaaaaaaaaagaagaaattaagttgtgaatttgaggcaatcggctatatatagggtaaataccattttgaaccatgcgttgcaaaagttaccaattggactttctgttttgttaaatgaaaaaatagaccctacatttttcaagatggtacaaataggatcctgaattgattttttgtcaaaataaaatttaataataatccaatctaaaagtgttatgacaaaaatatttatattttctatatatgttcatgttaggaattgtcttcaagttgattatattaaaaaaaaaaattgtgtaaaattaagctcatggtcctatttttaccattttgaaatatatagggtccattttgtcaattaacaaaccggagaatctaatcggtaacttttgaaaaaacacagagtctaaaatagtatttacccatatatatcgcctaaatcaactgttacattaaaaatgtatgtgggtcaaccggctagggttctacttatattttagaaggttcattctaaatataaagtccactttgatttatgtaaaaatatagctcgtgccaaattaatttatatttaagggtaaagtttaatatcgtgccgaatttttacagactgaaatataaagtacaaaaatataagtatgattaatatagactcaaaatttggtatttttagttctactatctaatattttttgaaagcta

SEQ ID NO: 209958 - DNA, 958 bp, Cannabis indica
taacatatttttgtaattttttctcaaatttttgattatgcaagttttaatataaaataagtacattcttatttttaaatcacttttattagaatcttatctttttatcctgcaatagtacttaaagaaagggaaagagagtatttttgatgatcatttcaacattgacttttatttttgcttgtgtgacttatcactttttaaatttgagtaggacaatttggaaaaaactatatatgtaccttatatttatttatatgtagtatccatttgtaattttatatattcgcttgtattgcaactaaacaaattacttgtttctaatagctgattgatctaatgtaaatgctcacaacttctaatgagtttttacattatttacaaatttttgacatctctagagcgaggatatatattacattaaggagaaatacacgtatgtagacttcaattgtatatatttatttgtttacatgtatttaatgtcaataaataatttactttctaattaatgtagtcttgcactagtggcgtaaggaatattcaacagcgtgatcaaggttatatttctggatatgctcctcgaactagtgagaaaagatcagaagtgtctgatgatgtcataaataatcatgatagttacatatctggatatggttctaaagaaattgagaaagagaaagaagtgtctaatgatttcattaacaaccatcaaggttacatatctggatatggtcctggagctagagaggcagaggtgtctgatgatcttgtaaataatcatcaaggttacatagctggatatggtcctaaaactagtgaaatagagcaaaaagagcatggtgatgctgtaataaatcaacattacactaggtatcatggaaaagataaagagaagattgaaggcccatgcacaactacatataagaatattgaagagactaatgaccatttatac

SEQ ID NO: 209959 - DNA, 551 bp, Cannabis indica
agagcgtctgcccacttgttgtgctctgtggcagtttattgcagttaagaagtttcactttgtttttttctggtttttgctctgttttcactctaaccgtacacaataactgtctcttttccctctggtttttcgatcttccttgcctggttttactggtttaaccatggatccttatacacataagatgaaagagccattgaagttgactgaggaagaggaatctgtgtttgacttgtctgatatgggatgtatagaccctcctgcgactgaagaccatgttttatttgccaaagttcttactaacagaaaagtttggttgtccactttcaaaaatcaaatggcacaacactggaatggaaggtttcctgtcactattacagaatcttctgatatgttttctctcagttttggatgcgcaggagataaggcaagggtccttttaaaagagcctttccattttcagaatcaccacattgtgatgcattcacccttgcctggccaaaatgtgcattcgggtaccctcatgtacactcctttttgggttcaga

SEQ ID NO: 209960 - DNA, 476 bp, Cannabis indica
tttcttaattggagagatatgatcttttatctgagaatattggaaggcaatccctgatctcgcgcgatctggcaaaaaataggaaactatgctgggcttctagatagttgttaaaggtttcttccggttacatgatttcatgtctttcagaaaatgaccatgctggatgggatcttacctggacaagttgctcattcttcaccatgaaagactgatgatgatctatggatccaacccagttatctcatttggctcgctattggacctggaacatttaagtcgtatttgttatgggaactccacgtgtccctatccgaaaatacgaataacattaaccatttcatgaataataaaaaaggataataatgaaatatcaatttcaaatatatcttcaaactaccttttaattttaacaacattgcttatatataggcaatttaggatttttactcgatgacctatgtattattgtaccc

SEQ ID NO: 209961 - DNA, 704 bp, Cannabis indica
atttattaacgtggagcgtaattaaggccgataatttcagaaaatattattacaggatttgaatttgaatataattaactgccaatctatgttattataaatagggacaaaatgtactgaaaaaagggatggaaaatccttgagaaaaaagaaccctagttctgtattagaagagtctgaataacattgactcgttgactatgcagagttaacgtcaaaaacaacataaaaaacttggtgttatttttgcttcttttattttctataattttttttgtgataaatctatcacgaaattaggctaattatcgttaacgaaaatttgcgttaacattaattttctaatttaattaaatatatctagaaaaataccaaaaagtctaccaagaaaagatctatttagataatttataaagtaattacttattttctagttaaaatataatatattttagtctatttattttaataaatcattaatgtaaaatttaataacattaattttcaacttaatctaatttttcaaaattaaaaattttcgaaatatctacacttaaaaaaaatgtatttcgaaattgtataaaaaaaaatgaatcttaaaataaaatacattatactttgaaaataattctaatttaagttggtctaaaattgaaatttttctaatttaaatatgatttttaatttaattaaattcattaaaa

SEQ ID NO: 209962 - DNA, 504 bp, Cannabis indica
aaattcatccaagaattgcagtaatgttgtggagagttttgaatgagactcttcctactaactctagactcccattaattttacataaagaatgcattttttgtgcaaaccatgaagaaaactatcttcatctttttcgtgactatgtctttgtgaagacagtatggtttgttggagtgtttccgtgtttggttgagcacatcccgagaaactcaaggcttgtttggtacgccgtattgtattgtattgtattgtgttagattgtgttgtattgtgttgtattgtattgtattgtattagtattatttaatacaatacaatgtttggtattgacttgtattaattgattgtgtaaagttataatatacattttcaatacactcgatcccaacaccaactacgagtccgggtgccgggtctgggtctggtatcgggtttggatccgagtctcgggtccgggttcgggttcgggaaccgattagggtccaggtccgggtccaggtc

SEQ ID NO: 209963 - DNA, 866 bp, Cannabis indica
ttagcatgtttacagcaggttttaaccaacgctccccactgtcataggttcccgaaggcaccagcagtggctcaaattttcttgagttagcgtttttccattgtgctaaagttaaacgagcagtgaacatcacatcagctgcagagtaagatttctggttccatagtacaccatttcgagcttgccatatagaccaacaaagcatcacagcttcctctaacaggttcggtttatttctgtcagcaacatccttaaaccagatgaaaaaactgtcgctgtgggcaggaggagtggccaaaccagatcggttccagcaggatttgctgaagtgacattgcagcaacacatgtgtaatcgactcctcctccgtatgacaaaatgggcatgttaattggacaggtacatgcttcgaatagagttgggtacgagtaggaagacaattggttaaagccttccatatcaaatgtagaacttttggtgggactttaatcttccacaacgtcttccacaccttatcctccatatctgaattccatgccccttttagctcttggatatattgataagcactttttactgtataaaaaccagcagtgtttttattccagtaccaagtgtcttcagtgattgtcgaactcaagggaatgcttagaataatttcttggtctctttcttcaaacatatcccgaatgagctcttcatcccacgctctttcattcattttcatcaagttttgaactgcataagtgttcaaaccaggatgagtagaaattataagaggattagagtctattggcaaccagggagtccctaaaatactggtactttgtccgttaccaatgcggattcgggcaccatccttgata

SEQ ID NO: 209964 - DNA, 667 bp, Cannabis indica
atttaacaacatatttaaattttgagaaaaccctaagtcgcctctgtgcacgatacggaaccctaagccgccgcttcagttgtcttctccggccaaccctcgtcttcggttctctatccttaatcagtgatattatcatcgttccctcgcccattctcgacatttccaggagggttattgctccctcgttctcagctgcggacaaacctccgtcaagtccgatgacggcgtcgctcccttagccacgaatggatctccgttctcgacggagcctcccttggccaagccctgtttgggtccgaacgtgtgctggtctcttgctgagatgcgggattaggcgctggttttgaagattggtacgactgggttagttgtttgtgatgattgggctccctgcgatctttgtgtttacgtcgagatcgttattgatatttttaatttggggggcgattcttgatccattgataatttataacaagcagtaaactaatataaatgatagttattagtttgttttgagttttggttttactgtttatagttttatttcatttattatttttattgttattagtttaattcaaattagtgttttattgggttataattaatagttttatgtgttgaaactacttaggttttctcattcgtcttgtcttttgacatg

SEQ ID NO: 209965 - DNA, 1325 bp, Cannabis indica
ttagcattagtcaagtttgtgattaggtttatactattagctttgatagtaatcatttaatttattgttataaccctgatagtcaaatttgtgatcagggttataatattcttgatgaaattttcttgcatgggctcagatctagtgacaattgttatactctctaagcttacatttaatttatccttattttgttttttataggagttggcccctcttgtgaccaactagactagttttgttgttgtgctctagttttgagctttgtgtaatttagtttaaagttcatcaaaaaaaaaaaaaaggaaaaaaatggcactagatcgtggtccccccacgggcttcgtccatcgtcagtgctaacttagaaatctagactagacttctaagctacatccgctcactagattggcgagaatgaataagtagttaagtttctataaaagagacacaacaaatttatagtagttcactatctatatcacgatagtaatatagctacgtctactttgagtttttatttctcatgagatggtaattaccacaatagactaaatgatagtaatatagctacgtctactttgagtttttatttctcatgagatggtaattacaacaatagactaagtgtcaaaagttctgaattctagagagagaaaatctagattgagaagctctggccttgtggatagttttctgaatgtgaaaaatgaactaagggagttctcttttattggtgaatgaatcctaaaaaatagtagaaaaacacaaataagatgtttttttaccgttgatgatgatctaagagtaaaaattagctcttggtgggggtggccattttttggagcccgacgagtcccgttgcgggtaacttggagcttatttttgtaactcctttgagggtaaattttgatgacaatagcttcaaaactacgtttggagtgccagaaatgacttgatagataattgaattagtttcaaaatacaagttgaatcgtgtcaatcagatcaaaattgagtgagttatggctattttactgaagggagtttatgaactaggttgacatcccagcacccaagttgaaatatgatgtcaccctagacgccgagtaagtgtaaaaacgtgcaagggatgtacttttagatgctatattttgacatcacttaatctatttgtgtgttatggtgaagctggttaccggttcttggagatgttgctattttgcagaaatgagagacttgatactcttcatttctaggtgagctggaaatgagaaattcaaagttttgaattttattttgctgacttcatagatcattgtcat

SEQ ID NO: 209966 - DNA, 959 bp, Cannabis indica
tttctttttttttttatcaagaactaagtgtcctcaggtttataactcaaattagttagagataagctattttttttcggaatgaatatcccaagactacatatagtagaagctaactaatatatattcctaagtgtttcgttaattgtttattggtttctgtaatagcgatttcacaagggtttatgttgttctatatgctctcattctttcaatcattcgcggtgaaggtatgccattattttgtaaaagatacagaacaacgggtgttgcagaattgaaaaaggaaaggaaaaccattggcttgacatgccatgaaaaattaatacaatcagctaagaaaccaaaaaaggaaatggagttgcatagaatatatttgtaccagtaacaactgagcatagaaatatttgaaaacatctgatggacaaagcaatacttaccccaaagtgcagcacttccaagcagaggaggaacaggtatatcctcttcggatttctttatgctcctgatagtacaagagagaaatccatcattagtgcaaatgctttttagttctaatcataaaataagaaatccaagtatttatgtaatagcacaattctgttcttcatttctaaatgatttctgagttctaagttccaataattacatttgcagaagaaaatgcatgtaaactaatagaatcagatatggaattgatagacaccaaataagcaatatgccacgtaagcattgaggggaatttgacatattgttctaggcagttacagagattattagaatgattgggaaggggaaagagttgtgaaaatgggtcattgagggggggaaaatgggtattgagttgagcatttgctcttgggagagttggctgtctcttgaatatcagccattgtggagagttggcggtctctcgaataccagccattttcatggtattgttctcggtctttcattaa

SEQ ID NO: 209967 - DNA, 1145 bp, Cannabis indica
atccaagaccaatcttctactccacatccattacataaatttctttcttatgacaaactttctacatctcataaagcgtttatccttgcagttactgctctctttgaaccaaaaaattacaaacaagctagtcaatacaaggtgtggaatgatgctatggacaatgaaatctttgctctcctcaaaaataaaacttggaccgtgatcaaattaccccccaacaaaagagctattggatgtcgttgggtctacaagatcaaatataatagtgatggctcggttgagcgatgcaaagctcgtcttgttgctcaaggctacacccaacaagaagggttagatttttttgatactttctcccctgtcgccaagatggtcaccttcaaacttctattggctatttcctccatcaagaattggccgactcttcaacttgacatcaataatgccttcctcaacggagatcttcaagaagaagtctacatgacattacctccaggcttcacccctcccaacactgaagacaactccaatttagtttgcaaacttcataaatccatctatggtctcaaacagtcttctcgacaatggtataaaaagctttctgatgctcttttaaccgaaggcttctcccaatcacaagcagattacactttattcaccaaaggatcccataacaccttcattgctctactcgtctatgtcgacgatattattatcactggacctaacatcaacttgctgcatcaattacaagaatctcttcatgcacagtttcaacttaaggccttaggacctctcaaatattttctgggattcgaaattgctcgttctcccgaaggtgtctttctctctcaacgaaaatacacactgcagctccttgaagacactggttacacaggcagcaagcctactaaaacccctatggatcctcgaagtaagcttgatgatcagcaaggcactctcttagccgatccctcatcctatcgacaactcataggaagactactgtatctcactctctccaggcctgatatcactttcgctgtgaacactttgagccaatatatgtcttctcctcggacacctcacttgcaagcaattaaccatcttctcagatatctaaaagggagtcccggccaaggttt

SEQ ID NO: 209968 - DNA, 803 bp, Cannabis indica
tttagaggcacttttttcaacttagtattaaataactgacgacatagggttggaaatatactgaagggaattttgtgcctcttttggcgtcggttatttggaaataaccgatgccaaaaggggtttaatgccctacctagccctttgtcttcctcattctatcagccaacccagaaacccccaaactagagaaaccctaaaccctcttcgccaaccaccacaaaaaatcacccccaattcaccattttttttttttaccattttagatcatttttttctttctaaatcttctatttttcatacctaaaaatatcacattttccctcattttctagggtaaactgaaggtagaggtaatggttgtggtggttatacctccggccaccgttttagtggagaaaatattgtatctcaacgtccattaaggtataaatctaatttctactaattttagtaatatacattgctttattttttattttataaatttttttagggtttagctagtaataaattaactagttactcataaattatataattagtaagtagctaaagaaagaaatttataattttgtagtatttctttatgttgcaggttgtgaagtcaatttacaaggatccgacttatttaatgttgatcagtttctagctagctcgaggtatacatttactaatttttattattaattaattatgaatgcttagtagagtttaaataccttaaatatacattcgtagttaagtaagttctgcaatatattgtactgcggccgaattgatgggtggtaaatttttatatt

SEQ ID NO: 209969 - DNA, 915 bp, Cannabis indica
cgaaccaacacccatgtatgattctagtgtagagacttcatctcttcatctatttccaacttccatttcttgcagtcaacactctgcacgacttctctgtaagtgcatgggacgtcatcatcaattactggaagtccaaatgctaccatatttttgtatctaccaggctttttaatctccctttgaaatcgcagagttaaaggagagcaagggagagcgagagagagaagagagaaaaggagaaaaagtgttttttaaaatttttaaaatcgtaaaaaattgtttttaaaatttacataaatttgattttaaatttaaaaaatagaaaacaaaaatattttaccgaacatgattttattttaaattgtcgaatttttgattaaaaaaacagaaaaactatttttaaaagggctttttttagtattaaccaaaaaaagtaataatattacaaaaatacttccagctggccaaataaacaaatatacagcccaaataaaaaaaaatacacaaataccacttacacacacattcaacccatgatccatgcttcctggacaactatcgcgcaaccatgcagcaacccaatgcaaccaaaacgaaaactcaactagaaagagaaccaccattaattccagcgacttcacctaagaagacgaccagaatcaatcaaaacatgggctgtttcgaattcatgaaaaaaagtgtagaaaaactactacgaaactaaagtttaactagaaatccagtttaatttgcataatactaatgtcttaacttcaatttttagatttatgaaaggtaaatcttaaaaagttgaactggagttcccaaacaatccaactcaagtataatccaaaaaaaattacatcaatactatagtaaaatatttatcctagtgtatttttcgttgttttc

SEQ ID NO: 209970 - DNA, 684 bp, Cannabis indica
gttgaaagatcatgatatgttgtcaaaaggcattagaggtagtcatatttttttccatccccttaggaattctaaaaaatataataacaaaaaataatgtaataaataaaatatttacataaacaaacattcagtagaaaatttttcttaaaacaaaaaagaaataaatatataacaacgtattaacgtaaactaaaagaaaaaaatcacttatattataatcatgatcattattatatattgatatcgagcatttttttttgttaaaatttccttaaagttatattactcaatttgtaaaaagctataccttgtttcataaataagctttagctatatgagaatttccttaagctttactcaatttggcgggttgatagtataagtgttattcctcttgtctcgagtgatctaaaaaaaacaaatgagtgagcaataataaaaaacaatgtatatttcatgaacactaataaataaatatgaatgatataaataaaaaagcaataagaagatattcacccaaggaaccttgaagccatatcaaattaaaaaaaaatgatactaagaaaggttaagaaagagaggaatgagtagcacagaaatacaataaaatagctctctaaataagcctccttgctatttactttcaaaattgcagcaaggttttcttttatggtaattatc

SEQ ID NO: 209971 - DNA, 768 bp, Cannabis indica
aactgagctgtttactttgttaaaattaccacatgtcgaaatattataagtctaaattattattttaatttaaaaataaaataaaataaataaattaaaatatttttttttctttttttatttctttttctttcttcgtcttcttcttctcactgccagaagccctaaccaaccaacccccaacccaccaactccaaaccagcaccaccatcacgcctgaatagccatgacccaaattgagttgcaatcacaacccaaataccctcaaagaaaaacaaaaaaaaagaaaattgcaaaactcatattcaactaggaaagcttcacaagggttttcgatatcgtgacgattcgagtcccttccaaggattgtttcattctcgagaaccgacttcgaggccacctcttgaactggcctcgaatctgaaacattgccagagtcccgggcgacaactttgacgacgatgaggtgaagaagcttgtgggaccccaagcaacgaagattctcaggtttcgttagacaggcgtatgcgatggcgagtcattgagcccagttctacacagggaaaagcttgtgaagacgtttgactctgttgggtttgtgaattttctaaaccttgctaagatgacgaggccgagttcgaggaagaagaaaatggttgatgatgaagagatgaagtggagggaagaataaggataaggttggaaggaagggtttctctgttgtagaggttgttgaggatgggttaatggaaggcttctggcagtgag

SEQ ID NO: 209972 - DNA, 1091 bp, Cannabis indica
  modified_base (981)..(981): a, c, t, g, unknown or other
actgggacaggtaatttggctccgcaaaaaaactcttattttaacaatcagttagttaattttatagcctaacattatgcgtgtatcttgtatatattactatgattgataatgcaaaagtcacaaaatgaatttccttcatggtacttgagcagtttattgatagtcatggcttagtctttcgtctttcttgtccacacacatcgcattaaaatggtaaagtcgaaagatacataaaatctatcaataatatcattcggaccattctaactcatgcttcaatgccaccatccttttggcattatgctctatctatggcgatatatcttctaaatatccttccttctaaggtcttagattatttattacctgcacaaatcatttatcaaagtgacccttcttactcgaatttacatgttttctattgtttatgtttttcattattttcctccactactatcaacaaattataggaacggtctttcccttgtgcctatcttagtccggctccaaaccattgtggctcaaaattctatgatatgtctagtggaaagataataatttttcgtcatgtgcattttgttgaaattgaatttccatttttgaccctacacaaaaccactcctacaaattatgattttctgagtgataatattgatccatcaatcatgaatgttattctctcagaatctagcaccaccaaatccacaacctgacccaacccaacgacccaactctccacctattcctcacaatgaggcacacgctcacacgagcccagccacccccacttctcatgctgctaagtccaggcccactcctcatgtagcccagatgctgcagcagccccctccaacttctctcctatcttggcctcacccacctcacatggccccaatcccctggccccgaattctatcgtcacatacatcaatgtcagcaccacactcctctcttaggccctaataccccatcgctacnccgcatgcaacttgtgctatcaatataagccaaattctagtactctaccatgtcatgcaaccacactaggacatttttcctatctaaaaatcatgtatgcagtcgtgctc

SEQ ID NO: 209973 - DNA, 779 bp, Cannabis indica
atgaatcagaactggatccacatgctccagaattacatttaggtttgagtaatcctagtcaaaataatgttattcatataaatgatgatctgcctattgctttaagaaaaggtgttcgagcttgcactcgacatcctattggcaactttgtgtcctacaaaatcttatctccatcctatcaggcatttgtttctactcttgacagtgtacagattccccatacaattcaagaagcgttgcttgatcctcgttggaaaaaggctgtacaagatgagatcaacgccctgatcaagaatggtacttgggaaatcacaaaatttccaactgagaagagactcgtgggatgcaagtgggtattcactattaagcataaagcacatggtagcattgagaggtttaaagctcgcttggttgccaaaaggtttaactcagtcttatgggatagattatcaagagacctttgcacccattgctaaactcaacaccattcgtgttcttctctcccttgctgcaaaccaagactggccattgcaccaactagatgttaagaatgctttcttgaatggagatcttgaagaagaagtatatatggatattccacttggttttgagaattcatccaaccaggttaaagtatgtagacttaaaaaatctctatatggccttaagcaatctccacgagcatggtttggaaaattcactaagtcaatcattcaaaatggctatactcaatgttagacaaatcacacattgtttgtcaaactagactcagatgaacg

SEQ ID NO: 209974 - DNA, 537 bp, Cannabis indica
gccctccgaatccactcaaatttctggcttaatatatacctccgactctccgagtcttcgacttgggaatgcattacttttacttttgaatgactgatgaaacgaaatttaacacccacattatatgtgtttattggatcacatttaatttggacttattcgatctaatttaattatttattgaatattaaatttttctttccgatccaatctaatttaattgagtcatccgatctgatccaattgatgtattggattggattaattccatccattgaatgttttaattagctttttattgatgaatgaatccaatccattttagatactatttaggctgatttcatttaaaaaatatatatatatatgaaaaaacataatttaaaacttaataatccaatataaataataaaataatatataaaatattaaataaaataattaaatatataaaattataaatattaaatataattggatggatattggatgatattgcattgaatcggttcggccattggatcgaatgtctcatcc

SEQ ID NO: 209975 - DNA, 557 bp, Cannabis indica
accattggctcaacattttaaacactcaaaagatcactcacctctgagaaagaaagcatatggacaacataccatatgctagctttgttggctgcaaggccaaatttggcctatgccatgagcataatcagtaggtttattgctgatcctggcagcaaacattgggatgtagtcaagtgggtgatgaggtatgtgaaagggtccttaaacactggtttggtctacaaagcaagcaggagagaaggctgttaagttgaaggctttgtggactcagactatgctggctgtattgacacaagaaggtccctcacaggttatattttcacaactctaggtggatgtataagctggaaatcgaatctccataaggtggtagcactgtcatctactgagactgagtatatggctgctacagaggcaataaaggaaactatatggttgaatggtcttactaaggaactaggattcaaatctgaagacatgacaatacattgtgaaaatcaaagtgccctgcacttattgaagaacccaatgttctatgaaaggtcaaaacacat

SEQ ID NO: 209976 - DNA, 384 bp, Cannabis indica
aaacatgactaagaacttcaaaagctaaataaaagatgaaaagaagatagagaagaagaactgaacaagaaaaaaattaaaaattttatatattaatagagaagatagagagaacttgaagaagcaaaaagtgaaaaaaaggaataagataatgaataggaagagagaacataagaaatctttcatatacaacaactaaactatcttggtgtggaggattcacgagagcaatccacaagattgggatcactctcgcttccaagaacaccatctcaaattataatgcccaatagcaatcaattttaattaaagaaaaatatatgtatgtatataaaaaattgtcactaaatcacatcacaattttatattagttaaaatataata

SEQ ID NO: 209977 - DNA, 774 bp, Cannabis indica
aagttggtagtttataggcaagcagacgaaaggggtaatcatttcaaaagaaccttagacgcctcggtcgccttaaaagaaaatagtagggaaaaataaaaaacaatcaagtgcaaccgtcaaccgtggtgagagagaatcggattccgaaatattaattgttagagcatttattagtcgaaaaccaaagggacgcccagtcagcctcacatcgtgtcgcgaagagacgcgcttgacacgtgtcacccatccaaatgcagaagtagctcgtatgaagtctaaacgcaacttcggaaatcccgtatagacttgggggtcaaatgttatcccaattttcgcactccgacgtggcatcacatgatggtgacacatggaattgacttcgagtatctgctcggagaatacagtccgaacaagatgcctcagacgcatgcctgaagcaaagcgatcagcaacccgcacagagcaaccaacacttagcgaattcagctttcgcattgtgaatcatcaaagaaatccctataacttggggattagattgcagagatacggcaagctacccaaatcccacgatcaatgtattctgtatttattatgcaatctttctgcttatatccattgtaacgagaagggaaatacttcttccccaagctcatagccctataaatagtgatgcatactcacttggcaaagggtcgaaaacattctggtagagagatattatctaagaattcatatttagagttaccgctgttagagctataagaaaaggaa

SEQ ID NO: 209978 - DNA, 618 bp, Cannabis indica
atgctagtcaattttaaatcaattattgatctaaataacacacggaataaaaattgaatcaatgaaataaataaattgacggagagagaaagaggaacctggggagaaagacgtttgcaatggccacaccaaggagcgtagaagtcgaccaatacacagtcgaaggcggcaatggcggaaccgaactttgaatcgtccaactccaaaacctttccatcaacgactcatttctctgccgaggtgcggctgtgcaattgaaaattttatttatattttagggtttaatatattgagattgaaagatttttttgaacaaatattgcattaatttatatgggtttaatttattttttttaagttaaaggaagagtaaagtttctgtttaatttaacggaataaaaaatgaaacattcttaaaccaacaaatgacgctacatagccactttttatatataaagataaagataaaaaataaaacaccgttaaaccaacaaataatgttagatagccactttttatatataaaaatatagaaaaccaggtcggtctgatctgatcctaaattacgtgttgcgggtcgggtcagaaacacgataaaaccagtgtcatgaaaatatg

SEQ ID NO: 209979 - DNA, 617 bp, Cannabis indica
cttcccccaaattaatttgaagcagtaattcatcccttataatttctaccagtagcatatccaatatctaattctccagaaacaatattatgccaatatcacacaatccataaataattattcttcaatcaccaaactttagtggaaagaaaacacttacttgtatgatagaggctttgtaatgcttgaagtagtcctcttccaccaagaaatccaaaaaaaattgatgaacaatgaaggctagattttaggtttttgattttttttttgaaatttttgggatggattgaagtaatgtgggtgatttttgatgaaacgggtgaatgggttgtgtttgtggttgattagaatatggattggtgaagaaatttggtgttagaatggtaaaaaaatggtagaattttgggtttgaaggctgctgctcgtaggttagaaggagaagaaaattagatggtttttgagaaaaaaatgaatgaatgggacgaattgacagttggagtgtttttataaggggtgtgttgcagcccctaatttccatgtcgtggcccgtcccttttttcttctctttgatgtgtaactggaaagcctaggggccgcgacccattccttgtcatgtc

SEQ ID NO: 209980 - DNA, 565 bp, Cannabis indica
aaggtagtgtagtctccaacacatactctaagaactcgtttagaacgtcatattaagtagtattatattgtattgtattgtactatatattatatatttatataatactatgttaaattttaatgtatattaaaatattatatacttaggtgtccataaaagttaataccacatataattttacataaaaatattgtataaaatacaatttaatataatacaatacaatacaatacgacttaatacggcgtcccaaacaagccctaaaagaattggtaataaaatatcaagttctacataatttaatttaaatataatatgtaagatttatagcttgtatgtcagttgtattctcttcttgttagctttatttctattagttcacccctattatgatttactgggaagagagctagattttatctttattgttaaataagaatgatagttattataattacataaaacattatttttgtaaaaaaattatgaaagtcctaatttctacgaaagctaattgatagatcttaacatattgttactatgaattgaaacagaaatcata

SEQ ID NO: 209981 - DNA, 509 bp, Cannabis indica
ttttaatctaaaattataattattataaaagtataaaactaaaagccaagtttgcaaaataaatacatcaatgtagaataaatttgtcttttgacatggtgagagattttaattttctctgttagtattttgtatctgttgattacggcgtttactatcaaggatttggaggaattatgtgctaatatagaaatagaaagggaatatgatattgtttccacgttcgactttgaggatactgatgcacaagtcgctgatattcgcgggcgattccttactgccagggctatcgattttgacgtaatgcaacatatgatgacatccctatggcaactgggcagaggtatgtatgtaaagcagttagaaccaaatcggttcttgttccagttttattatgaacttgatctcgtgttatagaaggaagtccgtggacttttaattgtattcagttcatctttgcacgactaaagcatagggatgatccacggttggttactttcaacactctt

SEQ ID NO: 209982 - DNA, 846 bp, Cannabis indica
agctgaagtttagcacagctttcaaccctcagattgatgggtaatcagagagaacaattcagatactagaagatttactacgagcctatgtcatggactttgagggttcatggagtaagtacttgcctctaattgaattttcctacaacaatagttaccagagtacaatagagatggctccctatgagatgttgtatcgtaggaaatgtcgctcccctattcattgggacaaaactggagaaaggaagtacttaggtctggaattaatttagaggaccaatgaagctatagaaaagattaaggctcagatgcttgcttcccaaagcaggcagaaaagttatgcttatccaaagtgcagagatgttacaattcaggcaggggaacatgttttccggcgggtttcaccagtaaagggtattagacgcttttggaagaggggtaagctaagccgtaggttcattggcccattttacatactcgagaaggtagggccagtagcaaatcaactaaccttaccaccagcattatcggttgtccataatatatttcatatcttaaagttgaggaaatatgtttcagacccgactcatatcttgagttatgaagcccttaaactacaatcagacttatcctacgaagaagaaccagttcaaatccttgataggaaggagaaatttcttcgaaacaagaccatcgctttggtcaaagtgctctagagaaacgcaaggtggaggaagtcacctgggagttagagtctaacatgaggactcaatatccagagttgttcaggttagattttgaggaagaaatccttttaacgacaggataattgtaatgaccgcattt

SEQ ID NO: 209983 - DNA, 753 bp, Cannabis indica
taacaaatattcttataaagaaattagtaaattttttttaaagtatttgtggcataaatatttaatttctggttgtaaataaatatttaaatttaatttttggcggtaataataagttatatttttagaattctgtaggtacctgatcaccattaaatattaattcattattcacgtgtcatttttttattggtctatttaaacgatctttaaaaaaaaatcaataacttggactaagtaattagggattgtcacgtggtaatttatttaacatttaacaacaaaaattctaaatttataacttaagtattattaccgtcaaaaaataaactaagtatttatttgcaactgggatttaaatttaaatatttatatcgcaaattactatttttttatgttgtgtcgtgaatatgtagttatgcaaccaaaagatacgagataaacatatatgatagagattagagaaagatgagagctttatttccctttgaataattgacaaaatagtatatataaaagagtaagtttaagtttaatttccgattctaaataaacatttaagtttaatttttaacggtaataatacttaagttataattttggaacttctataggtacctgattgttaaatgttaagtaaattgctacgtggcaattcttgattagtccaagtcattaattttttattttaaaaaaaatagtttaaatatatcaaaaagaaaatgacacatgggtaataacttgacatttaac

SEQ ID NO: 209984 - DNA, 504 bp, Cannabis indica
tacaatagaaaagccctccatggacgtctcttccctaaaaaaagttataataccagattaaactatgagttatgaccctagaagcaaagggtaacagagtacaaacctagcatttgatataatgtacaacaagtacccttttttaaacaatctaacgactgatgttcatattcaaacaatgtgcattcatgcggtgtgttcaacaggttatgttataactagaactccttaataaattattatacataattatcatttgcaaagaagattactatgaatcattctgcaaactataacactaatttacaattagaaggtgtaaggtactaagtaaaagcaaaaataaaatcgccaatgcatggtagggtaatacaagttcagaaaggataatggttaagatttagaaatgaataaaccattagcaatggtgaactttcaatcttttagataccatgttgctaaaatcacttcatctacccattgaccaaaacaaatgcttttcca

SEQ ID NO: 209985 - DNA, 775 bp, Cannabis indica
atataatttaatttattatttagtctaattgaatttttataataaggtgatttgttcaagaaaaacttatttttattattgtgtgtagtactctttcaaaaaataaaataaaatttttgtgtagtaatttttatgtatattcaaataatttaaatgatggtgttaaactctaaaagtaaatactgattggaatatattaattctaataatttaatatgattacacccatatattcaagataatgtaaccgttagtgaaatacaaaaagtcaaaaataaaaaaaaatatttaacctattcacaaagtagtcaatttttttttttattatacacaaccccacaacaccaacttggaattttcttaagaatttggcagtaattatagaaaaaatttagagaaagtggtgaagagtgatacgcatcgctggtttatttttcactgataattttttctccattttccttccactaggttttacaactcaaaagagcctaggaagagtgaaggaggtgtggccatcatactgaccaacaatattcttcctgaaacatgcacacaaatttcaagcaatgctatattaaagatttacagattaaaagttaaatacacatttttttagttattgaaaaaaggtagtgaagaaagaagattcaattatataaatccctaaagaacaatcattaccttaaaaggattaggtgatcaatactttttgtttaggtgaaaaaagtagtaaatttaacaggatctttgggatacaaaacagctgaattgc

SEQ ID NO: 209986 - DNA, 506 bp, Cannabis indica
aactatgttgtatttttgaaagaggatataaggtctggaactattaagtctttcaccatatttgctgtactgttagtagcaattgatgattttgcaaaaatgagatggatccgctacataaaatgaaaactttgagaatacatataaattggtgaggttccatttcacatttaccattaattattatgcacatttggaacctagggttggctattttcaaattatgaattgagaattgaattataaatttgcattatgatactcttttgctgcttaaatttgtgtgttagtcacaatgacaacactttcactatttgttttctttaatggaaagaccatgtccctaccctagtaaggaagaacgtgaaaaactaaccaaagattgttaaattttaggatccgtaattctgtagagtggtcactttattctattgtatttttttttttcaaaaaacttcattctaatcgtagaattaaaatactaaatgaatattagaaaaatgcaa

SEQ ID NO: 209987 - DNA, 790 bp, Cannabis indica
atgggaggtgtcgcctgtctctgcatcaaccagtcctccaggccaccattctccgtgtactcatatcataaacaaggaaaccgcgatctaaacacgccccaatgagtataagcaaatggggatggtgaattttgctcaagatgtcaagctgttctgtatgttcaagatcctggttagctattcgaaatacaaaaacaagcatataatctttagcttacaaaatctacaagtacactactacttattttcgttaaaaaacaattcctacctcgcgcaggaactgcttatctttgcagctctcattagatttagagctaagaactttcactgcagcagttgtttgatgaaatttgcacttgaaggcagttccataccctccaaaaccaattataagaacctcagaaaaattacaagtggctgactgaatctcttcccatgtgaactgctggtattgttgcaaattacatgtgagagcaatctcaagcttctcaatctcttcagcatcatgcatagctttcatctctgcatccttcttcagagaggcttctctttcatcacattgcctcacatacatagcttgtcttttggcagcctaatgcttttctttctcttcctttgctgtgcttttgttttgtcctcctccacacatttctcatgccttttggaattatccaacaggtttttgtttacatatttttagcttgaacaaaagaataaatctgttgctcttctgaatggacaggtcagagatttgagtcccctttcactatgttagcaacatgtcccctat

SEQ ID NO: 209988 - DNA, 1101 bp, Cannabis indica
ttgacggtaaaaaaaataatgtacttctcacatattaaaattatcacaataaagagtaggtttcattcgtgcaactcttcataccaaacgataatcggtatagccaaaataatttttaaaattattaaaaagagagaatatgagtatgttccaccatttaagtttttcatttatttatttatttttaaaaaaaaaagaaactcaaattgagaaagagagacaaaaaaaaaacactatgaattactattagccacaacgagagaagataatgactttttatctcagtatgcatgtgaggtaataaaacaaccatgacattttaaataattaaattgacagaaataatattataaatattttgatattaacattggattgcataattatctctatgttaaatgtagggtaattaaatgagttttttttttttttttgtaatggtaaattaaatgagttttagttatatatataattatttatgacaatgtttactaataagcaatgagaattaatggtaaatgagtcatttctttacatttctttatttaatttactaaatttaggaaaaaagaacttgatttcatataagaagaaaagaaagggagaacttcccccactaatttttttaaagaatgacattaagggtaattattagaatttattagttagttaggttcagttgattagttagttaggttccgttaattaatcaaagagtttgttacattgtatttcctctatcaatgagcctatataagagctctttctcctttgtaatacaaagttttttacaaataataaaacacagtatattcaatttattattttcctaatgtggtatcaaatgcaaacttgtgatttattcttcgaagaactttagctaccatcaccggcgatgtccttgtgatcgatgccatgaatttgattgttccaccaccatctaaacattctcctagaacccatgtctccttcttccattaccaacgtccaagaccctgttgtattaaggatcccgcaactttatgaagattattcgtaattcttactacttaagcacaactaatcatccaggtctcgccctcgctactctggtgctcaccg

SEQ ID NO: 209989 - DNA, 613 bp, Cannabis indica
ttggcctcctctttacttggctcctcataaaaaaaatttgtgatttggctactgactagtgactaggacaccacaaaacaagaacacaagaaaaggtcaaggggcctggcccctttgatttgattaggcatagccatatgatattctgaatttctgataggtaatgctactcaatcaaaactgatacggaaacaactcttaggcttaatatttttatttatgagctgtgaggctaaatacagaacggagcaaagcccgatttctaactaatctgctcatccgatctacctgacttaaatactcagcaatcccagggcctactttatcacattttatttcttcatgttggcagatttatgaatttatagcatgtattccttgtttaattgtaggaaattttaatcaaatgaggccgcaaggttcttccaatggtgaggagattttggatttcaatatataaattcgggagacacttgaatggcgggttagtgacaatgtagcagaatcttacaagaattttaggcagtagtgatctcttcacttgagcatatttgttttctgtctaaactagtaatatgaagggagttttgggacacaatttgatggcactgtt

SEQ ID NO: 209990 - DNA, 852 bp, Cannabis indica
tttgtgcgattgtgtgtgcgattttgatgctaggcgatttgtgtgcggtatttttacagcattatgcgattttgttatgtatgttatcttgtgcgacattatgcgatattgtttctttgttgtgcgattattgtgcgacatgatacttgtttatattgtttttgtattaggcgacattgtgcgacattcatagtagcttgtgcgacatagtatgctgattttttctgtttatttgtttgtatttccttgggacagattcaactgtatttgtgcttgtactgtatgatggcgtttggagtgtggagtcaactgggtatttgattcctcaaaaagtaagacattgatgtttgacattgactctacactgaaaaaggtgagtgaagttttgcatgaggagttggaggtggacccattggtgtatgaattaaagttagaagttctttacatgtacatgaaaggcactaagttttcgcctgaggttttagtgaaagatagtcaactacgagttttcttgagcatgaaggcaaaaatgagtgtggacaacttgttgccactatttgtgactaaggtgaagaagaatgtgaatttggagcctactccccaaaatgtaacccctagaagtgttgttgggacctttgtcccagaaactgatctgggggttggtttgaatgagcaacttggcactaatatagatgatgagagagtgggtatcgcatttgatcattcagatgagttcgatgctcccttttacaacagattgatttgcgtgtggatgatgatgtggctacagatgtacctcccccgaggatggaactaactccaagcaaccaagtagagcgacaaagaacgacc

SEQ ID NO: 209991 - DNA, 1015 bp, Cannabis indica
atggtatagattttaaacttcaattttaatatttaaatacaataaaaattactaactataaagtctaagttttaagttaaacattaaaatatctaaactttaaatacaaaattatttaactaataaacataatttatgtaatataatatatacactttcattaaaatatatataaatcggtttagttcggtttattcgagttaattgcgcagtataaaataatttgtaaaccacccaatatattcattgggggatttggattttcattgtattattttggattgtatttcttgtcggtttattcagtttgggtggtttattcgagttggacagtttgttaattttgttgaacacccctaatacttactagcctattatgtcttagtaattacataataactttcaaatacattgttagtatttttttggaaaatttagcatagtatgcttaaatataaaacatgttgttttaatataccacctaattaaaaatagtacatatattatacttttaatatttttttctcccaaaaatacctttacatttcaaaaaaaacttctctctctaactctctcactctccggcattaaccccggcctagaatccataccgtcgaacacacagacccagaacctcagtcgcaaggcctcgtcgtcgtcttctctcacagcctctctcattttttgcatttttttcttttggtttactaatttttttgcgataatttagcgatgtatttacaatgatagaataaatttgaggttagggatgaaatttagcaataatttgtgatatttggcgatgttttgcatatttagtgatatttagcgatgcatttgtgatatgagactaaaaaatgcactgtacatcgctaatcatcgtgaaaacttgagtatgatttcgcgacatttagcaatgtgtttagcaatgttgtgaattggagacatttagcgatgtttcatgaattcacgatatttagcgatatttcccaacatcgtcaaaaatcagaagaaa

SEQ ID NO: 209992 - DNA, 643 bp, Cannabis indica
cgaagaaaccagttttttagtgatttttccagtgacaatgccaattctgataacttttctggcgctatttgcaactctggtgacttttctgacaccggaagctactccgacgattttttcggcgccggtaacaaacttcggtaattttttcggtaccaataacaaataaaactgcctaaatgaataaaaatattaaatatgggctttaaaaacctaatttacatatatatggcacatcaaatactataaaatatctaaaaataaaaaaaataccatataaattagaaaaacttaaaaataccatatttaagtaaataacttttaaaatcctatagtgaatataattttcttttttattatatgatagtgtatattattattattgaaatactatatgaatttttgaaaatttataaataatttatagtattaaaaatttgaatggattgtttttattgaaatattaaaaaaaaaatacctgtaaaaaaattgagtcagcccacgtgttgttattgataaagcaattattattttgttttttaagaaaaaaattggctataaaggaatatactaatatcatgtgtacaattttttttgagaaatataaataaatgaccctgtttctcatttatcatatacttat

SEQ ID NO: 209993 - DNA, 584 bp, Cannabis indica
ttaaataaaataaaaaaataaaaaataaaaatagaactttacagaacacacttttgttttctgtttttaaaattgaaaaacaaaagtagttacagaacgcatttttatttttcaaaaataaattttttaaaaacaaaaattttactttcattttttgattaaaaaattgaaaaacaaaagtgttaccaaatacacataagaaattgaaaatgaaaaaaaaaaaactaaaaaataaaaaatagcacacatccaaaattatcgagaaactgtagaaaaaccattgagataccattgataagaaaaaaaaatagaaaaaaaaaaaaaaacaattctcacaaccataaaaattaatcgagaaaccatcaaaaaattatcgataagaatcttccccaaccttggtacacttaccattaataaaacatcgacatattatcaataaaccatcaatataacgtaaaaaaaaaattcaaatctcactgaaagaaaccaaatcccccattttgcacaaaaaataaaaaaaataacataacagcaagcaagtaataaccacacatctactaaaaatgaactacatactcttcaaa

SEQ ID NO: 209994 - DNA, 910 bp, Cannabis indica
aactccgcagaacgaggcagcagttcttcctcagggatcttgtcgacctttcatataaattcatcacccacgaacttctcttggagagtcaagatgttgcgagctcggatagtcggatcgatcacgactttcttccccttttcttacgtgcccttagttggcctcttggaggaatccgcgacaagggtgaccaccacgtcgctcttcatcttttgaggaacgataggagaagtcgtcgctgttccagattttggcttgcggttgaggaccggtgcggacttaaaaaaagtcatctctgcgaggacaaataaagataagtataaataaatttcaaggaagcagtttgtaacatgcgatatgttacctgacgttggccgagaagtttgcttggaaaggcgtttgtctattcgctcttgttgcttctcagatggctccttgtacactggctccctttgaagtcttgtgttctcttgaatcagcttgtgttctcgcagctttgaagtcgtacacagtaatcgccagtcacgatcttgtacgggaaggctttcgagaacttcagcagtctctctgcgagtcgcgtcaagtgtaggtcgagctggtctattttgcgacaataaaaagagcgagttagcctaaagtcacaagataactcaaaaattgacgaagtaaagaaatacgcgacatattaggtcgacggttaaagtcagtcctaatccctgtaaccttaaacacataaaaccatttcgatttccaatctcccatgttggaaatcgtgccttccaccccattgatctcagaagtggcccacttgctgaagcaatagaagccgttatggagacctacgttctttatgtcgtagaagtagctgaactcttctgtcaagggtcccctgtgtacgtactccatatac

SEQ ID NO: 209995 - DNA, 816 bp, Cannabis indica
cccaggttgacaaaaggcctggtacgctgggttctttttatcctaatctaatgtcatttcgatcgtttatctagtttttcacaatgacaatgatctatgaagtcagagaaatcaaattcacaacttttcatttctcatttccaactcacctggaattgaagagtttcgagtctctcatttctgcaaaatagtaatatctccaagaattggtgaccagctttttcaaaacacataaatagactaaatgatatcaaaatatcacttaagtatcttaaagcatacccttggtcatttttacacttacccagcgtccaagttgacgtcatatgtcaacctgggcactgggatgtcaacctggatgctagatgtcaacctgtgcactaggtcatgaactgccttcagtaaaaaagccacaactcactcaaatttgatccagttgacgcgattcaacgtgtattatgaagttaattcaatgctctatcaggtcatgtctcacactctagacataattctgaagctatcattatccaaatttacccccaaggcagttacaaaaataagctttggttacccgcaatgggatccatcgggctccaaaaaatggccatcagcaccaagagctagttttcacaattatatcatcatcaatagtcaacagaaaacttatttgtattttcccctatttttgtgggcctccttcacctataaaaggagagctccataagctcatttttcacattcacaaaactacatacaaggtcagagcttctctctctatatatatattctctcactaaaatttagagcttctgacac

SEQ ID NO: 209996 - DNA, 603 bp, Cannabis indica
aggtctgggtcataggtcccgatttgggtccatgttcgtgtttgggtcctagtcccagtttcaatttccattcagtgtttgggttcgggtttgggtctgagtctgggtcgaggtctgagtcctcgtctaagtttgggtccgggtccgagtctaggtacaaatcccggtgtaggtctgtgttcgggtccaggtctgggtttgggtcccaagtgcgggtctaggtctggttcagggacagggtctctgtccggatctaggtcccgagttttgatctcggtctgggcttgagtccaggtttgtattcagatacctatctaggtccaagtttgggtttgggatcgtgtcccaaatctaagtccaggtccgggttcaagtctcggtcccggtctgggtacatgaccgtgtctgggctcgagttccggtctcggtttgggtttggggctaggtctgagttcgtttctaggaatgggtatgggtcctcgtcacggccctagtcttattcaagggtcctagtctggcggttcttgttcaggttccagtttcaggtctcaggtttagatcagggtccaggttttagtcatggtctgagtcccagatctggat

SEQ ID NO: 209997 - DNA, 833 bp, Cannabis indica
aaattaactaaacatacacgaagtatatatagttgaatgcatggaagcttctatttccttcaactaacactacaaaagaaaaatttatttagtgtgaacattttagtcataacataatttttttgtgactaaatataatttttagtcacaagaaattaaagcacaatatttagatacaaggttcctaatttagttttaatcacaacaagtattgtggttaaaaatacatttagtcataataaattttattaattttcacaactaatacttttagctacgaactttttaatcacaatataggaattatattttataattatacacaaattttattatgattaaaagtaagattgtttgtagtgtaattactaaaaaaataagttgaatacataataataaaaatattacaatgacctatacaaattacaatctacttcaaatcttgagagattaaaaaaaaaaaaaagagagagagagagagagagagagagagatatggatcactacaagaaatgtcactttgtccaacacatttttgtgttggtaaaacttggtattgcgctggtaaatagaattaactgtaatgtgttggcaaaaggggttggaaaatcaatattggtattagaactttgccagcataaatgaaaaattagtaaaattttagacctcttaccagtgccgtaacgaactgtgctggtaaaagtggcatttcttgtagtggataattagtattattgtttactttatgtagctaatattaaatctacataaaatgtaagtaaattttgtagtatgtacactaatattagtatatagtatacgtatatgttaag

SEQ ID NO: 209998 - DNA, 567 bp, Cannabis indica
ataattaattacattaatatttttttgaaagattaataacgactattcctattcctctaagatcttgcaaaaagattctagatagaggctggctggtgtattctgtacacgtatttttctattaaagtttttttctttgtaaaataactatagcaattaaaaaagttgatatcgcctaattagttacactacaatcactttcactcaaaaaaaaaaaaaaaagttacactacaatcacggtagtaaacaggctatgtcgtattcttttttttttttgaaaacaagctatgtcgtatttacaggaaggtaaactacaactaaaaattaatataaatagaatatggtagaaattgaaatgaagtaaaaataataaaatgtggtttttacactacatactgaaatttttatttttttttactttttactgtggggtagaattttttgcaaaaatactatgtaagttttatattgtatattgtgttaagttttcacagttgttaatttatacggttattttttagttaatctaatattattttaatttttctgttttgttgttttatggtt

SEQ ID NO: 209999 - DNA, 685 bp, Cannabis indica
taaaattttgacctctttaccagtgccgtaacgaactgtgctggtaaaagtggcatttcttgtagtggataatttagtattattgtttactttatgagctaattattaaatctacaataaaatgtagtaaattttgtagatgtacacaatattagatatagtatacgtatatgttaagaaagacgcctataataaagtaatatttatatatactcaaaaaaaaaatcaagaaaacacacaaatggtatttaggcttattttacttaaaaaaattggtaatgttacgattttacaactcatgcatccatgagcccaattgaaacagtaccagcccaacaaataaagcccgaaaccccttgattaagaacaaaccctatcagatttatatttagggaaatttacatggtatactaacttttgtcacttttttacaaaaataagtatattgtgttaagttttcaccggtgttctactagtgttttttagttattctactgttgttttgagttaatttgttttgtgttttactggttttttataaaaacacagtatttttaaaaacctttctgtgtgacagtatttttgtaaaagttaacccaaatttcagtatttttgtaagtttccctatatatcagattctatatatagttcaaacacacttcaagaaatctagctccttagaacc

SEQ ID NO: 210000 - DNA, 810 bp, Cannabis indica
taatatttataaagagtgactactcaatgttacatttttatatatttttcttttatctataatagcgggttacccataagtaaaactttaatttttaaaatcaattaattataaaatcaattaattataattaactattttcttaaaataattaattgaatatttaacaagacgttttttaacaactaataattataaataattttttatataaatccctattataattattttaacagtaaagtcatttaattataatatttacaaggaaattttgttttgttttgttttgtttttttaataaaaattagacttctctttacacaaatgagataactttaaaactatacattatttgtaaactgggataacttttcctaaaatccaattttaccctcgtcatttctaaagtgactttctctctcttcctcccctttctcttaaccggttgaaatcgcaccacccacgaaaccgaatttccccacgaacgatgaagccaccaccccacagatcaaacccgccaccccacggatcaaacccaccaccccacggaccgaacccatccaatgagcatgcgagcaaggtaatttttccccctttcatttgttgatttttttttcttattgattagggttaaaatattgtttgttgatagatttaaggtctgatatgattagatttagggttagaacatgtcgatctaggttctgtgatgaatttggacgagaaattgatttttcaggctggcccgatgcatctcgatgcaggtccaatgcatcaggatatctgggttattttgagcttgaagat

SEQ ID NO: 210001 - DNA, 713 bp, Cannabis indica
aaacaatcatagaaaaatattacctcccccacagcagacaagcaatgcctcatgttagctaaggtctctgcagcccttggaagatcaccactggcaaagacatcttccacagttgaacttaattgagttaacccagcagcatcctgttgacccatacacaatgagtatatcaaatgcaacatcaacatttgccaatacagcactgattacaacttctgcgattaaatacccacctgcaatgtgtcataagcagcttccatcctttgcttaacagtatcaactttggccagagcagctatagattcagctgatgatccttcagcctgcaaattaaaaccaattgtttgaaagagagaatattgtcatacatatacatgtacaaagaattaagaagctaaaaactcaaaccatataaacatagctaagctagcaacagctgtctaccgatgtaaattatataatccaattacattggtaaatgtattataaggtgggtatattaatgtgaacttgttactatagtttatagtaatgctctgcaacctaatggaaagcagagcaaaatctaattaggctactatttgagtaatatgtgcggtatagtgtataactcaatgtgattccatatatttattcttaaccagagaaagagaaaacgagaggttttaaccaaaaggcgccagtcgtgttagtaatattttccaaaaaattta

SEQ ID NO: 210002 - DNA, 511 bp, Cannabis indica
aaagtctttggttttattatctttcatacaagcgcctgtggaacttattttccaaatgtagtgcttgcattttttgcattttttgtcatctctttcacaatcaaatatgttgaagaaatggtcgatctgacttttgggccattgaaagttacagaagaagagtgtggtgcataggagattgggatggaatactatctcgtaggagctattgtaagggacgacatgtgtaccaagatcatcgtccttggacttgcaatgaagggtcaaatcgcttggatcagaatccagaccgttgattatctctacatgcgtttttggttgaaaataccatgctctcacatttgttgttttgcatgataaaaacaaaaggaatgcaacaagcactagctgaagtagtccttgtgctttgtgtgacatagagaaaaggtttaagagagtagaactactcatatttaatttagacttatatatttaatttgtagttatggttattggaatttggtttacaagt

SEQ ID NO: 210003 - DNA, 760 bp, Cannabis indica
gaaaagaagcttgttttcagcggtcggcaaagaagtgttgatcaaagcagtcatccaagcaatgccttgttatacgatgggggtgttccgactacccaagaaaaatatccatgagctccaagggatgactgcaagattctggtggggctcttcaaaagaaaaaaagaaaacacattggggagcttggagtaagctttgtcttccgagggagaaagggggattggggttcaaagatttggagctttttaataaagcgttactagccaagaaagtgtggcgggttgttagaaatcctttgtcattggtagggaaggtgttgaaaagcagttatttctcccactcctctattttggaagctaaaaaaggctcgtgttcttctgcagtttggaggggtttgctatggggtagagagattgtggaagcagggtctagatggagagttggttcgggggaaaacattgatattataaacgatagatggctgcctagaccggtgagatttaaaccaattattaatccggatatccccgaggggaccaaagtcgttgaccttagacttgccaatggggattgggataccgagtttattaaggctatcttttgtgaagatgatgcggagctgattatgaatatccaacaaggctccttggaaagtgaagatagactaatttggcacttcgcaaaaaacggggaatacaatgttcaaagtgggtacatcactgcacttaatgggcgagtttatgaagagaactccgacacg

SEQ ID NO: 210004 - DNA, 724 bp, Cannabis indica
gagccatcttctctgtaccaattttcaatcctcctctctctctttctctcttcaattcgtaccctacagtgattcgagtaagtgcccacacacatcaagtggtgctcagtcatagtgtgtaagactgtgaagaatccaaattcaagaacaggagaatcgggctcaaatctttgtgatactctactacagaaaggatacaagggttagagatctgagtgaaaggagccatttaattctgctgcaaccactgtaaggtttctaaaacattatatgtgtttaacttacattgttttagaaattcatatttaggatgttaaataacatccatggtagtaaatctagatcctggtaaaatataatccaacaatagtatccaacatttagttctcaattcattagaaacactttttatatattttgtcttttcttcaaaaaattatattataaaagtcggtattagtcttcaattattaattattttagtatatactaaataaataaataacgtgtagattaaaaatgatacctcttcagaatattctattatttttgttgcataacaatctaagatttgttcttcttcgtgtaccaaacataattacagctacgcttctagtgtcgtcttttgttctattacggtttgtaacacttaaccacaaaaactaattttttggcaggtaaactacctaaatcctaattttgtttttctctgcacacctccatc

SEQ ID NO: 210005 - DNA, 826 bp, Cannabis indica
agaatatagcgtagaagtgtgggtttgattaggacataagatagaaagaactagagaaaatatatatgagatgagagaatctttatagagttccagcttcttcatatttatggagaaaatgctattcaagtatttcttgtattcaaatactgggtgactactggctattaaaattctaaaacaattaacatatgtgtagcacaagaatttataaattataattttacatatatttagtttcttatatgtatatgagttaattaagggcattaactaaattttaggaaaataagtctaattgttagtaattgatacatatatacgttattaaatttcatcattaattaaaatataaaacctaatcagcctaattaatatatatagaatcataataattattatttatcaatactatatatgtatactcggggcttaattggggcggggagtaccacacccgactctgccccgcccccgagccgggaaatgaaaatcaaccccgtacccgccccgctccccgccaagccgaagattccctgtgccattaggggtggatccccgcgggtccccatccccatggagcttttgtgcatccctacttgtagtataagtaccatttatcatcaattgtctatccatccaaatgtttaccatcatggattcaattccaaataagtcttagttattctgcttaccactgatgttacttaacttgttaaagcaacactagtgtagccactacactatagagggacaatctatcccttcttctttatatgattacaaatcataataccagtcttcaagagccaaatataccacggta

SEQ ID NO: 210006 - DNA, 938 bp, Cannabis indica
tatttttttaatcttaaattatacacgttacattgatgtgataattgactaaataatcatgttattattttatttgccacgtgtgacaaaacatgacagaaaaactaatttacaatattgtgaatagttcagaaactatttgtaaccgggtgaaaaatttaaaagacacaataatgcatatcatagtttgagaagaaaaatcatagatagcttaatttttttgttttaatattaaaaaacacaaatgattattaaatacatttttattttaaaaaagggcaatgcatttttaattctgtggttaaataaattcaaaaattaatattttactgaacacaccaccaaacacctttttttatttttttgttttaaaaaagacaggaaagcatcttctgtattaaataatatttcaatgaatatacaacaataacacccactattaatattaaaaacaaaaaacaaacttttaatatgaaaatatatagttccactttttaaatttaatttttctttcgattgacctattgtcaatgaagattctcatttacctccaaaatatatttatattgatattaacttccaagttcattatctttatatctttttttaaaaaaaaataaaaagaataatcataagtgttcgcagtgcggatgatacagatttagactattttcttaaactaaaccgtatatatagtttttgtaattttttaaaccgcaatcacaccataagatcttaaaactgcaaaatatcacaccgcaaaaatggggtgcaatttaggcggtttactctatcatcattatcaaacattaaaataaaaaattaaaaaattagtctactaaagtttgaacaattaaaaaaaaaataatttaatatactaatcaagttattgtattgattctctttaaaaaattatataatatacatatatatatata

SEQ ID NO: 210007 - DNA, 951 bp, Cannabis indica
aaactaatatttgtgatgtaaatctttaagaaatttgcaacagaacttgaagtaaacattgtttaactatttacatcaccaatcaaagatcggcaacagaatatattcattgaaatgattaggcaattatgtatttacaaaagataaaataaaattgccaagaaaatagtagatactatttacaatatacttagatttataaaagaaaagaaaatgaaaatggcaatactccatcatactttaatgtgaaaaaattagtcctgggtgtccattagcaactcggttatgcctagccaaaaatgataaagcaacttctctaaaattaagcacatttcatccttgtggcactttgttaagcattcaatagaatatttatgtacccaattaccctggttttaacatattcttattttttaaagagattgccagttttagggtactttaattattataaagtgttcttgttttactctttcaaaaaatgaaataaaagggttattgctttgaattgttttttgtccatcttgagataaaattttacttttttaacagtcatagaatgaaaagggtgaacttcttcacaattagaaagaaaatgaaaagtggtaacacaactggtaaagagagtgtgtgtgtgctgtttgactgactagcttcaaatactaagagcaacactttacattccaatgtttcaattcaaataaagcacaaagtatcaaatgatttttctctcctctcaaaaattattagcattagaaattcaaatgtaaaagaatcctaaagcaactaataataataatagcatatagcacaaaaagtcgtatgcaacaatcaaaataacccctaatataaaacatacccaaaatttggaaaaagaatacaaggcaatagaaaacataaatcatgagacccgcacagtttcaaaaatagaacaacataacacaatatgaa

SEQ ID NO: 210008 - DNA, 734 bp, Cannabis indica
atatattgatattgatacattgacatgaattaaaaaaatggaatgaaaaaaatatagaaacattttttattttcttttattaaggtaaaaaaaaaaaaaataccgatttttatctctgaattgaccatttaaataatttaaactaaacttaaaaaaaataataacaaaattggtaaaataaaaaaaataatttgtataaatagctatgttctaatattttaaaataaaacaataaaaaacataacaaaaaaaattaaaatatatatataatcatgttcaaataatcatatatgacattgacaattgctttttacaaataaaataaaaaataaaattttaacttttgaataaataaaaattaatagaaaatactttagttgtaaaaaattatttaaaaataaataatgtttttatatttattgatattaatatattgatataaaaatctagcaaaattaaaaaaaaaaataagaaagaaaaaaaataataaaaacacttttttattttcttttattaatgtaaaaaaagaaaaacaacatattttaatctccaatttgaccatttaaataatttaaactaaaacttcaaaaaaaaaaaaaaaaattaaacaaacaaaaactaagctaaaatacaaaaacaaaatacaatttgtaccatagttatagctctgtattctaaaattgaaataataataataaaaaaacaaataaactaaaacaaaaactaaatgaatc

SEQ ID NO: 210009 - DNA, 619 bp, Cannabis indica
cttgcttaggctaacaaggtcattccttcagaattcagatcatcttacactagatggtataatcacaaaaattaaagtaaaacataagttccataatcaaaaaacttgtcacgaaacttaattgggcaactgtattaccttgccgacgcctcttactttttattgtattcagcttttccggtgatttggggcacggcatgctttcctgtagaaacatacatacagatatttaatatctataagaaagtagagcaaactcaatgcattaaatctcacattaagcttcagcatttctacattacctcgttgctactaaagctcttcaataagttttgattatctggagtgatataatcaggagtgctggaagatgtttcaaaagaaaaaaaatgaaaaaaaaacgaaaacccaggcaacaaaatggagaaattacacagatatcctaactttcaatgccaccattaaaacaaaaattagcatctaaaaaaagtagttcaaactcccaaatatgaaccttgaatgagaatcagatttatattaccagaagaagtcttggcttagaataaaatctttgtcatccacagtgttatctaggtctgtatttcgaggcgatgagaag

SEQ ID NO: 210010 - DNA, 975 bp, Cannabis indica
tgccatatttttgtaaaaaagagtagaaatcctatttttgtaaaacaacaataagttttgccagaaaagtcaccggcaccgaaaaagtcgccggaaaagtcgccgaaaaaattgttgtcgctgaaaaaagtcatcgtcgccggaaaagtcaatgtcgccggaaaagtcactggaaaagtcaccagaagtaaatatctcatgtataactaaaaatataactggttatatgaataaaaactaataactcaaaccggttataattgaaatataactggttctgtaacataataaataaatataaataacataaaataactcaaactagttataattaaaatagaattggttctataacagtgttataatgaataaaaacaaacaatacgaaagaacggaaactgattataactaaaatagaaccggttatataacataatgaatacaaacaagtaacacgcaataactcaaaccgactacaataaaaacaaagacaaaatcagtttctaaaacactgtaatataaattaaagacaaaactaatttcacaataaaatatttcataacatatgatacctcataaaacctgttataatttttttttttaaaaaaaaaaaaaaaagtggggatcaaatgtctcggatataataaaaatagagtcgattctataacataatgaataaaaataaataactcaaaccggttataattaaaatataatcggttctgtaacataatgaataaaaacaaataacacaaaataatttaaaccggttataattaaaatagaatcggttctataacagtgttataatgaataaaaatcaataatacgaaataactcaaaaccgattataactaaaatagaatttgttatataacataatgaatacaaacaagtaacacacaataactcaaaccaattacaattaaaagacaaagataaaatcagttcttaaaatatcaaaacataaattaa

SEQ ID NO: 210011 - DNA, 907 bp, Cannabis indica
agaaaaaaaaaactatgctgtaatatttgatctggtgtagaaatgctagatttggttgctgattttgggccaaaattgggtagaatttctggtgtgagagtttctagtataggagctttagttcttgaatcagctgaattattcgaaggagctgtgtttcctgaagtggcagtagtgtgtgcaccagaaagtggtgcagattgaggaccagggacagtgtatatattgttcataggttggtgaacatttgtttgctgaactggttttgtggtgggaagtactatatcaggaaacaagttgtttatctcagaagaggatgtagtagaaaacaatggaaatattgtttcatagaagactacatcccgggaaatataaatttgttttatttcaatatcaagaagtatgtaggctttcatgccttggggatagctaatgaaaaccgaggctctacttcttggtgtaaacttatgcctttaagagttgagggtggagccataggcaagacacccaaaacttcttaaatgatcatatttggggctagtgccatgtagcacttgataagaagtcatacccttgaacaatttagaaggagttctatttattaggtaagtagtcgattgaactaggtatggccaataaactaaaggtaagtttgattggaaacctagagcacgagcaacatttagtatgtgttggtgtttcctttcaacaacggaattttgttgaggtctttccacacaagaatggtaatgaattatgcctttagatgcaaagaaagaatgtaaattgaattcgttggcattatcagaatggatggccttaatattttttgaatattgagtgcaaaccatgttgaaaaaagtcagaatcacattttggacattggatttattcttgagtaagtata

SEQ ID NO: 210012 - DNA, 538 bp, Cannabis indica
gatgctctgcctactcgaaatagatatgggggtgacaatggaactggatgtttcttttgcaacgattgtgaagagtctcctttgcacttatttggtagatgcacgttagccagagctatctggtttgggggccctgttcccatccactctgagcaaattgttgggtgtgatctagctgaatttgcctctggtattatctctatcctgaaagcatcaaagatggatgggcctttaatttggttggcgtctgttatggagattatttggctttggagaaacaagctgaatagagggttagatgtgactattaatccggaagtgattcttgctgagatcaaaagtaggtatgctgagatggtggaaagtctttctaagactaagaatgatcacaaggcaggctccaggaagaacccgactgaggcgagtaagattccgtttactcctaaagttattgtagtagatggagccttcaaaaatgggaagtcaggtggtgctttcgttgccatagactatggtagtaatacttgggaagggaatt

SEQ ID NO: 210013 - DNA, 620 bp, Cannabis indica
aaagttaagattttaatccaattcgtacatttgcagatttaattagaatcgtgcatagtagtttagattatctatttaatgatcattctaaaaaaggtaaataccattttgattgcaaaagttacagattagaccatttattttattgaatgacaaaattgaccatgtattttccaaaatagtaaaaataaggccctgagcttagttttcaacaatttttttttttaatataaccaacttgaagataatttctaatacgaacgaatacagaaaatataaacagttttgtcataacacatttaaatcggattattattaaattgtattttgacaaaaaatcagttcaatgtgtgttctattttagaaaatacaaggtccattttgttattaacaaaatagaggttcaaattaataatttttacaaaacacaaagtcaaaaatagtattttttttaaaaaaactattttatgaacactttgatttaagcccgaaaacttaaatcctatagtaataaacaagttcatcgatttcgtaaagagtcaaaaacagaactacatatattgtgtagcaaaaataagatgattgtaattagatagaattaaaaataataaaattatata

SEQ ID NO: 210014 - DNA, 809 bp, Cannabis indica
actttacctccatatgacatttggaagctcatcttgtttagcttctggaacaatggcggcatcataagcaacgatgtttccatagaatattctctctaaatccttcatccatttagtcaatagcaagttaacctgcaattttagtgctgaatcaactgtctgcatggaaaaagccttagccctattctatcaagaagagaaatcaaatactaacaagacagcctgaaaaggttctattgtaaatcctatgtatgtacaaccagaatttcctatccttgtatgtttgagaatcttaaaatttcatgattaagccaattgacaaagtagattcaatggcttctggagagcacaggtggcaggtggcttaaaattacacaacttacaaacaaaaaaagtcattggcagattataatgatcaacaagtaagaactgaatacacaccccagcttgagatactctaagctccacatcatgattgtaaatctcatataagtactgcccaaattcaacaccttcttttccctcttctttcaagcggcgtaagcaaagccacatgtgaagcacgagtaaagaaaaagttgttttaaaggtcttctctaagttgaacactgcaagttcaaattcagataaacaaaaaaatcaattagtacaacccaagaatggcaaggaaactcaaatagaaatagtctaattctacatgaccatttgaaagtttcggatcactaatgctttcctttacgtgtttatttctccttttttctttaccataaatattggatcaccccgatggctaaggagcaaactaagtt

SEQ ID NO: 210015 - DNA, 1082 bp, Cannabis indica
acaaatgtgagcatggatccttacaagctctgcagtagtagaataacatggatcactgctcactagtttttcattaagagggataaattcttcataagaaactcctaaaatgggcaaaccaccgataaccttcaagtcatacaaagaaatacccatttcaccactactatgatggaaggtgttggacagaggacccaaagttttgaaaaagctcgccaaacatgaaaaacccataaaaaaaggtatcgggatacagaaatagcaccataaataccagccttacttaagacaccttggtgttgaagtaacacttgatcgatccattcaatgagacacctcataaatccggctcgcccccgaaagacaaaatcgttatgcactttcttgtcttttaagtaacggtaaagacacagaaagaaatccttgttcacttggtaagtcaaatctccatcctctttattatcaacatctcctaagacatttgctcgaaaaatggcaccataacctctgacatggtgaacaacattatcattatcagaagaatggtatcttaagtctcttgaactgacatcctcgatcttaaaaaaagaaaaataagatcttggtggttattagacacctgaatctctggcaatgacatagagcgatgataacgcaatccaatgttgacttctttccaaaattcatctggagctctttgagaggctagagccccaaacgtagacatgctgcaaaaaaatttaatatgttaaaaaaataattaaaaaaaaattctcaagcaagatacgcttacataaatgacactcacttgtttgagagggcatctgttgaacaaaaaaattaataatgataataataataataaaaaaacaaaaaaataggaatgggtcagtagaaaaggagagcaaattaaggagatattttctccacctccactacttttacgttaagtgaattttataaaaaaaaaaaataaataataaaaaaagggggctgtaaagagatagagggctgaacagtttaatttttttttttttgtaaatctttggcaagaaattaatcgtaagagtaaaacagaggga

SEQ ID NO: 210016 - DNA, 666 bp, Cannabis indica
gccacacagttgaggttgggagaagatccctcaataggtttcggatggaatcctttccgaagaggaatccagggatctccccagatcttagtattcagaccattagcaaccaacttacatgcaccttttttcaaaatggaatttgccttcacaacacttttccaaaaccaagaatctgaatctttgtacctacagctaaggagatcttttcctttgaggtatttagctactagaactctacagcaaagagattggcatccattgagaatattccaaccccatttagcaaggaaggcctgattcatctccttggttttcctgaacccaagtccacccagggatttagggagacaaagtttgtcccaagcctttagatggatcccatggtttcctttctcaaaaccccaccaaaaatctctgaccagaccatcaattttgtttaccattcgagtagagagtctcgacgtttgcatcgcatacattggcatcgacagacctactgactttatcagagtagctcggcctgcttttgatagagtttttgccttccatccctgaagctttgtgaggttatcaaggatataaaatcagcatccttctgcctagatctaaaaaggggcaggcccagatatttgatgcatccttcaggataatcaaatcccaaaa

SEQ ID NO: 210017 - DNA, 657 bp, Cannabis indica
tgccgcggcatggcttttgtatgtcacggcccgcccttttctttctaagcaaatcctcatgcaaacttcaaatagccataactttatgatccggactctgatttgggagttctatatacaattggaaagctcgtttcgagctctatgtgaatatttatattttgaatgccaagtatatattttgtaaatgtagaattagggattaaccctatatgtgtgaatcttggaatttgtgactaggattactgacacttggtcaagagcactcggggatttggaatctccatattttgcgagacatcaggtaagacagtagtatgcacgtagagttaagcgcagtggcgctcatattgtatgttgtgattgtgattaattcagaactgggattagggttatttcctaaaatgagcggttatttggtctagggttattaccctagtagttaaaagatgttgaatgttatgtcgtgttaaatatcttggaataaagagttatgcgtctaaggcataattaagctagactcggtaaactagtaccttgagtttgattttaatgtggtctagggttattacactagaatattatgaaggtaagaaagcattaatatatggaaatattataaatcaagtgaaaacgtgagttagggttaacactctt

SEQ ID NO: 210018 - DNA, 894 bp, Cannabis indica
attagaaatttttgaaattttaatatagtccttaaaaaaaatttttaaaaataaattttaaaatttatacttaaaataaatttttaaaaatagttagtttaaaacacttttaaaaaaaaatttaaaattaagtgtgcagttgagtatttcaaccttgtttggtacacttttaattttttttagaaattgatgggatgcatggtataattataatatccatcatcctatcaaaaacttagttaaggtaaaaaagtttataataataataatttaggtaaaaaatagcaaagtttagttaatgtttatgtaataagtttaatttaattagtttgatttaattttttaattaattgtttattgttaattttgtgtagatgtttatttgtggtgataccgtttaaaaaattttgagacactatattagacttgataatctatttaaattttttattcaatatttaaaaaatttagaaaaaatttaagtttttcgcattgttaatttcaattatgtttaggtattagtgtgatattgttcgagtaagattttaatttaatattttaaatattttattagtatcgggttcattgtgttgattgaagagtgcacaagttgctatctttatttaaaaaggtataattactaaaactttaaaaatctttatttagtggagtttgaatatcttagatattcatcggtagttaaggttttgcgattaattatattgtggtcggataggtagaatgtgcatcttagatgagtttgaatatcttaaatattcatccgtagtgaagtagattttgcgaatacatgtactacggtcggattagtggataattttgtattgttaatattatttcttattttttgtagtgttttatgtgttttgtttatta

SEQ ID NO: 210019 - DNA, 729 bp, Cannabis indica
acttacaatcccataaacagtacaaggtcacttactaactggggttaccttaaataggagagttctactaatttatcattaaaagagaatatatacattaaaaagaaaaaaacaatccctacttaacaaaaataagtttgaaaaattttatgagtgaggagaattcgaattctattaaaatattaatagaatgaattttaatcaaatactataatctttttattaatttatagaatataataaaggtaatttattaatctatatttcaaataattacatatttgttatacccaaattctctcaaataacaaataagtttccttatttattttttaaaaataattaattacttatttattttggttttaacaaagaacgtacattttatattctttattttttttttaataaaaaaaccttgactctagctattattgaactatataatttcatataatttcacatatattgaactatataataatataattcctcaattaactcattattatctaattagggctttgctaatcattttcttaattccgggtattacaatatatctcactcacatctttgttgtattattaatgcaaaggttatatttgcaaaataacgaaaaaagttgcatgaaatcatactttaaacatactataaaatataatcatcaactattagaaataagattatatcaaataactatgattaattaatattagacataacttt

SEQ ID NO: 210020 - DNA, 1228 bp, Cannabis indica
cactctttcccgcaatcaatattatgaattatatctcaattatttaaagtcgttgtcaattattgtatttcaccagttgtcatcaccatattccacgtatagtcgtcaccattattatccccaatagatttaatcaatacataataatacaaataaataatataatgaagtgctaatataaatgaaaagattaaaagttaaaacaaaaaaattaaacactacaatgtcatatccataaaaacaagattaataagagatagtgttaaaactttatagggaagaaaagattaaaaaatgaaaaatttataaagaaaacacttaagattaagagatctttgttattattaataataaatttattaaaatattaaaaaaaagtttaaactctcaaatatgtggttaaaaaaattacagttatatgtaaattaaatagaatatatatttgaatttagtatgattaattattatttttcgttgatctaattcaaattaaacacagcaacatattattatatataattgattatgttaacatatattttaattttattatgtaaaatatatatcatttaaatttaaataattcttactaatgaataaatcataaataattcgaagttatcgacaacggtaaagtggtcgattataaaaaaaattatatttctccaacttattgagaaatattttgatgagtgagagaaaaattgagaatctatatatatgtatatatataataaaaaataaaaaaaaaaaaaagagaatattgacaataatttgtaatatacaaagaaatatattataaaatatagagaaaagaaatacctatagaaaattgatgttttgatgttgctcattaatgtcactgctactgttcattatccgtcaagaattaaaagttgcttaaactctttaacacaaaaaaaaaaggttgtaatatatctaaaaatatattataaaatataaagaaaataaataccaatagaaaatcgatatcttgatgttgttcattgatgttactgttattgttcattatttgtgaagaattaatagttagttaaactctttaacacaaaaaaaaaaaaggaaaaaaaataaatttagagaagatggagaattggcattaaaagcaaaactaagaaaaaaatgcaattgagagaaagaaaaaagaagatatgaaattaatttaaatttagtgttatataaggaaaagaaagaagttcaaaaatac

SEQ ID NO: 210021 - DNA, 879 bp, Cannabis indica
cttttcttactctcctatactttcggtagctaattgatatttttattttttttgtaattcgtttacacacttatttgatgtaatggccactgtatttataggagaaagaaaaggtacttttcctttaatagtttcacatattaattgcacaaattttggtagatgcgtgtgtgtcaatgtaatgtatgcatgtattaattgtgtggtgcagaaggcccttacagatagatcatcatctttgtgtgacttttgctcgggggtggcattctataagtgggcaccaaattctagcatagtcactagtaggggtgtacataattgttccacatgaaataaatgatacagtgttgagtcatatataagaatatgagctatactactcattaccaattgattttgagatgaaactagaaatggtaaacggggcggagcttccccgacctgacaagtcattgccccgccccgcctcgattacctcagaagtttaatcgagtctgacccgaccgaaccgagtagtatttgacccgactttttttttttttttttttcaaacactcaacaatatatagtttcattacccaaaaaaaaaatgatataataattataaagttttagacatttattacatttgtttaatttcttacaaattatacatgtactcaagaaacttacaattgacctatttgtttacacgaaaatgtgatttatttgtacaaataaactataacaccatttcctcacacttccaagcattagattaataaaatatgatgtagccacttagaaaatagacttaaacactataaatatcaaattagtatgtacgaatccttttataaaacacaaataattaagtccatatgcgtgcatattcaaaag

SEQ ID NO: 210022 - DNA, 721 bp, Cannabis indica
tccccacaaaataacataaaaggcaacttaggattattttaagaaattcaaaaatcccgactattctcgacatttccaatgtctaaactattatcccaccactaaaaaaataataagttatgattctaatagccatacaccgcgttccaatgttgtcgggcacaaaatatgcagaattatgaaatttctatatgtgacataaaaatacattcagaattcaaataaatcatcataaataattaattcaatattaataaataattacatgctagtacgaaacagacatttataaattagggtgagaagtcctagtcactatatccaggataggcagttgcacatggattagctttttcgttcctaagacagttataattccataaatcctccttagggagtaggccatccacaagttcttggaatacaaagctccgaatgtgctagcccttcaggggaggccaaaacactctagcagcggtagttgttatagcatctggtcctagaaattcgcaccatcctggagctacattaccagctttagatggacatgcagcgaaaattttaggtggacctcatacagccagaagcactcagaatgcacagaagaatgagttgaatcaaggcaaagcttgcaacttggtgcaatcacttacccagtgtccaagaatgatgaatttgcccatgacttttacaaaagacgatgccatgcacgtgcacttcc

SEQ ID NO: 210023 - DNA, 621 bp, Cannabis indica
aaaaaatattttatttttaaaatacacatattttatattaatttttaaaaataccacatatatttttattaaagatcctaataatttttctttcttcttctagaggatatgtaagactattttggtggtagatgatctcttgaggcagtgattaaatttctttttagagggtacataaagcataatgctttcatttatatataaaagtctgtataaattaaaaggaaaagatagtgagaatttttttcattccatatatataacacaataagtacattctaatatttagatcaatattagtaggaaaaaaatacctcatttcgaatcaagtagaatatataacagctgacgttgaaaatttagatacaatggccacaaattattttggaaattgcataaaaaataaaaaaaaaggctgataaaaaatgtatgagaggttagtgcagaaagaataaagaaccggacttaagactcaacatacgtgcatttcttcaattagtttagatttatatagcatatcttagaataaatatcagaatttaaaaataaatttatattatcatagtaaaatatcttaaaaaaattaactgcaaatatgagaacttaacacgtaaactttta

SEQ ID NO: 210024 - DNA, 733 bp, Cannabis indica
ggatggtcctcgtgcaagagttggagcgagtcctggtcaattcaatgtttgctctcccaaaactcacttgggatcatctacaaaagacaacacacaacatgagtgtttggtcggaatatcgaacgtgaaaactagcaaatatgccgaccaggagtactcaacagattaaagaataagaatgtgcaacaaaaagtcaaaactcaggaagtttgaaattttccaaattacggcaaaaaatttcatgaagcttagaataagcaagatgaaatataggcattatgcagttcagaaagcaaatattagggactgtgaaatcgcatgaactcatgacaaaggaaatcgcagagtttctaaacttagggtttcctacatatcttctacaacaaagtcgaaggtgcattcaaaaagtaaacatgcaaagtaaacataaaagaaatcgagaacttactcaagaatcagatgtctagagtcaggtaacgtcaaaccaaacgagcagtttcgatgaaggcacttcagcaaacttgaagccaaaaacctctctttttgctttcaacttaattagcaaagaaggatggtgaaaataaatttgtgtacaaatgctcgttggtatttataggcaagcaatggaaaggtgtaatcatttcaaaagaacctcagactcctcaattcccccttaaaagctaatatgggaaataaaaaataatccagttcagccgtcaaccgtggtgagaga

SEQ ID NO: 210025 - DNA, 1211 bp, Cannabis indica
aatccaatttgattttgaatgtagatttcttcccactagactcttgtctatacactctatactgtacattaagtacacgacaaaacaaatgtaactcatgtctatccaaattccaaatccaacaacgtacttaattatataaaaaaaattacatggtatactaatttttgtaatttttttacgaaaaatactgtcactgttatttttttacttttttactgttgttttttttataaatttcatactgcagtatactgttttaagttttcactgttgttattttttttttagttgttctgttttatgttctactagtgttttataaaaatacagtatttttataaaaatttccgtttttatttttttttttgaaatgggacctgagcggttggggcctaaagcagccgcctctttcatcttagctcaagaccgaccctgcgtacactgtcggctcacgtatgggtatatgggtgtttgttatgtgggtatatgggtgtttgttatgtggattttaattgtaaaaatataaaaaaaaaatactttaaagtataaaaatagaaaaattaattaaatgtgttatatattaatatattattattatatttaggataataataaatatattaatatataaaatttaattataaatataaattgtgatttttttttttcaatttacatttatacttaaaaggtaaaaagttcaactttaacaagataatttttatttattaatctatttaaactctactttttaaatctctactaaattttgtatgccaatatttttattattataaaaaataaaaggggaattatcctatatattatttttttttaattttttttttaaaaatttacggtttgagtttctaaagttgttgcaactaggagtttttatacgattttttattgcaatttagcttgcagcactaattgcaataaaagtttctatgtaaaatttcgtaaaaatacaaaaaaaataaattttgaagtgtaaaagtaaaaaagcctcaaaattaattacgtcctccctattataaaaaataaaagtacccctcaactaaaatcttgaggcagccagtgtctacatatgtcgtcgaggaattggaaatagatattatatatacatataataggactacatgccgttataattaatggaagatattaacataataatgatgaaaatatcacgattggcggctggc

SEQ ID NO: 210026 - DNA, 761 bp, Cannabis indica
gatcatgggctcattcattttagtattagccattttcatattcctcaagagaaaaaaaaccctacaggaaaacactgaatctcgtagcgccatgccgagtagtaccattgcttccggcgaaaccagaaaagagcgttcggagtattcattaacgtcgctggagagcgggaggattccgacgctggtagttctgggaagtcctgggaagaagacggcgacacttgggttgtcgtttgaagggctgcttaaggctccggcagagcttttggggagaggaaagcatgggagcttgtacaaagtgagagtggaaaatggggttttgttggcggtgaagaggatcaaggattgggatatttctttggaggagtttgatcggagaatgaggaggttggaccaggtgaagcaccggaatgtgttgccgccggttgcgttttatggctccgaacaagagaagctcttggtttatgactttcagcctaatggcagtcttttccaacgtctacatggtaaccgctttatttaatatctttatttatttatttttttttgtacaataagcctgaacattcattaatcaaattacatgagttatacctctcgtcattacaaaattcccaatatgggcaacaaatttataatacctactaacattagaaaagatacagcaaataaaagaaggatatggcttgataaaaaatgagacatagttctcaagaacccaaaaagataacttcccatactgattacttgtctcgagtcac

SEQ ID NO: 210027 - DNA, 741 bp, Cannabis indica
aaatgtttatttatgtatttaataatatatagttttctttttaaaagaaattcatattagttattgttacctactaacttgtagattttttactctaaaaaataaaaaaaaaaaaaaaaactctaaacttgtagacaacacaattttcaaacaattttaatatattttaataataaacttgatggaatattttgaatttttaatttaagtttatgaatatttctatttatgtcaataccaatgctttatgtcatgttttgacgttgccgttttttttttaaaaaaagtatttaaaaataaaaaataaaaattatataggataaattattatatattaagtgaattaattgaattcctaaggctctgagtagtataggatttaaaattaaatcctattatatcattttgaaacctagtccctcaaaacaatatgattggtttaccctatttgtaaaaattgttttcaaatctgaattacaaaacgaaactaaaaactgaaaacaaagaattaatgtcttcattaaattacaatatactaataatttaaagatggttctattgtgtgtatgttttttttcttcttataatgtttggttttctatattttaaaaaataggctttcaaaaaaaaatctatttagaaatttatttatcgatttttcttttgggattatttcataaatacacaaaaacaataaaaaaaattagggaaattactccatatatttttttttttaatttt

SEQ ID NO: 210028 - DNA, 921 bp, Cannabis indica
cactcttgttagtttcaaggatggggttactaggaacattattcttaaaaccggagtaattcaattcgataagaaacctgtgattctaaggccttggtccgaggatatggagacagcccggatggtcaaatcggtccttgtgtgggtgagattaaatggcttgggactccaatattgggggaagaagaacttgagtgcacttgttagcacgataggaaagtcgattatggctgacaaggttactcttgagcggtctatgatcaagtacgctcgggtgttagtggatgttgagattaaggaagaacctctgagaactattgcttatgtaaatgagaagaagcaactaatggaacaacctgttgaatatgagtggctgcctaccaagtgtacggcttgcgatatgcttggacactcaatttccaactgtaacaaagggaagccgactgtgtggaagaaaaacagcaagggaataagataactgatgttgaacaggatgctagaagcaaggggattccaacagagaaagtgaatggtgccaaggaatctgaaaagggtgatactgaactttaaaacactgctatacctgtcaataatattgctctacctactgttgatagtaaagtggaacggggagtcatttctgagggtacaggggccgtgaaaaatactgttatacaaaccagaaatgagcaatgggtgactcctaaaagaaaaggtgcaaagtctgtcattaggccgcaacaagaagcaatcacaagcaatgactatgaggctttagaggatgcagagggtatgttggctactgatcttagacacctttctaatggatagtttcaatctattaggctggaatgttagggggctgaataatgctgagaagcagcgtgaggtgtttgaacattgtaagataaataaggtggg

SEQ ID NO: 210029 - DNA, 780 bp, Cannabis indica
cacatattctatacttttctattaactcataatatacaattcaatatataataataaattcataatttttaactatcataaagttatgtataatagttttaaaatataaaaattataattaatttatttagtaagatataatgcatgtatacacattttttttttagctctaactatatatatacacttaaaaataattgagtttttattaatctgattatttaaataattttaaaagttaataaatttagagtacaattcttatttttttcttaaaaaatagagacggcaaaatgcttatttattttatacacattgcattgatattactaaaacacactaggatttaatgtgccaaatcagttttatattaaccatataagatgaaaagtaagagaaagatcacaactcagtatcgagaatatttaacatcagtaatagtttagagaatctttttttttttttttttaattaggagaaaaatacttactaatttatttttataataatttaaattgtacaagctgtaaaattaatcatgaatttcaatcataaaatatataaacttcactataaaatataaaattattttaacatacgtaattttaaattattattaaaaccgcgcgaagcgcagtaccattccctagtattagtataaattaaagttaaacataatattatataaaaatatgatatatatatatatatataatccaattcaatataaacaatacaatacaatacgacataatacgacgttccaagcgagtggttatt

SEQ ID NO: 210030 - DNA, 1150 bp, Cannabis indica
atatggttagcaatttgaaatttatcaagattatctttaaattttattaatattttaatatcaaaataagatcatttcatgttttattcattaaacatgtaaatatctaagcttataattaaaattaataaattaaaataaaataatcaaatataaaaaataactataatggcaagtttgttgaaaaatcaattttttaaatttaaagcctactaatatctaaaattaatctaaaaattgattttattatgataattaaattttatctcaaaaataagattgtacacaaaattctaccaacatttaaattttatttcattgaaaaataattttcaaaagttgaaaaatggccaaaatagtgaaatctggggagtgtgcaatgcacacttcccgtgcgcgcgtgcatggggtttagccaagagaaaggctgcatgaaaccttcatttgcgttaaatctcggtcaggttggggggaacttcgaacatggccctgtctgaaggcctcttgtccgagcaagcatcaagtcctgtccactccatcccgcgtgaaagctagtaaccctagcttgatatttttcaaacttcaaaaaatcataattaattaaatttaaattcaaattgagttctgtacaagccaaaattgattaattttcatctactttccaaaaaatacttccattacgaaagtaaaaatattttttgtcaaaaatttgtaatttataaacattcatcaacatgaacacatccaaatcaataaaatcgtcgtttaaaatccatattttatggaagtaaatcattaccatggctttgagactatttgttggatgttattttaccaagatctagatttactaatatgtacgattgattattaactacaatctaacaccctaaatataaattttctaatacgatgaagtaaacacataagagactaagaaatctttacattgatggtagcaaaataataatgactcattccgttcagatcactagcccttaattcttttttgtaacaaagcattatcaagatctgaacttggatcttctctccttcatcagtatggttggattcttcataatctttcacactatgattgagtactttacttgatatgagtggacatcgtactctatcactaaaggcttcg

SEQ ID NO: 210031 - DNA, 492 bp, Cannabis indica
gctggtgaggaaattctgttaaaaactgtacatccaatctcttccaacttatgccatgagtgtgttctgattcctttgaaaatatgcaatgatattgagaagcttatggctagcttctaggtggaaaacaaagagagctagtgggcaaggcattatttggatgtcttgggatcggttggctgttcataaagactttggaggtatgggcttccgtcatctctatgattttaatcttgcaatgcttgccaagcaagggtggcgattgttatgctctgactcatcccttgttagtcaagtctttaaagccaagtactacccacgatcggattttcttaatgctgaactcggaagtaaccccagttttgtttggcgtagtatttggaatgcccaacacttggtacgttctggtactaggaggatcattggcactggtacggcaacaagcattctgactcatccttggctccttgataataataatccttttgtatc

SEQ ID NO: 210032 - DNA, 593 bp, Cannabis indica
acgtgtcaataaatagcttcagcagaactaatctcgcttgatgtgatcttgttagaaaatacgatcgagataggatctaatcgcatactatgccccgaatagttaaaagaataagggggactgagacatgatcgtgcatatactgattatgacatgttctcagccactcatgttattaagctctcaaaacagaagttttaagaatcatcttctttgaaaaactttaacgagtgaatcaaataactcaatgagcacaaacacgagttcatgtatactcaggctgatctattaatgattatcgctgtgatataaataactttttcatggtaaacgacacgttaatgaaagatgtttattacatatcgatctagtcatgcataatcgaattatacacaacacatttactacatatctatctacatatgtgatccgaatcaaaatcacacacactagaaatatagtgtataaaaaaccatacttaacagttccataaaaaattcctattagttttgttgactgcaaatttagccaaccgacttcaaatttgactaggatcgtagcttatggctgccacgtgtgggatgataataaat

SEQ ID NO: 210033 - DNA, 1113 bp, Cannabis indica
ttaggcacgctacattaattttttcagttacagtgcgatctttgctaatcaaagaaatttccttgaaaattgtgtctaattaaacttttagatttaattattaaacttttatatatataattacaaaagtcgggttcccgtaattaaacttttacaaaatattcaaaatacatttagtcaggttgcacaacgactacaaaaaaaaaccgagatgtcctcaaaccgaacactctaggtcgcgccgccatgacatgtacaacatcatctaagctcgaggctcactcctgttcaaccttcgcctttcctttacctacacacgaaagtagaactgtgagtcgacaaactcagtaagaaaagcgtataacaaataatataatactaacttgtatctaggcacccataaacctttttacaaggcttaacaaatgagcaagaatgttcttaaataagatacgaccatgtaccactgtaccacatacaatcagtaccgccactgtactagtgttggtatggtatgaaccataccccgagtaccgctaagtgttgtaccacatgcactctgtacctacccgtactagtgttggtaacaccgtaatgtatcctttagacatcatacactataccaatgcactctgtaccgctaccgtactagtgttggtagtgtacgaatcacatcaagcatgcatatatatcacacatacatacactcacatatatacaatatgttctatgctattcttaatcacataacataattgggtaaataacatgcctaaaaccctaatctgagaaacccgaacctccaactaaaggttcttccatagagaactgaactataataccctaagaaatagggaatcacccaaccaaggctctaaaatgcacacgaatcgacgaaaataattgttcgagaaaccagtcctagaaccggttaaccagttttacgggacctagcaaaccagttaatcggtttgcaccaggttgccccaaacaattcaaaacctatccaaaacatgtccaaatctcaccaaactatccagaacacctataaaaacatcaaccaacatattccaagcaacataacccagaaattcccacaaaatcaaaaagtcc

SEQ ID NO: 210034 - DNA, 1466 bp, Cannabis indica
gtacaagcaacttttcagtaccaaaattaacacttaaagggaaccaacattcgatctgttaggaaaatcatgttcccagccatccacattattagattcccaacatagaagaagtaagaattatcttctttgagtaactttaacgagtgaatcaaagaaacttataacataaaaaaaagttcatgattgctgagaatttaggccaatatactattgatcatcgctatgatatgagttaggcctttatggtaaacgacgtatttaataaagacaaatttattcatatcgatccctgtcatatataatctctattatatacaacacattcacttagatgtcatactacatcagtaatatgattcgagattactggcaccgaagaacagacatcagtgatctgtagtagcgaccactaattaaagaatccaaaactttaatatgttgctgactgttttattcatagctaagtgattttatttctcagtaaagctacaagtcacaaccttatatacgaataaagaattttttgatatttgtataaattattcaataataaatattaataatttaacattcatgcatatataaaaaatattaactctttattaataattagaaatgactttatagatttttcagggcatgaaccgtaacaataagttcaacactgaaagagatccaaacaaaatatattttaggtattcggagatattgaaaaaaaaaaaatttatgagatctatgcatgtgtcgcacccagaaagcatgccgataaagaagagagggaaaattgaatcaatagaagtggagtaggaaaaaagatggatcccaattgacagaagcaaaaggagtggcgcgaccatcacacaatcaccattaccaccaccatcacacaaccaccattatcaccacagccaatgttttctaaaaaaaaaaaaactaaattagacaaatacaaaaaattgaaacctaccatcataaacaatataaaaaaatgtcaaaccaaatatcaaatcctaactcaaatcaaaatctctctttgttcaaatacatttaaactcgacaaaaatatttaaaaattactcaagtttagaaaaacttgaaaagataaagagagcacaaacatggaaggggatgaagaacctgggaattcgaaagtctcaaaagctcgcggtgagctctatttgagttgacaatggtctgtgacattaatacatgaccttatagatgctcgtgcagcggggagagttggtgtagagagaacccgcgagggaagatatgggctcgaggttcttgggattttcaaggttggtgaagatgtttgtggtctctgtatgggtcaacaacaatcgcagctgacccatcaagctaagacactgtgagagagaattgaaaaacgtgactaaggtgaatcgatggggctctggagagagggggatcaagatttgggttttgacggtaggtgaaac

SEQ ID NO: 210035 - DNA, 738 bp, Cannabis indica
gttatgctatgcactagaccagatatttacattgtagtaggaattgtgagcatgtatcttttgaacttaggaaaggaacattggaaggcaatcaagcatattctgaaatacttaaagaggataagggattatgtgttagtctacaagagtggtgctttaaatcccgtaggctatactgactcagattgctaggcttgtcttgagccacacgtcttcaaccctccctcttaaaagggaagggctgcttgaagtctgctttacacccaatgactctttcaccctttgatcttttcaagtgaagtctaagcttgaattttttatgcaacttcagccttcctttgtggaagccaaagcgtgcttcataaaaatttaacatggctctcacgtgcacgttgtttgtcgtgcaagaaagatcactgggggtaagatatgtcttcaatcttccttcttagaatggaaggatttcttgaagtctatcttactccacaggatttttttcctttaatcttttcaagcgaagtctaagcttgaatttttatgcaatttcagcctttctttgtggaagctgaagcttgcttcttaacaattcaatgggactcttgcatgcgtgatgttttcgtgcaagaaagatcactgggggtatgatacgtcttcaacactccttcccagaatggaagactgcttgaagtctgtctaactctctgtgatgctttcgtcctttgatcttttcaagcgaag

SEQ ID NO: 210036 - DNA, 1154 bp, Cannabis indica
gctttaactggattcataaacttgacagcttgtatcacctcttctgctacaaacggacgcagcaagtcatcattcatttcatttgtaactttcggccgaactctccttaacacctcatcaacttgctccatattgagagtcgaagccgagaataggcttccaaaataatcctccaccaatgttttgatcattccaatgtcagtctgccatatacccataccatccatgagacctttaatttcatttttcttccttctagccgaagctttcctatggaaatacttagtattcaaatcaccccacttaagccacaatgcccgacttcgttggcgccaatatttttcatccttctcaagtacaacatttaattatttctctaacgttttcaactccccccaagtacttgagtcttgtctacccgataattctgatattgccttcttcaacttttccgttctttctttcaatattttcttcttttttttattccaaacatgtaaagccgcacctaccttccttgtttttactttaaacccccggagaaaccaccctttcctcattattccacaccctctccactatctcctcacattcaggctcttcacaccaagcttcttcaaagtggaatcgacccttccgcttcaccttaccacacctttcccgttctgcatcaagcagcatatccactaccaatggtctatgatccgattcccaccagtctaataccatgatgtcagctccatcaaaattcagcaaccattcctcattgcataatcccctgtctaacctctccataaccggatttagctcatgtccattacaccaagttagatctatttttgaagagcagaaatcaattaatctacattcatcaatcactgtcctaaagtcctccatcgccacatcccttctaattcgacctccctccttttccgataaactcacaacttcattgaaatcccctacacacagccacggccctataatttcctccttaagatttcttaacaattcccatgagaacttcctttgcgcagcatcaggatgcccataaaaacaagttacagtccaaggaaagaaatccttgcctgccacccttgcaagtatatgacttggcgaacttgaatcaactctcacacttatctcctctttcc

SEQ ID NO: 210037 - DNA, 576 bp, Cannabis indica
aaactcaaactttgctcaaacaccataacagtccacaaattcaactcaaatcaacctaaataacttcaatttaacttcagaatacaaaaccaaacactatctagtatgacaaaatcctaattgcaaaaacatgcataagaacttaacttgaacttcaaaaaaaacaaggaggaaggtgctaggaattttaccttgaattgggtacacaaaaaacttgctaaaatcctcagaatcaagctgatgaaaccctaatttctgctagtttcaagagagctcgagagaaagagagagaaggaaagagaaagtgttgaatttttggtatttttctaattttggttgaatggaaaaatctagtgtatatctaacttaattaaattagaaaatcagattataaaacataaataaactcactgaagaacaaaacccaaatggccaaaaagaccattttgcccttacctaaaccaaaaggcaaccttactacctaggggtaatttggtcatttacaaaatctcgaatattcttgacatttccaatgtctatctaactcactccgctattactaaaatattaaatcat

SEQ ID NO: 210038 - DNA, 664 bp, Cannabis indica
aagtaaaatttatttgaaaaagtaagattattcaatgccactttgcttgaattgcttcatatctcattcttttattgaatggaaagaaaaagaaattgtatttatatatttcttaaagtggaaagataaaatataatatggtgagaacctatagaatatttattaacaaactaaaagatatagtattcttctagctatttcaatctttctctcttgtgaattaagaaagcccaagtttaaaatagctagcccaacaaagtagtacaatgcccaaaagcttcaatattcttttctccctttacttgtttttatttttccctaaaaaatttgtactaagaaaagttggagaattataagagaataaaataagtgtagtaggatatggagtgaagcagacttaagtgcagcctattcgaatgtgtagctaaaaaaaaaaaaagatccaactttagagcatatacatgtggataataagaaaaaggaaaatatttcaaaacactttagggtttgagaaagggaaatttgattttttatgcttatatttggttaaaaaatttttttctaaaacaaataataactaatatttgtaaaatatgacaatttttatgatatccctaaaatacccctatttacatcaccccatttacaccatcggaccacccat

SEQ ID NO: 210039 - DNA, 732 bp, Cannabis indica
aacattaatacatgtcaagaattggaaacagaggatttatactctcgtaactacttacttacctcttctttctctctctctctcttctccataaaggccggcgatagatgcataatactctctgcacgtctccttatctgcctatcattccttcctaaaccaaaaaaaaaaaaataaaaaataactaaaactcttacttcagttattacaaatcttactttccaaacctccccttcatttcttttattgttttttcttgattatctaccactttggccttaatcccattttcttctcaagtcattttttcttggaccacaaacgcacaactttcttcttctatagggttttattcctagtgtttttttatgtattgtcggttggatttgaaccctctttaatgcatgtttctttcggaaagacaagtatcccagatctttttttctctcattaagattggatattttggttatttggtcatctgggtctgagactcttctcttgagtggtgaaatacaaaaacaatggcgattgacctgtgttcggagaagtctcccgctatggtggtgacaagtaatggcagtactcccagaatctcgttttcttatgattttctccaatccgacgttgttcccatcgaacaacgccctctcagatcgaactcttccggtctgaactccagtattgattttgacttctgcgttcgtgagagctttagcgaagaatcttctt

SEQ ID NO: 210040 - DNA, 813 bp, Cannabis indica
actaactaatatagtttatttttattattatttattttttttgtcgtaaattattatttaatttttaaactaaaattcccgcctaaccatattaatttagggaataataaactataacaattattatgtaagtacctaaaaaaagagtcgatcgtactaaatatagttcttaataccattaactaagtacatgtaagtataaaggcagggtttattatggattggatagaagagttgtaagaagtatattgtatgtgatactttttttgtatagatgagataattcaggccaaatttcggatgctgccaagttgcaaatgagttttgtttgcaatatgactatcacggttgatttagcaaaaaaaaaaaaatacgtacatgtacaccataatctctaattactgttttttttatcgcaaaacgttcgaacaataattttaatattctaagttaacttaataatataatttaaaatattgaaattattataatggttcaaatctttatatttaattttttttttatcacttcaaaaaattagagcttggtatatattaatttaattatttgttaaaaaactgtttttttttcctttaaggaaaatacttgttattataaattaaactggtaagtcatttacaacaacagagtacaaagatgaaggagaagattccatccaatagcaagtctcatccagccctaaagcatatctagccaaagtgtgagcggccatattagccgtacgtttgacatgtgttactgatacacccgggagaaagaaaagaagaccagaaatatctatgattaaatcat

SEQ ID NO: 210041 - DNA, 461 bp, Cannabis indica
ccctttgagcagcaccttctttgtggctttgtccttcacaaaacaaaattcagagttcaaattcaataagaatatcattatcagtgacaagtttagatacacttatgaggttcttagcaatctctggaacaagtaaaacatcttttaacactaaggatttaaagctgtcatttgtgggaatgtgactgtaaccgatgtgagagatggcaacttgatgaccatcacccacaaccaactagtccttaccaccatagtcagatttttgactcatgttgctcccatcagaggtaacatggctgcttgctccgctatccgcgtaccaaatgtcgctgtccacaacttctggtgaggcagtgaatgctgatggaggatttttgggctgattctggctgagattaggatcagaccccatgaatgcttcattgtatcggttgtaacagacagctgccgagtgcccaaac

SEQ ID NO: 210042 - DNA, 425 bp, Cannabis indica
cttaagtctaaatgattgcatatgtaaatatttttactttttgagcttgttgcttacctatgctttgtacgggtgtatacatttgtgttggtaattacataacttgctaaataaaaagataaaatggacacaattagaataatagttaatatttttatttatttattggtctacatgtgttgttatcgtagtaacgtaaatttattgaattataaaagctattgcatgatctaattgatctttagctaattaaaaacataaaatgattgaacggtacattctgcccaaaagacattgctaaagacaataattctgaacatattgtactttaggggtggtcgtccgacctgattaccagttgtttttccaaacctttaagcgaagtcggctcagaaggccacctacttaagagtaagtgttcgagc

SEQ ID NO: 210043 - DNA, 843 bp, Cannabis indica
cagctttagtagctatgtttactgaataatcagtaaacatgtattcatcaattttcaaaaacaagaaaggaaaattgcattttcacttccatctctctctcattttcgaaccacttagaaccagctagggttctggttttgctgcttcaatcagggtgttacatcaattttaaggtcaatccaagctaaggtaatccttgtgtaactttcttgctagtttccttaagttttaagaaagaaaattttgcatgcttggtgattttggtgttgtggctgctgtatgtgtttgttgttgttttgtaaagcttaatattgttttaatatgaagattcaagcaggtttttttggttgtttgatgattttaagtaagtttggagttggaactcaaaactttggttttaatggtgaaatgatgatttagctactgtggttgttgtttgtgtagggcttgtttttgaggttatattatggttatataaggtgaattgagcaggttttgatagctagtttgtaggatgagcaagctttgagtttttgaactcaagcttgactcatcaatggtgatttttgtaattgtacatgaagctgtgttttgttactttgaaattgatctctagggtgtttagaacaggtgtggagagtctcaagtggtttgggggttgttttgattgagaaatgaaattttaaaaaatcctgcactgaaccggaattccggttcagggaggcctgtaggaactggaatttcggttggcctccaagaatttttcccagaaccgaaatttcggttggggaaccaatctaccggttggggcagttttgggaatcctagtttttcccattttt

SEQ ID NO: 210044 - DNA, 1066 bp, Cannabis indica
ttctcattaatttagtctcaagtaatcttgtacaacatgtcgttatactcgccatcgccatgtcactcttattgaaatttaggtaaacatgtagcaaattgactcaaattatgtaaaaaattatgtcagaaattactatggaaaatatttacttcaagcctaattagttgaccgtttaaaggaaaaaaatttgcacacaatatttttttcttgaaaaattctaattaatagaaataataatttttatgaaaaaaaataatcttaaaatcataattcatatgcttagctagggatcagcataagtaaggacattatagaatggaagaaaaaaaaattaaaagataaaaactttttaaaacttgaaggctaatataccttattattgctgttattattttgtagaatgcatgaaaagaaagttgtagttttgggtatagctgggcaatatttcatggaagaggggacttaattattgatgtcgggaacaggtatgatgaactatgtcaggctcatttaaacatccgttgataacaaaagatttcaaacaaatgttcagttaattattacactattttagtttggtttctcacataatataagggcacctaacctaaccatttatataaccaccacctacccactattctttttttttctctctttttattgaacccaccaaaaaattcactagtaaaaaaaggttaaaaactaatatacatatggtgaactataataattgtgcttgggatttagacttcatcaacatataatcatatatcatgaatcaatatttatatatatatatatatatcatgatcaattcctgcaaaatatgtaaatatatatatatatgtatatgtatatatcatgatcattttttgactctgctgttatgcagcgagacttcttttggaaaaaccaaataatgtttgcctcatttttagttggattaaaatcaaagctacaaaaattagcttacaaacatattgtaaaatttactcaacctaggtactttttgaatatgatgaatcataagtcaaaatcttttttcatatatatatatata

SEQ ID NO: 210045 - DNA, 621 bp, Cannabis indica
atttacgatgtagacatctgcaactagcgcaagaacctccttgaacatggatagctcatcatctaactgaagggcatgctttgtcaaaccataaattgcttaagtcagcaagcaacatgagacaaaactgccttcggaaatttagacaataaatctataatttcctcaaacaggacacccaagagctagagtttcaactaaatagtacacggcacacgccaactcaataacatatcaagaatatttccaaaatatctacaaaataaaataagataaaaatgaattaatcccctagcgaagacattaaaacctaaaaaaagaaattctcaatagttacaagataacaacttccaaataaataatatttaaataaacttattggcaaaaactctgtagcaattggtccttctcaaaactgacctacaaattaacaatacataaaattctattaataacaatttattgaaaaaaaatagttaatgtgaacaaaaatagtaaaacaatccataatgtcaagacttgaaacaattatttgtcgggtctgaaaatcatttgtagaaggcatgagtacaaaaggatcgtatccattgaccatattacaaatctaccttaaataattag

SEQ ID NO: 210046 - DNA, 1360 bp, Cannabis indica
gacttggactgggacctaggaccaagtctaggacccggacctgaatgggggacctggacccaggatccaggctttaaaactagcaccgagacccaggacctgaacccgaactcgaaccctgaactaggacccggaccaggacctgggaccaaaagtggaactagactaggacccgagactggatcctaatatggactcggggcttagacctgaaccatagtcgatgtttggatctggacctatacccggactcaaacttagacccagactcagaccaaaacccagacctagactcagacccgtatcccgtgaccccgaactagatgcggaaccgaaagcacaccgcgacccgaaaacaagactaggggactaggacccggtctcagtcctggaactcgaatcagactaggacccagacccagacccggaccgggacacagacctgaatcaaaactcggatcgagacttgggacacgaacccgaacccaaacacggacttggaccagacccagactcaggacccagattgggattagagactcagacctggacctaggtcctaaacctagattggggacccaaaactgaaattggaaccaaaatcaggacccaggactaggccccaagacccaaccccggtctcggtcccagacccggacctggacatggacatggactgggacctaggatctgaatcggaacgagaccgggacccaagattgggatccgtattttgacccacgacccagtgcttggaccaacccgtagtcgatgtatggatcttggaattgtaccaggcccaaaatcgaaacaagaaccagattcaggaccttggaaaatcaattagaccttgacctagagacagatctagacgcagaaccgaacacggacccagacccagactgggattgatactcggacccagactaggatcgatactcggaccccgacccaaactcggacccaaacttgtgccaagacctgcgctcagaacttggaacccaagacccgtgacccgggaactggacctgatgctagacccgtaccagaacccaaatccagacctagacccagaaaaatacccaaacctagacccagatcgaaacttggaccaagaccgagagctggacccaaaccgggacccagagtcagacttgtacgagaactcggactcaaacctgggactcggacttgaacccaagactcgaactcggaccaagattaggactcggacccagacacggactaggactagttccattccccaggtcctggttcaagttcgggtctgggtcgggtcttgggtctggtcctagttccgttacccaggtcccagttctggtctgggtttgggtcctaa

SEQ ID NO: 210047 - DNA, 557 bp, Cannabis indica
ctgttggatcaagggatctgaactgttgtgagcgcctaccatacaatggtgtttgatcgacactgcctcacaccccaaatggtctttaaaagccaacactttcctcaattgggtcatttctactgcactttagtttccaaaaatttcaaaccaattcgataaaattccagatgcccctgattttcttttgctcttcctccgccgttgtaaggcaaaatattatcatcacacgatgtcttcattcctctcctttctttcattgtgtaagttctctatgcttttatacttcttttcatctgctagggcaaatagtgataataatgtgtaattatttgctttgttggttccttcaaaatgatggccttggttgccgttggcgcgacgccccctttgatgggcgtctgatggcttgtgtctttctttatcaccatattttgtttttcttactttcactatgcatgtattgcttctctctttcttttaaagagctgagatcagagggttttttgtatgcccctgtctggcagttcgaagttgcttttgcacgccttctatat

SEQ ID NO: 210048 - DNA, 674 bp, Cannabis indica
ggtggttgttttgatatatactagtcctatttttagtgataagtgaggtttcagagctctaaacttttagtatagtcatgttatatgtcgttggactcaattttgaatgtagaatacaatgataataattatttagccatttgatagcataggtgaaagtgatatttaagattagactaaacaattagagctcgggacttgagagctttagattaacctttttagacaaagtttaacgacttgagagaggtagggactcaaattgattattgaagttgattttatatgtgttgaataacatttaacacattccaatttttatgatttaaaaaatgtttgaaaaatgaaaaacttaatctgtatatttttctagactgttctgagacactgagtgtcaaatatatttttgtacaaatatttatgtaggttaggatttttgagtgtgttgaaaatacagtagattttctaaaataaaagggaatatgttcttttattaatcttatttgtctgcttttagttatactgatgagagccataatgttgatcatgatttgtgtacactgttgttttacgacctagtctgtgtgtcatcagaggtagatcagatgtgcactcacctatatgtgaaagacctaaaatttgtacaagaagtgatcaaattttagccacggtat

SEQ ID NO: 210049 - DNA, 1094 bp, Cannabis indica
ttaaattctaagctctatgaacgataatggaaaaataaggggaaggtccaagttttatacccaaacaataaaaataatttgattgtaatgataactgatcgaatggatgggaactaatgggtaaagaagagtcaaagtaataaatattgaaatgatgcttacatcaatgtactgaactgccaaaatgaagcatgcaatttcttttaaggagggaaaaatacgatcatacccctggaaattaaaaagtcctttttatttttaaaaaaatactttttaggaagctattgttatactcatattttgagcaacaatatggtgttgacacatgtaaaaaagctagaaaataaaccagctcaagttttaaagcaataaatgcattcaatcaactcgcctcgaaaactacaattagtagaaatatttgaactcacccttttaaagataaggacaagccatgaataataacttttaattgatgagaccaacaagacgaacaataaacaaagaatattcatctcaggatacacagaatacacaatagaatgataatgtttagaaaaggtagaaaatgaattattcaaagagctcgcagctcattgacccacatacttatgagtatgttagaagattagcagaagcactcccatcatgattcacctcaaaattatcacactacgatggtgtctcgcttttgcttcactcaatgcttatagtaggacacgagaagtattatttaaaatattcttaggcattgagaagccttgttagggtaaagcatcttgagaaggctgtgtgtaccactagatgaataaagcatagtcaacataattgtttacagatagagacaaagagcggttatggcagtatttattattatcatcccatgtgatgtaagtatgaaacatggggattgtccacatttcaagaacagttacagggacaagatctcaagggattaattgtcatcataaactcctataaatagggatagaacttagggaacaaaggacgaccaatttgagaaaaagagagatattatatcaatatttccttttattttgtattatgtatacaatttatttaattccaaaataaaa

SEQ ID NO: 210050 - DNA, 620 bp, Cannabis indica
cacaacttgacaatctgtttcgaattcgacattgacatacccaagtctaaaacataacaacacaccagccaaaaccaccattgcctcaaccacaactggagaaagcaaccccatcactggtactatcatagaagccacacacatgccagcatatggtccctaataaccgccccaagacccactctacactcatctcaaataggccagcatccaaattgaccttgaagaacccttcgaccggcggttgccaaatcaatgttgaaggcagtttatcaacatgcctcaccatcgaagccgatgtactcttcttccctccaaatgatgtgtccctctattggtagtcacgagcaaaaaagaaagcccattggttccaaatacgctaaaataacaccatcaatctttccatttcattaggccgaagtaacaatatcatgcattaattggtttttacccttaatgatcttttaaattacatatatatttttttaattttaaattatacacgtggggctgacgtaataactaactaagttatagatatgtcattattttatttgtcacgtgtgcagtggcggaactatgttatggtatatgggttggccatggccccctaatatttt

SEQ ID NO: 210051 - DNA, 591 bp, Cannabis indica
cttgatttcctagtcaagaaaacatgtacagttatatctttaatatattattttattttttatatatataaagaaactttgttaaaaatttgtccatggtggatctatttgaacggaatgacagtttgtttaaagaaattgtacttttcttttagaatatttttcatttatttttttgattgtttccttacttgtaaaacacgatatgtttatttattgagaatatattgttacttagattatagatttatatgaaaagaataaaatattttattatgtaataaaactatatttatatatggttttttttttttttttataattgatttattttatttcttttctgatatgttttcattaatatctctccattgaagttgtgtgatgtctaagaaaaatttcgtgggaatgaaattggctttgatagagtttagatttacaatactgactagacagatcaggatttcacctgcatacttttcatatctattcagatagatttcgtcatttaatgagtttttgtaagaaaactaattaatgttttctctttatatttagaccttttggagctcggttttaagggtcatttat

SEQ ID NO: 210052 - DNA, 553 bp, Cannabis indica
caacaacagggcactttccaccattcactccggcagcgatgtctgagggcgttgtccaactgaccaccgataagtatatcgcaatccaagaccagatacgcgccctgcaagccgaggtggatggacagaacagggcccgacatcctcatcaagcacccactgctcgcacagaaaaccctcaggtgactaactctagacgttgtaataaccatactcgcagggaatgaaggatcaacccagaaggactcgacttgaatcaaccaacctcgagggaccaatctgcgagatatcccaaccaggaggcacagactgaagaagaccctgaacgacgcaatcctcgcagcagacctcagtcgcgagacaatgacgtggaattcgcctcctcatcctcgcatgctcgcacacccagcaggtatactaggtccggttctgtggagacaccatagggaggacgatatcaggtgcacaggggtgatctacgcgatcaccttaacgctattttcagggcacgctcccggcacctcgtgacattgaagagccccgtgatccccga

SEQ ID NO: 210053 - DNA, 851 bp, Cannabis indica
tcgaggaggttgctcagataggctagagcaatcgaagggcgtatttgggctgatcaaggaacctaccccacctccagtaatacacccgaagaccaaaagaggcaaagaaatgctcattcactatgtgacttggtcggtccctgaggcgaacaagtagctggctggggcagacaatgacctttccctggagttggtgatgggaggagctctgaaggagtttgcaagggtaagtctttcctgacagtttccttttgtccttcttcacttagttcaaattttaacattctttctctgtacagactagtctgaagatagcttacgcctattctcgggctaaatcagctgcctctaagaatgtcgccatttccaacactattcgggcgaaagtggacttggtcaggaaggacgccaaggacgctagggtttagcttggggctgtccggatagagctgggggaggtcaataagaaatttcttgctactgagaagaaggtagccgaactgaccaaagatctacaagcctccgattagcttgaaaccgccattgcctccttgtccaaagaagtgaccagccttcaagaggaaagggaggttcttcgggatgtataccgaaggttggaagaagagaagaagaccaaggaggaggaacttagagctaaggttgagaagtataagttagaggccgggtagtagagatctgaagtggagaggctcgaagggaaggtgaatgccttacagacagctggtctcgagattttctatgacctctagaaggctaatcccccagagaatttttattacttaggcaataccaaagacatgtttctcaagtattgcacttctcaagtggcc

SEQ ID NO: 210054 - DNA, 931 bp, Cannabis indica
cgatgtgatactgtcgagtagtaattaagccaacttacatttatcgatatctaatataatactaaatatactgataccgatattataatgtaatctagcaggcttaactaacatgtacgctaaacatgcaaacacatatgtatatcattatactaatcttacctcattttcgaattcaggtgtggcgaccaacctgagtggaacagctgctcgacaatttacaggctcctaaatcacattatttgtaaaactgataagtgacacgctaaatcacttttcggggacttaaacttgaaactagaagttttcctatcaatggataacatggcaataccctaaatatcgtaaaaacgagaaaaagtagggttcctaaaaatgccccaaccagtagaccagttccccaactgaaattctggttctgtggggtttcctggggatcaaccggtcggccggttcctacaggttcccctgaagtggaattccagttcactgcaggaaacacacaaaaccacgccacaacttcaaatcgaccccaaatcacatcaaaccttccagacctgctaattacactataatgaacataatccaagcaataaaaccaagaaatacccacatatacacaaaacaccattaaagaccaaaatttgagctctaaagctcaaaccttgtctacagaccaaaccaagccaccaattaactctaattctgctcaaacaacatcactaactttttaagaactcaaacaatacaacacaacatctacagcaaccttaaaatcctaaaaacatgcatgaaacttaacttataacttaagaaatcataaggagagaggcttaggggttttaccttggattagaatcactaaaagcttgctaacttctgtgaattgcagcagaggaaacccaaatgttgctagttcccttggtggttt

SEQ ID NO: 210055 - DNA, 832 bp, Cannabis indica
cataatgtgaacatcatgattggcaaaataataagaatatcattgtttaaccaaaagcggaagcgaaactaagttacttttaaaagtaagaacattaaaagtattattgaagagaatcttaactctcaactgtaattcaagaataaatgtgtcaacttagataacaacatctccaacataagtgcccactttaagctttgactctctctcacttgacttcctgagatcccttagccccttgttgtgcttgcttcttttataatttttcttatcctttgttgtgcttgagttgagaattatagtgagaatattcattcatttttttttttttgtatttttacggaatttcatatagaaaccccgatagcaactaatggaacaacctaaatcgcacccaaaattcacatagcaacccacatagaaaacactagagaaactaccagagcaatccaaaccgtaactttaaaaaagaattaaaaaatagtatgtggaataatttttcaacaggtgatatataataatgaaaataattttaaatgatcgctacggaaaagtgttatacgaactatattggacttccattataaataaaagattttgtaattacatgtcaagctgacatatttgtacacctaacttctcatattcttcgtagaaaaattaaatgaaaattagtaatgttaatttattttaaaatatctgctgcaaagcgcgggttgttaactagttgcatataaatataatatacactatcatgtaaaataaaaacttctaatagacattgacactaagagggaaaagagattataatttatccgcatataaaaaaaaa

SEQ ID NO: 210056 - DNA, 1052 bp, Cannabis indica
atatgataaatttttaataattatgccaccaatattactaaaaaacataaggttttttcacagggaataatagaaagtaaattgtttcttggactaacaactaacaagaatacaaaatgcttgtagaaaagataaaagtagcacaatttatcaaaaaataaaaaactaaaagttataaaactataaagaagggctaattatttctatgaattgaaatacatgcatacgattctcattccaataaagacttatattattaataaaattagatagcatgaagcaaatagatcttatagagaaaacaaaaaacaaggatgggtacaaaaggcaaaagagaacattacatgtcttggattataatatgcgcatttctagcttggagagcaaaacatggaatcctaacagtgataaaaataaaataacatctttttttgcactctctctcaaactgaactccaagtcaaagtaaagatgacatagtagttcctgaaaaagtaagacatattaatgcttaatgtaaagaggccttgaggctacaacactcttagtcctcaccatgtttagtccaaatagtgcataatcaaacataagataacactaccaagctataatgctaaaatgaaagttgtattgaagtgaaaattctaggctattgtacaatatttgatgatggttgtatattatggtgtaaattcttcaaacacttctccatcaatagttcttcaagttggctgcttatgatataactttttctgtgaaattttccttagtaactttttatgtgtagaaagagttgaaacaataataaaaatcataaagaaaaattattattattcaaacataacacttcaattaaaatagaaagaaatataaatttaatagaagtatttcatagtcacaatttgctacattcttaattaaaaggaaacgtatatatttcccctattaatacaaattaagttatgatataagatgtaaagaataatgtgagtgaggtagcaattaggtggccaattataatatatagcatcatcacgatgattaatatgtat

SEQ ID NO: 210057 - DNA, 515 bp, Cannabis indica
aaaaaaaaatcccaaatattacagtaaagggtgacgaatttcggagacccaagagccccaatgtctttgacgaacgcctctataccgctgttgaggtctagccatggaggtttaataatgtcgaaacgttttttggtcagatcggagtgattgaaatgaaggtgtttgatttattgcctgagagagattttgaacactttggttttgtatagccaaagaagtgactgtagtatgtagtggagaggggaagagaaaatgggcaatggggatttatataaccgcttcttccagccattatgaggggacccattgggttttttttttaaaaaaaaatgatttattattaaatattaaattgtcgacagatgaggaaaaaataatgtaaaataaaaaatgtttcttttctaagagaaaataaaagaaaatggtatgtagtagtaagaaatagtatgtattaatgattatacaggcagtcctaaacaggggtccaaaacaaaaagcacacggtttctata

SEQ ID NO: 210058 - DNA, 1280 bp, Cannabis indica
gtaatactttaccaattctagccaacacctctatctcatgttcacgtctttccgggtaaagaagtatttcagacttttatgatcagtttatatctcacatttctcaccatataagtaatgccgccaaatgttagcgcaaatactactgctgcgaattctaagttgtgagtagggaacatttgctcttattcctttaaccgtcgaaaagcataggctattacctttccatcttgcataagaacatagcccataccttgtctcgaggcatcacaataaacaacaaacctttccttattagaaggaagagttaacactagacaagcgctgctttaactccagaaaacttttcgcacaccgatcagtcctaaaaaacttcaaattctttcagttcagctctgctaagggtacaattgagaaaccctcaatgaatcgaagataatacccagcaacccaaaaagcttctaacttctatagctgattttggtgtaagccaatctcgaacagcttccatcttggctggatcaaccatgatcccatctttatccactatgtgccctaagaaagagacaagagataactagaactcacacttttttaacttggtgtacaacttgtgatatcataatcgctgcaataccgatctgagatgtagtgcatgttcctcttctgattcagaataaaccaaaatgtcatcaataaacacgttcacacatctgtacaggtaatccttaaatacccgattcatgaggtccataaatgctgccaaggcattaatgagtccaaaatacatcaccagaaatttataatgcccataccgagtacacaacacaattttcaggatatcttccactcgcattttctcagttgatggtaacctgagcgaagatcgattttagaaaagaccatcttcccctttagttgatcaaataggtcatcaattcgaggtagatgatacttgttcttgatggtaagcttattcaactcttggtagtcaatacacatctaatgaaccccaagttcaataactcctgaagttggatgtttaattctttcaattccgctagagccattcgatgtggtgccttcgatactggttccgctccctgaactaactcaatcacaaattcaatttctcgagaagatttcgattccagtagatctttaagaaaaacatcaagaaactcgcacaccaatcttgtgttctcaggtcctgatgtcacaggttggctggtatccaccgtggtgacaacctctggtcatcaaatctttagcttttaaaa

SEQ ID NO: 210059 - DNA, 543 bp, Cannabis indica
acgtaacataacaaagctttttgttttgttggaggggttattagatgattaatttaatttaatttaatttaatttagaaacccgacttaagagattccgacctcattcggctctgtccacaaaagaataaggaaaaagagtgtggatttgccagcaaaacacaatcccaattcctattactaagagaaactgaggaatgagaaatgtttaatattatgtgtatttctctctttggtcttgaaagtaaaccataaaaaggaattgaagtgatatgcattgggtaataatatagtgttttatgggaactactcattcaatcatataggggtggaaattctaagcaaatatatatatatatatatatataatatttatatatcatagtttttaagaaaagaaaatgaaaaaatagttaccaagaacaagctaacataaagaagtaaccaatttacttatactattttttctatattttttaactttttactaaaacaaaatattcataaacaactactaatttgggagagagaaagataattaagt

SEQ ID NO: 210060 - DNA, 1694 bp, Cannabis indica
gtgtttaagcatcccaacctctctctcaagccttcgcttttccaccaagacgtcctccagcttcagttggatacttctgtaatcaaactctactgtctgtgtcttgtgtcgggctcgccggttctggtaccagatggcaacctgtcttggggatagcccaagctttgaagcaagatgaagcttgcgttccgattggagcttgtgatcattggtgaagctcgtttccaagagccttacttgagcttgggttagccttctagttctgcgctgccctgtaagtggtttagacaggtcttggttttgttgtgtctcctcaataagtatgtcgaagcactggaaatccatttcttttgtggaaaacaaattagtttcatatcatttctctgttaaaaaggtttattatatatagatttttaagcaagaggaaaaatgaatgctagtaaggacgacctgttcaaatctttagtgttccccacttgtgaataaatacttgtctcattaaagaacatagagagagagagatgtgtatttcagaaagactcatttataattgatatagttttatatgcatgtgtatgactttgatagtgaaaaaattaaaatatatttgggttcgagagagagctaatgaggagagaggggcggcttataactaagccgattgatttaacgtcgtggtcctacaatgtgagaggcgagggtgaagggtcaaattagatgggcagttggtccatgtgttctttctttgctttttgacccaagcttaactcaaggatcatcttcagtcatttgtttttttgtgttggtcaaatgaggttaaactctactcagaaagagaagaaaactgtggatttactgttgtctggatttacctatagtatctcaacaataattatggattctaaagtcaataacttgtgattcaaaagtgtattcatcatatcagttatccttctagcctagttatcgcaatggtgaaacacacaaaagacaacaaaactaatgaagaccacctctccttcatcaccaaatctctgaaccaacacttactgacttcagttatttctcaaatgattgttttctataatattcaacagttacaatagtatttgtttctatgtgagcttgttttacaaattggtaatctcttgccttagtaatgtgccaattagcatgggctaggtataaaggtagaagaattttgagagtatggaacgtgcaagccaaagggcacacattaggcaaaaggcacatacgaggcaaaggaagagcattgctagaaggcattcatggtccttagtaccatgataaaatgtcaccttataatcggtaagcaattttttataataaggcagcttgaatagcttagctgctaaaaaaataccttattttttttttaattacttgaaatgagttatttcagcgcaacaaatgatacaacagtattaagtttgaataattaagcatcaattatgtcatttacatatatatatatatatatatatatatgtacggtattacttattggatagtacgtataagagtatttgtgttctaatatgcttattttgctatctataattaaagaaattaattttaattttgtattatataggttgttggttatttatgaggccaggagaaataagaaaaaaattaaagtttagaattagggaattagggatagagattaa

SEQ ID NO: 210061 - DNA, 720 bp, Cannabis indica
caagcctcacttcaccaagagcttcaacaaatgtgagcaacagtaaaaatgactctctatatttataggcaaaaggagacactagattggtgacaaatgtctctcatctgatcaataaaaaaaattacataataaataaataataataagtagtacttgtaagagtacaatgagctcatacctctacaacttacctatcttctttttatgtaatgagatgtattgaccaagacatatatataaatatatatatactcccatgacacacaaacgtgcatgccatacgcccaggagagttgtagccatgacctttacatatatacatattacttgcatattggtccacatcaacatgtgatgagatgtattgactaagataaacatatatatatatataaaagctcctatggcacaaagtcatatgccagcccattctctacgccagtcctccctcctatttatatatacaacctattacattttgctttaatgccaagcacacatcagtaagtaaaaaaaacttttacactacttgtcatatacgcatatgtctatctcctcacttgatgtccatctcctcacaacacttaatgtatgtctgtctacctccttctattatatatatacatgtctatctcctcccattatctacatacatgactatatattatgtctgtctacctctttctattatttctatacatgtctatctcctcccat

SEQ ID NO: 210062 - DNA, 1135 bp, Cannabis indica
aactttacaaaatcatttacaagcactgggatcctgattttaaaatcttatacaaaaaaacacaaaatacataaccaagtcgcataacgactacaaaataataatcccaaatgtcccgagaccgaacactctaagtcgcaccgccatgacatgtacaacctcatcccagctcaggctcactcctattcatctttcacctttcctttacctacacatggaagcagaattgtgagtcaacagactcagtaagaaaagtatataacatatcatataatacggacttgtatctaggcgtccatacacctatttagtaggcttaacaaatgaataagaacgttctactaagatacgaccatgtaccatgtaccagatgcactcagtactaccatcatactagtgtaggtaagtatgaaccacaccttgagtactataagtgttgtaccacatacaccttgtaccttcccgtactagtgctggtaacaccgtgatgtactcttcaaacatcacacactttaccaatgcactctataacgctacagtacaagtcttggtagggtatgaatcacaacaatcatgcatatacattaacacatacacattaacttatacatacattttcatattcatatcacacattatatacagttcttacctcctttccagattcaagtgtgttggtcgacctgaacggaaagtctcgtgctggatggatgccctaatcacatattgaaaccgggtaaatcatatgttcgaaaccctaatccgggaaacccgagtctaaaacccaaggctctgttatacactctagggattacattaacctaggaaacatggacacacccaactaaggtactgaaatggaagagaattgagaaaacccgtttctcggggaacctgccaaaactggttaatcggttttataggtactggttaaccggtttttgccagtcctccctaaaaaaaatctccaatttgctcaaaacttgtctaattgcctccaaaatttccagagtacctaaacagggtatatacaacatattccaactagaaaatcccaaaaaaactcattgaatcaaattatgcaattaaagatcaaaggttaggtttcaaaacacaaacttgcgaaatcataaca

SEQ ID NO: 210063 - DNA, 580 bp, Cannabis indica
ataatatactatacaataaaactaatatatcacataacaaaaattatataccttataatcaaaatatatatatatatataataacaacaaataaaaataaaaatatataggatgctaatattatacatcatgtcaacaaaagtacaacagagaaaatagaacgtaaatattattttaaaaaataatataccgtacaacaaaaaatacatataccattcaccatacatatatttaacaataataataataaaaattatattactaaattatataccataattaaagtatatgctaaatcatataccacaattaaagtatataccatgacaacaaaattatatcccaccatcgttgactgaatgtttagccaaaccgatgttgagtcgtaataaatgagatttaaactcaaatcgtaacaataaatgttattaatgatatcgaaattcacaataaatgtaaagaaagacaccataatttaaagaggtacggccccagatgtcggtaatagtttactccccttgtgttttattaatcagagttgcaaaagtctagatcaggctcttgaatgcaaaaaataaaa

SEQ ID NO: 210064 - DNA, 530 bp, Cannabis indica
gtaatctcactgccttgtctcagcccaatactgtttcagattttccaaattgttcacattgttgtaataaactcactgaaacttcagtgactacttgtaatatgtcccatatcaataaagaacatctttctgagtattcttctccccattcttcatctgtttcattaacaacccttactcatgatatcaatacttggcatcaaaaattggggcacccttcatctgccactcttagcagaattttaaaaaatgttccacattcaggcactttaaaagaccttcatttctatgttgcatgccaaaaaggcaagaatcacaaacaaccatatccattgtccaatagtcatgcatctcagccccttcaattaattcatactgatttatggggcccttctcatgtctcatctaaagaaggatatcaatattacattcattttatagatgatcacactaggtacacttggatatatcccatgacacttaagtctcaagcctttgtacaatttttaaaaattcaaaagcatgtagaa

SEQ ID NO: 210065 - DNA, 766 bp, Cannabis indica
taataatatgagagacagaaaaacacagacgagagaagagagagaggcattgatcaatttacttactctaaatttaaggagatatccatgcaaatggaaaatcctaacaaccatggaaggattgtgagttttttttttttttaaaccaacacaaagaaacagcaagctagactaaaaaaagaaaacatagtataaaccgattcaactcagtcatccacatccaattgaagtgggaatctctcaaaattggacaagtcgattcttccgaattgctccgctcgacaagcccattgagccacatcatgggccacaccgttgtggattcttgggatccaaatgatcacccagagatcgaatttcctcatgagcatatgaaatcttgttatgagctcctgaatgttgtgattaaaggctgagataccgtcttttgacagccaattgcgttaattgaacccacagagtcgctttggaagatgacatttttcaggcccatatcgattgcggtttgtgcactccaacaaagaatggccatttctccagccagagggtctatgtattggtgttcagtggtgtgcatgctcgtgatcaccccattctcatttttgaaaatggctgcaccaccccctcggtttttcccaatggcaacatcagtgttgcatagactccaaccggtaggggggagccacttgagcatggtagcggcagggtgggtgtgatcctgcgagtttttaagcagccgaatattgacttgagatataatcacctt

SEQ ID NO: 210066 - DNA, 822 bp, Cannabis indica
gtatagtgtagggatatcagtgtggttacggtattaccaacacgagtaccagggggtacgtcgtgcatgtggtacaacacttagtgatttccgggggtacaataatggctctaccaacacgagtacagagttggtactttagtacatttggtacagtggtcgtacttcccttaagaacgttcttaaccatttggtgagctcggttgttgagcccagggcggcttaagtataaagtcggtctagcattgcttttatatatgttatgcatatcttactgagtctgttgactcatcagtttgctaccttgtgtaggtaaaggaaaagctaagctggaggaacagtgagatggagctcggcagtgattatacatatcgcggcagtgcaacctggagggtttcggtctttcaatattttgagttatattttagttgcctgttgtttgtaaaaaaaaaatattactagtagactttgtattagtaaaatacttttatccatgttttgaaattcgagatcccgacccatataattataaagttataaaattataaatttatcttttgagtttagtaaatttcaaatacgggcgttacagtttggtatcagagccaccaggttgttcactaaagaccatcaagatatgtacaatcaaggccagtgtcgagctcaactcacggttccgtaagctttactttttgcaaattggtttaagatatattgcatatatgagtaaatcgatgttttgaaaccctaaatgcggtcttaaaaatattttgaccactgtctaacctacattccttgtgggttcgtaggctaagtcctgag

SEQ ID NO: 210067 - DNA, 923 bp, Cannabis indica
ttttgcttccttcaaaaaaaaaataaagaaatcacaataatcaagctgagcctgaaaatctcccttaaccaaacagtgatttgttacctggtgacgctgatcggcgacccgttctctttcgttgagagtgtgaggattcgtcttcttcttccgctttctctttcttgaagtcgaagcatcttgcgtcgcatgtttggaatcgaaaaaacgtgagtagtactcagaaggggaaaccctaaatcgggagtaagagcggttgagaacatgaaccgggtcaatgaatacggcattacagtcttcaaatctgtaaacgccggtctctaagaacatagatagtttcttgttcatttccaaaacctccattgtcgaaaggctcaaggcttgcagtacccctgtgactgtccggcttaagacggactcataaaacaagagcactcacaacaccatctccaaaatttattttacaatgcaacctgttaaaacggatgtattcatatacccttgacttatttcggcattcaaaaaaaattttagtttaattttttttaaccaacaaattccggataatttacaatatagaaaataatattcaaacaggttgaggagcaaaatatgaaggggtgtaaaataaaatagtcactcgtgcaatacactgtttgaacgtagtttttagcgtgttaaacttttccaaatttcttaaaattttgcaggatgttttaaataactataacgtacatgatcataagaaaaattttgactaaaaaattatttcgggtgctaaaacagataagggtacatcaatatatccattttaagggggtgcattatagaattttcctaaattttattaattattttcgattttaataattatttttgtccataaatatattataggggaattttacaatgcacccccttaa

SEQ ID NO: 210068 - DNA, 1006 bp, Cannabis indica
aaagctgaaatctgggaggaaatactgatagcattctggggagtttgggcagtgacgtggaagaagtctaaaaaacgaaatttcacttatccacatcagcaattatgtggcaaccacttaagtttattccagctggctaatgtggagaaaaaataccaggaatagtgggccaaagatgaaggaaatggctttttaattagggtattacaaagtaccctaatgacctaactttagagagtataaccaaacaaataaggaaaaaaaggaaaattattgttggctgccattgttggaaaaaagttacagaaaaaaaagagcatgaagaagaagaagaagaaaaaggaggaaacacgaggaattgaaggagaaagataaggacaagaaaatccaacctacaacaccatcaatctaggctttgttctcttttcttcctttcttctccattttgtattttcttattttgcatggatattaattttctattttagtttatgtttgctattttagttatgagctaaacttttgagacttgaatggttaaaagccccttttgtcatgtattttaaattcaatacataagcaaaattgtctttgttcattcaagtgatcttcatgtttatttattgttgttgtttggaaatcaatggcaagttattaagctagatttaatactgtaaatgttaaatctagtagttggtacttgaatgatacaagaaaatagctatttgtattattcttagtaagtgaaatatgaatattttactacattgcataactttgagaattggtgcttagattgtgttcttagatctgatttaatataggaatatattgaattagatgatagagctttatttcacgagtttagaaaaatctcataaacatataggaattctaattaactttgtgcgctttgatgaagcaatgttgtagcaattgggcaattttagacattgagggatttagctattcaagtttgtttgtcctttgattacttttccttgca

SEQ ID NO: 210069 - DNA, 602 bp, Cannabis indica
aataggtggcgttgttggatctctaacaggatttctggtgtggttaatgtgctctttgctgccactgtttatttgatttggaaaaataggaattattgtgtgcataatagtagttgtttaaccattttgaagattgtaaatgagattaaagatttagtcaaatacaggttgtatagtctaaagaataggaagttttttcaagctgaaaaaggcatgtttttacgccttatgttgtaggggctgcttgttgcagctggggtgtggttggggctggtttgttgtggccttgttgtagcttgtttgttctttgattaatgaagttttccagttagtcaaaaaaaaaaagttcatgaggcatgctttagtacattttaaaatttaggaggtaaaaatcctaattagtcttttattaaacattatgtttataaaatgttagctagatttggttaaatgcacaaactattaacggaaggaaattcaacttttgagaaaaacaaaaacattaaaatgagagtttatttagtaatatttataaataatactatcttcaacaaacaaattgtggtattataacattagctaacttaactaacaatcggttt

SEQ ID NO: 210070 - DNA, 583 bp, Cannabis indica
ctgccatggggagtggtgaggcagcctctgctggccatggctttgcttcttatgtcaaaaatgttaggattatggactattcaatgtcattcaagtaccctcagtgggttggtacttgggccgatgaggaatactgctactctgccttcaatgaggttaagtatgggcttgagcccaccttttattttggtggcccaggccaaaatccactttgtccttagtttcttactttattgactatgtgtatgaatggtgtaacaacttaatccctttcataatgaaactcatggctccacctatatcctcttattcttaaacttcaatgcctatactctccaatgtgattgtggatactgtataataacaaataaaatgtaaatatatttgcaatattaaaacaaataatctaatctaatctaattacttgtgcaaattgaattgaaaaactataaactccatattaatttacatataaaaataaccattgaatcaaatttacatatttaatattttaaagttaaacgaatcaataattttaaaaaaaaaataaatacattctgcatatattttttaaaacttaata

SEQ ID NO: 210071 - DNA, 1535 bp, Cannabis indica
aggccacatatcacgttgatggttatcaaattgtgtcctacttttttggataataaagatacattaatgcttgattgacaattactttatttccttattcaaaagatacaaatcctggacatgatactggaaagaaagccttaatattgtgggatttggccatgaattgttgtgatacagagctagatatccagatgcccattaatcactcatctagaagatttatttgaggtcatatagagatacgatgtgccagaggtgtagcttgtctggacgagtcatttgtccaacatccgaaaggcttgacctcgctaatggatgtagtccattatcttagttgggcctggagcaactcagctgaaactatcttaaaattacacgtgtcctccatccataaatacaaataacacctaatattgtaatctaatggcaactaaaacatgcatgctaacacatgtacatatgtatctctattataataattttacatcaattccgtaatcaagtgtgttgttcaacctgaatggaaaaactactcgacgttcgaaggccctaagtcacataatgtaaaattggtaaatgtctcactaaaatactttcagaaacttaaactcaaaatttatagtttacctgtcgatgaatagcgtggtgataccctaaatatcaagaaaacatgaaaattgaggtacccaaaaatcacctcaaatgggtaatcggatccccaaataggtaaccgcttacccaaggcttgcttggagtaacagtaagccatttctgtctagagtttcaaaaaacttaatctttcaaatctcattcctactccaaacatgctcaaactttccagaacaccctaaaatgatgctctaaacataactgaacaactaaaaacaccaaaaccccctaaaaaataaatcaccattgttgagctaagtttgagttctaaaactcaaactcacttaaaccaaaccacaaccattactagcccttgaaaacaaccacaaactacaataattaaagcttaaaatagtttttaatagtactaaaatcgtacagaaccaaaaccctaccatcacacaaataaaccaaacttctttagaaattcaaagcaggaaaaaaactaagagcttaccttgatcttcttctctcttatgctaactgaaatccttgtagaatgtttgaatttactctaaaattgacttaattttccttggagtttatcttagggtcgagagagatggttaagaaagagagaatgttagttaggttaatgttttttttttttgtagtcatctattttatttagcacataaatctttttcataaattcttaggtggcaatcttggaaaatgtgtttacttagcttctaagtaatctttaaacgtaagagtaaaatggttataactaaatatcccgcataatttttatattttatctgttcataaatttgtcccactaaatctatgatactaaattttgtcaaagtgatactattggccaaaacatcgaatttctactgttaccaagcataaaacat

SEQ ID NO: 210072 - DNA, 497 bp, Cannabis indica
tggaccgcaagctaaacttaaataactcatattaattaaatactgttaccacaaaaaaaaaaataaacatatcatctactagagaaatgctcaaagacagtagttgtgtctagttagcaccttttaaatagttaatcattattgatacaattagattttatataatttaataaaataatttttaagctttctttgaaagttaatttttaatgaggaaagaaaaatgtagcaaaaaacaaaatagtgaacaaaaaataaatcaaacttttcaaatttaatagggaaaatttgttgaattgaatgtttttatatgtatttttcttttctttttatacagaatttattatttattatttttcatttttctctctgtattttctctatttttttcctcactaaaatccaacttccaaatataaaattagagaatttcgctaaacaatcataaaacgcctcctttatgtggtgttaggtactattagtgttcaataataata

SEQ ID NO: 210073 - DNA, 537 bp, Cannabis indica
attattatgtatatatatatatctctttagtaatagaaaataatctgatttatcattctaaattttcatctatgtaatatatgtatgtatagatataatttgtaggtttgggttccatgtgtttgattttatgactgtgagagtaaggtatgactctctataaatgaaaatagatattataccacagttcttgtttttcttttagttatgaattgttttagttgaatgtgttgtttttttttctcttgtttctttctaaattactttgtttttcgcctgaacatctgcagctctgtctatcaatatcagttcaggtatttcttgttgcttgtgaaattgtatcagaaatgattagaaaatagtgtgagtttgatgttgctgagattttcttttgggtttttagttggcaagattgggttctgattataaataaaataataaaaagtttggagagtgtttctgttttgactaagatataggatataaccattataagcatgcttgttactaaaaaattaatctttgaattactggaag

SEQ ID NO: 210074 - DNA, 513 bp, Cannabis indica
aataaaaaataaatatatcttgaagaatcaccatacctccagagatcgaactgattgaccataagtaggagcctcacaagagaataaggcatgcatcataccgaaaagcccttgaacaaaaccacaatcgtcactctcttcgtagggccaaacctaaatcaaaaataagaagattttgtgtttatatttatgtaaaaagagaatgaaaaacaagaatacgccatcttaaatattgaaaagcacaagtaaatataaaaactaaaataagtaccaacaccagttatttatccaaacaatacaaaagggggtagagctaaattggacactatatatttcaataaaattatgcaaaaatcacaagttctataactattctgcccgtcaatgttgcagttgtacgcatcaagaccttccaaatgccattggataagccaaacaatgcagctgagcttaacctaaccatataacagcataaagtattgtagctaaataaagggaagaaggcctaaacac

SEQ ID NO: 210075 - DNA, 702 bp, Cannabis indica
aaatgaagagagaaagaaaaagttaatgaggattttttaattgtttattttaatagagtgaacctttatttatataaaaatatgactaaaaaaatgaaaaattaaatcaatgtaataaaagaaactacaaccaaacattaatagtgataattaatttggcaatttggacatccataaataatattttataatactcccctttgatgtccataaaatctgtctcattaaaaaccttgttgaaaaacttggtcaaaaaaaagagtgcagtgtaaactaacttcccctcatttaggcattcgtagagatctgttaatcgacgaatttcaatcttgtatgtcgtcttctcaaatattgatgctcatgataataactttataaataagtttgctaaattgacacttgattgaatatgttagacaccaatatacattctcttgaaatgtataaagaaaaattttgtgaaatatgttttaattctatctccttcaatgtaccctcattttagttgagcgatgcaagcaatattatcttcatagagtactgcttctgttgatacttttttattgaatgtaatcctggtatttcccgaatatgatatgtcaataaactcactcccacacatactctacttgcttcataaactgcaagtatgttaacatgatttatctcgtcaaaaaccttatcaagaaaatccagtgggac

SEQ ID NO: 210076 - DNA, 611 bp, Cannabis indica
caacaaaaaaaaaaaaatgatgtcaaacatgtactttttttaggacccaaatgttaccctttgtgagtaggactgaacatattaatcggatttgacccggactcagccaatttgcctggacttgacccagtcaacccgtaaattaaaaaaacttgttttgttcaagtggttgggtccaactcgatacactttcggagggttcacgggttagttttttatggtcactgggttccgggttgaacccgaactcgcccgccaatccggtcacttttttatttttattacatatataatatattaaaaataaaaaaaaaccttaaaatcaatcatattatttttattacatagataatatattaaaaataacaatgtacaatatactatatatagtttagaatttgacttttgtattttagatttgaaattaatgcattctttattttattttaatctaacgaatatagattatggtgttataagtttataacttatatacttatgggatattggcagttaaaccacctgaacttttaattttttaatacttaactacaaaaattaaaattttgatagcaaaaactactaaactcaagttccgttttgctctacac

SEQ ID NO: 210077 - DNA, 705 bp, Cannabis indica
gataggctaatttggcattacacaactactggaatttacacggttaagtcgggtttccatctggcttcagacttgaatgataaagagtttgattctgcttctaactcacatcaagaatggtggaaatttttttggaatctcaaattaccctcaaagattaaatctttgcttggagagtgatacataatgctataccggttgcaactgctctgtttcaaaagaatgttctgaattctgcagcttgttcattgtgtacacaagcttgggagtcgattgggcatgccttgttctgctgtaggcatgctaaggatatttggaatcaatttcatttccctattgattttgcaaaggcacgacatttggcaaatggtgattatctcttccatttagcaactctgcttagccaggaagagtttgaactgttgctctgcataatgtgggtgatctggacagatcgcaataagataatacatggagatatgaataaggatgctactgctatggctctatatgcaataacttatatgaacaattatattaaagctaatagcactaaacctcctactgctactctatcttcaccttcagctgccaatccttcacatactgctacagatgcaaatgttgctgcaatgaaggctcgccctacagcaggagttccatggacgccgcccttactcaacaagctgaagcttaatgttgatg

SEQ ID NO: 210078 - DNA, 790 bp, Cannabis indica
taattattcctaaagaataggtagttgaacccctattttcgtgagttgttgaagtcaattcgtagctgagagtgtctgtccaggttgaaagccacagagacaccaaaagtgtctgccagaagaggagttggccaacccacccttattctgcagagcctggccgacctatgtactcttatggccaaccaagtattgctcctacaattctgggatgagcctgccagctttggtaagtgttgaccatccttaatatgtgttggacagccttagcatgtgatggccagccttggtagcttctttgtacagctttccttgcaaaggtcagactttcttggtcaaacaggccctttgggtctaatagtcactctttggccggccagcttgtgctcaaaccctagttggccgtacaagcttctcctcaccgatctatgtactcccctttgctggccaaacatggttgtacagcttcttgacggcttgcttaactcattttgcttgttgcttgacatttttgccatgcccttgtaaggagacattgttttgctattgacaatgttgtattctatgtgtcctcagtcttgacttatgtggacatgccacgtcaggtgtataaaattttggataacaatagggctggacatttatactcaaaacccacccctctgctcaactcgactgatccgaaaccaaaaaaaccccaaaaaaaagggtttgacaatgttggcaagcaggtcaagctcaactcgggttcttttcagggcgggtttgccatgcacgcctccaaccgacc

SEQ ID NO: 210079 - DNA, 729 bp, Cannabis indica
aaaagtatcaaagccaagatcaagagagtgtttgagatgaaggattttggaccagttctaaagatacttagtattgaagtttcaagaaacatatggaagggaaaatcaagttaaagcagtctgggtacattaagaaatttattcagaagttcaacgtggaagatgcaaagagtacatccgttctgataggtgaaatttttttttttttgttgaaggaacaatgtccaaacagtgcgaaagagaaagaggaaatgaaaaatgtactatatggtaattttaggatgcttaatgtatgtgatggtgagtatcaggcaggacatagcccatgctctaagcattcgttcatgtccaatccgggcattgaacatttaaaggccctcatatggttattaaggtacttaaaggacacttgggattatggtctggcctatgagaaagcaaaaggagaactggagttgaaaggattcatggatgctgactatgcctcaaatagagatacgagaaaatcaaccacttcctacatttttatgaaaaaccagaactgtatatgatggaaagcctaattacagtctgtgattgccttttccaccacggaagaagaatttatggctacaatagaagcattcaaggaagccttatggcttgagggaatttagttcaaattgaaacaattgagagaaagagtgactatgtactccgatagccagtcatcgatccatctttacaaga

SEQ ID NO: 210080 - DNA, 762 bp, Cannabis indica
tattagcacttcaattcgataatacttttaagagagatgcaatacttttaaaaggcacgtaaaatacttttgtcgggccggccctaagctagttgctcagggagctaagaccagaataatattggtcggggggtgtgataatacaagagaataatgggtgttcgtagtgcaagtggtgcgtgctgtaattattttttcaaacaaaaccgtaaatacagtttttgtaatttttcaaattgcaatcgcaccgcgagatcttaaaatcgcaaaaatcacaccacaaaaatacagtgtactacagtgcaatttaaataatttacactatgatcattatcaaatattataataaaattttaaaaatcaatctaatcaagttttaataataaaataaatcttattaaaattttaacttcataacatatatactaatcatgaaattattatattaaattatctctaaaaataatgtaataatacatatatattacatatattttctttacatgcaaaataaaaataaaaatcatattataaaaattgataactttgtaatatataatgcaatatgatttaaactacaattattaaattcaaaattgcaaacccagtttgataaaaatacaaatcacaactgcactatacaaaatttcaaatcatacaagaatcatacaaatccaataatgaaagaataataaataattttgaggaatccctcaaaaagaaaaatgataatagaaaagaaaaaaaaaaagaagaggtaaa

SEQ ID NO: 210081 - DNA, 684 bp, Cannabis indica
ctgcccaagaacaactccaatggcaaaatcgctggtgtcacacatgagttcaaagggcagcgactaatcgggtgctacaatcatgggggctgtaacaagagctgtcttcaacttcaaaaatgcttcattacattcagcagtgaactcaaatggcctattttgttctagcaagctacacaagggtttagacaccttagaaaagtctttaatgaagagcctgtaaaaacccgcgtgtccaaggaagcttcttatgccttttactgtggtaggggctggtaacttctcaatgacttacaactttgccttgtcaacttctatcccctttctagacaccttgtgacccaaaataatgccctcttgcaccatgaaatgtcatttctcctaatttagcaccaagttggtttcttcacatctttttaacaccttctccaaattttccgaaaaacccccaaattagtccccataaatagagaaatcatccataaatatctccaaaatactctcagccatatccgagaaaatagccaccatacacctttggaaagtagcaggagcattgcataatctaaatggcattctcctaaaggcaaaggtgccatatggacaagtgaatgtgattttttcttggtcttctggtgttatagaaatttgattataacacgaatatccatcaagaaagcaata

SEQ ID NO: 210082 - DNA, 625 bp, Cannabis indica
aaaaaagaagatctttgagttcgagagtagatggtaagaaaatggagctttggttctttctttatatggtttttttggcttcaactgtccaagcagttgatacaaaaggttgttctacgcgggaaacataacggtcatctcttgggcctgtaaatgggttcgaacgtaatgggtcgaaggcctggattcgatgagtgaaatttaaaatttatttgaataatttataaggataattacataaagcatgtttttaacaaaaattagatttttatgtttaaagattttttttttatattttattatttttcataaaaataacatgaaaataataaaaaaattatataaaagtaacatgaaaataacataaagattataataaaaaataacataaaaataacaataaattaacaagaatacaacataaaaaaaaaatcgtaattttctgtaaataaaataaaaaaaattagtaaaaatatttaaaaatgctctgaaaccgaatttttgtaatatttttattatttttgtgtatttaagaaataattcgtaatttatatttataaacgttttctttattttattattagtaataactttaactatcgcatttctaatttttaaattatta

SEQ ID NO: 210083 - DNA, 1550 bp, Cannabis indica
tctccagatgtgtatacattaaagcttaacaataaaatataagttaagaacatatacttcttgatggctatcgagatatcctcaaaacttctgtatgttgtatcctttaattcagatgatgagaatgatacaaaataactcacaccagtgtcttccaaatcgatccaccatacataaggaatattgtgggctattaggataaagtgtacaatgtgttcttgttaaaattctcaacacatgagcaagaacaatttgagagaaaaaactattttctttttctcactgtatttcaaaaatacctattaaaaattctcttctaatttcttaaatcaggcttctatttatagtagttaaatctcattaattaaatcacattttattatttaaataaacaaatatctataaccgaatttaattactaatatttatgaggtaatccctcaactacttgagagaatatcttaattactttaaagtatttttaaccttttttttaaaaaaaaaattcaagtatttatctaattgaattaattaattaattaactcaaaaagacaaaaccaatagggacatcctacactaaggataggcgcctaccatgtctgaattaatacaaggatgatgtcttttgtcctgacaatttctgtcttaacaaatattatcttgacaaattttgttcttttcctatttaatttatttatttattacaaaaataaataattattattttgccaattcaaaataaatttttcgaacaacattatactattctttattccttcccttgacagtattttaaggtggtgattcggggatcatagacctataattctaagcttcaataaactagatattcattgagtctcattaaccaaataatcctatttatcaattccatgattactctacaataaatatgaaattgaactcttaataatttaagaattatatttacttttactgcagtgttcattaatataatcaatttcagtgattagccctctatgtgttggttcgtaattagtcttggtcaaattactgttttacccttctaattatttctttatcctttagtaccattaattcactagtggaagtataatttagatcccatctaaatttgtgcacaactttccagttctagaattaacacttaaagggaaccaacattcgatccgttaagaaaattaggattcgataattgtagatcatgttcccagccatccactttattagattctaaaaacagaagttgtaagaattatcttctctgaaaaactttaacgaatgaatcaaagaaactaataacatgaacaagagttcatgattactaggatttaagccgatatactattgatcattgttatgatatgaattaagtctttatagtaaactgcatgttagataaagacaacttcattcatataagtcattgtcatatataatttatattatatacaacacatttactttgatgtcatactacatcagtaatcataccaaaattacttgcattaatgaaccgtactagcaaccattgattaaaaaattt

SEQ ID NO: 210084 - DNA, 587 bp, Cannabis indica
ttttgtaatatttattgatatttgtaaaaactcgatttttcagagagtaacaacaaaagatagaatgatgaggattttgtcaaaaacgataaccaaggagaaagcagattgatttgaggctttgtaaaaagtggagaaatataaaaagaaatttacatttggatagataaatatttgaggcttatttaatagtcttttttaggttgtaaaaattttggtttgtgattaattaatgaattaagctagttcataaaaaaaaaatccactaattctttttggatcttatgattttgtcatgatttatattaattttcattcaaaattaattgcttatatataaaagatttactctaaatactaactttttttttctctaaattttacatatatactttgacaagcctaatttttccaaccttaatggcacaccaaattctaaaagtgttagatattaaatctacaccaatttagtgtacaacctttctttttgcaatccaaaccctattttattttactttaaaaaaaaaatcgtacatttaaatacttcaaattaaaatagtatcacaaaaataattgatttaaaacac

SEQ ID NO: 210085 - DNA, 581 bp, Cannabis indica
caaattaaagcagttttagaaacgtttatttatataattataatcttttgtttgggagctcagaaaataattaaccattttttttaaaaaaaaactgtgattttataatttattctcggttatatagttatatatgtatgttatataagaagagagagagagcgtgagagtaccatagagctgaaaaaggagttcgtgtcagttcttgtaaatagaaaacttggtacctgtctttcattcatggcgttttcaagctttttagctcaatctaaaaagataaattagagtagttataaaacaataatgtgcattggagctatatggacacattaagcaaatacaggtggagcatctccaaggtattttttatttttagtcaaataactaaaaaaaaaaattaaatgggagagttattttattaatcttactccaattatattctacttaagtatttaattattttgattaatattttataatttaaattttataaaaataagttaatttagtaaataagaaaaaaataataatattatttgattaaaataaatattaaaatgttttaacaaaaaaaataaatg

SEQ ID NO: 210086 - DNA, 817 bp, Cannabis indica
aaatccaagtaaattctcttagggtatatcttaagtatttcataatctttggacccacttgacacatggccatcgttgggacggcaatgtatattacgataaaaggggcaacaaaattaattataaaattgcattcaaccacatactaaatggtgcataaatattttacttatacatacaaatatagcacaaaaatagtgcctaaaccatgtgagattcttttcaaaacaaacaccatattatatcaaagttttacacattattttattctgaaaaatgtgaaagcctaaaaaataaataaaaatagaagaataaatatatagaatgtcacctaacactctttgttattttctctatataaataaaattataactaattaagaaatatttgattatcgaataataataatattttattcaaccattatatgtgatacaaaacaaaaatgaattttgtgacaactaaaagtaaagattactaaacttatttatactatataggacaacatacaaaatagtttataaacaatgtaggattgtttctaaaatatttatcatcaaattttcttcacgaactgagaaaacctcataagttagtaaaaatagaaaaaaaaaatcatataaaatgcaacttaattcttttttcgcttttctttatataaatatatagaatatatagattgttgtttattaatttttgataaaactattgcacctaattaaggaaatcaactcacatatagttttatttctatgtattttttttagttaatattaaaaattaactgttaaatagaaattgttataaatattatta

SEQ ID NO: 210087 - DNA, 555 bp, Cannabis indica
taatcaaaataagaaattagagaatcacaatatgatgagtgtgttagagagtaaaggtaatcaatataataatttggactaagtattgtgtgtagattgggtactaccactaccagagaagataataagatgagtccaaacagaaatgtaaagctgaggaaaataaacaccattctttggacacccaaccgaaaaaggtcccaaaactcagccaacacgcttgacacacttctctcttctaaatcaaatgattcttgaagatcatatcattagctttagcaagaatccaacacatcataatcactaatttcaagttctttgaattattggaatggataaatcctatctcagagataatgatatcaatatcataagttcatttatgcataaataatgatttcattctaatccattttatgccaaatctgatacaaataacgacattcatgattatgtttaatttgtttctttcatgccatatcttaatttataaagagcactatatataaaaccaatctcatgactcttcccataagaaggtaaatcaaatgaacc

SEQ ID NO: 210088 - DNA, 1069 bp, Cannabis indica
atagcgaagtacctttgggctatttcgagctatttcgagtaaacaagacaacttgtgggtgaaatgggttaactcgatctatctcaaaggacaatcaatttggagttaccacacaaagcaggatgctagttggtacttcaagaagttgctgaatctcagggtatcaacgagtgaagctgagctgaaccttgctgtcaatggaaagaaatttcatgcctcaaagttttacaacatgcagctgaaagagaacaaagtcaattatgctggtgaagtgtgggataaacttgtgttgcctaaacatagatttatctattggcaagttgtgaacacccagcttataacttgagacctgctgaacaaatttgtgccaattccagatgtaaactgtccagtttgtaatcaagcagaggaaaaccataatcatgtgttttttgtatgtcttttctccaaacaggtggctgctaaagtggaagagtggcttaggcaagtgcactggccgatttctgtcaaagatctcagcgaaaaatgctcgacaactcagtttaacctccggaatagagtgataaactctgtgattgctgcttctctataccagatttggctaaataggaatgattgtatttttaatctaacttgtgccattccttgtaagattagtagagttgttagaagcttggttaagataagaattttatgcttaggtcctttcaaagaggacagaatgacaagattcttacttaatgttgtaaaggattggtaggttgcagctgctgcttgttgctggaagtggcctttcggctgtgttgctgctggttttttccagcttgttgcgttggttctgtttttgaataaaatcttccctttgttcaaaaaaaaaaattgagaaatctattttggaccttaaaatatggcccacacgtgtaggccataatttattttggaccatattttattgaccatattttattaatttctttgattattttattgattaaaataatttaaattaaattaattaattatcttttaattattaatttgaatagattattggataatgtatttaatt

SEQ ID NO: 210089 - DNA, 603 bp, Cannabis indica
tacttcatatacacctcggactctaactcccaagtaacctcgtcttctttatggttcttccataagaccttgactattggaatctctttattccttaacacttttagctctctcaccaagattatgataggttattctttagaagtcacaatttcctaaagagggatggcctcatactcattgacatgtgacgaatctggagtatacttccttagcatagacacatggaacacattacgaccatagcccattcatgctggggagtctaatcggtaagcaacctccccaaccctctcgataaccttaaaaggtccaacatatatacctcagggctagcttacccttcactccaaatcttattacaccacgcataggagtaactttcaagaagacataatcaataacatcaaactcaacttcctatcgatggagatcgtcatagctttttaaaaaactctgaacaaccttaagtctttcttggattcccttaaatatttttggtggtactaataataattcggggcccaatagtgatatgctcatctggttctacctaacactatggcgatctgtatggtctcatataaggcctcataaggagcc

SEQ ID NO: 210090 - DNA, 512 bp, Cannabis indica
cataaagaaggttcaggaaatgaacctaccagattcaagataaggttagttgccaaggggttcactcagaagaaaggcatcgattataatgagattttctctcgagtggtcaagcaagcttcaatcagagccatgatggcaaaggtagcaagcatggacctagagattgaacagataaatgtaatgacaactttcttacatgggaaattagaagaggaaatatatatgcaacagcccaagggctttgccaatggaaactcggatgaggtatgcctactcaagaagtctcgtcatggccttaagcaggcacctaggtaatggaattcgagatttgacacttatatgttgaatattagatacactaaaaacaagtacgactcatgtgtgtatatcaataatcaaacatatttgctactctatgttgatgatatactgatctttagcaaagctaggtctgagattgacaagcttaaaagaaaactcactgatgaatttgagatgaaagatctggg

SEQ ID NO: 210091 - DNA, 487 bp, Cannabis indica
ctaagggtgctacctgggtgaacggtagaccagttctacagggcaaaactgaaccgatcgaccagttcagtgcaagaatcctcaaaaacttcacacacaactcaattctaccctaaatcaattcaaaccttccagatcacctaattaagtcataacatacctatttcaacaaaaaataatagctataactccctaaatttgatttcaccatttaaggtccaagtttgaatttaaaaactcaaacatttgttgagcacaatcacaaccaacaaaattaagtacaaataactcctactaacttaaaatcaactcagaaaatcaatcccaagcaacttaaacttaaacagtgccataatcacaatttcacttcaaaattaaactcaaaacctagaaaacaaaggcgtggaggaactagggctcttacctttgaattcactcatgaaaaatccttcaaagcttgctgaaatcctcaagaacaagaatgaga

SEQ ID NO: 210092 - DNA, 1201 bp, Cannabis indica
atattactattattattttattaatatatctactatagattaatgatgaattatttatattcttttttattgttttatataataatattaatgataaagctattattttttatacttttgataaaaatattaaattttgtatcaaattttgcaattgtacgtacataatggtaaaaattagatccaaaatatatcacaaaatatttttatactaaatataacacaatttttacatatctcctattaaatataatcttaatctgcttcaaacggaataaagagaaacttagaacaattttatttaatataatccctccctctttatgtatatcaatgataattaatacaacaaaaatatgaattcatgatagatataacttataaaagattcatacggtccaaaaaattaattttgacaaaatacatgtatgaatctataaatatatgtatatataatttttttgttggtgagaacatcaatattactttttttgtgaaagtaatttttattttttaatatatttaaaaagatttaataattttttttattgtatgatgttctgcattatagttatactacaaacattttatacatgtacactaaataatttttaaactttactattcaatatcatgaaatatttagaactttttcgaaatcgaacgaacatgatacttattaaaattacaatatattatatcatatgaaaaaaattgacatataattacttagaatatgaacaataaataatattgttcaaaaaaaataatgaaaaaataaaaaacaacccctagctagtagaagcaatagtgatacttttatatataaatatatatatatatatatatttatatatgttatgtacttacgaacataaggaggtgtgtagtaagtggcagttccagaatctgcatgtgcaactgagtagaagcttaagaacatacccaaaacaactaacacaaaattacttttcatttttatttccattctcattatattttaatatttaactttctaattttttttgatgtaaaatctaattaatgagattaatattttgtgatgaggatctttataaagctaatatttcttcattttatattaggagtgaaagctaaggcggccttatatcacagactaagattaagattaataatggtatgcatttattaattacacttacgtaagtaaaatgagcat

SEQ ID NO: 210093 - DNA, 511 bp, Cannabis indica
ttttattaaatgttaaaatatattttgtattttttaaaataatactaaataggaccctaataagctaatttttttatgaatatgatataaaggtttaatgataaaattagttacgtttcttaaatcttttcgagttagaaattatcttcaagttggttatattttataaaaaaaattaaaaattgaattcaatgtcttatttatactattttaaaaaatacagagtttatttatcatttaataaaatagaggtcgaatctccaatcgctaacttttataaaatacaaaatctaaaataatattaattctaaaatatatagtactccaaaataaataattaatatacttcttctaaaaaaagttcgaatcattcatgaaaagaaaaaaaaaattataaaagataaacaacaactaacataggaaaattataaaatagagtctaaacaaataataatttatacaatacaaaatgttgtataaccacacaaataattagtaaaacattatcata

SEQ ID NO: 210094 - DNA, 1607 bp, Cannabis indica
tttaaataagatggactaaaataaaggcaattgggctgagattaaactctagggccaaatttcacttattgggctttagagttagatttttttccactttatttcaactaacgaaactaaagtgtcttttctaattttagtatttttcttgtctaattttttaaataccaattttattttgatagtaataataaataattaccaaataaaatacaatttaaatatatttattaattagacctacaaagagtactaattaacaaataaacccctattttcttttcttctctaaattgtccaaacttggtaaaaattctcaaataagacatagtctattttagaattataattaatttattaaatcaattagttgagtctataagatgatattatcccataaaatgtaaggaccatgggcctatgtaaccaagctcctaataagtagattcgaaatttatcgagtaaatttcttatcttattaattcctcatgattctactatagatttagaatcgcactcctgattatatagaacactctacataccaaatatagatatgctatgaattatccattgtctcaatcacaaaaatcattgatcctctatagacggtttacattgagtaaggacaaaattaccattttactcttcaatgtattttatccttaaaaaacttagctagttgtaaataatttttcaagaaactaatataattaccaaaatgagtgtttatcatttattgcatttaatgagttctaaggaactatcgtttcacttctaaatagttatagaagctatagatgtccatatctatgattaacacgcccactcaattgtacaaccgagttcccaagatgtaagtattgagatggttctacagtaagcttgtaacggacaagtcaaagaactcgtacaatacatttaagttagagcttaaccatctcaaggttgagatcaaatgatctatgatcaactaagtgctattgacttagaaaagatataacgatgccaatatcggtccagtccgatgtatagccaatacatctgatactagtttcctttactaatgccctggaaaagacattctacttatccaactgtaagcgaaccctctcagttattatcacatcagtgtaaatctagtgcactgataaatcgtgtgactaaataatttgaagtatataatcacaattactttccactgtgatgacatcactgtaattgtgaataaatatatgtttgggatttaatagaacttatatattaaatatataatcatgcaataaacatgtgaacaaagcttatgactaggtcatgatatgatttttgatctttattgaaattaaataagattacaatgaaattgggttttatttagggcataaaatctcaacaaattcctacttgcactaatataaaactaaaagtgcattttgatttaatctcatatacttgatgatctaatcaaatttagtatttggcataaattatataataagatctgataggttgtattcagtatcaacctcatccaccatcacattttctttagtaataaaatctatgattttgcgtattcctcacctatatgttttactcctcttagg

SEQ ID NO: 210095 - DNA, 604 bp, Cannabis indica
aaaaaaaggattgctgaagcacagtccacggttacagctcttaataatatcagcaatcactcccctacaacaactgcctcgctcaaaacttctgaatctatccttgatgacttgctggaacaagaagaaatgtattggcaacagcgatctcgcattgactggctccaacttggagatcaaaacaccaagttctttcattcgaaagcttctgcgaggaaggctaaaaataaaataaaatttcttcaaaccgaagggggtcttcgggttacatctaagcatgatatggctgaggctattcaagattattttgaaggaatttttcagagtagttcagttgatgaagatgctcttgctgccatcattcattcgatcccaacaaccattacacaagaaatgaacaatgaccttaccaagccatttaccccttctgaagtgaaagatgctttgttttctatgggttctgataaaagccccgacattgatggtatgtcggcaatgttctaccaacaacattgggacattgtgggtgattcggtttgttctgctgtccttaatgtcttgaaccatggagctgatccaacacctttaaactcaacgatgatca

SEQ ID NO: 210096 - DNA, 558 bp, Cannabis indica
aaaaaaataaaaaataaaaagctgatatattaagcataataacatgagtctccataataaaaaaattgacatctttatatattaaaagtggctatctaacaatatttcttggtttaacagaatatactttaaaaataaaagaatattatgttcatttttaacgataatagtaggtttgatcctcccgttaactttcaaaaatatataaataaaactaaaccctcaaaaccctaactcatttacaccgtgcgacacttcactcttcccttacgttctcactcccaatcgcagattgtcgaaaccaacaacccgacaaaccccaacaaaccaaagcttcctttcaccgactcgtccatttcactctcccaatcccaatcggaggtcattcgattttattccctctgttggagtccgcgatttgggttcttaatcgcgactttggaatcgaaaacgatttgggttcttaatcgctactttctaatcgaatgaatccaaaaactgtggcattttgaaatcgactcatcctattctctttccgagtctcctttaaaaccccac

SEQ ID NO: 210097 - DNA, 689 bp, Cannabis indica
ccaatttttcaagcatattagagtttcaactgtcgtcacactcaatgagctcgtgaaaggatctaaaattcaatccccatggagaaagttgcctcagaggctatagttagtggtgaccaaaatcgctaaaatatcacaatcaatgcttgacagtgtagaatattttgatgaatttatgagccaccatttcaaaatatcaaattgatcccccgcaccattagttcaacagggtctaagaagtattgtgtaaagaccgctgtgattaataccttggaatattaaataatgagggtttatgcatgagatttaattattatctattaaatacatattgtagaaatatatttaagttcatgtatgtctattatgctatttatgtaaatctttcaatttctgtgattgtgttcagaagctgtggaaagcgacgtcgggcctttagagagtcaaattttatatgtttagaacattatcggggtatcattgttagatattaaaggcgttagaattttcggggtttggtaattgaccaatttacccttgtgaggttctagttattttaattagatggagggacaagaaggtcttttggcaaatacttcttttatcttatttgggttattttaggctgaatataagttaacaattttaaaaagaaatgatatattgcttaggttagaaggaatagaaag

SEQ ID NO: 210098 - DNA, 712 bp, Cannabis indica
tttctccataaggaaataacaaaggatattgtaatggatcgtaacaaccgtaataatactgtactttatgactaaagcctgcatggctatatacaacaatctcacgatctgttgtttctctagaggagttatcatcgatccatactgcagctacttgtgaagctaaaggagcgttgtatactctttgatctaatcctacattagactgtatgtgaattgtgtagttttgtaagttaggaatgtttcttagacttcggaaaaataaagaataaggattcatatttatgatttctataagttttgaaactattgtttgattcatttttgatgatatattgattcggttttctatttcatgctctgtatcatagaagtacaattgtaaaaaagatggtcggccatcatgtggaagtagttcattaatataatgataaacctgtccttgtactctaaacgtgtatattcctttgtttcttttgcctaaagttttgtcatttttagccccgaaagaagtgaaagcaaaatgattattataagtgcgaacatactttctaaagtgttcagattctactgttgaagatgtaaataattcataaagtgtagtcggacaatcatttgattttaatgagactttaccatccaggcaacaaaagccattaggttcatgggtaaatcgctttgcttggcaatgtttgcaagtagaaggttgcgg

SEQ ID NO: 210099 - DNA, 1041 bp, Cannabis indica
tacaatatatactcatcaaagatgagtgaagaccaaacaagaatctgttacaactgaaaagcaatcctaacagccgaaaactaaaaacagttgagaaccaacttaacagaaaataacagacttgtaactgaattcccttaacaagaatatataaatattgtgttatatttaccaatttttttttttttttggttgggtaactaataaatattaaataacaaagataacaaaattatacagtctagggtattttttcatttaagaaagttcattgtctatcataagagcattcttaaccaatctatgagtctcaacattaaagttgtggctgacatgagagagatatcctatgaaagctaaataataactttaatatcaaaaaagataacccccaaattattcaaatactctatttgaccttccaaagttgagactaaagatagtgaatctgaaagaccatttctattgaaattctcacattttaagcccaacgcaaatctactaataagtgcaactatttttacctgaaaaattaaaaacgaacctgcaatgaaataatttaacagcaataagtatttttaattttcaaaactgaaaatcattataatataattgtactaaagtcaaatatggaaggaaactccttagtttgattatttacttaatttcttattaatgtttaatgtcacaatagttatcattatgttctgttaagcaaaaaaaataaaaaataaaaaaaacatcatgttccaatgcaaaaggaattaaaattgatacattttttttttaatttatgttcatattcatttaaaataaaaaaaaaaattatttagtgtgatttatatatattagtagatatatctcatatattattattattgttttttttttttaaatttactgttttggttgctccgataatttttatgtggattactacatagaatttgattgcgatttaaattgttgtgttagttgctatgtgtgtttttatatatatttctgtaaaaatattatagaattctacataaaaaaatcctt

SEQ ID NO: 210100 - DNA, 373 bp, Cannabis indica
tttttaaaaaaaagtaacaaataaaataaaaaagcttaatatattatatttgttttgtaatcacaagttaccctcttatttgacattttatcatttcatatttattttcatcatcatctttatacttaagctattcatctctctcccgtgttcattgtaacaccttaactattttaggcatgttaacgtaatttttaacttactgtccagctcattgctaatcaacaaagtttaatcgtaattaattaaaattttagtcatttaattaaaaacataaaatagcttacatatataatttcgggatcccgtttacaaaagtgtttgtaaaagtttcactgtacatatataaaagtctgtcgcatagcgactatac

SEQ ID NO: 210101 - DNA, 1050 bp, Cannabis indica
ataactaattgattgtgtgacttatgactttttatattgtcatgttcaaaaaaaatataaaacaataaaaaataaccagaaaaaaaaattcaagataaatataaaaaaattgatttcatgtgtttagtgaaaatatattttgtaaataaaattattcgaaatataaaaataattttttcttacgtattttttaatttttttgttgaagttttaatttattatgtaaaaatttcataaagataattgaaagataattgttaaaggagcattagtaggagacccagtatgagaatcctgtaaaattgtaaatgaaatacaaggtgaccaaaacacgtacaaaaactaaaaggaccaatcacacaatccgcaaccaataaaacccaccaattcaagttaataatatttgaatatatacatgcgtaggcaagcactagaaacaaaatttggttaatttaaagattgtcgtatatatatattatgaaatgagtagaggcatgagcaatttggttaaatttgtaagaatattgtcgtgacctgactcgtggtgtgtgtaatagagatggagtgtgtgtggtgtctcctgtggctcattcccggggtgcagtatcaaacaaattaaaatgttgggctgtgtctgtcatgtgcaatataacactgcaaataataataataatttaaataatagtaattgccaaatgacaagtacctaagtgtttcagtggacaatactctgagtctaattctattatatatatattttgatcatctacttattgagttgagcacaaacttacgtggcctaacgcatttcactatatatatattataaaggacaaaaatgaaagttgaattaataatagaagagaagagagtagagagttcttggaagtgtgagtgaggaattacgtggcttacgtttgcatgcataatgaatggtatcgctacgtacagcacacatctcacaaagtcttcacacttgaaagtgggtcccactttcctccactttatcaatgccccacgtctcttgcttcacccccactcacctctctc

SEQ ID NO: 210102 - DNA, 1287 bp, Cannabis indica
caatattgtttctctcactgtaaatacagcaaagtaaaaattacttggaaatttccttttaaaaaatggtttattgtacattatttactatgagatttttacaccacatactgttaattttttatttttttatttttttactgtggggtagaatttttttcaaaaatactgtgtaagttttatattgtgtactgtattaagttttcacggttgttctacggttatttttagttattccactattgttttaattgttccggtttgttgttgtatacccgaaattcggttgtacttcagagagtgacatgtgtcaatctcgtagaatgtgaaccaacagatacaataacgattatatcattaaatataaaatggaataactcattaaatatataattaatagagtatattcttaactcgctgactgcatagtcttaggcgagacaagggtacacaaactatcaattcatgtattgacgagaaaccatcttgcctcgaaaggcataatcttgagggaactacgaatgatgcatagcggtacatctacctcgctacatgtaagggagtattgatgaggtgaataggctattgaaacacttagcgtataatccacattataataagtgtaatagcttgggagcatggaggacatgattgtccagtctgcaaggccttatggtcaaagaacagttcttaagtttactcaatacactgatgctcatgtcattgctggaaggcatatgaataaaccaagtcattcatctatgtacaaagcgagatactcctatcccacgtcagtgtccactatcttaaagataagaataataaaaggttatgcagatttctagctctacatgtgttaaaatggaacgcgatcaaagcccacatttcgtgaaaacagttatgtattttaaattcacatgtaaataactgctaacctatattcctataaatagggacagattatacagaaaaatagacgaaaaaatctttgagagaaagagatcactgattgtaatactgtattctgtatcaagaaatatcttgaataagatagactcgtggactatgcagagttaacagcaaaaccacgtaaaaaacttagtgtcattatttctactattattttttctcaaatttcttatagtatatgtgtttaatttattacgaaaaaaacttattaattagttaatgaaaatttgcgttaacagttgtttatagttgtataaaaaaaaactccaccccataataaaattattcatttttgcttaaaattcaatatttttgtaa

SEQ ID NO: 210103 - DNA, 785 bp, Cannabis indica
tgtgaccaattaaccagatcaacagttgggttccgaactttttgtgttgtcgattcgtgctagtttcaaagctttagttgggtaattccttgttagtttagggtattgccatgttaactttcagtaggaaaacttttggtttaaaacctaagtctcctattgtgatttagcgtgtcacttacccgtgttatgaacgatgtgatttaggggcctgtaattcgccgagcagttgttccattcaagttggccggcacacctgaattcagaaacaaggtaagattagtataatgttatgcatatgtatttacatgtttagcgtacatgttggtatgcctgttagagtacattgatagcagtatcagtgtagacagagttatactggatactgataaatgtatgtttggctcaaatattgattgatgctatcacatcaatatggctagagtatgactagcatattgagtataaactgatattatggtcgatagtattatcgtatgaacgttctaaactcagcaccgtgtgggacacgtggatagggctatggttgggtgtatgggcgcctgattataacccgggttattattatgttattatttatacttttcttactgaggctgttgactcacagtttctattttcatgtgtaggtaagggcaaggctaaagctgagcagtcatgagagtgagcagatgaagattgtacatgtcggggcggttaggcctagagcgtacgatctttgggacatcggggctaattttatatagttgctaggcgacaaactt

SEQ ID NO: 210104 - DNA, 727 bp, Cannabis indica
atcactgatgtggtgaatggctcagctgaaatcgttggaacttttaatgtttctgatttcatttggttttgtaagaacttggatttgcagggtcttaagaaaaagagtaaggctattcatgacaagtttgataacatggttgagaaaatcatcaaagaacatagagcagagaggaatattaatggagataatgatgatgttcatgttccaagggacttccttgatattttgcttcaaatttctgatgaagaaggcacagatatccaattaaccaaagaaaacattaaatcattcttcatggtacgttatatatattataatgtttacttaggtatatttttttaatcttgtgtttatattaaattttattgaggaatttgcactcaaatttttttatgttttaatttttataactcccttattttttttagtagcaaaaccttttaagtttatttttttttttcgtaaatttaaggtgtcagttagatattaccgttaaatatcaactgaattattattgtatcgactaattcgaggtatactgttatatatacacaggtgtatacagtagtcatttagttaatatttaatgataatatttaactggcgtatcaaaattttctaagaaaactatacaaaaaaaaaataaataaagtgtataaaaattaaaacacaaaagaatttcgcttgctcaattgtataaagcctgatgaattaattttataaa

SEQ ID NO: 210105 - DNA, 480 bp, Cannabis indica
actttttcctattaacgttttccttttttatgtgtaaaatttaacagcaagttaactccgttaagttatcagatttatcttaggatttttatcttaggattttaattataatcctaaatcaaatgaggtcttctttatcaaagaaaaaaaaaccataaatcagttggaatataacaagatctcaactgaggacaaaaattctcaggaacgtgagatggagaagatgaagttggagttgttgaaggaagagatggaatcgagttcgagcgcaattggtaatgtatagctccaaatttataatattagccaaatgatttgatcatgatattacagtgttaaggtgaaagagatactcatatctggaccaatcaaaattgaacaccaagaactgtaaaagctctcttgagattcttaaagcagaacctttcatttatataggcaatcgagaattcaaaaggctgaaagccagctctaacaacc

SEQ ID NO: 210106 - DNA, 658 bp, Cannabis indica
tattgagctccaccaagctcatataaaaaacactcaaaattagtatatggaacccacattgagttcctaccagtatctatcgagctcgtggaaaaagaacttaaaaattatcttattttaaagccacatcaagactttgtcgagcatcaacaagctcatggagaaaacactcaaagtaagctttttccaaacccactttgagccccatcaagctcatggaaaataatactaatcgagctactattgaggggcatcaaacgaaatcaagaaagacgctcaaaaattaagccccataaaagagcaataaatagaaccaaaaaaagaccacaaacatggaggcattgaattgttgtcaagtaacattcaatagaactttaaaaggttcttaaacatgcaagtaagctatcgagctacattgagttcatcttctttagaaaagtaggaaatcgtcaaaaaaaatgtataatttttaactagtatgggtaaaagtgaccccctcttataactgctttagatatatatagatatatatatatatatatatatatatacataatactacccaaattatcaattacctttagccattgaactgaaccttctcctctgccatcgccaacgccatcatttctattgatctgttgtcttgaatgattgc

SEQ ID NO: 210107 - DNA, 533 bp, Cannabis indica
aaaatgtttatcatgaaagataaggattatcaaattaatagcaatttaaatgaaaatttaaccaaaagttgagatggccgagttggtctaaggtgccagattaaggttcttgtccgaaagggcgtgggttcaaatcccactctcaacaaaataagtttttgttctaaaacttcatttttcaagtcatcttctattattgctgctgaaataaaatgaacattgtttttgtttttaatttttttaagcaaaactagtgcaagagaactggtctcctactcctacaccagagagttattatatgcagagcaaatcttggactggactggcttggcttataagggaaaaagaagtgatgaaaaaagactatatgtgaatgtgaacacacttaatgacaaatgtatccattatgaattaacaggtagaatgactattttgtttttgaggctcattacaaattctgctttgtagagaattaattccctatatatggcagttcttgtgtacttgttcttattattagggaataagaacaa

SEQ ID NO: 210108 - DNA, 552 bp, Cannabis indica
tttcctttggagtagctaaagtttagtgatgattgtcagttaatcggtgttgtatagtaaaatttgtcttaaaaaccatcgatgttaattatctaatcttgctgtcaaaataaaagacttggtcccccgtgtcctttaattgggagcaccacctttgaatggatcttcaacttgcctagttcatggatttttctttcgctaaatgattctctaaaatagtgaatacaaagttttttttttttctttttttgttcccacaatgtatgacttaatatatttaaagagaaatattaatggatacctgttactaattcttatttttggtctagttaacactatattattattgttttaattaagtataattattataaaaaattattaatattattattataattatttttggtgtagtgaacactatattattataaaaaattattgataaatattacttagtgccaaataagaatgctcaaaataaggagcgtggcacacaatatatttcatacggtggagcatgatcaaattgaggtctttctttatttttat

SEQ ID NO: 210109 - DNA, 843 bp, Cannabis indica
ctaagggaaaagccttccaagagttagcctttcggatgctaacttgaaatacgactgctaggcagcttatatgataactctagaaattagagttattttcatattttttttaaattaaaattggtttagttcttaagtttttaattaatttgtgaagtttttaattatttttgaatttattagctttatgtttattttatagtttattgtgtgctttaataattattttgttataatatgttatgtgttatttatttgaagttttatttagttttctaattaattttatgtatttttaggtgtgtttgtgacaaaaagattgggattaaattgaaaaaaatttgaagaaatggggcccaaaatacaaattgtgtaaagaaaatcagatttgcccaagaaaagacgaactctcggtcaactgcttgctccaatcggagccgttctttaacagatcgcatggcctagatccacgcgtgagaatcacccaaccaaggagcaagtgaagctccagccaactgctacatgggacccacattcaacatattgtccccgactcttccttccgccagctggcctgcgtggtccccagcccgtcagcgcccaacgaccaacacaagccacgcaagcacccgttagcttctcctcgaatcaagccgcgccaagtgttctactgagcaaaaaaaagccaaaattctatttactctcgcacattttacacacaaaaacctattttatcttcccaatttatttctacctaataaacattcctaatttattttttttacccttatctttttcactattttttccatccaaactaaatatttatttttttcaatactc

SEQ ID NO: 210110 - DNA, 541 bp, Cannabis indica
atagattggttgacaaacttgtgtgggagtatataatagttgaaaaaagttggcaaatttgtatagactcacatgagcaataaaattacttatttactaaaaaaacaagatttaaaaaactattgattctttgtttgcagatcgtttcacaaaacataaatccacataattcaaagacaataataaattacgaacatcaagcaccaataaattaaattgagacgcataggaatgttactttgaatagcctggacacataataaactgtcagtctcaatgacaacattttgccaatcatgacgtttgatccaactcaaagcctcctttataccaataatctccaccacttcaggttgaaccagaccaagctttcccaaggagaaagcttcaaccatacgaccttcacagtccctggctaggcaacctataccaaaacatccttcattagcgaacaatgctccatccacgttaaccttgatcttatttctactaggcttcaaccaatgctcagctttattcccatcttcaaacaaatgagaaa

SEQ ID NO: 210111 - DNA, 646 bp, Cannabis indica
tcgatgcttctcacttcaggagaagcaactaatgtggtgctatctcaaccacctccttggttttggaagtgattgaaatcttattcttatggtaatatcccgctatttttgcgggtttgtaatcgtctttgagcttcttgcgggatttgaatatttgaattagtcgttgacgatgagggtctcccaagggtgtggtgtgatcattaaccacgttcggggatagaagctaatacttgggggtgatacccccgagatccaacatgaggaaggtgtcaatgactatctcggggtgacttcccccagaccctttcaacattgtgggtagtcatggtgtcatgaggatgtacttatctacctttgaggatggcatcacgtccatggtgggagtagtgtcatctaccccctagactaatttgacccgtaagtgtgtgttgatcgtttatcccacctatgagggtgtcagtccaccatttttccttcttggaggtaagcatcttgctcaagctaggggtaaacgtgaacgtcagacttttattctaacggtcatgaccactcgtcatgactaattatcactttaacggactttacatattctccattaatgatctagtcccagtatttctgtgccacatgtcgttactcttgc

SEQ ID NO: 210112 - DNA, 1116 bp, Cannabis indica
gatcaccttatatcctgataccaaatccatgtcagaattaaatcaccaacactccagaaagaaactccagaagaattctcgaaatcaatcgcaagagtaacactagatgatcgaatcaccccaatcgaaagccctaatctggaaagcgaattagtttttccacgaaacgtaagaataggaagaaatcgatctgacagtaggttacgaaagctcagcaatggtggactttcttcttcaacaattcacaactgaaattttatttattttcctctgttgagattttaggcaaaataacttcttcttctttcttccatttcctttccttttcaaaaaataaataaatattttttttgagaagaaaataaataaaaaattattaggtgtatttggcttttttgatagttttcgacctatctgttttaaataaattcgtacgtggatcccactaattaattaaatatattaacaataatttacggcctacaaaaataagtttaattattaattgtaaataacacttaaatcgaaaaatacatttgatacatatattttcaataatatttatttgttactttatattttaaaattgtatttagtatcttaaactaaaatataatcaatataattttattaatttgacaaaacagtttacaattatatgtaattaaataattaaatttaaatttaaaatttataaaattgaagacagtttaatcgtattgataaaatttcatcaaaatatttttagtttaaggtactaaatatgtatgattttagaacacaaaatactaaataagtatcattgaaaatacaaaatactaaacttgtatttagataaaatataaagtaccaaatgtgtatacactcatactaaatttaatttttaaaggtaataatttaaaatatacattttctctatggagatggagctgcatggacatgctactaatgaagtgggaatttcccgtctaaatgaggaacggggcgaggacgaaattaaaattttatccctaaatattaaacgggatgaggacgaggacgaggacggagataacacttctagcataaaatattatactttgttcacgagaggaaactttttattaattattaaga

SEQ ID NO: 210113 - DNA, 506 bp, Cannabis indica
aaaataataaaaaaaatataattgaaattgcataaacataataaatacatgaactagaacccatgtatttaacaaaaatacacttaaaaaaaataatatatgtataagggtttatttttttaaaaaaatttcattaaaatagtctaggagttaattttttcagagctcgcaatgcacataaagatactagacactatgagtatcttttagtatttcatgatatataaaatgtattatcactataagtataatttaacatggaatttcacttgaataaagattattgagaatctttaaatataattatacgacatcacttgtagtggtgctaaacactttagtatttccaatactcttatatcccttatagatatacaaacatttactgcattaatttgctcataaatatatagctcttattattgaaagttggtatcttttgtttattgaggaatttaaaatggcacacaagtacccaacctatttattatttttttttaagccaa

SEQ ID NO: 210114 - DNA, 865 bp, Cannabis indica
tatagttacatatagtagatagctgaattttattatagagaaaatgtaagtatactaccaccaaaatttagataagtagtaaatataaaaaaaaaaaatgacaaatatacgatacttcgagttaaagtggtccggaaacaatagaaaatcaaatgttgaaatcttgtataggcaagaataaaagacacttgtgtaaaagctagattatcaaaaatcttgaaaacaacatcgggctaaatgcgagacttataaattaataacagcttgcatatataacggatattatgaacacgatcctatactgaatcttgataaataatacataagctaaggtgcgaatacatgattaactactcccacatacttgatcaaattttttttaacaacaatgaagaaattagttatttaaaaaaaatatttaagttcactctttacttgatgaaagtagttatttttattgctctatgtggacgatatcctcatcatgagcaaagaaaaaatcgtgatcaaaagtattaaaacaaagcttaagagagaatttgagatgaatgagcttggatcagttcaaaagatacttgctattgaagttttgaggaataggaaaaggaagggacaatcaactaaaagaagtctaagtacattaagaaagttatttagaagttcaacatgaaagatgcaaaaaagtagattcatatcgttaggcggatagtttgttttgtcaaaagaacaatttccaaatagtacgaaagagaaagagaaaatgaaagatgtaccctatgcagtagttttaagatatttaatgtatgtgatggtgagcaccagaccagacataatcatgctccaagcatcctaagtcggttcatgt

SEQ ID NO: 210115 - DNA, 791 bp, Cannabis indica
ttgttgtggaaacaacaagtgttagctgcaatcagagggaatcgacttcaacacttcatcatgggctccgatcctccattaaaataccttactgatgaagatcgcaccagaaaaatctccaatccagagtatcttgattgggaggctcaagatcaactactggtgtcttggctcctgtcctctatgactccaagtctcctaactcgcatggtagggtgtgaatctgccagtcaaatatggtccacactcgaaaagtattttactctacaggtctcagcaaagattcttgaattccaaactaagctgcagaacctcaagaaaggatctctatctcttaatgactatcttctcaaggttaaagaaactgtagatcttcttgcatcggttggtgatgttctctctccaagagatcatgttcgtgcgatcttcaagggcttacctagtgaatatgacacttttgtcatatccactaatacaagactcgaacaatactctgtagctgaaatcgaagcacttttacttgcctcagaatctcgaattgagaagactgatcgtgagattgatctaagtgctaatattgctacaatggagcctgatccatgtcctgaagccaaccttgcaaattatggtcgaggaggatacaagcaacctttcaatcgattcaacaacacaggccctggcaactcctttccaaatagaggtaattttcaacccaacttcaacaacttcagtccttacaattacccctattttgctcctgttcgtggcaattttaatcctagcagaggtgc

SEQ ID NO: 210116 - DNA, 594 bp, Cannabis indica
ctgtattcaatgagaaatctattgaattctctctttccttttcgttctcttcttttcaacatggtatcagagtgatttttttttagcttccgcatttcttctctgcaactttctcgtgcttcaagcttcgttaatggctgccagctttactccagttgtgttttctcacaaagtctctgttaaacttgacgatataacaactttcttctatggtgtcctcagattctctctgcatccgtggccatcgtcttcaagattacatatctgattcgttccaccctcctctcaagtacctaaatcaagaagatgaagttcttggtcaaatcaatcccagatacactaaatgggaggttcaagattagcttctctactcttggcttctcttttccatgtccgatgggatactcacacgtatcgttggtgctgaaacatatccgctcaaatctagaaaaccttggaggtatatttcctgactcaaacctctgctaagattgatctttacactactcaattgcaaaatcaaaagaaaggttccttgtctatcaatgaatatctactgcgtattaaaaccatcgttgatcgattattatctgt

SEQ ID NO: 210117 - DNA, 738 bp, Cannabis indica
ggtgctccaacttctaattctggtagtcattctctcggctagaatttcacattctttcccagagatccttttcccacatattggtattcccaaataggtgaaaggcaattcctgctttgtgaaacctgataatctcataatggagctcacttctctaggctgcatgttgctacagtatatagcagtcttgctggggtttggatacaatcccgatgttagagagaaagtttttagggcctgcaacatgtataggatactcatgaaatctccatgacagaataagagaacatcgtctgcaaaagcaaggtgattaagtttcaaagcagaacatctatcatgaaacttgaatccctctttttccccaactttcttcattaatcgagacaggtattccatgcccaagacaaaaagcaaaggtgatatcggatcaccttgtctaattcccctcttggcttcaaagaagccatgcaatgaaccattgaacatcaaggagaatttgggagtgctgatacagttcataactagctgaatgaatctctcggggaaattcaatccatataacatctcttcaaggaagctccactcaatcgtatcataggccttttggaggtctagtttgatcatgcaactaggcttgaccgcttttctaccataatgcctcaccaaatcttgacaaatcaagatattatgtcctatgaataaccctttaataaaaccaccctgagattgtgatattat

SEQ ID NO: 210118 - DNA, 1287 bp, Cannabis indica
atatatatatatataaactcaacgtgttttacttttaagttaacattataataatattaataaaaaattcattattaataattatcatttcttagctactaagaaacttctacttctagggcgctacattaaatcctacatactcctaattaccccaatacctacattattaacttatcataatattcccattaattctatcaattaagcttgttatgacatttctggcccccgatcgagtctctaaggtcgccaaacctgaaaatatttttattccacatatagttcatattacattcacacatgctatataaatctccgtaatttaaaaattacgcttatttatcaacttatagcaaatttaaaattctctgttgaactagattagtaggatcataatcccacttattacctagttaactcataatataaatataaaccctaattattaattattaagcctattgggatattataaccattccctccttataataatttcgtcctcgaaatttacctgaataactcagaatacagctcccgcatctgcgactctaatttccaagtcgcttcctcaactttactattcctccataggactttaaccagaggcatagttttatttcagagtacgttctcctttctgtctaaattatggataggttgttcattataggataagtctgtctggagctctatatcatcgtaactcaaaacatgtgtcagatctgacacgtactttctcaacatagagatatggaagacattatgcaccccagataacgcgggtggtaaagttaatcgataggccacctgacctatccgctccagtattttaaaatgactgatgtacctagggctcaactttcctttctttccaaatctacgcacaccttttataggtgatatttgaagaaatacagagtctcccacttgaaattctatatccctacgctttggattagcatagcttttctgtctactttgcaaagcaagcatacgagattgaatcttttcaatggcttctgtaaacaccgcttatcttaaatttggaaattaacagataattagggtttaattatggagattatttattaattctaaattattaatttatagtgtttaatttgaatttagaatgcattttatatgtcatatatagaaattgcataattttgcatactcagtgcccgacaacattagaacgcgtcgtttggctattaaaatcacatcctagcatttttagtatagcagggtgatatagttacacattgggaatgtcgggat

SEQ ID NO: 210119 - DNA, 767 bp, Cannabis indica
gaattttattgtaaatgagctgcgagaatcaatacaaaattaatatacagagcaatttactcctccttttttactctgtttagcttggatcagagctgagaatcttgggctccttgattcatggaaaaaccccacatcagccgaaatgtcatctgcatccaaccctgcaaatgaaccttcccagctgacacagtcaacacaccagccataactccagctccaccagtccaatctttccttttcaaagccttgcccactcaccataaaactgatagatcaaactatccctattggcggtcccaagctctcccagcccttcgggctcatgatcttgagggctatgttctaggaacaaaaccctgtcccccttagtttgttgataacacaatcggaggacctataccagatgaactgagacaactaaatctcgggtttgctatgtggaggcgcacggatcaatcggttctcagctggcttcttaattccatttccgagtccatgtttggacatgtggtcaactgtttatcttctcatgacctctggatcacgctggaaaacctatatactaccagttcaaaagctagaactctgcaacttcgatttcagctgcagtctctcaagaaagggagtctctttatacatgattatatcctaaaaatgaaaaatattgctgatggtttgtctgctgcaggtcagcttctatctgatgatgatttaattctttacatacttggtggactcggccatgaatatgaggcagtggtggt

SEQ ID NO: 210120 - DNA, 962 bp, Cannabis indica
cgggatccgtttattccaatcatatctaatcttatggatgctcgtggccttataaatatgctgatccaaggggacaacttgacctgggacaatcatcggtccgggcggcatcatgtgaaatctgctttagataagggtttagtgaatggagcttggctcaatttattccccagggctatcttgtgttcgtcccagactagcaactctaaccataggcccttatgccttatgtcgaatggtccggggaccaagttcaaaaggtgctttaggtttgaggaaggttggacccgtgattctagaagtaatctggtggtagctaacgcttggaactcggtcagtcatgcctgggcaccggcgagaattttcaaaaaagttggtgctacacgggtggcgcttctgaattggaatcgaacccaatttggtaagcttgatgtgactattaaggaacttgaagataagctcaactctcttcagagccttccggctaggtctagagattggaatcaggaatgtgaagttcgccgggaactcaatgaatcaagggaaagaaaagcaatctactggaagcaaagggccaggatttcgtggctcaaagatggggataagtgctcaaagttctttttcctttcggccgccattaaaggccggcggaacgccattgagagtattatgaatagagataacgtctggataactggacgtgaggccattgggagggagtttactgagttttttaagggtatttttacggaggcggctactagccaggagtacaattgtgctcggttgattcaggagcgattctcccatgaggagttggatcaccttgttaactgtcccagttctgatgagattaagaggactttgtttgcaatgaacaatcataaagccccgggtcctgatgggatgtcagttttattttacaagcattattgggaatctgttggatctgatttttgtga

SEQ ID NO: 210121 - DNA, 571 bp, Cannabis indica
taggaggataaaacacatatccactcaccattaaacttattaatccaaaaaatcatgatacattttagattttaaaaatgggtttatgggaaaaaatattgagccctaaaatcaataactttgactcttgataccaattgtttaaaaacaattattcataatcattaaacccaaaatctagtatttatttagagcatcaaaaataaaatacacatacctcccataccatccatgagagtgattatccttcaatattttcaaagaaataaccaccaagatccctaacattgagcaaaagcctagataatactttgtggagctaacccctctttcactcattaccattaacccacacacaaccacttcttcacataagacatatatatatatatatatctctcatacccttataaccctaacgggttatatactaattgggcttaagtggttcaataatggtaaactataatttaatgggccaactacaatattaagggtgctccaatgtgcctctaacacatagttaagttgttaaccattccattatagttattagtaatattaggcacat

SEQ ID NO: 210122 - DNA, 620 bp, Cannabis indica
atcttaccaatttagcgaacgagtgttgactgctttttagtatcaacatgtataatattgttcttgtaaaattaacgtaaaactaataattcgtatttttgtgaaaaaaaaaatgtataaaaatattaaaaaactgtagattctatttttttttttttctgttttcatataatatatatttatgaaaatacccaacaaatatatgcttattatgtatcaaaggccaccacaagataattcaagattttgtaaacaaatttcaactaggctttatttaaaaaatcacatattttcattatatagtactaatataaatttaaagtgtgatattttttttaaaaaaaaattgacattctttttaataaaatttaaaatatgtagcatttctaaaagctaaattggttatttattgtaccaaataatatttaaatcaaaaatatagtatttttgcaaaataaaataaattgtttatctaaagaactttcagctgagagcgaggcccctaagcggcgattcagctcgctcttccgtgggagaggtctgatttatgatcattagttacacgaccaaactaaatatcccaactaaatactctttttgttaagatacaaaatataggg

SEQ ID NO: 210123 - DNA, 528 bp, Cannabis indica
aatccattatatatattactttatttgaatcaacaatataaccaaatcaatcgtgtcgtttagtcaaacaagaaagaataatctagtagaacctttaactaaaaaataaatatgcagtgaagcatcaaagaaacacaaattaatccgaataattaaatatgtgacaaatcacacttattaataactatcaacaaaaaaatattaattattgaatagtactttaattattaatttcttccctttttgcttgctccaaaagtcgtttgttattaattattaaacaatacatcgatgctatgattctctaaaaatattccactaggttgaaagggtcttaagagcttattaactataataatttacaatgatttattaatgatatgtgtattaattataattagcgatcaagactataattttaataaagtcttcctttttatataaaaataatattaagataacctaaatatatcttaattcacatatacccacaccacatcaaccataaatttgtcaatatatatactc

SEQ ID NO: 210124 - DNA, 1294 bp, Cannabis indica
ggggttaagtattgtattgtatattttaagtagtattgccgcaaattaggggtgtttgcggtgcgggtggtgcgagttgtagcttattttttcaaaccaaaccgcatattagggatggtaattatacctgcgggttcaggtacgcgccccattggcgggggtaggtatgggtttcaatgtttatacccgagtcaaaaacgggacagggtgggagaatgaatacccaccccgatatggtatatgtatatatttaagttttaaaattataactactacaatcaaaataacttcatgttttaggctttttattgattatagtaatgagatatttcagttttcatgaaaatacctacggtgatgcatattaataatcacacttaactgctttaataaatgacacaaccatttattttcaattaccaattttgtatttactaactccatttacaatacacactattccacttatgtttattattttaatgagtttttatgatttttttttttaaaattctctttgagacattattttttttttcaaaaatatatatgtaatgggtacccgatgggaatccttcccccgtcgtgtaatccttgtcccaaccccactttaatttaaacgggtattggggtgggtacggggtgaatttaggaagtgggtatggggtgggggagcaatccccgcacccgcaccgccccatttacatccctaccgcatatgcgatttttataatatctcaaatcgcaaccacaccgcgagatcttaatatcgaaaaaatcacactgcaaaaatacgatgtggtgcagtgcggtgtgagcggtttacactatcatcattatcaaacattatagtaaaaaattaaaaaccaaactagtaaagctttaacaatacaaaacaaaaaaaaaatcttattaaagttttaacgtatattaactatcaagtcattatattaaatttttttaaaaaaataaagtaataaacacatatagtatatatatttattcttatatatatataaaaaaaattaaaaattagtgactttgtaacatatagtggagtacggtttaaaccgtaattattagatttaaaattgcaaattgcaccgcaccgcaccgcaccgcgaggtttggaaaacatacaaaccgcaaccgcaccacaaaagattttaaactgtatttttcatacagtgtagtgcaatatgagccgtttgtataatttgaacagtttgaagaacatacctacccaaaaaatacctattttttttaatcgaaaatgttaaagatggtttataat

SEQ ID NO: 210125 - DNA, 636 bp, Cannabis indica
aaattattatttggaccaatcaattattgacacgtgacatttgatttgggtttaacggatccgttagaaagagggactaacagactaactaaaatggggaccttagggattattaccaccaatttttgaggttggggacttatttgcatcaacccgaattttttggggacttttgccgcaattatcccttaatattttaacaccacacaattacatgaacccattcgggtccggattcaggtgtagtttcggatctagaatcagagtatgtgagtaaaaatttaaaatgtaaaattttttctgttttttttttaaattgtgttctcagaaaataaaaataattttttgtagtttttaaaaagtaaagttgtttgagtgatgtttttttaaaacagtttttcaaaaaaaaaatggaaagaaaaaaaaacaaaaatcatatttgaatgatgtaaagtaatttgttttttgaaattaatttttttaattttaattttattaggctttgttttctagtttcttttttaaaaaatagcattctaaaaaatttatttatggttaaattttatataactaaaggaataaatatcttcttacacaaaaaaaatgaacatttgtatagtgtttttttttaaaaaa

SEQ ID NO: 210126 - DNA, 530 bp, Cannabis indica
tctcatatggtatcagaagaatttcggcccccagcttccatggccaggccaactactcgatctcaggatggcactacaccatcgacgatcgacaatcctggagcagaggtcaattccgaccctatccctgctcctcctccctcagttgctcatcgacgcattccaccagcacgcgttcaacatcagaactcgactcctggttttcaagaaaattctgccattgttgatgacgattccactcaggcgcctcaatctcgtttggttcttgatgatccctccagtcctttcttcctcagcacaggtgatcaccctggcttgattcttgtaaccacggtccttactggaaccaactaccaaccatggaaaaggggcatcacgatggcactcacggccaagaacaaaattgcgttcatcaatggatccattcctcggccagaacctggtaatcctacactcaattcttggttaagatgcaataacatggtgatgtcttggttagtcaattcggtttcctctgagattgcacaaag

SEQ ID NO: 210127 - DNA, 525 bp, Cannabis indica
aaagtaacaaaaatccaaaaagcaaaacatactaaactacgagaagagaaaaaaaaaaaaaaggagggaaaacaaaaaagaaatcgtactttctagcaatctttctaggatccttggcttggggacgcgattccatctgatcatcagaagcaacaacaacaaccccatcagcagggctcggaggcactttcccagaagacgacgtactagcgtgacagtggtgggtaccaacggagagaggatcggcttcttcaacttcggacattgtcggaaaacacaaaccctttttctctctctctctagagtagagtggagtggagaagagagagtgagaaaagcaggtgatccacgcaaagcaggcaagcaaagattgtgggaatgtgaataataataataatgtttggtacgagaataagaatggcgtaataacgggaatggcttaatagaaaagaatagcttcgagaggagggttttgtccaagttgagaaataaaaagaatgtggggtccacctagtggaaagtcaa

SEQ ID NO: 210128 - DNA, 552 bp, Cannabis indica
ccattcaaaatagaatagtcactctaccaaaatggtggaaagtgtattccattagaatgacattctaatactttaacatgcaaccaaacaaaagaatcaatataaaaattgttttctttctattccattttattttattacctccaaccaaacaccacctaatatattgtagtagatatagtattattcttttattaatgaccttattttaatctcaggtaaatatagtaggaaaatctggattctcaaatgagaacaatgaaatataattaataaaaattaatctcaccataagtattaataaaaattaggggtatttttatttttacacttcaaaacaattttctttgtatttttacgaaattttacatagaaacccctattgcaactaacactgcaacctaaattgcaacaaaaaatcgtatagaaacccatattgcaactagcgctgtaaccactttagaaacccaaaccgaaaataaaaaaaaaaaaaagtaaaaaaataagtatatggggcaattcccctaaaaattattattctattttaaaata

SEQ ID NO: 210129 - DNA, 658 bp, Cannabis indica
aaaataaaaatactaaataaaaaattgcattattacctgaggggtagggaagcttattagagctccatggttgcaaaccaaactcacaatatgtttcaatttgtgtcctcaaaccaataacatcccaccatttcttccaccttaaagtagccatagcttcttccatggtgtgaatataaaaggggtgtttagaaatagccatatctacattctttgacacaacaagtccatgaatcaaaagcaaaggatcaaccatcaattgcaacttggcatcaacccaaatactaaatttcacatttgggaaaagcctatgaattaaatacttagctatgactccattcatagctggattctcatacaaatctttgctcaaaactttgacaattctccatgctcctattctattgttgttttctgaaactaatttgtggtactttagtcctttgtgtgttacatcatcaataaacatgtaaaaacatacattgtcaagtgtttttgatccaagtccctttggttgtctaattttgtcatggtcattaaaaaattgctgagaccactacaactcctctacaattttccatttcatttcgatctgtcacacatttaaaaaaaaaataagattatcaaattgtttcgtgacaatgaataaatttattgg

SEQ ID NO: 210130 - DNA, 749 bp, Cannabis indica
tccagttcaagacaccatattctgttattcagtctctctatccccacatttctacaaacactttgccagtaaaagtttttggttgcactgcatttgtacatgttcactcccaacatcggagtaaacttgatcctcgagctaccaaaacaattttcttgggttattctcctaccaagaaaggctatcgttgctattgtccactcaccaagaaatcatacatttcaagtgatgttactttttttgaaaattctccgtacttcactcccacctcgcttcagggggagaacaatcatcacaagcaagaaactcagtggtcgtggggtttagaattaccccctgacattccattcccttcagaactagaaaatcctccatcctcttctgaaacagaaatcaatcaacgtccatctcctaatgaaagtcttcctcctcaagatcaaaacatgcagaaggaaattcgagtgtattctagaagaagtaaacaagtcacgaatcctcacagtcaagagtccaatccggtgatagaaccaattccctcaagtgatccaggtactcttcccacaaaaagtcagtcagatctggacattcctattgcattaaggaaaggaattagatcttgtacaaaacaccctatttcaaatttcatttcgtattcacaattatcatctccatttaaagcttttacctccagtctttcagatgttgtgattcccaggaacatcaacgaggcacttagcattcctcactgg

SEQ ID NO: 210131 - DNA, 618 bp, Cannabis indica
ccaaattgagttctgtaaaagcataaatttattaattttttgtctactttcgagtaaaaatattttcaaagcgaaaaaaatatgtttataaatgtaaactacgatttctatagaatcatcaaacatgcacataaaccaacatgaaaccatccaaatcaacacaaaaattgttttaaatctatatttcatgaaagtaaatcattactgtggctctgaggctagttgttgaggattatttaccaggatctggatttactatcatgtatgttatttaacatcctaaatatgaatttctaaaacaatgtaatttaaacatatataaagtttaataaaccttacattggttgcagcagaattaattgatttctttcactgaaatctccaacccttgtatcctatctgtagcagagtatcaccagaatctgagcccgattctccttcacttgatttggattcttcacagtcttacacattatgattgagtaccaactttctatgtgtgggcacgtactctatcactatagctcgaattttaatggtgaagaaagactaagaatttcgaattagagaagagaaaagaagaagaactctctacttgtgaaaactaggtcaagagtc

SEQ ID NO: 210132 - DNA, 676 bp, Cannabis indica
tgcacgtggtatactcacctagtttaaataaaatatacatcaacatatcaacatgtatgaccaaaaaaatgatttattatgaattttttacacattaacaatgtgagattctgtaactcttaaaattaaaaattatttctttttcaccattttggatagctcggtaacaactcacttctttttctttttagttcactatccccaaatcatcacaagtaactcttttggctatacttttagatttgtttttttttttttacttttggtgactcttttggatccattatttttgaaatacaagtgactctattgactctaatttttggatcaattttttagattattggtggttctttttggctcactgtccctcaaattacaggtgattctttttggatcatttttttttgtggctctttttcttagttgtactttttttttctatcgactttttgtttttgactaagatattcgttagatgttttttttactctggtatcatgttcaaactataaaatacatgcggtacgttccatttccaaactaattgaaaaagaaaagaatagtttatagatcttatatattctattatcttttcaaacagtaacaaatgtgagagtactctctaacaagattgctttatttatctttaagatcttcttataacattattaat

SEQ ID NO: 210133 - DNA, 1298 bp, Cannabis indica
  modified_base (1172)..(1172): a, c, t, g, unknown or other
  modified_base (1199)..(1199): a, c, t, g, unknown or other
tcttgagattagtggttacgatgtaggggtgagatacacttcactgcaaacaaagctcaggtatttattttttatatagtttattttgacctttgataacaaacaaaagcaatcgttctgtatttttagcttttctttctaaagaggatagttttaaaaatgtagttgaagctaagggtgtttatacatttaattcaattcgtattattttgctcatagtacatctgatccgcactaagtacagatttcatattttaaattcaatctaatctgcatagtaactcaaatctaatctaatctacaaaaatacagattagatcggttatcttgaattagtttcttttaatattgaattatttaatatttattaaaaaaatatttttttttccgtataactaacaataaaataaaataaattattgttattttatgtctccaataataatttaaaataaataaaataaataaatttaaagcaagaaggaaaaaattagtatgtatatagatgtcaaatttgatattaaattatatgttcattataaataataatagaatatatatttaatttattatattctgaaatatatttgtattagatttttaaattattgttttttatattaaaatattagttgtatatataatttttaaatatatatatatatatggattgaattgaattagttacttttacatgtcaatcaacatttaatccgcacaagtgcggatatccacagtttgcgaatagaattgaattggatcgtggggattggactagattggttattttatgagcacccctacttgcactcctcattaaggttggacacttttgtttggcaaaaataaaggtgtgggaaaatctgtcaaaacaagcgtgtgattatgggtgttcataaaatagtcaatccaatctgcacaatctgatctaattcaatctaacaaagtacagatatctgctcttatgcggatttaaatgttaattgaaacgcaaaaagtaactgatccaatctcatccaatctacatatatttatataaaatttaaaaaaaaattatatgtatacaattaacattttaatgtaaaaaaataacaatttaaaaaatctaaatacatataatacaaatatatttcaaaacttaattgaatcaaatggataatctattcttaacntaaaaaaaaaattccgtaaaaaaaatntgttttcataaatattaaataataaaatataaaaattaatcaatccaaaataatagatttaatccgcacttactgcgaattggatgtactataaacaaa

SEQ ID NO: 210134 - DNA, 653 bp, Cannabis indica
aaaataccaacccttttaatacccactaaccaaatatatttcatatgcttgcaattacacattattctctactaatataaatagatgcataatcaagaatcaaagacatttctaggcttgtagcgataggctcaggcataagtggatggaatagtcatttaggctcgcctataccataagtttctctaatcaaatcaccctataattttcacaaatgatcccgatgtccttttttctaattacatgagagaactcttttccttgataacctttacaactaactattttttttctttctaattttgacactttatagtctaattttttttcttttttttttcaagttttttggtcgataattgtttttcttcacattcactcaatattactctatttcccactcacatgcataaacttccccttaaaatctctccaaacataagattcacttatggtataattagggtcaaagttagataataatgagtttatgttgttttagctcacaatatgtgtagaaacaaagaatcaagtcaaagctcaaaaagggtaaactaggataaatattacaaggatggcttgaaaggcacaattgatccaaaaaaaaatacataaataactttccctattatgcatcatttattattttgcct

SEQ ID NO: 210135 - DNA, 622 bp, Cannabis indica
ttagaatgcgaaaatgtatggttaaggaagtaggaataggtgagtttgtagtaaggtgcatggagttccatcttaaaaccaattagcaatgagagaattaatccgtgcatcttatgtaatggtttatagttttcacatactatcaatgtgagactctttaatatctcacctcaagatggaggttattttttttgttcaccaatcttgcacggctcgatcacaagtgacgcttttatagctcactatcgccgaattacaaacagttctttttggctcgtttttttggactgattgttggattcgaatcagatacttgttagagtattctttgcatgaggttccatttagttttctatcaatgtggactcccacttaataatttgaattcccacttgaacaaattctagttccaaatgataaatgaaaaacacatggtctaaatcccttacgtatttataacaatgaaagggatagggagactacatactatacgactaaaaacaggtcaagttgtggtaccaatttccaaatatcaatcttgttgtctatatgctgtcaccgttggattcaaccgttacagtatttttaaggctgagattaaaattcaaaacaagaaaggctt

SEQ ID NO: 210136 - DNA, 869 bp, Cannabis indica
atctcttgggacattttcttctttcttttagggcttgttagttttacgtcccaacatatatttaatgtcaagcaaatatagaaaagagataagtttaaaaatactacttttattaatcaattaattaaatttacctctaattttatatttagttgaaacatattgtacccaaaataccctcacataagagagtcacatagagagtatcttgaagtgacaagggtaaaattgatacaatatttaaaaaaagaggtaaaaatgataagactttaaaaaaaaagggtaaaaataaaaaaaaacaatataaaaatagtatagagtgtaatttcctctatagaaaaaatactaaatccatccaaatttcatcaaaataatctcaaccttgtgtactacaaacaatgtcaagaaatatatcaaaatcagagcattttatacactttgtctttgcctttgttttttttttggtaattctagtttatagtttaatgaattatatcacaattttttcatcgatggggatagtgggtggaggctgccgttgaaatgtacaaagagaaaagggttagctcaaatgtgaaagaaagaaaaaacaaggaaagagagtgagtggaacaagttacagtaggggtattttagacgtacaacattatcggcggagatatataattttatttacactctaaaaatttaaaaaaatatcctattttaataatttttattttatatataaaaaaatgtaaagaaaaaattatatgaattttttttttaaaaaaaataaaaaatatatgagttagaaaaaattataaaataaaatcaaaataagtttaaaattgatataaaataatgcgagaattttttttaaaaaaata

SEQ ID NO: 210137 - DNA, 717 bp, Cannabis indica
gatactttgttgtgatctaacaactgtagcttcattatttgtgtgttggaatataaagagaaatcagaagggtcttctaggaacgcacagttttatctctctggtctcgtggtacaggacatgtctttcgggtacaaattactgaaggcagaaggctttacgactgcggaaccaagatatgttcctggaaggacatatccaggtgggattggcccacttctcctttgttgagggtcccactgataggtctacgatgctgacctggactccacgtgtccaataccaaaaacgcgaataacagttacaatttggttcgcacgtcatcaagaccaaaatttggattaacaattatattgtgcaattgttatattttattgtataaagaattataaatttaaaaaaaaataaagtgtataagagtttcccataataataagtttaattaatatactatcataaaaatttaaaataatttacttctctgtacaatcttaatgtatcgacaaggtatattttatgatgacctgtctttctacatgttacaattttgattgcatgtcatacaacccaaaatttgggataacaattatactgtgcaattgttgatcttaaaatataagggtagcaatttatcatttacatctgaaaaatctcatagttattcaaaattatcatatactatctcatttgaattagatcaacggtaatcgagatcat

SEQ ID NO: 210138 - DNA, 548 bp, Cannabis indica
ccagcacccgttgtaccccctagaggagcaatccctcaacaagtccctggattgccaccaagaccaaatgggagagtggccatgatctccggtggaccccatattggcagaaccgtcagaaacgagctaaagcgttatgttggggccataaaacacgatgaagtgtgggaggtcacccaactcccagcaaaaaggccccaactcatggaccagcccattaccttcacggaagaagacaccgaattggtgtgtttccctcaccatgaccctctggtcatagagactcccatcgccaataagattgtggcgagaatattggtagataatgggagtttcgtgaacttattgttcaaagaagccttcacggctataggtctcacggacagggatctatcgtccagcggctcccagctcacgaggatttaagtgggacaacgcttaatccaagtgggaaacgtaagactccctgtcactcgtgtgccccggataccccacagagcacttttaaatctgcaccttcctggtggtgtattgcccaacagcataca

SEQ ID NO: 210139 - DNA, 855 bp, Cannabis indica
ttaaaaattgagtacaagcatatgtttaaacacaatctcttaaactagtaatagaggttgttattgtgtgagcaacactatttactgatcgcataatggcgatgcaagaaccactaccaacaacaactaataaagaatagatatgtaataaaatagactgaaaactaaaattaatgtggagcttattaatctaaccaattgtcacagtagaatcactattaataattgagatactgaaaccaaattgatgcacgagagtcaaacccagacgaatggcaagcagctctgccatattagcagagaaatcccctaacacacttgaaaccacactaaccaaaccacactctctgcatcccgtagcattctcccaaattcgacaaagcccctccccgaaaccaccaaagcatctgtcgcaagagtaaaggatttagggggaggtgacatctatcgagtagcttagtaaactgctgggtttgctggatccagtttcaaatgaagacattgtcgaccatactccttaaactctgccaggtgattattgactaagtctggaataatatccaatcttgactgcttgttaccaaataatactgagtttctatcatactacaaccattaaaaggttgtcatcatcaattcaaaagtctcacgaggtagcctatcaaagagaaatagaagaattttctgcattggtccactcgcatcaacggagcaccgaccacacctccaactattgccacattagaatcaacccaaaacagaaaaataaaacatgctgagaaatttcgaattcttcccgcatcaaaaacagcaaagaggtactaaaaaatgtttttaacaatactaattaaaaaa

SEQ ID NO: 210140 - DNA, 648 bp, Cannabis indica
gcttaataacatgagtggttggggacatgttatatacaatagtagaattcaagttttcttaacagatcgaatattaattttcttatagtgttaattttgagagtgctaacagttggatctaaatctataataagttatatattaattattcacattggattaaaggtacacaaggagtcaagagataattagaagggtaaaactgtaattttgaccaactctaattataaactaataattagagggtgaactacttatattaattatatcaatggactacaagtatgaattctgtaaatataattttatattgtcaaagagtgcaattctatatttatagtggagtaataataaaattaataaaccaggttattctattaatgagatcgataataattatgtgtttattagagcttcaagatataagttcatggtctctgagtcacctctatacaatactgtataggggaaggttttatttgatgagtaaatttgagtgagaattaatttctatgagaaataaatttttaagggcaaaaaagtaatttatgaaattattattttgaataattatgacaattatgaattgtataattaataatatttaactacttagttttatttcataaaattatattaattagttaa

SEQ ID NO: 210141 - DNA, 551 bp, Cannabis indica
taactctatgatataattttggtgattagataaatacaatgtgtgcgattgaaatttatcaaaaaaaaaaaatttcgattttcttcccaatttactctaccccaatctcctttatctaacctactagaacaataagaagaagaaaaaaaaattggaaactcatttctaatcttccagagttgacgaggaagaatggaaaaagacaacgagtccatatctggcttcgacgaagaaatttcctttcttctttgctttcgtgttcttctcctttctctccgccagcttgggagacgtcccagtgttggtgctgagtttgctgataacaggaaggggggctgagattttaggcgatgaagtggatggatagtgccttgaccttgggttcttcttgttagagtttgtgttttaaataaaacttattctctgtaatcttattatttatcaataaaaaaatagaaatttttcttgatttagtgaaatatttggtttacatgtttattttacatataattatatattcagtgccgaccctgagaatttatgggcctaag

SEQ ID NO: 210142 - DNA, 1327 bp, Cannabis indica
ttctattattttagataattcatatttaggatgttaaacaacatacatggtagtaaactagatcccgataaaataatccccaacaccctagtcattgaagtacaaattgccaacatgatagtggctcagtcaatgatcgataacgtagcttcctcaaatattttttttcaagtcaacatataaaaagatgggacttcttctaaaagacttagttccttacgctcagctggtgtacgatttctccagacagaacattgctccacttggacatattcgttccccactcaccgtagcaaagactctaacaaaaaacacgctgatggcctaatttctggtgattgatgtcccttctacatttattgtcatgataggtcagctaactctatatgactttaaagttgtaacctcagtctaccatttatgtatcaagtttattgaccgggaatggacttgggtgtctaaaaggagatcaaaagactgcacattaatgctactaccttgccttgaccaagggaaaaaaggaaaatacaaccgacaaaggattaaaggtcgagaaaattttaagtaaaaagggtccacctaaggtggggatgaagacatggatcatctctttggggacctaagcacaagcatcgtcttgtataggaattagaagaagtagagatcgatcccactattacgactaagaaagtcaatatttgacaaggtttgttgctcaaaataaaatttactttgataagattttcaagagcaaaccttgacatttttgcctagtcgcatgaagacatggtcaggatatagccccatccgtaatttctcacgccctcaacattgatcttggtttcttttccgtatagcaaaaacaaagactattggacaaagaacacgcacctgtacttaatgatgaagtagatcaagcacgtagaccaagttccattatctggatagaagcacagatcaagtaaagattctcagagatatcttccccaaaatatctccataattatagtccatttagaatccctatctttttgggattgattttatacgattgagaaaattatgggatttgatttttaagtttccctaatttctcttctattaactcatgatagttgtaatgtacttgccctataagtagtgaggtcatatcactatttctggattcattttttttgcattctgaaagagcaattactttgaaaaaaaaacttgtaagctttcttaagattatcaggaactcacctggccggaccttatgatcttgataattctctaaaagtgatacaactaaaaggggagtaggatataaccactatcagaagtc

SEQ ID NO: 210143 - DNA, 728 bp, Cannabis indica
agatattcaaacaagtatcagtgagctaataaacataatggaaaaggcccgccaattattcaggacactaacaataatgacacccgaatttgatcaattaacaatattgaaaaaattaataatagggcatcctaaccatccattaaaaggtctaagccacataacttaatcattaaacattaaagaaatctgagtatgaacattaaaaaacacgaaccatatctttcttgaaattcaggtgtgccctttaagaactccaacccagggtgggttgccaaaagctcttgaagaacaggtttgaagtcaacctgaaacaacaccaaaaagataacacacgataaaaggtgaacctaagtgaacatagcaaaagaaaggatagtatatttacagacttgcagtaccaagaacaccaatcaaaaagaaattgtatatgccaaaggaataaatacatctataaaacaaacctgagaaatataattgcaattctgccgcttcaaaagtttaaaaatctgagtctcagtatccataatcagcatattgctatcaacccagtattttatgaacccattcctaaagaataccatattaaagtgttatgttatgcgaaattgcaaatgaataaaatagttctgatgtttcctaacactatttaagtccttataaatgcctaaatgaagataaaaaaacaaatcaaaacagagccctaaacatgtaaagttgatctaata

SEQ ID NO: 210144 - DNA, 510 bp, Cannabis indica
aagcaagagcctgcaatcgcaaagttacgtcaagcccaggccccaagaatagaatagggatttttacaagaatactagattttaagtccacaagacagaaagtatatttatactgcctcttcttttatttttcttttatattgtaacataaaaaaaaaaaaaaaagaagaagcttctatcttgcacacttacggacagaactaccacaacaatatcagaacagctagaaaaaagactattaattcgagcaaggtgaagcagaaacattaaatctattaatattggagctgttatagtttttctaatgttatttttggattgttctactattgtttaatatgtttaacaaatattagtttcaaattacacaggttaaactaatcactaaatatttgtttgaggtaaccagaataaaagaattatagacaaaaatagtaccccattgaaagggcgaaatctgaaagaccgaaaaaaaagatggaagttgactgggaaaagaaacaacataac

SEQ ID NO: 210145 - DNA, 557 bp, Cannabis indica
accttcttccagtgaaagacattatccctcaaatcttttgtctagccatagaatgatggcccgtactaagaagacaactcgtgtggctggcgcgtctgaccctcaagtgtctcagcgcgccactttgcctagcaacgaataggatccagccgtccagggagggggatcaagaaggggacgctgaggttcaagagattgaggagcaggacaacgtacgtcctagcagtacctccgaggtggaggaagaggaggaggctgaacccccaaactacgagggatacaatgaggcttgggaaccagttgatgctgatggagacgtctgggttgagggcgtggactacgttagtgaggagcttactgctgcggttcctcatagaaggcaaggtgtcttgggtgccaggtgggggagccctccatccagggttactgaagcgcgcctgcgactctcaaccatggtggctacctgggccaattggattggtacattcccgcccacaataatcgagccacaaatcctaaaaggaggatgtgcgcttgattgggtgctagtgcccaga

SEQ ID NO: 210146 - DNA, 822 bp, Cannabis indica
gctaaaagcgaagtcaacaatgagttttggtgagtgaacttctaaactctgaagggacattccaacatgaaagagatgatccattctaaaaatggatttctccaaaaaagctagaagtttgtgaaaaatgacaagcttgagctgcccttttatacacaaattccagtgataagaaagctagggaaatctaactgttcgagggaagaatatgaagggacgactcataatgatcctcgaaaccgtacaactgccagaattaaaggacgaatattttccaagaagggattttgatgcaaatgccctctgtaattatcaaaaagctcttttttctaaaaaaaaagaactttttaaggggcaattgttataccgaaaattcagttgccatctcagtggaggatacatgtcaagataaaagggaatatggatcggtgcaatcgctttttatggaatcactcattaattacgtaagtattagagtatatttgtaacctgtagactgtaaggtcttaagcgaggaatcaatatacaaactggtacttagcttgttagtgagaaagcatatgtcgctgaatgcgaattgcgaggcatcaaaggatagtacacattggaagacgaaagcgacatatatcaattgcaaaagatcttagtgtacaaactaagtgtcagatcagctcaagaccaagtaagcgaggtgcccatctcgctatgggaagacttcctattacttcatcccatcaatgctagcgaggctcacaaccctggcaagtcaagaagttaacattcaaatatgcttcaaagagcgatcgacacaagacatgcatc

SEQ ID NO: 210147 - DNA, 1394 bp, Cannabis indica
gcactaggagcaagcgcaacaacgactttgaccatgacaccaacgagtgtcagaatttgaagagggagattgaattcatcataaggaagaataatccccacatgcatcattatgtacgtaacgaccaaacttaggcacaaggtgcctagaatggagatccaatgccaccaccagtggcaggacacttaggggccattattggtacactccatattgcaggcaagaccagcaaagctatggatcactatgcttagacactccatcacgagcctaaaagtgacatcctggcagtcgaggatacaggctacaaacaaccaaagtatggagagcccacgatctctttcacagaaggagatgctactcatgttagtttcctgcacaatgactccctggtcatcactgaacaaattgggaatatgactatggcaagatgcaaggtgggcaatggagcctcttccaacattcttttcaaatcaacatatgaaatgatggggctccaactcactgacttggcaccttgcaagcaagtgatgtatggcttctttggccaaggcaccgcacctatcaggtatatcagattaccccacactattagagaaaatctaaccactagaactctgataacattgttcatcgtaattgatgttccctcgactttcaatgccttgataggccgaccgaccttatacacttgatggcggtaatatccatctaccattgctaccttaaatttccaacaaggcatgaggtaggatgtttgaggggagagcaacaatttgcctatcactgttacagcttgaccttgtccaaagccaagaaagagaagatgtctaccaagagctctaaagaagagcctagcaaagggcaatgaagtctagcccaaagcggggatacaaacatagatcctcggtttggggatcctacaggtagcttcagacttatagaagaactaaaggaagtggaggttgatcccacttctccaacaagaagactgaagatcgggaaaggtttagcgccaaaaataaaatcattactgataaaatttataagggcaaatctggacctctttgcatggtcacatagagacatggtcggaatcaacccctctgtgatgacccatgccctcaacattgatccaaacattcaacatgtacaacagaaaaggaggttactagccaaagaatgcgcccgagcactcaaggacaaagtggagaggctacgagcccatgacctcataacagaagcattctatcaactttaggtatccaaccctgtgatggtacgcaaaccaaacaaaaagtgaagagtctgcatcgaattcaccaacttgaataaagtatgtccaaaggactgcgttttacttcccagaacgtggacgccacaactggccatga

SEQ ID NO: 210148 - DNA, 506 bp, Cannabis indica
tgggttggactccgcggcctagtagatgcgagtaggaagacgagggcacccacgcgcttcaagcaaagcatcaagccttttcttcttctctaggaatttagcaagagcctcttcaggcttgggatagaagtcaagcttaatactttggccatttgactgccaggccatgtagacgccgtcgtcaaaacgcttggagcattgcaggagacgggggtccggagctcatctcttttagccttcatggtatctgaagtccctcagctccttcagctccacggtcaagttggccttagattggaagtctgcctggtgcaactcctctagggacttcaccttggcagccatttcatccatggcttccctggcctcccgaagctcgcgtctggccatagccacggcctcgccctccgccttgagcgcctcctggtgcgtcacctccacttcgacctccctctgcttggcctcctctcgaagatttgccttcgcaagggcctccctccgttgag

SEQ ID NO: 210149 - DNA, 568 bp, Cannabis indica
ttgaattagagaaacacaattcatttacaaagaaacaaacagaagattagttcttcaatccagtgtataagactctactgtcgccctgacaaattagcaacagtagttctgttatgactaacttacttatttactaaatttttatgaccaaaaaccagtaggaaagtacgggccctgactactctgagacaagaataaagaaaaaaaagaatatatagaatttgtcatcccaaactatgacccttgtaaagttttgtccataaaccttttttgttgcaaaagttttccttgaattatgaaaacaattgcttattacactctgctaatttcattaaacaatttattgatatagcgtgacgttaatccaatgcacttcaagaatgcacacaaaataaatacataaatagcagtctagtgatgaataaagggaatatttctatgcattcttagagctaataaagggaatatttctatgcattcttagagctaatatttgtatgcataatatcaataaacaggctttttgggtagttaaagtgttaaatagaccttccaactatacttgtga

SEQ ID NO: 210150 - DNA, 1336 bp, Cannabis indica
gtgtgttctgtaaagttctatttttatttttattttttgattttatttaagtcatgtctaggtcaggagtcgaattcgggttcaagtcaaaagtcggtgtagtgccagggccgtagggaggggatttgggtccgggtctggtcgtaatccaaaagattgattaagaaaaaaaaactgtttaaaaaatataaaaagtgattattttttaaaattttgatttctaattataaaattgaaaagtaaaaacaattttatagaacatgtttttgaaaaatattttcacttttctacttttaaaaacagaaaactgattaaaaaagtgttaccaaacgccacctaagttaaataaattgtatgcttcgtaaatttattgcttgttataataggaagattaaaaaaattgactatttaagtattttttgtggtattttatagtttaattgagaaaatagattaatttttcggggaattatcttgtatactatcttttattatttttattttcaaatttacagtttgggttgctccagtagtttctatgtgtgttgctgtatagatttttattacaatttagattgttccgttagttgctatatgagttattacgtgaattttcataaaaatataaataaaaaaagattatttaaagtgtaaaaataaaaaaatctctaatttttattattatggattttaaaggattactcagggtgaaaattaactattaactattttttttttcttaactcttaactatttcctaatattttaataaaatctttcttgccttttctttttatgttatttaatcttaaacctaaaaattcctttccaaaatatttgtgaaatattcattgttgtaaacttcaataacatcaacacaaaagatttatgaactaagattcattaatgcctgaaacacatttatcaaaaatctcaattaacagttttcattccattttgtcatttaatcattgatattacattgtaaataatatttctctcccacaaactttaaccactactaaatcaaatccctttattttttttttattaattccaatatattttttaacaattattaaacaattaagtccaaactttaggaaataagaaaaaatacattttaaatgatgaaaaataccaaaatttaaaattaattaagctatttaaaaaataatatagtttttatttaaatataaaagagaacaaacttaaattcctttatttttttttctttttctttttagtaaaatctaactttgagtaatcatatattttttttttatttttagttgtagtaaagaaaaagttaatttaatttttagtttttttattt

SEQ ID NO: 210151 - DNA, 506 bp, Cannabis indica
ataaaaattaaaacataaaaaatcacaaaaatattaaaaaaaaaacatcaaaataataaaaaataatatgtaaataataaaaaatcaacaacaaaataataatacatcaaaaaaatatattttttctgtaataaaatcataaaaatcgtaaaattatttaaaagttcgtacaaccgtaattttagatatttagaaattatcccacgaaaaaaaatctaaaaaattgaagaaatttttacagaaaatataaaatgataattttttatagattatttatttgatatgaattttttaattatattttttagagctgcataagacaatagtaaaaatattaaataacctattgtgatgttgttagggatgtagtactcttcccatcttatccccgttaaaaatctaaatcctcattcttatttatttttcattaaggatggagtgagaaatcccctaatgggggcggggatgggcaagagaatccctaatgggagcgggaatgggtaggg

SEQ ID NO: 210152 - DNA, 506 bp, Cannabis indica
cttgttcagaatttttttgtgattgggtcgtttcctagagagttgaattataccaacattgtgcttatcccgaaaaagaaacatccagaatctatgactgaccttcgaccaatttcattatgtaatgtgctttataagattatttcgaaggttttggctaatagatttaaagaggtcttgccgtatgtaatatctgatcatcaaagtgcttttcttccgggtcgtcttatctctgataatatcatggtagcttttgaaatcatgcattatttgaagaggaaaagggctggtaaggaaggtttcatggccatcaagctggatatgagtaaggcatacgatcgtgtggaatggctgttcattgaaaggatgatgattcatatgggttttagtagtcattgggtgcaacttattatgttttgtgtgactacggtaacctataatgttactcatggtggacatttaatggggcctataatacctggaagaggtctgcgacaaggagatcc

SEQ ID NO: 210153 - DNA, 669 bp, Cannabis indica
tttttttttttctttttgtaattggacttttcgggttttgattggtttttcgttgagacctacatcttgttcaaatctgatttcactggtttttgaaagaaaatggtggagatttggttgtttggggtttctcggctgggtcacgaagaaggaggtctctcctccgttttttatgggttggccggtatttttgtaaatagaaacttttattttctatttatgtttattttccctttttaagttatagatgtaaattgtttacctttttagtttattatagaaaaaattcttaaaattaatatttatagttaaatttgtttagtaactattcataggtgatacttattaagaatggttccatatatataaatattatatgttagatatatttttatagaataaaatacacttatgtgttttttaatttagtcaatggaactctttttatgaaaattattttgttaatatattttaattgactaaaaaagtttaaataaataatatgcataaaatattactcattatttattaaaatgaattttaattaaattaattctccattttttttctattataattatacatttacaatttttttttttctgtaacaattacaagattaatataattttaacacacgtctaatcaactagtaataaaaataggact

SEQ ID NO: 210154 - DNA, 670 bp, Cannabis indica
caagcacaactcagagaaggtatagtttcatcaaaaagcctttaatggaaaatgaatatttttattttttattggttctagctattaacaatttcagaccaaattctcttctatggttttgatttttctaaggaatgaaatccatgttgctcttttctatttctcatttacagctctgcacgaaaaattgagggaagaagttcagtgccttaagatagcaaccaccgccaatacggaatcagagaatattgggtcggggccatagcagtccaaaacactctaaactcgacactcgacacactaagtgcggtgaccgttgtggccgaaacaagttgagagaaaatgaaacggtggtatgagatttagtgtaagctgcttatgagattatccacacccagttgttagttgttgtcatcatctgtatgtggagttgttaagtcatttcaggtcaggtttcctagactggtcccttgtttgatttgaagcaaatttgaatctgtaatgtatgaattggctttaactctctctactgttttagttctgaaatcctcttaaaacattctgaattggtgtgttcatcttgacaaatttgtttcaattataggatttgtttcatttagatagtttaaaatgtacttgtgttgcctttttataatgttgaagcattttt

SEQ ID NO: 210155 - DNA, 990 bp, Cannabis indica
caaattgctcactgtaaagtcaaggtccttggcttgaattttgattttttattcgaactgctatatatgggaaaaataccatagttgaaaggaatgttttgaggaaaaatctggcaagctttggccatttgaatctcccttggctcattttgtgagatttcaatgttatgttccatacagatgatagatcaggtgggcagttggtgtctggttctgtagttttagatgctcaaaattggctcgcattgggtcaagttaatcatctgatgtgttatgcaacaaattacgtacacatggtctaataaacatgatccaggagttcagattcattcaaaactcaataaggcctttaaaaagtagagttgggtggatcattttcccaacacataagcactttctcagtgggacacgtgctctgaccattgttaatatgttatcaaaaatttggatttgaggaagatgggtgtcaaaccattcatatttttcaattattggatggaccactcaaactataagtcttaagttctcttgaatttgaataaaaggatctctagaatggggctacataaaattttggcaaagctgaacagattaaagcacttcctagagaagtttaagaagatggaaattggagacattcctatgatgtacaactttgctatagagaggtacattgaagctcaatctcttcttgctacaaaccaaaaagactctacccttaaaactattgagattgactctaaggagaaatatcttactactaaacggaggtacgcgagttacatgcaacatattacaaaattcttgtggttgcattatgctgattaaaattcgagctatttcatgctagtgtcaagaaaagaaaagggcagaaaaggattacaaccttcattttgaatggtaaaatcattgatgattataatagtgttattgctcattatcttaatcacttcaagaacttcatgctcgcaaggagttcttcttctaaaa

SEQ ID NO: 210156 - DNA, 851 bp, Cannabis indica
ttttttttttaaaaaaaaaaatctttattagaaaacgttgaccccattcttagggaagctgcaaaacatgataaatggcgctaattaagactatctctaactaacaacaaaagaacacgagtcgatccgataggtacgagtatgacccaacaataaagaaagagtattgttattagacaccttaaggtgcttaatgttgagatttatgccataaaagtaagtaattaatggataataaattaaaaaatatattaaatataattataatataaatgatagattaattataagagataattattaaatatttgaaaatttcttattcatataaagaaggtataattttgtaaagatctactagagaattaagattatacgatatggataaaacaagtcagtagtatattaaagtattgagaatctttaatataaaaatgctaagtactgtttactatacaatatacttttagtgtgtgtgatttcgattcgaatcacatatgtagatgaacatgtagtaaatgtactgtgtataattagattatgcatgactgaaccaatatataataaacatctttcattaacttgtcgtttaccataaaaagagtttatcatattacaatgatgatcataattagtagatcatcctgagtatatgatgaactcctgtttgattgtgttcattgagttctttgattcactcgttaaattttctcaaagaatatgattcttacaacttctattttggtagcttaataacatgagtagttgggaacatgttatacaatagtggaatccatgctttcctattagatccaatattagttttctaatagtgttaattctgggagtgc

SEQ ID NO: 210157 - DNA, 549 bp, Cannabis indica
aggcgtttgacagagttgaatggcactttttgcaaagtatgttgacggctatgggctttcctttgactatggtggatctgatcatccgttgtattagcagtgtcacatactccttttcagttaatggtaaggttcaaggacatgtttctccaaccagaggtatccgtcaaggcgaccctctttcgccataccttttcattatctgtgctgaaggtctttttagacttttgcaacaagaggaaatcagaggtaatctgcatggtcttcaaatctctcgaggggcaccagctgtttctcatctattttttgcagatgatagccttgtgctatgtcgagctaatcatcaatcagcaacagccatcaaaaactcactggactattattgcagagcctcgggtcagcgacttaattctgaaaaatcagtgttatcattctctccgaatgctctcccttcagttcaaacacgagttcaacaaatcttgcaaatgccgataaaagaatgtcacgaaaggtacctaggccttccttcctattcgggcagagataaga

SEQ ID NO: 210158 - DNA, 975 bp, Cannabis indica
atattttttggaatattttattacctataaaaggaaaggtcatctagttatttttgacattcagaaaagtactcataagatgagagcatctctctctagttttctctctagaaacttgtaatcaatccagtgagaataaaaactcgaagtagacgtagctctattataattgcgacactgagagtgaactactataaattcttgtgtgtgctcaatattttacttagttacttctaactttcatcttgtctatacatacgagcgagttggccaaatttctacatcaatattttggtgctttcattgagagccacaactcaagaagacacttacaagatggttgcaactcgatccacaagtgtggaaagaagcacaactgttgaccaacagactaggggcatgccagtcactggaactacacctacatctcagatgctaggtggaggcctcgaaaccaactccatagctcatgctagtttttatggtccttatcagagttataaaagtggaagtagaattttgataaaataatttttatctaatatgaaccataagccaaaggatctcaacataatatatatagattaaatctaactgctgaaagaaaataaattacctcttgaagcctatcagggtatccttctttcttttcgtataacaatcgaacatccaatccaagaactttattgaagaatctacaccttgatcttccaagccagcctcaacactcaagaatagagtaggctattagatcttattggatgaacaaatttaggtattacagtgtgtactcaacttatgagacactgtaatgagaatagaataatctcacacacaccttgaatgaatgtggggtgtgtgtgtgtgtgggtgagagagagagagagagatagtaacacgtgagagagacagagagaagtagggttaaaaaatccaattttattttctctactttcaatttgttatctgtctcta

SEQ ID NO: 210159 - DNA, 571 bp, Cannabis indica
atatttttttaatataaaatattcatatacctatacaacaagtacttaaatttttttttatttatttttttaattttcactaaaaaatcactcttaaaaccttataaaaccaatacggctaatcattttttaaaaactatttattctcatgactagaaaatactttgaattttctaaacttcacctttaagtattatgttcttactttacatcctcatctcattcctcatatttttggaagtctatttttattaatgtagactttttatttttctttttttttaacagattgagatcacactcacaataaaacacaagaagccaataaatttaaaaagtaataaggtaattaattgatttttcttatatatttatctatttattctcatatgcttttataaaagtattttagtttcttttattttgtattttgtacctgcaacatagatttatgcgttataaatacatttagtaatttagggtatatatttaggggttattaatttgtgagtgtatattttttaccatttaaacttttattgtttacttttattcatgtcaagtttttagc

SEQ ID NO: 210160 - DNA, 787 bp, Cannabis indica
aaaaagtaccagtctctttctcctccaccatgtgaccatgacttctccaccaccatgactgccatcttctctgatgaagctaccactgccttctctgactccacaaccaatacctccagctcgttccagctctctccattgtttcgatctctaagctccaccatgagaccaccaccacgacctctatctccgtgaccaccacgtctgccatcacaaccaccattgaaacgaagtcctttggaaaaatttgtaacagttgagtcatctgagtcattctatagaacaagtatgttagaatgcgttctttgtttattttttgatattttgttaggggataattaagagttgtattaatgtaattttggtgaataataattcttattatttattgaagaataatttgcggcataaatacctaagttttactctgagtagcatataagtccctaagtcgtatttttggcggtaaaaataccttccgtcattagtgtggaacttccgtaggtacctctctgttttctttcttgtaatgtgccagatggcattatcattaaaaataaatgttacaccattccaatcattaacaataaatcattgtatatctcaaatagatgtatatgtggcaatatttaattggcccatattatttaatttctaaaaaaacattttaaataaaaattccattaaaaattatttaaaattaaaagaaaaatacaaaataataataaaatttaaaacttaaaataaacacactttttctctattctatctcgtcttcttcctcatt

SEQ ID NO: 210161 - DNA, 882 bp, Cannabis indica
cttgggaaaaggtattttttctaagttggggaatattttgatttttttgtttttggactcaaaaccaaatgtgggagtaagtagtaggagagtctttatgagtttaattgagtgtcaaaatgtgaaagaggaataaattgacactcttttgaaaatgaagaaaggagtaatcttgatgtgtagaggacaagttattaagagagtaactaaatattattagagcttaggatgatgatgaggaggagataagaagtggttgaaacggataacctaataaggttttatagtgtaactattttccaaggtttattattgctttgctatttctcaagttataatgtagtgtgtttatatatatttctcaagttgtcaatttcatatcatatttatactttatagatactacatattgctaagcgacattattagttatgattagacttatctttaattatcataattaataagaacacgtatatatgcataccaaaagtaaggtgaaccaacatgtcaatccacgtggatgcaccactattcactaatttcgtcggcatatttgtacccgcgtgggtcgacccgatacacttttttttttgttcgtttaaactatgtatataatattatattttatataatagagcattgagcattactaactattagccttttgtgttgagtttgtaataagcggtataaatttaatgtatttttttagtaagtataattaaatactcatattaattactttaaataaatttaaatttagaatttatactgaataaaactaagacaattaataaattttcttcatttacaaattctaaaactttaccttactccaaaatagtcattttctatttttaagtttattttttaacttaa

SEQ ID NO: 210162 - DNA, 529 bp, Cannabis indica
actcgtgagattcgagactaatcaagctagtgcctgcagatggtatatatgaacatatatttatatatcgtttttaataattaatagtaatgtttatttattactctcttcgtgagaaaaaaataataataatgataaaagtagttgcccaatactaatgatcagaatcttgattagcatttgtttataataattattaaaaagtcaaaaacatttcagtttttctaagatttgatggtaaaaggttgatcctccacttcattttaatttgttttccataattgttttatcattgcaaaacgtgccttaactatataggttttcacaatttttttgagaaatttccactattattataaatcaaaggtggtttacaataatagagaaaataagatgtggtgtttctctcatctaataaacatcttcatccaactctagagagtactttgctaagccgtgggcagcttgattagcatgcctacgaacatgagtgacagtaattctaaggaaaaatgataaaagacaacaa

SEQ ID NO: 210163 - DNA, 508 bp, Cannabis indica
actcccatacctgggaatggccgacgagggtttatagggcatggttgatcttcaccatacactctctaagggtatggcaaaccagcccctatctcttcagaatctgtagcctccccaaggaggattagtcaatcaagtccccacaacaacagatccttctgtgcaagcacagttggaccaactcagggacatgatccagggcatagctggcccaaagccttcaaacctcgagcttgatcagtcgaggggatgaccattcttggcaaatataaatgccctcctacctctactaaagttcaaaatatcggtataaaagatgtatatctgatgggaggacccgctagctcacattaaataattcaagatgtagctcgacttccagaaggtcactggtgatgtgcgctgttgcatattcccagccacactatcgaagacggcccaacagttagtctttaaactcacacagggagattcaaattgtggcctgagttctcgcgagaattctaca

SEQ ID NO: 210164 - DNA, 663 bp, Cannabis indica
gtggaatgatagttgagagggttaagtacaagtggaatgatagttgagagggtttagtcacaaaaaaactgagatattagcggctaaactacctcaactatataattagtgacacttaatcacataaattgatttttggtggtaaaaccctccaaacatcacttgtgttaattatttatcccttctgtttaaaatgctctgttaggtgtcactgtgaatattcaagattacattgaaatatagttttagttagggcacaaaatctaacaaactctcatttgcactaatataaaacaatcagtacatttcaattaatcctaaattctctttgtgctttttaaatgcagtctcggtcaaagtcttggtgaatgggttggctaggttgtcttcagtatcaaccttttataccagaacgtctcctcttgccacatattctctgatgatgtggcacttcctctcaatgtgtgtactcctcttgtggctttgaggctctttagtgatggttatagcaccagtgttgtcacaaagtaacacttatgggtttccatccctaaaacaacaccaagttttgtgaagaactttcttagccagactgtttacttagcaaccttagcggcagctatgtattcgaccgccgtaatagagtcagatattgcggattgc

SEQ ID NO: 210165 - DNA, 1630 bp, Cannabis indica
ccctggcttgacggaccttgggtgagcaacaatcggtccctcctaatcacgttgataaggatggcgcttacgacccaaccatatacataccaatcgtggaattggaaaactgcaatcttaggcatcgattggaggaagtaaactggcgtaatgccgagttggagcatgaaatagctgcagtaaaggaaacgcgggaagatggtacccaaaataaacctgaccttgggaaaagagattcacaaggcaaacctcacggctcgcaggccaaggggcagaggataacccagggatatactttgaaccctcaggaaatgtaagctgagggaactgagaaaaacttggagacacagcctgagatatgtggagaacatctgaagctaaagaagcttgacctccgccaacgactcagttcaaggcaatagtattcattccatttgcgaatgagtgagtcagagaataagtttagagggcatcaagtcccggaacccaggagacatccggggcacgatactgttggagaacctgattcggaggcctcaggatcaaagaaaaaagaggattccaaaaggctgctcaaggataagaagtccaacaggtatatccctctttatggcgaatataccgagctcaatgaaactcagaaaaagttctacctcgcacatgtacaagaaactggttttggcgagccaagagcctatgaaacatgcgaggcgcaagagggatccaaataagcggtgcgaatatcatggtaatattggtcataccacggaagagtgtcgtcggtggaaagatgagatagaaggtctcatatcacaaggacaccttcaatgatatataaaggggtaggaagatgcctatgatcagtttgatctgccagtaactcgagctacttaagattataaccctcttctgcgagaagaagatacattttggttatctcaagagggagggggtcacaagaatacaaagggcagttactccggtaaagcaattatgtaaaagaattgcgacgtgagttgatatcggcccactttggttgccatatcaagctaccacgtggaaagctgatcgtccaccagtagtaatcgaagacaaacaactaaaaccaggattattttactcgtgtcataaggctaaattctcgcactcaaattttccctgcgatggcctagattcaccccaatctagtcagccaacccaacaacatgttagtctgcacacacactcacagtttcactcttacccagcgtcactcaacaacacactcttgctatcaagtaaatggatacacaagtataagaacacacagtatacaggaaacccttttcccaaccttgttattcacacaatatcaaggattacacaatgttcacgctggacatcacacactctgatgactctagcgcccatagcctactatataacacaataataggttgcggttgacatccccaactgcctaggccatgctggactgaccagcacattacacatcagcatagcatatgcaaaataactaacacccccgtgtcagccatccaagccctcgcctagattccatgcatctgtcctccaacaaattacttaagccaatgtgcgtgtcttttgatagacataggtaacttctgat

SEQ ID NO: 210166 - DNA, 776 bp, Cannabis indica
taatgcaaacattacatatacaagggaccttccctgaaaatttctgttctgacaactataacttatacatttgaagcctttagcataagtgagaaggtttttcactatttttttttttgaaaaaagagaaagaggccaaagtctaagcttgacccccctcggcatatatagaaagcctcacttgtggcggaggaataccatgattacaagtgttctatcacagacatataaaacatttaaaacaaattatgtactgttgcaaacaattgtacatttttaagcctttgtaaatctggatctttgaatatagatcgtctaacagaaccagcagcaaacacacatagtagcaaacatagtacacagatttttctacactagactacttagatgggttaacttaagtacatttgcaatctgcttatacaggtctgggtcaaaattgtcaagttgaaatcctgaagccacatccttttgcaaagcgataaaatttattcaaagtacacactgatatggacaaaagcaagagaattgggaggttccctcaaaaccaaacaaaagtaaaacttcataaaaccagactataatataccattttgacaaacagggagctagtaaatatccttactttcatcagtcaatgtacacatagacattatttatgttgaggattattggtacatgaaagaagtaaaaataggagcagagataggattcctgtgaatggtcattaatgatttctaacaacaatgaaacatgctatttatttatttatttat

SEQ ID NO: 210167 - DNA, 675 bp, Cannabis indica
tgtaggactaaagctcaaagaatgaatggctagagatattttgattctttgttcataatccatgtatgtttgattaattttgcacttcatacatgatcatatatgcttcatgtttacatacaattattctaacagttaattgtttgaataacaaattgaagggagaagtgggcatcacttttgcttctaccgtatgagcgtttctaattttcatacttcaagaaattatatttgtaggaaaattataactaatggttcaaaatcaaatcaactaaattttaaataatcaacgattagcaatggcaagattttcaaacacaagtagtaatcagaggaaaaataggattgaacagagtatgaataaccagaaataattaaagtagtaaaacaaagaaatcaataccaagatatatactagttcaagtccgatagattaatgtgatctatggctctactctagttttagaacaccaccaaatcctctttattgattaagcaataacaggtacaatacagtcgagattgattccccgatgagttctctcaaagtgtttcaactctcacactcttacccaagaatcttcttcatctacagaagattcttcatacaaaacccaaaccctatctagctctcttttctctataactctacctctcaatcttctctctctctct

SEQ ID NO: 210168 - DNA, 386 bp, Cannabis indica
acaaaataataaaaatataaaaacttcacacgcatttttttttaggtatattttttaaaattattttttgaattatttttttaaaaaaaaaatctaataagggattggtggaatattttttgaattattctgaggaaagctgtgcagagaatttgagatgaaaggaaaaagtaaaaaagcgtgagtggcacgcgttgaaggtcaaatggagacaacaaatgaagttatttctttttttgcagaagagcgtgcccagaatctaatctacacaaagaatcttctcgttccttctttatcttacttgtctgacgtggcccttctcaataatacgattattgaaatgaaacattaatgaattgtatttatttatgggtgattttaccatg

SEQ ID NO: 210169 - DNA, 684 bp, Cannabis indica
cctcacatcaagcaacttctcagtttattcctactactactactgccactactcgaggttaactaatttaatccacttctacataatataaatatattatatgtgtactgattactgatgggttttgtttggttttgtgaaaataataaagaatcaacgagcagaaggaagaagaagaagaatactacaaccgaaaattacaggagcagatacttggtggaatcaattgcagaagaccaaacagggcaagagttagatgatgagaagcagaagataagtaagaaaagggatagagttgaagtagttcttgagagagctcatgcttgtctcagaaagattaaaaacttcaaagcatccttattatcatgactctatcaaagcgtgtagcatgagcatgacatcaccatccattatccagtatacttcaatatcaatcagtaaattgttctatggtcaatgtctttacaaagaaaaatatatgttacacacaattaacattgcaaatggatggcataccttcaatttctgtcaatatataaattacaaagactttacaaatggaagaaatattgccttcaatttcaataaagtacagcagtattttggacagatatcattactctaaaagcagttccaaagcatttacttaaaaaactccaagaaagattaatacataagttatac

SEQ ID NO: 210170 - DNA, 504 bp, Cannabis indica
ctccactcacaacaggtactctactctcgattttgaggatgctaatgaggatcaaatacaaagagacgatgtgaactttgtcttaagtgattttctctcttttgtatagacttctacattggcattctacacggatatgatttagctattatgattttctctcttttgataatagttaggtctgtcataattagtttattatgtttagttctaagatttaaaatttgtgtatactattatttaatatgttataattcgaatgctttaataatcataggagatttttttggggatcgttcctagatttggttctcaatctttttccagggccagggccagggccaaagaaactttcataattttctgagtactgttcaataaaaaaagttctgtttttttttttccttcatgtgaagcccatttgtatggtatttgttcctgcatatattttgtttcagtactgtgttttaagtttgggataatattttggtgttaatgaagtgt

SEQ ID NO: 210171 - DNA, 859 bp, Cannabis indica
gattttaaatacgggcgttacatccaatagcttagaatgcatctcatgaccgaaccctttaatgaagcccatgagttagaattttgccattattttgtttccttaattaaaaaaacttgtcttcctttagtaatgctattattctgctatagttatttaaagagtaatttgcggcataaatacttaagttttatgtcgtgtagcagataagtacctaagtttcatttttggcagtaaaaatacctcccgttacactcttggaacttccgtaggtacctctccgttaactgccaaatcagtacctacgtagcagcccttgataggtccatgtcatttaatttttttttttctaacaatttttaaaaattaaaaaaatatttaaaaattcaaaaaaaaaataattaaaaataaacatatatttccttttctcttctacaatctctatctttcctctcgacttcatctccttcaatctccatctcattcttccattaataacaatatcataatacaagaattcaaaatcatttaacagatcaaatcctcatcttaccaacctgttttctttttttttttctctctcttttcttttacactctctcttgaacagccaacaaaaacccaaaaaataagtataaacagtgaacacaaccataaaacaaattcagaaaattggaatgagcctaaaaaaaaatctatgcacaaatttgaaaaatattttgccactaaacctcatcacaccatattatattttggcactaaaattacactatcacatccttatcttcttctccatctttttttttgaacaatatctcattctccatcttcaatttacttagaaccctaaaaataaaaa

SEQ ID NO: 210172 - DNA, 723 bp, Cannabis indica
gaatcttaagatcttataaaaaagggtttatgttcgaattgggtgttaaaattagatctccctgaatcacttgttttacagttttacagaaaagataaaatacaaataaaaggctcgtgactttactcattcaccagacacaacgacacaacaactaaacctaactgaatttctattttgtaacagaaattatgttacttctctaccactgaaacttaacctgtaaaagggggggcagatttttaccaatctcttagtcgagagaaccagaagtgtgaagacccagattatgagagaggagctctcgtgttgaatgtttcagtgtgtacatgcaaagaaaagaaagagagagttagtgagaatcaaagaaaaatacacagaaaagagagaagagagaagagagaaagaactgatataccagtcgatttgtgactcgaatttctcacctgatgtaatattctccatttatagtgcagatctgagatcgttcttcaaggcgagctcaaaagaggacgtacccctggatttagggcgaacctctataaaccttgtgtttgtttttcttacttctctttactgtttaatgtgtgatcttttgtgtgtatgtgtttgggataaatttctggggaaggttattggaaagatcgatctggtttgatcgagaaggggatctaggttctagggttccttcgaagagaagcagagggagagagagagagagag

SEQ ID NO: 210173 - DNA, 527 bp, Cannabis indica
tttttcatattaagaaaagtagccataaggtcggagcatctctctctagtttccctctctagaaattagaacttaaacacttagccatttttctataattctatctcgtgagaataaaaactcgaagtagacgtagctttattactgacgcaatacagggagtaaactattataaattgttgtgtctctctatctatacttacaaatattttatttttgccaatttagtgagcgggtatggtttgaaaatctctgttcaaattttcgagtcaacagtgagtcaaggtgaggcggtggcccaatacacgttaatagtacgttgcaatttaacaacaatacctaatagaattgtggataccaaaacagatgtgcggtttggagagttttacccccaaaaaattagtttattcggttaagtgttattaaatgtatagttcagtattggtgacaatatcccattaatagttttttatgtaatattaattccaaggtataaaacatgctccagttcaaaatgaaaaaaaaaa

SEQ ID NO: 210174 - DNA, 747 bp, Cannabis indica
ccataatataatcctatgttttggtatattatagctattccaaacttccctgaaccatttgaccttttcctgttcatcattcatgtgagaataaacaagatggatactatatttacctgttacagccgactgtaggtgagggagagttttatgtgtttctttgattcttacaatttgtctccaataccaactgccttctatggttgaattatagtcccaccaatttgttacactgcatgtacccacttcacccataagttgtcttgtttggtggcaatggcccaaacatattttcccaaggctgcttcattccatttgatagtattcctcagacccaaaccccctgctgcttttgatttgcacaatcggtcccatgatacttgcccaagaccattaatcagccatgcctttccacaaaaaagctctacaaatgacatttattttttttcaacactgctttaggaagaaccacgatttgtgcccaataggaatgaattgttattaatacagagttaattagagtgattctacttgcaaaggataaatttcgagttccccatgttcggattcgttgtaccatcttctcaattatagtgccacattccactgctgttaatcttcttgcacagattggaatccccagatatttgaatggtagaatactccgagcaaaccccgatgcatctattactctttgaacttcatcttctttcatcccacaacggtacaatgcagatttcagttcat

SEQ ID NO: 210175 - DNA, 772 bp, Cannabis indica
ttttttttttaattttattgaaacgctgatcagcttctctccttctctctttcctcagttgcgaaggttcgtagtcgacgggttcgtggtttttcatggtggacaaaacttcgtggtcactatttgtggtcgttgatgatgactcacgattgtcgaaggtggtttgccgctattcgtggttgtcgaaggtggttcgtggcttttgttgtactggttatttgtgatttaaatctgtactgattgtatattttacataaaatattggtaaggaaaaaatttgtctctgtagtggttcgttgcttgtcagttttagtatgattttttttacctttaatcccgattattataggaaaagcaggataaaaatggtctttaaaagaaaatcgggattaaaatggtcttttatccagtttttctataataatcgagattaaaagtgattttttatcttagtttttataagagtctttatcccactgacatatatctcagttttcattttagcagaaaccggtataatatacccctaaaaatcaagataaaaagcctatattagtagtgtcatgtgtatattcggctctaagagttagatttcagcccaagtctttattttaagcctatctcatctaaacataaccctaagtgaatgtctatataaagaaagagaagagaattgaaaaacctaatgtctcatctttctcttctctttaattttcgaaattcattatgctttattctcaacctctaaattgttccaaatgtgatttgagta

SEQ ID NO: 210176 - DNA, 508 bp, Cannabis indica
ttcaaagtattgcttagtaaagataatcgacttttagaaggatgtcctagccttaaatgccatatgtcagcaggaaccgtgcacacatatgcatcttcaggtgtagggtccaacatgtagagaccattctttactctacccttgccaatcattctcttggtgagattttcctaaatataaaagccatcagtattgaaaaaaaaaggaagagaaactgtcatgaatgaggcagcttacagataaaatgttaaacttgaattttgggacatataagacatctttaagaataagagaatcattaatcttaacattgccactatgactaacaacaaggatatcattatttggtaatatcaaattagtagaactcacagggcaaatgaattgaaacaactttgcattattgcaaatgtgtcttgtggcacccgaatccactatccaagattgttgacaaactgaaatgttgttgcaagttagaattatacctgagttacctgtagaggaactc

SEQ ID NO: 210177 - DNA, 1058 bp, Cannabis indica
tggtcattgacctctcagaagaacaaacagtcgtggaccctcttgcctcaaaagtgactaagtccaaagattctcgaggaggtagttcggacaggcctgaacatgcgaagggttgatccaagctgattagaagcggctctgaataggctaaggcccctgccccacctctagtattgtaccaggagactaaaagaggcagagttatgctcacttactttatgtgtcggtcggtccctgaggtgaacgagcagctagctggggcggacaacctccaatctctgaagttggttactggaggagtcttgaaagagctttcgagggtaagtctttcttgacattttccttttgttcttttgtaactagttcagattttaatgtcttctgtgcgcacagactggtctaaagatggtctatgcatattcccaagctaagtcggctgctgctaagaaccttgccatttccaacacaatgcgaatggaagtggacttggccaagaaggatgccgaggaggcccgggttcaacttgggattgtgcggatagagttgggagagatcaacaagaagctccttactgttgagaccaaagtggccgaactaacgaaggatctgcaggacatgccatccaccgagcagctcaaggttgatattgcttctttatctcaggaagtgatcagtctccgagaagaaagagagggcctccagagccttcttcgtaggctagaggatgaaaagaaagacaaggaggaggagcttggggccgaggttgagaaacagaagtaagaggttgagaaacagaagtctgaagtggcaaggctcgggggaaaggtgaatgccctagagacagctggtctcgagattttttatgacttctggaaggccaatcccaaggtgaactttgattatctgggcgactccaaagacatgtttctcgactactgtgctgctcaggaagcctatggggcagtgcctactgatcaaagtgttgcagtgccttctgctcagactaatgatcccccagccccttctaaccaagttgactcacacaaggagcttgggac

SEQ ID NO: 210178 - DNA, 663 bp, Cannabis indica
aacattgaattgaagttaagtgcttgggaaattgtttaaagaagctttgattcttggtgcttggttgtgcaaggaagtgaggtagtgttcctactgttttaatttttgaatccttgctcaaattgaaaatgaaattatgattttaaagcttttgatgttcttggtatgcatgagttggatattagtataatcttggtagttcatgcttgtttgagtaggaatttgtgtaggaagtttctcttgtatctattgatgtaatttgtgggctgattttatgtttttagttgggttataattgtgattttggcttttgttagttgctggaaaataatgggggttttatgagttgaagctcaagttcttgagcttgagttcttgttggtttaaagcttgattttgagtttattgtgcaatatgaaattgggggtttaagttgaaatttaatgcatgatttatgtattttagctctctaatgtttgctagtagctctatttgtaatttgagattttgattaagttttgggggtgttttggttgagtttggaagctgattttcgtgtaaagacttgctggtttttgggtttgaaacccaagtgctgcgacatggtctttagcatgcctcggcccaacccttttgtggaacctgggaatcggtcccaggtgc

SEQ ID NO: 210179 - DNA, 579 bp, Cannabis indica
aaagtttaataatcacaaaaacaactcttaaagaacttttgtttttatatcttcaatattatcaataagattttttctttatacaattactagggaattattttgcgctttgcgcggttcgatcctagttttataattttgttatagtttttccaatgcatcttaattttttcaacctcttcagtataaaacaaaattaaaccaaactaaaatttaattgttggtagaatataaaggtaaaaactactttagtgttagagcttagaaatctgaattaattaattaagattaccctcaattcacactcttgttaacaaataattgcaggtgtgactttcatcacaatatataatatataatatattatcaagctaacaaaactacctgtagatgtaataagtagtacaaaatttcctcgaaacccttacaaactatctctcaatcaataaacaaacccaactagtttattaggtttaagctgaagtttacaaatagctattgttcattaattctttagagttcgtaaatttttcttttatatcgattatctctttagagtttataatgtcaatcacaaca

SEQ ID NO: 210180 - DNA, 654 bp, Cannabis indica
agtttataatgtcaatcacaacaatacaaaacaaagacaaagtatctatgcaatatctattttaaagacttcaaacgaaataaaaataaagttgtcaatgtatattcaaagacataccttatgactgctgctgctgataacgaacaccagcacaaggagggagacacgctaactcagagcttataactgccacaacaccaaggacaggtttggagaactaagaaggaagggtcttaggttcttacaaaaaaataattaccccactatagaaccttggtcactgaaaaaactaaaaatttgggaatataaaaacgacaggcacaggataacaaaattatgaaaaataaaatgacaaaatacagattatgaaaaaagaaatcttctgataacttggacaaaaatcagcaaaggaataagattgaaatattagtgatacaaagcttgctatagaaataaatatgatacaaatgaactaatgcattaaaataaagattgaagtttaaaatataagcagaaaacaagatttttctactattattttcttcatggaatagaagaacaataactgaaagtgttttgaaaaaaaaaaatgaaagggtatccacttgattccatcataaaacataatattcctagataattatatgcttaagc

SEQ ID NO: 210181 - DNA, 551 bp, Cannabis indica
cctcttcttgaatcacattcatccacaaccattgcagtcacactcctcccattaccatgtatggttatgttctgcaaacacctctgcctgttgttgaaccatcctgtggataacgccaccactggagtttcgtctgagtgaaactttttgtcacactcagagggtcctccgccatctccaccctttccgaaactgttgattgtcaaaactgctttagtgtgactatacaccgggggtgagcactcgtaagtggtatacaatttgcctcttttacaacactctgattgattctccgggttgcattgtcctggaggaggttttttccctcttattttgccactgggattgcagcttttagcttcgtttatgctcaataagttgggtgtgataaggattaggagaaaacagagaactgatgaaaaagaatagctcttcatcttttcaatgagttctttttcttgtactaattgatttaggggttggctatacatatatagatatagagacacattggctttactgtctttccttggttattttttcttaaaatt

SEQ ID NO: 210182 - DNA, 651 bp, Cannabis indica
tttactctcatgacaatactgctgatcttggttagatgtatcacatttttaccgagcttagtcttcatctgggtgttaatcttatgggattagtctttctctctatggtttttattatattcttactttgatgtacataacaagaaaacaaaaattacacaccatacagaaaaagtaacatcacttcagcataccaagattatatcgaaaatattatcaatttttatgtgcccaagtatgattacactggctatgggcaatctactagaaatttatgtttgatgtttgatgtgtgggcacgtataataatgtttattttcttaaacaaaaatggtataaaagtcaaagaagaaaggctaggtagtttgacttcagataaagagatcattgagcttagcattgtttctcttgtaaaattattccatgttgttcattaaagttaaatctctctgtgctctctctctctatcatgattgatcaaacttatttttttttggtattcttgaaaggtcaaaattatttatcttatacatgtaatgatttttactatgtgtaatatagttatatgtcgagttatatgcctgctactcctattctttataattttattatcaccggttcaagttctgtatccaaagtaagtgtggtaaa

SEQ ID NO: 210183 - DNA, 928 bp, Cannabis indica
taacgtaggaatcaaagcatgtttaaagaaacaaatagtgttcatgcattcatggaaaaatcaaccaaatcaagcgaaatagcgggtatgaaaagcttacccactacgagaaaccattgaggaagaatgtgggaagctcagatcgtcaaaacggcacgaaaatcccaagaaaatgatgcttggtgggtttggccctctagagagaaggaggagcttcttctaatgtgaatatttagtgagagaaagtaagatgtgaaaaatgaaaagtgcaaaaaggcatttccctaaaaaaaaagtacttatatagtacatgttggaccctttcttcacttacttcacctacacatcaaaaagacagctaaagtatttatttttctacagctaatgagatcaaacagtcaaggtaaagggcatcaaaaggctaaacatgcaacaacttttatttcagcaaaggttacaacagtcctgaccgcaccaacatggttggtaagtccctatctgtacaaacgtccccgcacagggacttgggggcaaatattatcccaatttttttccttatgacatggttgtgcttatgtggaaaaaaccattactacgtggcagtacaactcaccaataagaaggccaagtcaacacctaagcaaacagagactctaacactcaaacgggcatcaagtgacaaaccaactccctcactggagctgcctaaccctgtggccagctagcctttagagtgcaccatggtcggccaacctgcttcccacaggggtctggccggccaagaggagctctacagggtttcctatgcacttctacgacgtggacaacaccatttgagttgtgaattaggccctaaaagcccaatagaatagttgaataatatctaagttcaattgcattttgttcttttctaattaattaattaaat

SEQ ID NO: 210184 - DNA, 851 bp, Cannabis indica
tttttttaatactaattataatactacatactccaattggttttagataattagattttgggttatagtcagctcaaaatttaacagggccccaatacatgtaaatatatatatatatatatataaatagttaattgtggtggcgtttagtaatacttttttaatcagttttctgtttttaaaaatagaaaagtgaaaatatttttaaaaaacatgttctataaaactgtttttacttttcaattttataattagaaatacaaaatttttttaaaaaaaaaaaatcactttcaatattttcttaaacagttttttttcgtaatcaattttttggattatgaccagacccggaccaaatctcctcctcacagccctagcgctgaactcggcttctgatccgaacccgaatctgacctcggacctagacccgatttaaataaaatcaaaaaaataaaaataaaaatgaagtttacataacacacttttattttctgtttttaaaattgaaaaacaaaagttattacagaacccatttttgtttttcaaaaataaattttttaaaaacaaaaattaaacttttattttataattaaaaaataaaaaaaaaatattaccaaacagtacctttattttttaataatttttcaaatgtacttctaaaaaaaagaaattgaaaaaaagaaaaaaattgggaagtcatagcaccttccgattccatgtttcgttattgtgagtcatcacaattcgagttatcaaaaagtcaaatatgtacataaatagtatggccaaataagtcattaaatgaatacttcaaaatatattgaaactagtcttacaaattattttttttc

SEQ ID NO: 210185 - DNA, 603 bp, Cannabis indica
cactcactctttagattgacaaagctgaatactatttaatgtgtttcaatagagagtactagatgaagaaatagagatgtaacaaaattatatagtgatcatatatatagttttctataagttcgaaaatttagtcacaatttaagtttgatttttttagaagtaaaatatcttaaattaaatattattgcttaataaaaaaataatatttatatgtagtttatatttacatgtgatttaaaatttaaaatataacataatttaaagaaaacaattaattattaggttgaatttatttaaaatatattaaaactagatagttacgtgtaaaaaaaaaggttagattcttatacatataatatataatagttttagtatttttaaaaaaaaatctaaagcattaattaaggaaaaaaaatctttttcaaattaaaaaaaaggaacagaataaaaaagagggaaagtaacccgcctaaatcaatttcaccaaagctattgagaattgaatagtgaaccgtctctcctctctctcctaaactggctcctctcattgtaaatggtattttgaaattttgattttggttttctttttcatcatttttc

SEQ ID NO: 210186 - DNA, 204 bp, Cannabis indica
attgtaaattatttaatttttttaaaaaaaatttataagattttaaatataacaattataaaaataaataattagaatgtgatgtagagtggttctatagacttactgaatatccatgatgaactccctaatttgccctggatggaaacatattgacttttacttaagctagtgctaggaatgtatatatgaacatggaattta

SEQ ID NO: 210187 - DNA, 545 bp, Cannabis indica
tattatacaagtaggtgaatattgctgtttaattgtattattatcttgatttggatatctgattgttatatactttcattgtttactttttttgttgagtctttgtgactcatgggtgctttgcggtgtaggtaaaggcaaagggaaactagggcagccatgcaacgacaatcttctcgaacaaatgtacatatcgacttattcgacttgtatggtcaagttgtcaagagtttttttcgattgtacctgatgtgtattttgcttactgatgtatatagcctttttttttaaagaggtgcattgccctcagctggagcttcaggtcgtacatatcgctgaagagcaacatgtttttgtctgatgagaaattctatcttgtcccacaactgattacacttatttgtgttgtaatgccctacttgcttaggcatgctacaatacttttctacttactgtgcacacctttactaatcaaagagtttctcaaaaattgtgtcaacttaaatttttgattaaacccatgatcttgcatgtaaagtttacta

SEQ ID NO: 210188 - DNA, 850 bp, Cannabis indica
tctgctttgctgatgatctaattattttctgtaaagggaatttaaaatcagttgagttagttaatgttgcttttctagagttctgtcaagccacaggtcttgcttccaacaagaagaaatcccatgcttactttgggggagttaaagaggaggtaaagagcaagatcttggagctgattcaaatggaggaggggactttcccgcttaagtatttgggggtagtcctcaggccgactaagtggaaggcttcagattgtggagtgattttggataagcttagtttgaagctaagcggatgggcgagtagaaatctttcctttgcaggtcgagctcaacttattcactcggttctacttagaattcgaaacttttggatgagcctcttcattctccccaaaaaaagttgttgatgctcttgacaagaagtgtcgtgacttcctttggggaatgaacggcaatagaagcaagctccacatcccctcttaggagaaagtttgtcttcccaaacaattcggtggcattagttttagagaaggtaagaagtggaattcggccatgattgctaaacatgtttgggcgatttcgagcaagcaagacaacctctgggttaagtggatcaattccatttacttaaaggatgaggatttttggtctatttcagcgaatcatgacttcagttggtattttaaaaagatattgaagataaggaagatgaccaacaatgtcatgttaaaccaggcggctaaggggagtaaattcaaagtgagtaagttctatgttgatcttattggggttgctaagtcttcttatgctacttctatttggcgtaagttcattgttcctaaacata

SEQ ID NO: 210189 - DNA, 956 bp, Cannabis indica
aaaggtccattggaaaaattgggctgacatctctgtctccaagttccttgggggtttgggttttcgtatcttgtcttctcataaccaagctcttctggcgaagcaagcttggagagtgtggaatgataaggattctcttcttcattctattcttaaagctcggtactttaaacattctgattttatgaatgctcctgttggccataattcttctttcacctggagaagtctcctttggtgccgtcacttacttaagaagggtctggtttggaagattggtgctggtattaatgtccctttatcagcaccaaattggattcctagtattcatagtcccactctcttacatcctattgacccgtcccaggcttttgtttccttttttatcaaccatgattccacttggaatgtacctaaacttaaacatttctttccctcttatcaagttgaaagtattctccaaattcccctggatccaactttgtccgactctctcatttggggatttcacccttccggcattatcactgtcaaatctgcttatcatcttgcctcttcccttgcatcaatggatgctccttcttcttccagccccaacccttttcaacattggtggaaaaagctttggtctctttctgttccccccaaaattaaacatttcacttggaaagcctttcaccatattttaccttgtgccttaaatttatttcagaaaaagattcttccccatccgaactgctctttttgtggcaacaataccgagtctgtcactcatgccctcatcggttgccccagagcaaagaacatttggaagctttcaaggtttaaacaattttacatagattatcatcgaaatgatattagggaattttttcttcaggcattgcataatatacctaaacaggattttccaatttttattgcttttgtctagcatatttggaatactcgaaact

SEQ ID NO: 210190 - DNA, 1207 bp, Cannabis indica
ccattttttacctttttttccaaaaataggaaagctagacaactttcctttcaagtttgaatacacaaaataggaaaccatattaatacataccagccgaaattaataggaaataataaaatatttttgtcaattaaatatgtcaaaaatggaattaacatacacaaaaacaataaaaaaattacaaaaatacagtttcacagaattttaaatatttttacgaattttttgattttatttacagaaaatacggtctttttatgttgtactcttgttaatttgttgttgattttttgttatctgcatgttattttttgttgttgttttgatgttattttcatgttacttttatgtagttttcttgttgtttttatggaaaaccgtaaaaatataaaaaaaaatatagtaaacgtaaaaatgtaatttcgtttacaaaaaatagtgcctcatgtaattatccctattatatttcaattaatacacatttttactgttatatttttttttttacatttttattatacaaagttttcaaaaatactgcgtttcagtaaaataaaaaaataactaaaacaactaaacaacaactctaaaataacttaacaaataaccaggcctaatccaaaggtatggcaactgggacctttgcccaggccccacaattttggaagctcaaaaataaaaaaataaaaataaaaatcggtatatataatatgtagaagtaaataagatatataaaaatgtaatcctataaatattcaaaaccagaaatagcatagttggcaaatctcttaacctttcttcaagaggtgaagagtttgacaccaaataaaggcattttccttttttttttttaggaaacttacaataagaagttatttatttttcttgtgtaaactaaaagatatgttacaagattttttatttcctataaaaagaataatatttgtatatatttgacactttttaatgtataattgaaaaattatttcttaaaaaacttgtgtaaaaaaatatatagttatacattatgaacttaatatttattgaaaatacttttagtttattaaatatcaaaccaatattatattaaaattaattatataaaacgtctcgttttagatttcttcccaagcttctcactggcttgagacagccttgcaaacaacatgaaaataactataaaacaataaaaagataacttcaa

SEQ ID NO: 210191 - DNA, 555 bp, Cannabis indica
ctatgttcaacccataatagttgaaaagctgtgggtttttttttacgtaaccttatatatttttatcaaacttaaaatgatttttttctttaatttttaagtgatatataaagaatttattttaattggtgtaaccgatgttataaccgtaaatacaaatattaatttttttttcgcttcggttatgaaccgaaccaaaaaccgcactgatgctaattgtgtttttgcttttgttataaagtgaagcaaaaaaattttaaaaaataattaaaaaatcttaaaccaaatcgatcgatctcacccaacacccaaaaccacgatcaacaagtttgacccaacttattatcctcaagacctctaagtgtatgtgtatattggtgctattgatccaatcatcaatctcctcccaccaataaaattcgtcttccccttaatataatatatatagttaaaaattattataacaaataaagtttttattcatttttatcttaagttctttaagtatgttcaattggcattgtagtttggttcgtgtgctttgaggagtgttct

SEQ ID NO: 210192 - DNA, 623 bp, Cannabis indica
ttcattctattttaatttatataatgatatacacgcatacacgtgcaatgcatgagtggttgcactagtatatattaggggtgttcgtggtgcgggtggtgtgtttttttgactattttttcaaaccaacttaacttacatatatgaattttctaatttctcaaaccgcgcccgcaccgcaaaactaaaaaatcatagaaatcacaccgcaaaaaatagtacggtgcggtttttgcagtttttacagtttggactatcactaataattaaactattacaaatacaacaaagtttgagcaacacttgtcaataatacaataatacaataaaaaatttgaaaaaaaaatgagtttcaataatacaataattagtgggctttaggttggacattcatatattggacctaaatagatataaaaattggtatttttataatgtgcggtgcggtgcggtttgaaccacatattaacaattcaaaatcacaaatcgcaccgcgcggtttaagaagaatttaaattgtgaccgcaccacaaaaaatttcaaactacaatttatttagtggggcgcgtatagacagtttgaacgatttgatgaacactcctatataatatatatcaaggaaa

SEQ ID NO: 210193 - DNA, 506 bp, Cannabis indica
tatatatatattcatttagatgagtcatatatcccatcttacgatattgtcgatgcttatccagttatccttatctttcaaaacctgtagaaaaaactgagtttaaacataaactaattagaatatattcagcaagtttttggtatataaaatacataaaactctttggtatgtagtatttcaacaagtttatgatattaatccataatttaattataataaatgatagtcaatattacaaggtcaaaaacccactacctttgtattcttcacatgtataccttattatcattctcttattctaatttctaatcttgcccaagatcacgaaatcaccaaatcacaaaatcaccaaggaataataaaataaggtcagattttaaggtttaaagaacaacaagagaaaaagtattgaaccgatctaagaacttagaagcacccatgaaagaaactaagagagggtgagccaatatgataatgaagaagaagaacctaccttgtcgcga

SEQ ID NO: 210194 - DNA, 869 bp, Cannabis indica
aacaagttgacacttggtgtccagtcgtatcacttgagggggtatattgtaacactagatcaaaactaagaaaataactaagtgagacaaagtttgttaaggtagttagttagagtaacatctgtgttaattctattataactttcagtattgtaagatcccagaccatttttaacagatataactaagaaggtctaatctcaactcagttagttgagcaatccattctactttctattttctctttctttttttctccatcgtttttgctctctttgttttttggtttagtcaaaaattatgttatgttaagttcttataatgggtaatactcattaaaagtgcactcatatatgtatatatatatatataataaaaaaaaaattgatacttgaaactttaataatgcatctatactcctgattttgccatgatgagttctccttaacccctttcaatgaaaaaaaaaaaaggctaattaagatttttgccctctgaactttgacatgcacaaaatcatgcctactgaacttttaaggtcgttaaaaatgccccctgaattattgagattattggatttaaagacttttttctaattttagtaaaaaagtctaacatgaatgaaagttcagaggctataatttagtacataaacaattactgaaatagtaaaattaaatgaaattagataaaagtccttaaatctaacaatctcaatagttcaaggtacatttttaataaccttaaaagttcaaaggaacataatttaatacatgtcaaatttcaaaaagtaaaaatccaaattagaaaaaaaaaaaaacctacttttctatattggcttttgccatgtattacatattcgtttgcgt

SEQ ID NO: 210195 - DNA, 607 bp, Cannabis indica
caaagaactattcagttcttttttagatgatcatggaggtactattttacttggtaataacagagcttgtgaagtgaaggggattggtttagtagaaatgcagatgcatgatgatgtttccagggttgtgcaacatgtgagatatgtgccagaattgaagagacaacttattatccattggaatgtttgacaaaaatggatatgcagtcaagattgaagatggaatgctcaaaatttttaaaggttcaaaagttgtgattaaagggatcttgaacaatagactctattaccttgatggtaaaatagtggttcgaaatgcaacacaagcagtgagtcaaagttctgaggtgagtacaaagttgtggcacttaaggttaggacatgttagtcaaaggggtctggatgagctcaacagacaaggtatattcaagggtggcttgaagagcaaacttgaattttgtgaagaatgtgttcttggtaagagttgcaaggttaagtttggaaaaggggaacatcacacaactgagaaactggcatatgttcactcagatttatggggtcctctaagtggaacaatgtggggctgtaactgcataagcatcataga

SEQ ID NO: 210196 - DNA, 545 bp, Cannabis indica
ttctgacacatagcaatacttctctagtatcactatcagaaatcaaaattttagaactagtgctaaaccaaattgttgctatgtagaaattcttcaatggtacaaactaataattactgttgggccttttttttttgcttaatgagcaggttcacattgattatcttgaagctggggcagatattataattacagcatcttatcaggtaagtttctttaaccagatatatttgcttgtttcataatccctggaactattacattaagttataatgttatatgcacatgtacacaggccacaattcaggggtttgtagccaggggctatacaaaggaagaaggcgaaaccctgctcaagagaagtgttgaaattgcccttgaggctcgagatatttataaggcaaggtgtgaaagcactcctagtgatattgtagaccgtatagttctcaagcatcggccaatcttaattgcagcatctgttggaagctatggtgcttacttggctgatgggtctgagtacaggtatgtgaagttgcttctgaaat

SEQ ID NO: 210197 - DNA, 872 bp, Cannabis indica
cattgctcagacctgtaatcaagcttatgcgagtgataaggtctcaagtgaggccagcaggcacacccaaatgattttaatattgtgtaatcaggtttagtagagaacaagcactcgtatggactgatattgccaatcacaggacttggcaatcgattgatggtataggtggcacattgaaaagcatgccaccagtacctaagatccaacttagcttgtgcaagcatggtaagccctgtctcagttatgtggcgatgcttcctttcggccctaccattttgttggtgagtgtgagggcatggatgagagaatagaatcccttgatcagctaggaatctagcaaacggtttgtactcaccaccaccatcagcatgaacacttttgataggtaacccgaattgcaactcaaccatgcttttaaactgaatgaatttctcaaaagcttgagatttcatggtaagtggataaatccacgtgaatcgactgaaatcatctaggaaatgaatgtaataccgaaaaccatctttagaaggttcatgggaaggaccccaaagatcggtgtgaatgagttgtaatggtttagaagcacgggtgggtgataatgaaaagggtaacctatgactcttaccttgttgacaggcattacaaaagtgtaattgtttcaatgttccactgtgtggaattgatggtaatagcttttgtaatgtggacatagcaggatgtcctaatttacagtgccaaagattgacatcagaaggtttagaaacatgaaaaacagaatgctcataaggggaagaaactgaacttttattgattgactggttattacaagaattgtgtgtagaaacacattgttcagtacaagattgatc

SEQ ID NO: 210198 - DNA, 661 bp, Cannabis indica
ccgattcagcattcaggacccatgaagtggggttgtggaaaaacttgataatggatgatcgctaatggaatgaacccctgctgcaacaatggtttttcccagcttgatatggaccgaatcttgaccttaccttgagttttttctgcaatgatgatatccttatttggcaccatcgcacctcaggtgtttacacattcaatcgagatactatttggccacttctattgaagaagctcatgacagttcaagctccacctcaccctcttcttggtggagatatttttggtctctacagatgccacaaaaggtaacaaaatttcttggcgagtttttcatgatgctttactagtggctacatcttaagtcaagcaaaaaatcatcaccaattctacttgctcagtctgtaaacaagcttggaagtccattggacatgcactctttggatgcaagtatgccctatcaataatactaacacttctacgcaataactctaccaagggcgatcctattacatgaatagcatctgatacacccgttataatttttactgcctaataacctatttggtcccaaagtaaggaataaccagttacactaaaagatgcagtcaatacacccaaaaccacacctataactcgagtcaattcacgaggtcttttaa

SEQ ID NO: 210199 - DNA, 1164 bp, Cannabis indica
ggggttttcccatactatacatgaaaacataataaataaaacaaaacaaagattgttagcatagataggagtctatctctagtaggcaccggagtagatttacactaaaaaaagacaaagaccaccagccatgaaaaacaagcagcttaaacccctatctgagactattttgtacggtagtccgaaccggcatgaaagtactacttgttgattgtcaagattcagattaccaagttgattatctttgaatagattgatttcaacacatggattctaaaattgaattgagattaaatcagcaaagcacacaatgatttacaagcttcatctgcactgagaacacatctcagccgactagtgcttgggtttcctaaacgagggtaatctcatctactagttctcaaaagattcgtattacaatttccagttcactctaaggaatttaatacaaactttacagcaattagtaatgaattaccaacaacaatcaagaatcttgattgcaagaacacagtcccttgtgcagcaactgagttcgtctttgacacttcttcaatctgaaatcccttcagatttgatgacaaagtaggcactgaactaccttcagtctcaactcagtaacttcaggctctgatctttttgccatagatcaccatcttcaagctatacattcagacctgtaaaaacaacaacaagataagcaagatacaactctaactctcacgataaaactgacctaaccaaccatatcgatttaatggataatcagtttagagaatgaaaccaactatttatacacaatagatcagtccaacttgcactaactaacgcctaccgttaagtcataacagactcacacagactctaatagtaagcaagagtgcagatatatcagactaaaaatccaaacacgactagacattctattaaaataatttgtcacagaataacaacacttacattctccccttcgacagattatgttcaatgactaaaaaaaaaaacatccagtaatcatagaatcaatgcaccaaaaaaaaatgtctttagaattataaacatagcaacccataaagccatatataaaaaaaaacgtaagtacaaacatctcccccttcattaaacatgagctgcttgatcgtgttctttgccagactccccctg

SEQ ID NO: 210200 - DNA, 893 bp, Cannabis indica
ctcacctgagaatcagaacgaataaatctgatgcctctccctgggtatatcttggcaccgctaaacctacaaagttcagtcctacaagcataaaccaaaatattaataaactgcattgaaaatcaattacagagtcacaagacactctcaactgagagagcaaagataatatcaggtaattttttgttttaggtgcaaaactctagcaattgctcagtaggcactcgtgaaagtcgaatcccagggctgatgggagcaaaccatgtgcactaccattcaacaatcaacaaacccctcgtgtagaacaacaaacaacttcaagccaagatctcaaaataaagtccaaataaccacatttcaaaaattctattcaactaatcttcttttgtgattggtcaagcatcatatatacttaaatgcatatactatatagatatatatatatatatatcagaatgttactaagcctgcccttattctgttaattttgaaaacaaatttctatacttcctggttctaatacaagatacattagaaataccaataaacatcatacacccaatcttagtactcactttaatactctgcatcacaatttaacctaccatcagaaccctaaaatcccaaatgtttaaccatattttaattcacttccaagcttcatttctccaccacaataccatgcaaaatcgatagaagcaatacaagtttaacaatgaaaatgaaacttgatcaaactatgaaatgtaaaccatcagcttaaatttacgacttttcggagaatataagctgaatgatctgatatcagatccaaatagcaacagaggaatagaggctcacttgagaaccatggccgctgatgttgatactaatggcgctgcctcctcctcctc

SEQ ID NO: 210201 - DNA, 641 bp, Cannabis indica
taactaattaaattaactaacgaaaaagtaaaaaattaaactactagttggtaaccgaaacctagtcgaaccaaacttaaaatttaaagtttggtttttcgttttcgtagtacttacttaatttaaatttaaaagttaaaaagttttaaagtttagttaatttaattttaaaattttaaagtaggttttaagtttttttaagggtttacgggactaaaaaccctaaaaaaccccaaactaattaatttaccttaccttagtttggtcgtcgtacggaaccgaacctaacttaaattaactactagtaacgaaaaactaaaattaattaattagtcgtccttacgtaacgttaaactttaaagtacgactttaattttaactaacttaaaacttaaaactaaattaactactagtaaagtaaaaaattaaactactagttggtaaccgaaacctagtaaagtaaaattaaaaagtaaacggacgtttacttttcggtcgttttacttttaatttaagtcgaaaattttgattacattgaaatggattttatttagggcacaaaacccaacagtgtggacgttactggggtaacgtataaaagaacgttaggaagagtagtggtatcactaaaataaagaaga

SEQ ID NO: 210202 - DNA, 1231 bp, Cannabis indica
tggaattggaggcatcgagacatgttgaatcctggaacagtgacggccagttacattatttgttgctgaaacatgctcacgatttgattctgagtctccaacatttgttgtttccactcgttcagtgctgatggtttttctacccttcagttcaggggctcatattcctcttgggtgatagtgggttgcttggagggaccttcttgggagttaccttctttaccctcgtcctaagtctcgacaactagcacatccctctcaagtggcgtgaccgctcacccagcacttgtgtcataagacacatgtctccagaaaattagatggggtcaacattgtactgctaggggacattggtcagcgctggctgagtttcacaaatctcaaccattttggcctacaaaaaatttaataaattgttagagtggaatagaaattaaaatataacacaaatttattaaagatataaaattacttacatgctattgttatgtgtgttcattgcgccatttgttgttcttgtagtagaacttttcaaaagtgtccacaacattaggaagtttccctatctcgggatcaacctatttttatacaatacaaaaaattagaaatatattattcaaaaaaatgaatttttagacaaatatgctcacaacatgataccccgctcacaatgtggacgactatggtcttaatcccctatccaccttgaatcttcatctgccctcaatttattgcattgtgttcggctcttgcctataatttataataaatttattgttggcaaaactgagtaagaaatcataagttaatagacattcaattttacaacttttattttatacctgttattttggatctttctggtatgcgataacctctgcgcacacctccagtgtcaccacatctagacgtgatctcctagtggcttctacatctccatatttctcaatattctccttcgatgatttttttgtgtccgctctccagtcacgtagccctcttgatattgatttaagaacgtaatccttaaacaggattgtcaataaggaattcaaacatgatttagaaaaaaaaacactaaaatcatatatatttgtttttttttgtataataattttatatgatctattacaataaaaaattgaatgttactgttattgtgtcccagatagtctgaataaatgtttccttaacgttctcaaagttgaacttgttcaaaagaattgtatta

SEQ ID NO: 210203 - DNA, 601 bp, Cannabis indica
attattaaataaaggattaatagataacattcaaaactcgttgaatttatagtcaaaagagagacaaggataatcactattgatctgaggttaacgagacatatgcatgccttagaagatataaactagaagaaagatgttcatccactcaagtagagtaaatataacaatgtaactgcctcgcatcacacatagagaaaaggtcacctcgcattgttcataccactaggagaatgtaacgagatggattacttcccaacacttagcattttcttatcaagacggaaagaaacgacaactcatatcaagcgagatatgaccttccaagtcagcaataactgtctaaaagataataataaagagcggttgggtagttattagatattatctcacatgtgattaaaaatgaaacgtggagattgtatgcgtttcatgaatctccacgtttcatgaactgttatatttcaatccatcccaaaaaaggataactaccaacctatattcctataaatagaggcagattctatggaaaaagggacggcaaaatttgagagaaaagactattatttaaaatcaggtattgtattctgtactcaaaaaa

SEQ ID NO: 210204 - DNA, 516 bp, Cannabis indica
tttaattttttcttcattttttttctgacgactaaaaaaatacacaaactgagaaaacgagaaaaggcatagttgaaaaagataacaaaatcaacagatggacatggctgcaacgaagaacacgaactgtacggacgagagatggagtcttgaggggaaaacagctcttgtgactggtggatctcgtggcatagggtatgcatatgtgttatataaaaatatttatagatgatatggttaacttgtaattatttggttgtagtagttatatacaagtctaaattaatacaaaatttaatcttttaggcatgccatagtggaagaactagcaaaatttggagccatagttcacacgtgttgtcgtaaagaaaatgagttagataagtgtttggaagaatggaaaaagaagggtttcaaagtaagtggttcagtttgtgatgtttcacaaagagaccaaagggaaaaacttatagaaactgtttcttcaatttttcaaggaaagctcaacattcttgt

SEQ ID NO: 210205 - DNA, 510 bp, Cannabis indica
tttatttcacaaactgaatttatcataccaacaaaaaacagccttactggtcttaccaaccattttacaaccatattggtttacccaaaaacaacaaaaccatactgaaaatcccaaaggtgcaaaccacaaaataaagcaaacaacaccacaatatttttcagaactaaacaaaataaagcaattcatttataaactaaaaaagaaagtaataagagactaaaagaaaatatataaaaaaaaaaaaaacaaacaaaaacaaaacaaaacaaactacaatagatctagtcggccacaaacaaatctagacatgagaaaaacaaaaactaagatccagaaacaaacagaagaagaagggctaccggtgaacccaaaagagtagcatccgaaaatgacggaaagataatcccccttctacttgtttctcagggctccaaatcttattttgtatgcaaaaaaatagataccataaggatctcaaccctgaatctgagatactcatcctgacat

SEQ ID NO: 210206 - DNA, 710 bp, Cannabis indica
ttactatttcatgtaacatacaaacatgatttataattattagttgtcaataatattggatttattattagtgaattgtatctccctattttatatcaaattaataaatcaagtaaagttagaataatttttcaatgaaaatgaacatccatatatgcatgatgtgtctttggtaatatttttcaacttaagttgatagctatataataaaatgttaaatcataatttgaaagcatcatcaaagaatgattaattgattacattcatatattaattgaaggagaaaacgcgtatatatagcacataaaaaccctaaccctaaccctaaccctaaccctaataaatcacttataattaaaatcttaattgtgtgtgaaaacaatattgtactaaatttcccaattaaacttattacataatatatatagtaattaaaggaaaatttaaggtaatacttagcttaatctttttttggggacaaaaataaaataaaaagcacacctactctttctcacttatttatttattattattttaaatatatatatatttatatattatattcactgtggagagcaaaggggttaccgacatagaagatttctgaagcggattttcaggagaaattattatattaatttagaaaataattaaaaacaataattaattacattcaatcattaattttactatgtgctatatttatttat

SEQ ID NO: 210207 - DNA, 836 bp, Cannabis indica
ggaaaaatcaatgatacacatactgattaaaatgtgtttttcactacccttattttttttaatttttatttttattatgtaggagtagattttttagtttttttttttctatggtaattatctatattatagttatttaaaattatttttacatttaaagtttttgtttttggcaagggaattttttttttctttatacacttttaaaacagttttttttttatatatatttttatgaaattcgacatagatatttttatagtaactaacgaagcaacttaaatcccaactaaaatccacataacaatcaatagaaattaccgaaaaaactacttgagcaacccaaaccgtaatttttttttaaaaaataaaatataatatataaaaaaatttctctaaaaacaccacgtttaaattataaaaaaaatatgaataatttattgtgcagaaaaatatacgttgtaaattttcacgagtaaggttcaaatagcttactcattaattttttatattatttttatatgtatattaagtaattaattatttgaatcttggtattataaattattaaaaatttctaaaaacacttaacttataaaataaatgatcttaaataattagaatgtaaatgatttataaaaaataaaataaaaaagtattagacattaataaaatttgtagataccgatacaaaatgtactacaataatattttggaataatacttttggaaggtatgtacttttacagttattattattattattattattattattattattattattttgtatgtaatagaactaacattagaaaatgtaaaaattaattaaa

SEQ ID NO: 210208 - DNA, 626 bp, Cannabis indica
ccttaaacctatccaatgataatctatatgtgtaaatttatggtaattttataaacttttaaattattcttataatcatgtatattatagttaattatcactgtttgtaatttttttttttaaattttagaataatttatagtattgaaattagatctttaaatatattttgttatatgcgagattatttttcttatatactgcttgaattttatttttaacactataaatttattgaaattttcaaaaaataaaataaaatataagtgggattttaaataagtaaaacgcatacgattatgaaataaaatttattagaaaactcttctcgtgatgcagattcattccacactcctttaatatatagccttgataatcccaccatgtgtcagctataatggtcttatacctcatcctgccttaattaggtcatcggtatgcacctcgagagttctcgccctaataagaataacactgccacaaaaagctagcctcaaactctacaaatcaagttaataatataaatatgtatattgttttctctgagaaaaaagggatttctttctcacagaatgaagtaatgtgaagaaagtcatttttctaatcgtagggatcgtgtgaacgat

SEQ ID NO: 210209 - DNA, 917 bp, Cannabis indica
aaaacttctatgttttgacttttccaaaaatctgatcatataatagccaaatttaagcttgaagttgcagctttattttcttgcagaattttctctattctatagattgttgttttccgaaatttgatcaatttatacattccaagtgtgaaacctgaaaccaaagaaaaaaagcgtaattctattccaaatataataataaagaaggaaaacaactataaaaagtgacccaaaacgtaggctaaaaatagcctaacaaattcccccaaactagattcttactagccctcgagtaagactaagactaacactaaaactcgattaactaagctatcagataattatattattgctagctcatgcaaaatttcctgcaattaactaaactagatttttaattctaaaaactctaacaattaattaggatactcatcttatcacacaatgtacatatacaaactaactataatattgaaataatggcataattgtttcactccatcaaatcagtccaaaaactaatagccaatatgcttgcatgctttccccctttcaactaatgttgacaacattcttttcggaattaaaaggactttttaatgttagaatttatggcttagatattcggaaaatacaagacatttttggctaaagatatcataagcacaatagaacccacaaacttctcataatttaaaatttcccgaagtattcccacaactaacaattattgagatttttctgttgtttttttcaatcaccgtacatcactaaaatttttctttatttctgattttttttcattcttttttttaagtgattgccgtagttataattctttcctattttattcacatgtttctcaatcacgcaagattttttttctatacttcgacacactatatatttcactcccc

SEQ ID NO: 210210 - DNA, 628 bp, Cannabis indica
gtttgattgtcgttcacaaatgatttttccatttttgggtcttcgtccgttttccccagtttcaatgttttgatacccttttttctgttctgaaaattgtctctgctgcctgctcggtgggtttgggtccgtgggtgtgttttctttttgttctgttttggcaaatgagttcagatttttgttttttcgaaggtgggctttgattttcagttgggattctgtttatggctggaaatggtatctacactgccagaatatactgaatcacttcgtgggttcaaatgtttcacttagacagttctgaaaaaatttcccccttttactcttttataatttcatctatctgggtagatgggaaaagttccattacgaatatttaaaggaactgagaagtgtaagcaactcttcctagctgtagtttagaatacaaaaaggaaaaattccttttaaaggtttgagtttggatactggaaaagtgactggaatgaaaagctaatgttgagcttattccgtttggtgtatgaaaagctcggagaaaaagtagctgattcttgaattttgggttgagagctgaagtttcatcacctggatttagaaaagtgagttgtgggtctctctctctctctct

SEQ ID NO: 210211 - DNA, 572 bp, Cannabis indica
taaaaataaaaaagtatccgaactcaaatttataaaaccaccggctatcaatctttgataagtcaactgcatgtttattggtaatttgccgctcaattgtactatgaagtgtgaaacgtactgtggaaccaatcgaaagaaataaatgccaaagaaaaaacaaatagaagtaccacggaatcaaatatatatatagatatattatatataaagagaagtaccatcaattttattataattttttaatcaatatttgtgtttgaaaatacagaatatatatatatatatatttttttttataattgtactcgttatagttgcaacattatttttgtaattttttgaatttcttttttaataatttacaatgctaaaaataaatttgaaggtttttgaacacacacgtggtaaattgaaatatcaagaattctattttctgtattgtaaattattcagaatgtttaaaaaatttacaaaatgatattgtaattataacaaataccatattattataaaaataaaaatattttagcaagtaattttaaaatatagaaattaacaaagaggttgta

SEQ ID NO: 210212 - DNA, 665 bp, Cannabis indica
gtagtatagtatatttgattgatgaaagtcttatttacatttagaatgtaaaatgaaaactcatcaggagtttttttttaaaaaaaattattttattttcaattgaagaggacatgggttcaattattaatgttctttaggataaaatgttacaaaaggattgctgggacctcattttataagagagaaaaaaaaagagaaaacattctgtatctgaaacttaaatatgaaaagtcaatctttttagcccaaaaaaaaagaggaagggtatgaaaagtcaatagaaaagccaagctctatccaaagttgttctttggagaaaaaatacgacacaacaacaaacaacttgtaaagtcttgagaagaaagaaagatacaaatagaatggaaaatgcacattcacttatttaagagtaaagtcacaattaagtttttaaagaagtggtattgagaatattaattaatataaaaacctaaaacttaatagctggaaaaatttcaaataccaataaagttgaaatggtctggcattgtgatcagaatagctgacaaaataaataaatagtatagacaacagcagtaacatggtactgtaaatatgttgaaatccacgtgcatgtagacaaagcagagctgaatttgagtgcttatagaaaaaaataaaaa

SEQ ID NO: 210213 - DNA, 942 bp, Cannabis indica
agatgttttatttcttgacacatgtcaaatattgatgtccacatcaccagagtgagtttctgggtaaacaattactaattacaactatatttatttaatttaaaaaaaaaaaaagtaaaaagggggtataaaaataaaagccgtaaaacatgtacaaaattaatgaacatctcacatttatcaatcttattaaaaaagaaatattcatttcatgtattatatatcagtttgagacctctaccaaaaatttacgtgtgtaaactcagaaaatggttgcaatagtagaataagcttgtcgtatgactatatccacatcaataaaaagaaaatatgtagaagacattagccaaaaagagctgcaaataatggagaaattaagtggcagggaaaattaactggaaaaccagggaggaattggattgtatatcgactacataggccttcttagaaacttgaacgtggacatttaatgaaatatggttcttgggccgaaaagattgtatgaggcccatgttgcttaataaagtggaaaaaattaggaattatttcacaaatacacaaaaacaacaaaaaaattataaaaatacaattttatgaaatttaaacacttttacgatttttttgattttatttacagaaaatacgatctttttatgttgtactcttgttaatttattattgattttttgttacttgtatgttaatttttgttgctattttgatgttatttaaatgttatttttacttttatggagttttcttgttgttttcgtattatttttatagaaaactgtaaaaatgtaaaaaaagatatttaaacgtaaaaatataattttttttacaaaaaatgatgtttcatgtaattatcccaaataattacattgacatggtgttgttgacggttgagaaaaaatattagtttttaactgtaaaaatagttaa

SEQ ID NO: 210214 - DNA, 1181 bp, Cannabis indica
ataaagtcaagagcttacctagagcttaaacacccttaatccttctagaaacttgcttgtaaatggagagaatcacaccaaaccctagttgattctagggatttcgagagagagaaagagggagtagaaagagagagtctttttcataatttttttttctaattttccttcaaatgaataaaaagtttgttttattaattaaatatcagctgaaaacattaaaaatcagagttaataaactttacataaactcactaaagacaaaaagcttatggggcaggtcattttgcccctcccacactaaaagggcataaaaggcacttaggggtattttgggaaactctaaaatcccgactactctcaacattcgcaatgtctaactatatagtcccactatacaaaaaatactatgatgtgattctaatagccaaacaccgcgttccaatattgccagacacaaaacatgcaaaacttatgaaatttctatatatgacataaaagtgcattctgaattcaaataaatcatcataaatacataattcaatactaataaataatttttataattaagccctaagtatcttctaatttctaaattaaagctaagcggtctttacactatttgctttttcctcactcttaccacacaacaaactaacacacacttctatttttacaactcattattttctccacacacagacctctctctcacacacaaaacacatatttataaacttacaaaactttggcttcaagacaacttggggaccaagacattccaaaacttacttaagaagactcatcaaaacttagccactaagattttctttttttctcacaattaataattactcaaagagaaattgtaacttaataaatatagataaattaataaagaaataaataatttgagttaaaatctaacaatattacatgaaatgcacatgtacttagttaaattcttagttttttattttggttacatttattttagtttttcttaatgctattcataaataacatcatattaaaaaaatatttaatttatgtgctatttattacatgataatatttaaaatttgttgttaattataattttagtttgaccataatacttttaattttataatattttttttattttcatagaaatatcataaacttttttggggtttttt

SEQ ID NO: 210215 - DNA, 615 bp, Cannabis indica
ctatccctgtgggattgacctcactcccagtgaatttactacttgtaacgatacgtacacttgtgtgtgcaaaatatcacaacaataagtttttcaatataatgaaaattttcttatatttctaattctattacatcacttttagttttaaaaaaccaaatattgcaattgtaatcccaattctattaccattaccattataacaaaccaaaatgaccatagtttctttgtaataatacaacaacagacatcttattaagaataagagtattatataaattgtctaaaaattacacatgaacatttgcatcttttggcgacaaaattgtaatgtttacaatgaacatgatgatttttttctttctgaaatctcacaatgtatatgatgattggtatacatcttttataaatataaaacaaaagtaatttggaaaatctctaaattgtttttttttttaattttcttaaatattttaacataagaatgtaagacttcattaatacataaatgaactctgggaaaatattgtttgcttgcaaaatacaataaaaataaaacaaataaatcttgcttaatagtaagctacattattcgtaaactatttaataaacttt

SEQ ID NO: 210216 - DNA, 796 bp, Cannabis indica
gcagtgaattttatcgcacacttaactattttttcttgtacataaggtaaataattgtttgaattttatttttaattttgtaaactattcaaatttttttaaaaatttacaaatgaatctaaataattacaacgtatacgatcttaaaaaaaattaaattaaaaaactctcctgatattacaacagagtttaccaaactatcttttttaagaaaaatgtactcttaatttttcataaatttcgtttttagttaaggatccaaaagcaagacttgtgccatagggctggtttagtcactagtggtcgggttgggaattaggatgagacccaggatggaacatggaacgtcttaattttactcttattattattattattacttggaaagtctcaattgagccccaagccaagtgtgtcaataatcaaataaaaaagttatggcaaaggatatcctgtaaaatcaagtagtgaatttacacagcctcatttacattttgctatgggtataaaacataacaacatggccggctataattattggctccaactcattctaaattggcataatttagaaatctcataacacaaacaaacacattgacacttaaaaacgcaaagacacacacacacacagagacaagccagtgataatttgttactcaacaaattttattgtctttcttaaaagttgttacgctcgacagattcgcgattagctctatatatgtactcggctcggctgtattactggatggtggctgtaataatgtgaagagaggcaagtggctcatgcacc

SEQ ID NO: 210217 - DNA, 1132 bp, Cannabis indica
ccaccaactctccatccttcctagcaaacatagccttagtcttagttgtataactaaataacaacaaacaaataattgtacaacaacccgactttaatttgtagattaaataggcatcaacacattacattaactcaaagaaaaaatacaaataattataataaataaataaataaataaaaggaactacaaaatacttgtataccaactaaaaaatatatttacctaaaaataactaaatataaattcatttttctttgaaatttttacacccaaaatacaaaatacatactttattactaaaataccaccacacggttaagcctacatttttactctttaactttattttattacaattttaccacttgcacacacatttcatgcatcactacacgtcagtcaactatgacctctatcaatcaaccatccatcatttccctctctttttctcttctttttttcttttattttctatttctttttagtttttttttcttaaaaaatatcaacctccatagctgaactctttcttctccacgatcccaactccattttccctcttctttttgttcttcaaatttttttttgttcttcaatttttttttcaactcccattaaccgaatcccataaccgttttccatccttttatttttctcttaatccatacataaatatagctgtaactcgttcttcatcaactccttcccctgttcaaaagaaaagctctaaaatgggattgaaatctttagctaatagaaaaaatggtaaacgacctgttgttgaggaggatgactctgattttgctcctccattgtctaaacgtgggcgagctcctccaaagaagaaatcgaaggtggctgcccaggaaaaaattcctcaagatgtttctcaaaaaaatgatcaagttggtggtggtcttcgatctgaggtttgttttcgatttctttttggtttccccccttttcgaaattttttcgtatttgacatttctgtgttttgtgtttttggattgtactattctaggttttctattttagcatttcgtttggttttgtttggttttttagggcatcaatttgttttatccaatttatttgttatttttatgggtttttttttatttttgtt

SEQ ID NO: 210218 - DNA, 354 bp, Cannabis indica
agctgtgttggctaaatgtgcatacccatccagaagagatagtcggactaactcatacaataagtgttgtcttcgctgcccacttattttctgtctctgtccaaagcacctaaagcagatatactcaccctagaaaagctggtgaggggcctctttctggaaggaggttatttgtgtgggtccagacctttggtgccttgggaaaaaaagtttgcaaacccagaatccaagggggcttgggaatgggtaacttggaaaagcagatcttatgaaatggctgcggaggttcccctagaaattgaatcattatagcacaaagtagaaaagcacatatagaagaacaagccgatctcc

SEQ ID NO: 210219 - DNA, 542 bp, Cannabis indica
agattattctcactgtgaattttcgatacacctccctggatactgcccaagtaagtttctttgacatatatcctaggcttttaccagatttttaacgatttatttgctatggaaaaccattcaagtaacttgtcagcatcaaatgtatatatattattagtatgtggagtgttgagtatgatgttatatacattctatgtagttactaatgtcatttacattgctcttaacaagtaatagggtgcaacacatgacttgccaaattatccaatatcttcttttgcttcagctcctcagatgataattataacaactagattgcaatctctatcacaggtttctatctattattattattctcatttatatattgtatttgatatggtaaaagttagaatatcttagtctaatctgttgttaggcatgaagtttcattagttgctattttgtgtataatgcagtataaatctaatgttgatggagagtggcgacacgatgagaatgagaatttgaatatgagatcgtgaacactatcttggtat

SEQ ID NO: 210220 - DNA, 508 bp, Cannabis indica
tatattttacaaaataccaaaaattttaattatgattaattttaatgcaacaaaaaataataaaaaaataaatataaaatgtttgaaaaaaaataataaataataattttttttttgcttaaaacagtaatagaattgaaaatggattttaaaaattaggatggaagtgacaaataataaattattagccccttaaaaaattaggttcattaaaaaaaactaaaagacattaaaaagatatgttgggccctttattttttgggaggcctgtgcagtagctcaacttgcacaccataagggctggccctgagtaattagtattgtattgtattaaattatattatattgtattagtattaagggtgttcgcggtgcgggtggtgcgacttttgactattttttcaaatcaacccgcacatgcagtttttttcaattttcccaaaccgcacctgcactgcgaactaaaaaactgcataaactgcacaacaaaaaatggtgcggtgcggtg

SEQ ID NO: 210221 - DNA, 506 bp, Cannabis indica
ccatttcttttcacccttccatcagcatggagcaattcacataatactccaaatgttctcctattcattcttagatcattcacacatgctatgtcactttcacctatcaaactatccaaatattttaaccgagtctcatgtctagcaaaagtacgatctagaaacatacgtctcctatgacggttgcgtaccattttatacaataataattgcaacatcatacacatgctcatcatttgaaaatgccatgtgaaaagaaatatcataatcttcttttgttgcatatccatatctattaatagcattccatgtacataaaaaatgtcatataacaaccatagacactaaatcaaaaactatattatcatgaactatattgaataacaaacaatatcacagtcatgaatttcccatcacttagctggaaaaaaaccaactatgtaagaagcaaagcttctccatttccactcttcggctagaaataatatcaagcacaaattataata

SEQ ID NO: 210222 - DNA, 593 bp, Cannabis indica
gcctctggtctttcgtcgttgctctgcctctaaccgtccaccgttgctctaccgaaatcctaaactcatcttacgattaaagtttttttatgagtttatatatatgttgattgagtcttttgagttgcaatatggtttgattttgctcttatttttgtgtttaatttctctgtgttttaagtgttttttggatctgtcattatttatattaaactgtaaatatagattatgtttttggtatattttactcttacattttttaaatatgataccaattctatgaatatcaggcctcgtagttatagtgttttgttggacactttttccgattcgttgtctccacacaactgttcaaggaatttgaggcttcgagacgctgttcttgccatttatcatcacaatgaggttaggtatcgatcaaggttttccttctctttcattttttcaattcaattacaaatgctttgttccatatgtttggttttgttaattgatatcctttgataatgtctgtcaacataaccaaaccacattttatggctaactgaatgtgaagccttcattcttgttgttgttatctttggtgatacaca

SEQ ID NO: 210223 - DNA, 731 bp, Cannabis indica
tatatatatatatagatttaattttattaaattttcataaagacttagacgtaaacataatttacttaaattaaagtcgtgataacaattaataatacaaggaatatgactatttcaaacttatattataatcttattaagtgatcattatttgttattattgaattattgattagtgccaataaataataatcatagttttgtaatataagtcttcttttgttcggcttggaaaactttgtagcctcacacataacaattaatgagattcgaattaagcctaaattttcagtcttaatttggaccactaattattagttttgagtatagcatgtagttgtgcctaatttttgcttaattatcaaagagtattaatatatatacatatcatcatctaaataaaaaatcacctatacctatatatataaattagggagaatctacaatacaacacactttttttctatagcgaaaagttcaacatatttatatgtgacttcaatttgtcacttatcttcaaataaaaaaattatcaattgcgtcgaaataaaaaaaatatatacataatatgacgtcataattctttacaccatattttctatgtcttttcttcacttttactttgttcttctcctctgtcctctattcctttcatttcctataatatttgttttaaatactccaagtgtccaaaaattttagtttgaagcttcattatttcagatttaagt

SEQ ID NO: 210224 - DNA, 846 bp, Cannabis indica
cattagcgaagtcaagccttccatatggtggacagatggcttgtccagaaaagatgcacctccgacatagcgtatctctagatggcatcgaatagatctttcagattagtgattaatgggcatctggatatccagctccgtaccataataatttattgtcaaatcccacaatagcacaaatttatttacaggatcatgttcaggattcgtatctttcagataagaaaataaagtaattgtcaatcaagcatttatgtgtctttattatccacaaaagtatgccacaatttgacaactatcaacaagatatggcatccacatcatcagaagaacaatgcctcatgggttggacttcaccaaatgagcccgaagtcaatgtattttttgtatttatcccatcagtgggcaatgtgtacatactagaatcctagcactataaatataagaaaactcattcatgcaaagggttagaagttcattccttaagtgctcagtcaaatcttaggcttcaaacacgtgtgtaaatcaataagactttttcaatcttatcataataatattaactcgtagactagaggttattaatccttgaatcacgttaaaactttgctcttattctttgtctatgataaatttccttaagctttattatattttatcaggttttaaaaatttcgataaacaattacattaaaaatgtaaccataatggttacattttttataacttgctacaacaagttgccaataggtttttttattaaaaaaaaatatttttaaaattgaattaattataattaactatgtacataaagtaaattaacttttttaatcaaaatattaaata

SEQ ID NO: 210225 - DNA, 996 bp, Cannabis indica
gcaacttcaggaatagctgctttattacctaatggtaggacagcacattcaagatttcatattcctttagatgttacaacagagtcaacttgtgaaattcgtaaccctattagttggacttttcatgaaaacttcattgatcatttgggatgaagtgcctatggtaaataaattctattttcaattagataagaccttaagagatattttatgaacaaagtttgaaagtagctctaaaaaaccttttggaggacttgcaatagtatgcgatggtgattttcgacaaatattaccaattgttccaaaaggtacaagagctgacgtcgttggtgcttctctcaactcatcatacttgtggccaatttttaaaatatatgagctaaactaaaatatgaggctatataatggaagtttaagtggatctgaggctgctaaaatagctacttttaataaatggttgttgtagataggagatggttcattatatgatgacattgacagagaattaattaaacttccttctgatatatgcaaaaattcatttcaagattcagtgaaatccatagttgaagctatctacccatcacttttacaaaactacaacgatcctgcatatttaaatgaaagagcaatattaacactaaaaaataaaatggtccatgaattgaataaaatgattatgaatattataccaggtgaagggagaatatattatagctcagatactctatgcaaagcaagtgtaaggacaattgatgatgatcttttgtatccacctaaatttttgcatagtttgaaatttaatggtataccaaatcacgacattcgacttaaggaaggtgttccattaatgctccttaaaaatttaaatcaaacggaaggcttatgcaatggcacaagattgattgttacacatcttggaaaatggttcattaaagctaacattatttttggaacaaatatcggtgaaaaggtcacaatcccaagaattatcat

SEQ ID NO: 210226 - DNA, 731 bp, Cannabis indica
atttataaactcatatcttaaaatataaataaaaataattacaaatttaataaaaatataaaattatttaaaaaaaaaaaagttaaaaattagacttaaaaaatggtatgtttatgtcaacttagaaatttagactagacttctaaaccacacccgctcgctagattggcgagaatgaaacaattattaagtaattataaaagagacacaacaaatttataatagttcactctctatatcgcgacaataatagagctacatctacttcaagtttttatttctcacaagatggtattacagaaataggctaagtgtcaaaagctataatttctagagagagaagctctcaccttgtgggtagcattctgaatgtgaaaaataagctaagagagctctccttttataggtgaaggaggcccacaaaaatagaagaaaaatataaattagacatttttgatcgtagatgatgatctaacgataaaaataagcttctaatggtaatagtcatttttcggagctcggtgggatctgctgcgggtaacccggagcttattttcataactctcttggggtgaaatttgagatcaatatctttagaattacgattgaagtgtgatacatgaccttatatagcattagcttcgaagtgcaagttgaattgcgtgaatcagatcaatattgagtgagttataaatattttactaaagtcagttcatgacccagcgctcagg

SEQ ID NO: 210227 - DNA, 530 bp, Cannabis indica
cgaaaaagaagagggaaagaaggttacatggcccttaaactggatatgagcaaggcttatgattgtgttgagtggaaatttattgaaaacttgttgcttcatatgggcttctgtagtcggtttgtggctcttgtcatgagatgtgtctctactgtgtcatatcatgtgattcatggcggacattctattggacctatcacacttggtaggggtttgcgtcagggagatccattgtcaccttatttgtttttgatttgtgctgaaggtctgacggctctcttgaaaaattatgagaggcttcaacttatcactggttgtagagtggttcgtggggctcctgcggtttctcatatgctgtttgctgatgacagctatgtttattgtaaggctaatactcgagaagctcaacatgtgattcgtcttctcaatgcttatgagctcgcttctggtcaaaaaatcaattttgagaagtcttcagtgtttttcagtaggaatacggcggtggatgtcaaggataggctttgtagtct

SEQ ID NO: 210228 - DNA, 702 bp, Cannabis indica
aaaaaaaaaaaaaaaacagagaggtcaaggtcattgaagactattatcaatttcatacaatacaagacaggaataacaacaccctaactatagcaaggcagaccagaaaagccaagaaaacaaagagaggtggtaaatggttattgcattaagccttcaaaaatgactttatgtatctcatcagcccaaaaacagtagtacgagataatattctaaagttgaagatatgaagttagaattacatactgaagattggcaggcttgccacactgaagacatgacaaagaagatgcttcagccacatctgaaccaccggccatcaactccgcacggctaactaccctcttctatatgtacctgccctgtctggctcaattcagaaaataaaacgatcaatcagtgttatacgccattacataaccaaaaattgtaacttcatatctttgactagtaattagtttggaggaaaaacctcacgagtcacgaggaggttctgagtatcggacagatgcagagagcgacagaacgcaaaggggagatgaattagggttttttgagagggaaagagaaaaagaggaagtaattcttcaaacaaaagaaatgtcctttattttttatttattacttttttagagacaaatgtagtttatttataattttataattttgaccaagttataaattttttaaggctaattcaac

SEQ ID NO: 210229 - DNA, 805 bp, Cannabis indica
attcaatttatgtttggtaccataagaaaaattatgaggtttctttatatgaggtaaatttcaataaatttataaattaaagaactagtagaactaatattggaaaagactttcaaattctaattgaacaagaatgacctaatttatttaaaatagaattcaaaaccaaaaaatcaactaggtgatgatagtgtataagtcttttccaaatccaaaaataactagtcattaattatagtttgaatattcttatagcctcaactataggtgttttcctattgcatcgaaagatgaatctttcatcatcacttggcttttagtttcacagataaccttccatagttatacttacataagcaatgtcataaaattttgcttactaagtatatatataggtcaataaattaagtcatttacaaaacaaaccatagtgagaaactcattttcattagatatgtctaatggcatacttggaacactttaaccttattttaattccttttgcaaaagtcatagataattcagtatctaatatcttttgtactttctttaacagtgttccatatgcaacatactgaattttatctttatccttatcttttatttaaaaaggtagctaaagaagcatgcttatttttaatatttccttaaaatttgtcatatttggcatgagaatcaaatttatgttggtagatataactgaaatatgaatttaaaagagaataaaaaaaaacacaaggttcacaaaggaattcatataacataataagttcaaataatggtaaatcccatctcaagataccaa

SEQ ID NO: 210230 - DNA, 1024 bp, Cannabis indica
tagactacaacttctccaccaagtgtaaatactaacctagatgtccacttttgactatctttgtctgattgaaaatcacaatcagtatatctagtaggatttaactctccaccagaatatacaagcatgagatctctcgttctctgaagatacttgagaatgtgctttacagctatccagtgttccaaacctggattagattgataacgactaacaatccctacagcgtagcatatgtcaggccttgtacacaacaatacatacatcaagctcccaaatgctgatgcataagggtactttctcatgtcctctttcttttgaggagtctttggactttgatccttacatagagtaattccatgtctggacggtaattgtcctttcttggaatattccgttgagaatcttttgagcaccttatcaatatatgtttcttgagaaagtgctaatgttctccgctttctatctctatatattttgatcccaagaacgtagcttgcttctcctaaatcctttatttggaatttattggctaaccacttcttaatgtctaactacatttctatattatttccaataagtagaatgtcatcaacataaagaactaagaataccactatattacctttaatgtatttgtatacacatgctttgtctttattttttcaaagccatactctttaatataatctagaggcttgtttcaacccataaattgatttaagcaatttgcacacatttcgatattcccctagtaatacatacccctctagttgttccatataaatgacttcatcaagattggcatttagaaaggcagtcttgacgtccatttaccatatctcatagtcataagtggcagctatagaaagaaaaatacgaatggatttaaacattgccacatgagagaatgttttgtcatagtcgatgccttctcgctgtgtgtaacctttagctacaagcctagctttaaaggtctctacgttcccttctgcatttcacttcttcttgaaaatcaacttac

SEQ ID NO: 210231 - DNA, 716 bp, Cannabis indica
tgggttgaatctcaccagcaaactgaacttcattatttctgccaaaacaaaaatagagtcatctttcacattaaaaagcttgtaaagcagagtacctattttccctcattgaaaacaaattctccaaattgagattttacctctccccgcaatgtgtacactcaaatgcagataatagaatctgtaaacgaatccaaagaaaaaaaacatatttaacaataatgataatcacaataagctaagaaggaaaagaaccaatttttcttgaatacatacctttctgaagtgcggaatcacagtaaacaaaaatttggttgtaccctagtgacaaaacaaaacccaaatatttgaaaaataacaaggaaaatttattgaaatatatatataaatatttgagttgttacgcttaaatgacctctggcgagcagttgcaacatggctgggggttggggtaggatgtgcatgtttctgagtaggggcagttgtgggtgccacagccacagtggttccagaactctgcagcattaatgcagattccattattcggtgttataagaacacatattgaaatttaagaggattagtatattaacattcaacaacgcaataataatcttctcttttttccactttcataaacagtgatcaaagttctaaacaatcttcttctattatttacaaatccgacactgctttagccaaataaatttgaaatt

SEQ ID NO: 210232 - DNA, 684 bp, Cannabis indica
tcttcaagacttgatcttcagggctttacagacgattctcaaccaactagtatatatactttcctccaataggttctacaccttacatagagcaccatcactacctttaaatttcttgctcttcctcaggccttctttatctaaagtacacttatttagctgagtacatctacagatcctatcgtgagattatcgagactcatctccttctgatgattcattcacaattaatatgactaactttatagaactagtttctcctagctaccacttattggagttggagtatatcatttatctccacattagtgtgatatatattaatatattgtgcctagcttttatgattttagttttgggcacattttcaaaaagcatcataccaattaagatattgtatatttttatatatctataattttttctatttgtagtcgtaaaatttttgatgattgcacaaatttatattttgttgtgttgcacttagttgcttagtaatttggacatgtataactagcctacatattcctttttataattatttattgttttttaaaaaattccatattcgcccagcccctttaaaataagttatatataatttttgtaagatgttgagaggatgcaatacattttttaaggtatagtattgaaattaatattaattagcatggatattatgtt

SEQ ID NO: 210233 - DNA, 601 bp, Cannabis indica
gagattgaattggagaaagttccttcagatgagaaccctgttgatgcaggaactaaggtgctgccagtgagcaagtttaagtattttacggacttgctcaaacttagacctgtgtagttttcaggttcactccccaaagcattttgtttcactagatttctatgaattaaggtggaaattgtggttgtaattcatagaaaactagtcttggttttaaactttccatttttggaagttagttaagaaagttagttaaagtagttatgttagttggctttgtccaagtggttagtggctcggttttgtgagctaatttctaacctatttaaacacctactgttatgtagtttgtaagtaagagagagttcataagagtgagtgaaaaaatcatagaagagccaaagttggagactcctggaggtgaagaaccatgacattcatggtgttctaaactgctcgatcatggaggtttgagaggctatatctctctgtgtgtagctctgcttgatgaactcattattagtgtttgtaaactacattgcatagtggagaaactccttgggggagagctagaataaaactcacattgagatccgaacca

SEQ ID NO: 210234 - DNA, 743 bp, Cannabis indica
aaaaaaaaaaaaaagaatttactgcttagtccctatgaaatcagttttgactctataaaaaatcataacaaaacctgtgaaatcataaaataaatttgtaaactcatacaatatgacaaacttaaaataaataaaatatgacaaaatatatattttttttcctcatataaaaaataaataaaatatgacaaatttaaaataaatatatatattataaaaaaaaaaaaacactaagacataccataaaaaaattttaagaagtaacttataaaattaaacaattgaaacaagtaaccagttatatcaaacaatcaattataataataacaaaaaccaataaatctataaaatcagtttcaaccctataaaaatcataacaaaacataaataataaatagtaaaaatagttgaaaccaaattcattagtgaaacaaataagaaaaaaagcacacacacaacaaaatactcagagatacataataaaaacaatatacaatgtacaacaaaaatataaaaatgtgatacttaaagtgaaactgatttttatctgtataaaaaccagtttcaatttttgtctatataaatgaaaacaaaatatacagataaaaaaacaacttcacttaagtataaaataaatataaaaaaccagtttcattaagcactagatcggagtcaaagagttttaactcctacacaccctaaatacctaaatggaaaacgaacgaacggcgagggaagcttca

SEQ ID NO: 210235 - DNA, 640 bp, Cannabis indica
taaactgttacaaaattgatagagtttaattttagttaattttgtattttttatgaattatttgtgttgtttcttaatttaattatgaaaaatacctagactgttcagattattgaaagttaattatttagggcttagtacagactataaactgagttagaatggttcgatttggtttcaatcattttttttttatttttcatgaatttattcagttaatactttaaataattatgaaaaatagttaagtgatgctaaaacagtaaaatgtatttttgcaatgctatttacgatctatggtacaaaataaaaaggtttttataataacttggttgctgtaagtatttattataattatttgtgactaatcaactatttaattgagttttaaatagagtaaatattaaaaattatgttcactgtttgggaactgtcaatatgatgttacaatataattctagtctatgaaataaatttaagactagattgagatgttttgttattttatttacttaattaattagtattttattatataaagtttgaagtgtaaattagtacataaatatggataataaattgtttgtgttctagaagattaaatatgctttataatcagtataaatgattaagaaatatg

SEQ ID NO: 210236 - DNA, 519 bp, Cannabis indica
caacttacctgaagaaaaaaaaagagaaattagaaaaagaaaaagggatgtatatgcattaaagaaatatcaaggcaaaaatccaacacaagtacaacactctaaggaagtgtgtgtttctcctaccaatcttcaatgtcaaatgattaagagaaggaaacataccaattacccaacttttgaagttggtgagaatagtttttctgttatgttgattttatttaaccataaattagcttaattttgtaaaaattattaatatttaaattttttataggttcaacatcaacaaatacccattctgttttaaaaagaaaccgtcatagttctactttacaaaataatgttgataaacctgatatattgaaatctgaatctatttgcaaatattgttttgcaaagaaattcaagtatgagccaaaaggtttttgttgtgcaaatgaaactatttctctattatctaataatgtttgtgatgtctaagatgaattgtacaatctttttatagaaactgataaa

SEQ ID NO: 210237 - DNA, 635 bp, Cannabis indica
aaaaaaaatttccaacatgagatggggtagttttttggaagctcggggtcgggctaatgtgacaatggcatgtgaatttctcgccaattggcccgagcgcagaaatggggaggtgaaggtgcgaggaaagaaggttcccgccactgctgatgcatttaatgttatgttttctgtcccggactattctagggaggaacaactcctccgaattattgaggaggaagagtagtttgatttggtggatgtggctgagacagtgggattcccggggttgaggttccatggcaatgatggccaagatgggtcgccaaacatcctatataggtgtgaaataaacccggtggcgaagacatggctgtacttcgtgagtgctcggttggtgctgaataaacactttttagatgtccaaatggataacctcaaatatgtgtacgccattatgaacgggtacaacataaatattggacaagtcattagaaacaatatcgagcaaattgtacaaggagccattggaggtggacttggtttggcgggggtcataactgaactctgcggggaatatgaggtgccacaactggagtatgataacactctggtgccacttcgaaagacggatatcacgtttgtcaacaggc

SEQ ID NO: 210238 - DNA, 727 bp, Cannabis indica
ttttcaacagtgccatatgttttattgtttcttctgaaacgatgtttaattggttaaaaatgtctatggccataataagcaatttttttgtgcgaacaaatagaagctgttgccacattgcatgtaggacaagcataatagccttgaccactccatccaaaaaaacaaaaaaactactccttgttggatattcgtttatagtccacaacaaggtcgcctaaagattgaaggaactaccatcaatagcatcccgagtacgtacactagacacccaaaattctttcagttcatcaatcaatggccttaagaaaatattaaagtcctttccaggcgaatgaggatcgagaatcaatagactcaacatgaaattagtctctttcatacacaaccacaacgataaattatacgtcgtcaacataaccgaccacatactgtaagattgactcatgttaccaaaaggattaaatccatcaacagccaaacctagacacacattccttggttccatttcaaacattggattatttcaatcaaattcttccaagcctccccatctgtgggatggtgcaacacacctttttctttgatacattcctcatgatgtcatcccatgtgttgagcaatatgcctcgatgcatatattaacattaactgaggagttaaaggaaaataacacatcactttatgcgacactttcttgccaatggtgttgttgtccacccatcga

SEQ ID NO: 210239 - DNA, 891 bp, Cannabis indica
atacacccaatcataaacccatcccgtgtcccatactatgctgagtctagaacgttcatatgataatactatcgaccatgatatcagcctatactcaatatgctagtcatactctgatgtgatagcatcgatcagtatttgagccaaatatacatttatcagtatctaatataactttatgtatactgatattgctattaatgtactctaataggcatgaataacatgtatgctaaacatgtaaatacacacgcataacattatactaatcttaccttgtttccaaattcaggtgtgtcggccaacctgagtggaacaattgctcgacgaattacaggccccgaaatcacatcattcgtaacacgggtaagtgacatgctaaatcacatccggggacttaggtttaaaaccaaaagttttcctactgaagttaacatggcaataccctaaactttcaagaaattaaccaactagagccctgaactaacacaaatcgacaacacaaaaagttcgggaacccagctgctgatccggttaatcggttttacatggcctataaaaccggtcaatcggttttacaccaggtaacccaaacaattcgaaacctcaaccgatttgaatccaaaccttaccaaaccttctagacctgcttaatataccccaataaacataacccaagcaacagaacaacataacatgctcaaaatcaaaattcacctttaaagagccaagcttgagttctaaaactcaaagcttgctcaaacaacactacaactcttaaatctacctcaaaacaacatgaataatcttaatttaactgcagaaaacaatttcaaacaccaacaacaactacagaaccctaatacccaaatcatccataattctcaactt

SEQ ID NO: 210240 - DNA, 880 bp, Cannabis indica
ctttatattattaaaatacatgttggtactttgtgtttttaataatgtttatttagtatcttgtatttttacattaatacatattataaaattttatcaatacaattaaattgtctaaaattttatgaattctgaattaaaatttagttatttgattacagataattgagaactgtttggttaaatcgataaaattgtattgattaaattttactttaaggatctaaatatgtacaatttgaaaatacgaggtaccaattaaatattattaaaaatacaagatatcaaatatgtttttcataaaaatataaggtactaaatgagtatattaccttatttaatttaaaatatggggttcttttaacatgcatacatctaaaaaggatgaactgctgcatcccttatctattttggcatcagaaaaaaattaatctaattttttttatagttgtgtatgctatatttatttaagacatcatgtaaaattgtaagaaatttggaataatttacaatataaaaagtagtgtttaaacagactatttcacacgcgtataaaataaatgagtcacacgtgcaatagattatttgaaccttatttttggtgtattaaatttctacaaaggtcacaaaattttacaagatatcttaaataattacaacatacatactataaaaaaatagattaaaaaaaaattttgaatgtcgaaatagatagaggtacatcggtgcatccattttaaaagggtacattgttaaataaatttaaataatttaaatattaatttttgaaaaattctacaatgcactcccttaaatggatacaataatgcacccctatctattttttggtattttagttttttcttcatggtcatgtacg

SEQ ID NO: 210241 - DNA, 804 bp, Cannabis indica
atagttcatctaaatgaaaaggtatccaaaagttattcctcaaaagttatttgtctcccggaagtatgttcccagactgcttacttgtccatttgaaaaaggtcttgtggaatgatggttgccatccgaaagggagttcctgaatgaccatcatgtccactccaagtgtagtcctcgagaaagttatcattccttcggaaaggagtttaggatggctagttgtttctctaggaaaggagtctcggatagtcgagtccaactgccactttcctatcagggaagtttttccagcgagtgctttactccgtgattctggaagccttcatacacactcctggatgcactcatcatacttatgctgacgtggagacctcgctcaaagaagagttggttattgcctaactaacttaacaacctcgcttcttgcaaccaccgactttacgatcttgatccttaacctattaacatcaccaatacttatcttttcaaacatgacgatcgaattgagttttgagattgagagagaaaagttgaggggtagagagagaaaggtgcagagaaaagagagagattgttgcttgtgtttggtaatattgtcattgctaattgtttgattatcgtttcgattttgcactattaattgtaatttttccacatttaggctattaaaattcttccaaaactaaaaacaaaattattagatttaaaaactccatctaatttcgtaaaattttactgagagatgcttaatgtaatgtgacgattatttatgtgttatctgaactttgatatgaattaaatcat

SEQ ID NO: 210242 - DNA, 575 bp, Cannabis indica
atagtatattgctatattttagccaatacacttaagcaatgaaaaataaaaataaaaattatgagtatctctaaggaagtgctaaaatatagtatattgctatattttagcacacttagaaagaatactactctaatagtgttctaaaatgtgtgttaaatttagtacatactaaaaagttgtgccaaatttgacacaaaatatagtattatgtcaaatttaacctacaataaaatgtcttttttttttatttgttgtaatatcaataattattataattaattgacttttagaaaattttatcttctttatttaccatattatcattattcaaacaataaataattatttttgtctattctcgataaaatattaaataaccatcaataaaaatataatttttttttacatcttgtgcattagagcacaattataaatagtgggttaaatatagcacaaatttatttttataccaaatttaacacaaattttatatcttgcattagaaaaatagtacactcccctaaatggttgttaaatggatgttttggtagaccccttttatttttttttag

SEQ ID NO: 210243 - DNA, 681 bp, Cannabis indica
ggccacataagaattttttactgcctttgtaatctctgtgtaaaaaaatctggttttacagtgtatagctaatatggggtttacttcaacaaaaaataatcattagaaaaatatctaatatcttttaaatatctaatatcttttaaatatctgatatcttttttaaatatctaatatctgatatcaaatatctgatatatgtaaaaccttttaaaaaatcaaatttaaattacgtataatgtgtgttatttagaatgtacatttatctttttatttacttatttaaatccaaattacattataaatatattattactttgaaaaaatcaaaattaaatgaggtcagtatgttatttaaaacgttatctttttattattttctttatatcccaatcatattattgttaggattagcagatatcatatccacttatttataatttatactatataaatacataaattccagaagcaattcatccaataaataatctcttataccctcatttaactaatacgtacaaaaagaaaacgatcgaaattgtgattcaaaaaaatgtggggtttatgggtatggttgttgtcattcttcttcatcctaactctgatattacttgttggttatcagctcatatgcttagtggacttagattcagactatatcaatctatatgattcaac

SEQ ID NO: 210244 - DNA, 538 bp, Cannabis indica
aaaaaaaagtcctactcaaatcataactgtcattataattatattattaagtacaaaaggatatgagaaagaaaagaaaagaaaaaaaaaaagaagtgccagattgagaatgccagcgttgccccaggggcactgattgtagtcacatttttcagggggccaccagtcaagagttgcacatataaaattgtcgtctgttttggctatagaggattctcctctaatcgttactcttacaaattcagatgatgaaattggaagaaataatacaacaaaattaaacagcattactttcattactatcttcattattatagagatgtttttggaagaataacaattagatagtttattgttttattactttgtttggcttgaaatatgtatattatattaccttctttgtgcttttaattaggaacatgtactgaatgttatgctacatttcaggattgtattctcttttttattataattattgtttcacattctttgtgtttcgactttgaagttgattcttgttacttttttttttttt

SEQ ID NO: 210245 - DNA, 540 bp, Cannabis indica
gtgatttagtatgtttgtttgtgataaattatgcaagagaaatctgggaaaattatgggggtcgtggtaaacgctgtgttttgctgtttttgttttttgtgcgacgttatgcgattttatatgtgatgttgtgcgattttaacctaggttaatacattttgggtatgtttggcgatatttaggcgacattgtgcgatgtttgtgtgatttagtatatatggagtaggttatgcgattttagcaattttatgcgatgtttgggcgatgtttgtgcgatgttaactgacaggatcttgattttttagttgttttgttctgcattgttttagcgatattatgcgattaatgtgcgatgtttatgcgactcttgttgacagtggcctaatttttgctgcctttatgtgattttaggtgatgtttgtgcgattattatgcgataaaatctaaataatctttttaaatgcagatggctcctgaacttattctcccattgtcaaaccactttccagggcgtattacatacagagggaacggatactt

SEQ ID NO: 210246 - DNA, 678 bp, Cannabis indica
ttttttttccataattctaatagttttgaatccaacaaaataagaattttttttcaattttttattggttggatctggaattcgggtatgggtgtatggttgggttcgagtccaggtaaaatctaaggtttgggtcatgattcagggtggggtcaggtctaggccttgaagttcgagtctggatcctagattcggagtacagggtcaaggtcgagattaaaaataaaaataaattataattaagaaaatatttgtttaaattaattttgggtaaatagaggcataattacccaaagttttatgtttgtaagcggtataaactcaatgtttatttttagcggtataagtacccaatgtttgtaaaactgtaattttgttccattttcgtcagtacagactccgttttaaatttattaaaagaacatttagaagtaagtgatactacatatttctatctaaacccaatgatcaagaatttaggctttatatgtgccctatttaagacaataacagagtctttactgacaaaattaaagaaaaaattacaagttttacaaacattaggtatttatgccgctataaataaacattgagtttatgccgcttacaaatataaaactttgggtacttatgccgttatttacccattaattttggaaaatttcatattttggccct

SEQ ID NO: 210247 - DNA, 598 bp, Cannabis indica
aataaataaattacagcgtgtctttcccatcaccatgcattttcctagaagattattaaatatagaatttgggcactatttttaatctaacagtaacaaactaaaaaataataaaccgagaaggagagaaatgggtggcagaaccatgcatgttgatctccaaataatcacccgaattcagacatactcttctcctctctccactcaatcttcagctaataatcttaacctcttcaacccaccagttacagttaccgtaccggccattaatggaagtgggtcttcttcttcttcagcttctcaatctgtttttgggcctgttccatcccaatccgaagtccaaactgctatctctcttttccaaatgtcagtaacaactttactcatctctaaatatgtatatattatgcataatttatctttttgtataaatttatagatttatctctaaactagtttaatcgaattcttaaaattgatttttttttatttaaattcttaaaattgatttagttccaaaaaaaaaaaaaatctattacaaatcatttcatatttattaaaattcgtttctttctctttttaaaaaaattaaagaaaa

SEQ ID NO: 210248 - DNA, 1054 bp, Cannabis indica
ggtgaaatatttattttgggctttcaataaaacaaaaatatatatataaaaatatttgggggttgaaagtgacctgggaccatacttttttattgaattactctctttgctatgcacactcacacaaccaacatccaatatttaagcactatttttatgcttagccactcatttcacattccaattttaacaaattctatcaatgttttctcagggtcacttatgtgtatgtgtttttggactaagtaatagtttagggactcctcacttatgtgttggtgtctttggacaccccattggcattcccataaaatagtttttttcataggactagaaatagtttaataatatacactgtaaaaatctctggtctgttggaaagtcgtaccaaaaaggaaaaggcataacaaattatctgaagtctgattttatatcttatataatttataatttttcaattttctaaaaaactacaggatattctgaataactgccaaaatagaaaggtaggcattgataatcatttttaggaatttaataaaagaaaattgaaatgtacaattttcataaatcttgaaaaaaaattcattacaatagaatgtaattcagaagacaaatcaccctcttaaattacacagtctgaagagtaacaagagccacgcgccaaacgatgagtggctttatcagcagactacttgacaaaacaaatagaaacattacaaagattaaataattgcatttcacaatccttattaaaaagactgaattcagaaaacatgtacaaaattattgttaaatagcttgaacaagcacaaggctatccgactccaagatgacattggaccattgatgttcaaaaaattcagctaaaaggcttcctttaatatccactatctgaccaatttcacgaaggacaacaccttgtctacccttgttaaaaaacttccttaaccctcccactatggcctctagccaaacagcccatgccaaatttacccactttagcaaaaaataaatactatcaacattcactttgatcatgttaacataccgg

SEQ ID NO: 210249 - DNA, 769 bp, Cannabis indica
tacaaacctcattccaaatattaggaaaattagaagtcctcctaccatcctcaagcttaagacatctaatataattattcctctttctagaggaagctttattttataatacttagtgtttttgtcaccagctagccttcaaccaatgaaccttcgatctttgtttccaaaaaattttctacttataaaggagaatattaagatgagagtgaaggttcaagaccgttttccatgcctaacttgaaacatggatatttgaatgaatattattgatatgcttcgcaacattgttaataagagtattaatattaccaaaagaattgttctaatttttgatagctttaatacaattatgttgtttgaggagaaaataattaagataattaccattataaatagtattattcttagtccaggaactgttgacactgtcatagaaagaagccttgattagccaatagttttcaaacataaaccttttattgccatttttactcatactattatcgtaacgagttagcttaagaactctatagtcagaaccataaaaactaaggtgatagagagtggccttaggataagagtccagttagcttttgttggcaattccccaatccaaacactcacaaattgaaccatgtttccaagtgaacttattaccaacataattaaggagatataaagaaaatttattaacaaagttttgaaaattaatcatggcataactaggaggactggagttactactcatatcactaatagagaggta

SEQ ID NO: 210250 - DNA, 974 bp, Cannabis indica
tcttcttccatcttggtctttttacatagagctaaagtttcctcttccttctcctcaaagaagctggtatccatgttagggttccaaagctaggcccggtatacagcgcgaaaaccaactttatcgcaccgttctacggtctcaatttctttctcagcaagtttctcagtaagcttctcctcaaactcatcaacttggactttgagggccttctcggcctcctcttttgccttctcgacttccttctttactgaatatgcttcctcctttactttctcagcttcctgcttgaggtgggtaatctcctgttgggcgttgtctcgttgctcacacacatccttgcattgggatattaatttgtgagtctcaccctttaaatactcaagccgctcagaaagtagtcgattggaagcaaaagaagcaaaggaagcctggagaattgctaacagatgagtataaaaggggtataaaaagatagtataattatattaacaaagtcaacataccatgaagtgacagtccaaggtccttaatagcatctcctctgaattcttaagattgagaaaatcccaatctgggggaacgagagtttgaagtttgcaccaacaagcgaccccgtatgcttgggcaaactcagagccagcctctccagctgcgaccgatagggtctcgatggcctgactcggagaagcggtaacacgagtcgcctcaggatgaggggcattggcatgaggaacaactggaggaggaacttgctcttgaatctcgttgtctgaaacctcaagatcaataggctcggccggtaacttcttcttttgagcggtggttttcctttgcttcttgggatgaaccacctcggtggcaatgtggactctagggttagatgacttttcttccccttacgatctaggatgtcttcataacccatgtttgcaaaatgagatgaggcgctacaatcattataaaagacgatt

SEQ ID NO: 210251 - DNA, 723 bp, Cannabis indica
gtacaaggccagaagaatgtccttcactagaggaaggaggactagaacaaagacgaggttgatccttgtgcagaagttgaagcaaatcctggtcgatccgatgtctgagttcccaagacgcacctgagttcatctacagaagacaacacacaagatgagtgttggtcggaatatcgaacaataaacaagcaaatatgtcaaccagaagtactcaacagattaaagaacgactatgtttaaagaaaagtcagaactcaagaattcaaaaatttttcttgagttagggcaaaaaagttcatgaagcttagaacaagcaagatgaaagtacggacgttaccagttcagaaacaagcaatatggctgtaaacccgcatgaagacatgataaagaagaatcgcaaaggtttctaagcctagggtttcctaagcatttttctacagcacagtagaagttgcattcgaaaatgtgaacatgcaaagataagcataaagggaaattagaaacttactcaagattcaagtgtctgggttcaagcaacgtctattcatccagtagttctacgaaggcacttcagcgaccttgaagctaagaaattttcttttcgctctgaagcttacttaggtaaagaagggtgatgaaatgagtttatgtgctaatgctgtggatatttataggcaagtcacgaaaatagttaattgtttctaaagaaacctcacgacgcct

SEQ ID NO: 210252 - DNA, 867 bp, Cannabis indica
cttcattggtcttcatccaatttgagccttagtgatagagtgtcatcgcccacacatagcaagtcaagtactcaatcatagtgagttagaaggtggtaaccaaacccgaaggagagaaagagatctagactcagatattgataatactctacgacaaaaaagaacaagagttagagatctaagcggaaggagtcattatattccgctgcaaccaatgtaagggtttctaaactcttatgtgtttaattttattgttttagagataattcatatttaggatgttaatcaacatacttgttagtaaatctagatcctggtaaaatattcccaaacaataataattgtaaaaatctttaatgcaaacacaactgcagcgagttctaggttatgagtgtggtaacgtttgtcatactccttcaactgttaacaagcataagcaatgaccctattagtttacatcagaacacatcccaaaccctatttggatacatcacagtaaaccacaaacttctcttaatctgatggcaaagctaacacaggagctataatcaaccattgcttcagctcttgaaaacaagttccaaagttatctgtcatataaattgctaattcttcttagttaactcggttaagggaattgagatcgtagaaaacccttccacaaagcggcgataatatccagttaaacccaaaaaaattctgacttcggtgacagtcttttgtctcgaccagtctctaactaacttgatccttccaggttcaaccataattccatccttactgataatgtggcctaaaatggacacttgtcataaccaaaaatcacatttcttgaatttagcatgtgttcccgcaatctttgtaaaa

SEQ ID NO: 210253 - DNA, 647 bp, Cannabis indica
aataatattttttatagtgaaattaaaatgcataaataaatataaatatatatacatttatatattgatacataaagggttatttaaggacaattcttgttttaacatgtttcttttaatttttctaaactttaacagttgatgtcaagtttgaaacttttttgaaaaaagttcataaatagattgataaaaaatttataaaataatacacatagtaattaaatattgtaaaaaaactagataacaaaatatataatctgtaggaagttgaagactagagctcgtttacactattttggtgttgcggatacgtatacatgtaatggtgtggtttgtgatgttaatatagggaagatgttgatcatcattgcacctcgagtagattttgtcttcacaagattaaagcttggggtggaaaatccatgaagctaatgtttatagattgtttagatggttacgtcgtggacatgggcattcacatttttgtaggaataatttccagccgggctgttgtggcagtgttagtgtatcagggctcgaaatgtggccttccagtatctcaaagttcctagagttagtttatagtcaccaaaaattaagagggatgtcttagctcggtctaattattacacataaaaaaccatata

SEQ ID NO: 210254 - DNA, 456 bp, Cannabis indica
ctccttcacggacttaggtacaaaatctaccagtaaagctggtacttcacaaagttggcatctgtggtcaacaaagtgatattccgagcagcctcttgcagttggagaattctttgaaaccgagtatgagcagtctccatgccggccacaaagtagtactcgttaacaaaatgcccaatttagctaaccttcgtatccacagtgcccgtcagccacttgtcatctggctgagagaagtaaaagtaccccgaccttctctacttggcggtagacttcaaatcaaagagccagttgatttcgtgcagagacggcacaccccatccttgaatggcgtagaggacgaacatggcagataagtacttgattcccttgggtgtgaactgggtcagacaaaggtggaagtagtctgcaaccctcctgaagtacaggtgcaaaggcagcatcgccatttttttt

SEQ ID NO: 210255 - DNA, 659 bp, Cannabis indica
tattatttctcaagataaaaaacgaattttaccaattaatactgcatgcatgtttgtttgtttttattcaaatcaaacatgtgtgcaaatgtcgaacgtttcgttaattttatttttatttttgttgttggattgaacagcacacattgaaatttgaagaaggattcgattttatatatgcaatatttatatgcttcacattttgattctttgattaatggtcccaccaagccttttattttaatagcccatctcttaattaattaagtagtttttggaatttagtatatatcttgggaatttctcattcaggaaaagatctattgcgtttttttctttttttatttagtatatttaaggtggttcataatataagaaatacttataaacgtgtacagttacgccactgaaaatgaaaattgtatgggtaattctgtagtagagagtgcttatcgtagatattattaatcatatattatgtatattataactatataattctttactctagaattttatactttagctacatatgttatataataatgcttccatggtataatagtatatatgcggctcagatatgtttaaatacttgaaatttaataaagttagctataatatgacagcattaactacaaatgtatttatctaattaa

SEQ ID NO: 210256 - DNA, 640 bp, Cannabis indica
tcttttgcagatcaccatgctttcttactcccttgccccatcccacggccgacggtttcctagacttggagtccccccccacaagattggttgaagctcaactgcgacatcagaatggggttggattgtatgtttgctgttgtggttgcaagggatcatgttggcaaggtgatctgggtggctacttcgaagctggaattttttaatgttctctgtggggaagcgacaacttgctctttggctcttgaggaggctaaagctcgtggtgtcgagtttcttattgtggagagtgattcgagggtggtgatcaacgctcttaattggatggagtctcgctgggagcttgctaactacgtctcattttgtaaaaacttctcctcctactttattggctgtagttttcaatatgttagtagacaatgtaattatatggcccataatgtggctaagtttgctttttcccatcagagatttggctctgtgccaatttcctcgatgcccaatactatattttgtaatgaccgagaggtctaattgcttttgttttaatatatgcacgcttttcttcaaaaaaaaaaaacgctttttaaaactcttagggatcgtctggtatgcagtttttatttcatgggaataggtt

SEQ ID NO: 210257 - DNA, 816 bp, Cannabis indica
gtgattctgaaaccgtaaagagtccaccccgaaatagaggattcatcttctttcctattcttgtgatagtaattgccattttatgggttgtgctaggaactgtgaaactatggggaagtagtagtagcaacagtactagtattgcttcatgaaaatgtgtatattgggggggaacaattttggctgatattgatcttaaaattaatgggaaaagatcaaagaaagagagagggggggcagatttatatatgaattttggttgtaagggtcaacacgttcgtattgttaataggggttatatatgtatgataagagagagggggtgtttgagttagtcttatatgaaattatgaacaaatgcatgtttaatttttagtatattcatcactaacctattattcttttgtgcaaaagctctcttttttctctctttttgctatgctttgagtcagagtgtaatgatacttgcagacaagatatggtaaaacaatattacacacgatgacctgaccattgttttattctgtaactttgatttaatgttgtgttatgtcattctgtataatgttttagtgcatattttgttcaaagagtgagaagctgtttacgagccactggactctctgttgttgatcatcagagagtcagaaagattaggtatctgttcgtgcaagaattttaagtttttgtccgaagctgtttgttcgagccacttgactctctgttgttgatcatcagcttgcaaaggctgcagactaactgaagagtcatatggcaaattgtaattgaggttcaattttgttagaaagattaggt

SEQ ID NO: 210258 - DNA, 433 bp, Cannabis indica
ttttgaattctattttagttacaatattaaaaaactaaaattctcaaaaacttgtgggatacttgctataacttcaatttacactttcatataactctttttgtttttgttttttttaattagaaaagtgaatatattctccaaaattatgttttataaaactgttgtcactttttaattttttaattgagaatcaaattttttttaaaaaaagttacttttaaaatttttttaaaaatatttttttaattaatattttagactccgaccccaacctaaacattggaacctagacccagactccgaccccaaccccaaccttaacattggaacccagacccgaaccccgaccatgacccagacccaaggcgggccttgaaaattagtgggacataagaaaaaaaatatttttagtccttatttagagtaaaat

SEQ ID NO: 210259 - DNA, 790 bp, Cannabis indica
gctcctatttcaccaagctcacgacaatttaaccagttaaggccaagactcccctgaacctatgctgcagcaacacaatatcatgatcatctcaaccatgatcaagttctttaatttcttaaaggcctcaatgaaagctaccatgttgtccgtgaccaaatactccttcttgacccttgtccccctcttaacaaagtgttttctatgactgtccaccaagaacgccgaagaaccattggccatcgcaccattcccacccttgttgctactacaacttctgcaccagcagcacaagcctctgaccctgcacctgctgcaaatcaagctttaagaaacaaaaaacctcgccccatgtgttcccattgccagaaacctggccactacaaagacaaatattattaaccaacagatgcaacaaacaaaagaaaaccagacaatgcttcatctacttgcaatcctcaaagcatgcaagtttccacgccgaccattgatatctcccaatcccatctcaccaattctcaatgccaacagattatttctatgttgccacaacatctccaacatattatttctatgttgacacaacatctccaacccacaaacagatgcatccacatctgttgacacacctactgccaacaattttactggtaatcttgaccttttttcctttaattattggataattgacagtggtgcaactcaccatgtttgtgctcatttacaatgctttcaaacaattaatcatgaacataatgcaaaaactgtcaatttaccaaatggtacctct

SEQ ID NO: 210260 - DNA, 736 bp, Cannabis indica
catgatatttatgcactcataccaaaattttgtttgttttcatacctttcctatactttctttctgttttaagaaaaaaaaagaaggaaggcctctattttttaatgtgatgctattacaagtgcattatatcacaattttggtgtccaaaaagatagcagttgcttcagtttatagaatcgtggttgatcattgatatttttacaagtcgagcttattattctgatcatcattatatcattatctcaggtttcatgagttcttaaagctggcaaatgaaatcggaaacataacaagacaagaggctgttagcatggtaggtctattttgtgtcgtttgtctttctggaattttacttacaatcctaatttttctttaaacaaatgcatgcctagactatattgattttaacatagagatatagggatttctacatttggtttttgtagaaaatggtgaatcaaaatgatgtattttattcaatagaataacatgtatttatatacgaaattagagagactgaacttggtaactaagagagaaaatagcaaattaagtaattacaactaattcctaatgtattagctaatttacagctaatacattctaatactcctcttcaagctagagcataaatgttaatcatgcctagtttgttacaaagataatcaacccgcaccctattcaaagcctttgtgaaaatattccctaactgctctctagtcttcacatatct

SEQ ID NO: 210261 - DNA, 593 bp, Cannabis indica
gggcttgaaaaatgagattcgccaggaattgatactatctaaacaagttgatttggctgatgcaatggccaaggcttagttatttgaaggccgcaatgacgatttgtaaggtcgtacttgtaacgagggtgtgcgttctgcttggtgagtaagatattcgaactcaacaataacaatgacttatcaaggtataggtttagcctccatcggatccaactctaatgtaatagtagcctcaaagattcaaaaacctagcagctcttccttaccagttaagtgaatgtctcctgcagagatcaaacaaaaacaagagaaggggttgtgttccacttgcgatgagaagtattctcttgcgcataaatgtaggaatcgagttcttgtcctttgtactcaagaaaatgattgaggtgacaatggtgaacttgaggaggaaagcctcgattcaagagttagaggatgggttagatgatgaggtaagctttcattccttgtccaactctattaatcccagaatattttgcattttagctcaacatgcattcgaatccctggaggttttaattaacactgggagtaacaatatttatcgaaga

SEQ ID NO: 210262 - DNA, 1060 bp, Cannabis indica
ggggtgtaaatataatgccccctaagtaaattgccattgccaccataatctttaattggtcgacgttatgaatttttaatttgttttttttttaaataatttatatataccaataagaaaattataggtggatgatgacttgacatttaacggtcaggtacttacaaaaatctataaatttaacttaagtattattaccgccaaaaattaaacttagatatttatttgcaactatgcgttaaacttagatatttatgctgtaaatactcttattttttctctgattgcaaaagatttttctcattttcttaaaaaaaatacaccactaactgataacttcaaaagttttttttttcctttttacttattaaaaaaccaaacttcattcaaaactggaacaaactaacttaaaaatcaaggctccaacgaatgggcgaacatcaaaaccaaaaaggaattggcagaagtctgggacacagcccactttgccaaattgtgagtagaaatattaaacttcttaagaatccatcaaacatcaacaacattaacaaagttaaatctccctaacatctgctcaaacatcaaaaaaagcctctaggaggggcactttccgcttcaattgacttgcataagacttggtagtcggtgaaaatacagacctccaaccaattagttttgcaactgagatctaaagttaagatcaatccatgaagctcagcttccaagggagaagaaactgaagctttttttgacttagctttaacaaggttgccttttgcattatgaactagggctacaacaaatacagtctatccacgaatcgctggatcaatgaaggtcatggtggaacatcttagaaacaacgttggtttcaggggttctttggcaggttaagaggaaacactactattggcttccctccagtcttggacctcggtgagaaccctataaaagatagcttaaggggattcaattgacccatcatggaaagctttgttttgagccttccaaagggcagaacatagagtgacagccacgtgagtaaaaagaaatttatcat

SEQ ID NO: 210263 - DNA, 505 bp, Cannabis indica
aaatcttgcttagacccattttgtaaaaccgcttcaaccacacagccaccgcaaccgctaccaccatcatcaccaccttcatcatgatcgtcgtcatgctgtcgttaaatttccggttgaagagcttcctgataaggtatttttatatttaaatctcaatcgtaatcgtaaatatataaataggtaaactaagtttattaagtttccttataggaagagaaattagttgtcatatacatatatatttatgtatatatactgtataaacttcatatttcaacagcaattaatgtgctgtgttaatattatttctaataattatgctattatattgtaggacaataatattatgagcctagaacttaaaattattggagttttagtttagtagtcttttcaactcaaagaattaggctaaaagacttaaaatgtgagttcgaatttcgttttctcaatactttttatacagtgcacattattaattatgagctttagattttttttt

SEQ ID NO: 210264 - DNA, 742 bp, Cannabis indica
acgtgtacgaattaagtatttttattttattactttttcaacttttataaacatatatatatatatattaaccgggatcccgtgtttaaactttacaatcatattcaaaataactattacaaacatgtcgcacaatgactacaaaatatagcccaagtcgtcccgagactgaactctctaggtcgcaccgtctcgatatgtacaatcatctcttgagctcagaattcactactgttcatctttgacctttccttaacctacacatgaaagtaatatttgtgtgtcaacagactcagtaagaaaagtatataatataaaatatattatcgacttgtatctatgtgcccatacacctatccacaaggcttaatagatgagtaataatattctttactaaggtacgaccactgtaccacatgcactacgtaccgctactatatgagtgttggtaggtttaaacagtacctcgagtaccactaagtgttgtaccacatacactacgtactcaaccgtactagtgttggtaacaacgtattgtactcgttgaacatcatacactataccaatgcactcagtatcgctacggtactagtgttggtagtatacgaatcacaaataacatgcatataatacacatacacttattcatatataattacattctatgctagttttaccttgtttccaaattcaagcgtgcaggccgaactgaacaaaatatcacgtgctggatggatgccat

SEQ ID NO: 210265 - DNA, 835 bp, Cannabis indica
atgtttatatcttaaggccatctccaattacatacttaaaatttatatagtgtaattttctccacaaaatactttaatcgagctcaaaaattcatcctactttgatggaagtttacaatgtctcactaataatagtaggcacggtggaccacaacattcttttttttttatatatactttttaataattaaataatttatttatgaaataaatatttttattatattaataaaataacattataataaagaatataaatttcatggttagaattttaatgttgatttaatacttaatttgagttctggcattggagttgcccaaagtaacatgtaccatatttgtagtggtatctaaataattttttatatacataatatttataattttgttattgcaggtgtttaacgagatcaacagccgtgatattgagaagataaacatattccatggcatgtttagcagttgggtattcattggtgtgatgtttatcacagtagctttccaagtgataattgttgagtttctgggggcatttgccagtactgtaccactgagctggcaactatggctactcagcatcggaatcggatcaatcagcttgatagttgcagttttcctgaaatgcattcctgtcgaaaaagaaaattaacattaagcatcatgatggctatgaagcactcccaagtggtccagagcttgcttaaacttcccctaaggtgagaaaaaagacttatattttcttttctactttagtgattggaaaaaagaaaaaaaaaaaaaagtaataataaaaaataattaagtgattactactacgctgactgatacaatt

SEQ ID NO: 210266 - DNA, 669 bp, Cannabis indica
gacaaaagttgctaccaaaatcttagagacgtttgttgaataagtattttcactagaatgctagaattgatcaagaattgttagaactttatatatggtgatgattagtgctcctgcgattgaaatcacagtgcccatgactttgatcttgaaaccaaaatccttttttttttttcattctacaccaaacaagacaaattcttaaattcaaatttaatataagaaaatcacatgattgggagagaaagaatttcacatctccttttttatcttaatctttcttctataaacaataaattagtacttgaagaaattttcaatagtcgcttaatctttcaatcatctaacatcactgatctcactggtcatgtagtagtttttggcttcaaatccacatgtccatcttcaccctttaatacattaaccacctatattgatttggtcaaaaagataaaaagtgcacaatctatcaatcttgccttgttttggatatgaaaaaattaagctaacttgaaagtgaaaaattaggctaacctaattcatatacatgcgattagaagattgatcgatggtgaatgcacatcaaaatatcccactataatttctgactacatttaaaaataaaactaatataaaaaaaatatcttacttttaaaaaatttaaaatat

SEQ ID NO: 210267 - DNA, 789 bp, Cannabis indica
cttacaaagacataatattcattggcttttctacaatggcttatcattaaaaaaaaagtaacatctttttcccaggtggtttatgatgatgtatacatgctagatgctgaaatgaagtggaaaactctaccaccctatgccaaagcctaaattctcatatagaatgtgcttgggtaatagtcaacaattcaatcataatcactggaggcacaacagagaaacacccactcaccaagagaatgatccttgttggagaggtcttccaatttcatctagactcactggtatgtatcatatttacttcacctgatctacttttatatatataaatattttttcaaatgttgctcatagaaagatatacttgtttttttccttaaactaaacagacatggtcagtgattggaaagcttccatatcgagtaaagactacattagctggtttttggaatggttacttgtattttacatctggacaacgtgacagaggcccagacaatccacaaccaaggaaggtcattggagatatgtggagaaccaagttgagtttgtgagcttatttcttctttttctttttttggtataagatgagaatcagttgttcgttacaatacaaaagattttccttcaatacaaacaatagcttattgtacaaagttgttctcgagtagatatgctatgttctttgtcaaattatacatagaacttcagccaattataactctggtctctgtatttggttataattcacagaagtatagcccacaatcttcaattcattttttatat

SEQ ID NO: 210268 - DNA, 859 bp, Cannabis indica
gtacattctaactcataattatactccacagttgtagggctctccctcccctcctacccttccctacctttagatttatcttcttccttagcacatgaaaaatgttctcaatcacacttatagattgagcgtttccaaacttttcctgctatttttttgcttttacaacttggaaaccatccccaaccaccaccacgaccttcttcggatctaaaactttcccctcatttattttctttggagcccattctttcctttgactatcttctttttgcaatccaggaagtttgcacattgaatcagaatccattcataatgcacttggacatccatgttcacatctaactaattcgtaaaggagatcatattaggaaaagcttaatccaatttaacctcaatcaaaactcgaggattagataacctctcctttgattgaataatttgataagcttttagtggttcccaatctgactagcaatctcgaatagtgccttccctccccaatacatgatatcaaacccttgtagttgaatccaagttggagtcgtgaggacattcttcttcttataatttgtatgttccattgcatgaaaatgaactataaactccccatgattaatcaaacccaatttatcaacctaatctcccccacatccttcttgcgaaaatagcaaatggccctatgggaggattaacccccaagacaatgcacactaaagaggaattccaaaaggcaattatattttcaatgcccactttaattccctcctttttcttactcttctattcctcattcataccataaaacaaacttatgtggtattaagttgggagggataaaaatatagaaataggaatg

SEQ ID NO: 210269 - DNA, 757 bp, Cannabis indica
tgtctcccatctggctattcgttctaattttcagggggtgtcttattttgcataggtttttcttcccgggccttttaccgtctcttgcttcgtgagccatgaggtctgcctcgtggtcttctcactccaggttcaagttgattttgagcatttgtcccctgtgccgccctggccgaggctgcatcacgctctaactcagcatttcgactttgtgcctcttctagacggtgtctcaggcggcggtttttcgtttcataagttccttttcccacagattggtcacctccacgattgagcttttcatccctcatcccagggttctaaccactcccacgctgagttcttctcgagcgtgttgtccgcgtactaagaccaatgtaggtttgggttcttcgggaacgtgtggtccatacactggggccacccttaggttgggccctcctagaacgggtggttctttatgaccacgagtttgtagaccttcggagcccatggactctttcctagaacgattattagtttcctcatgtggggtgttaatattttctagatttttagccatgaaggaggtggtttttcttcaaaagaagggagggtttttttttttttttctgagctttttcatcgaggctctcaatgaaagcaccaaactgttaacgcaaatttttgttaactaaatttgagcttcatagtagtgattttatacaaaaaaaaaataaaagctatgaaagaaaaaatatgaaatccgggttttttt

SEQ ID NO: 210270 - DNA, 1028 bp, Cannabis indica
tctccatctgctcgctctcatagctgcccagcctaagccttgcccttacctacacatggaaatagcaactgtgagtcaacagactcagtaagaaaagcataacataaaacataacaatatcccgggttataattagtttcccatacacccaaccataaccatatccccgtgtcccacacggtactgagtctagaatgttcatatgacaacaatatcgaccataataccagcctatacccaatatgccaatcatgctctagccatatagatgtgatagaatcgatcagtattttagccaacatacatttatcagtaacagtacaactctatacatactgttactgctatcaatatactctaacaggcataaacaacatgtatgataaacatgtaaatacatatgcagaacattacactaatcttaccttgttttcgaattcgggtgtgccggccaacctgagtggaacaactgctcggcgaattacaggcccctaaatcacattgttcataacatggttaagtgacgcgctaaatcacaaatagggacttaggttttaaaccaaaaatctacctactgaaagttaacatggtaataccctaaactaacagggaattaaccaaccaaagctttgaaactaacacgaatcgacaacacgaaaaatttgggaaacccaacagctaattcggttaaccggtttacagggcctataaaactggttaactggtttacaccagaaaacccccaaaaaaatttgaaaacctaaccaaattgactccaaaccttaccaaaccttccagacctgcatattacaccccaatagacatattccaagtaacagaacaacacagcatgctcaagcaatcaaataaaaaattaaccattaaagagccaagcttgagttctaaacgcaaagcttactcaataaacactacagctactcaaaccagctcaaaacaacagatctaaccataattaaacctcagaaacacaattcaaacaacagcagcaactacagtactcataaact

SEQ ID NO: 210271 - DNA, 588 bp, Cannabis indica
tttttgcacaattattgaacttattggtaacatggaataacttatgtttttttattggaagttggaacttatatataatattcctccaggatgatgatgacaatatttactcactaatatatttcaaatacttttgctaagataaataattaaatctgtgacttatttctctttttctttttgattcaaattttaaaattatacaatttaataaatgagtttttttatttttatacttcaaaatagttttttttttgttgtatttttacgaaaatacacatagcaactcacataaaatcatactggaacaactcaaactgtaactttaaaaaaaaattcaaagatggtatgttaattgggtgattcgcctttaataaacattggtatactcatggatgtaaatttatattacacttcctaaaatggttattccagtgcatttctatttatttcggtatccaaacagatttttatttatttatttttttcataattgacattgtgtactaaatttaaatataggaacacttataaatttttaaaaaatttgaaataatagtttataatataagaaataagttttaaata

SEQ ID NO: 210272 - DNA, 718 bp, Cannabis indica
tgttctttagtactaatacctctccggaaatgagacaaataatttgtactagaatgggcattcaggaggcagctgagaatagcaagtacttgggactcccaagttcggttggaagaaacaaaaatgctgtctttggttttgtgaaagacaaggtgcataaacgaattcaaacctgggacaacaagttcctttctagagcgggtaatgaagtacttagtaagtcggttgttcaagccctcccagcttacactatgaatgtctttctcatcccagttggcatttgtaatgatattgagcgagctattagccaattttggtggcgatcttcttctaagaagggaattcattggatgaattgggataagctttcggctcacaaagctaatggtggaatggggtttcgagactttagagattttaaccttgcattattggctaagcaagggtgagactcctcacttgtggtgatacattgatggggaaaatttttaaagctcgctacttctctacggggtcttttctttcggctactcttggttctaatccaagttacatttggaggagtgtacttgaagcccaagacttggttcgggctggggttaggaagatggttggcgatggatctacaacaaacattttgatggatccgtggctagctgatgagttgaatctgtttattgaatctcagcatccaactcttgttggtaactccgtaaag

SEQ ID NO: 210273 - DNA, 762 bp, Cannabis indica
accactatttctgtttagcacaactaaaagatttggtcaatacatacatatcgtgaatagttttaaaatcatacttagaaaaagctcgaagttatagtaagttgtagtgctatatagtaattagtaattacaaacttttctttccttttattttgctatataacatatttcccaacatttcatcgatatatagttcttgctatatatatatatatatatagaatgtctccttaagcacctacgacttaagaggatcttccaaaagcttgacaagaatggcgatgacctagttagccttgaggaattgagttggcttctggagaggattaataatggtagtgttcatcatcagtttagcaagacagaacttgagtccttggttggaaaatcaagcctcaactttgatgagttcttgttcttctacgaatccatatcatcaaaacataatgatgaaattgatgatgaggttgaagagatcattattagtgaccttgttaaggcgttcaaggtgtttgatcaaaacgacgacggattcatctcttgtgaagagcttcaaagcgtactaataagattaggtttgatggaagaaaacagtactgacaaagattgcaagactatgattaatgccttcgacgccaattccgacggccagcttgattttgaagagttcaaaaccatgatgttgcttaccattacttcttaatcagcatgcccatatatatatttagctatatattctagtttcttttataatatatatat

SEQ ID NO: 210274 - DNA, 528 bp, Cannabis indica
atctttaaatttttttaaaaaatcacagtgatatttcctattcttaactactttctatctaggacggtaacaattatttatgaggtttgttttagatatttatttaaatttacatttaaaataataaaaaaaattactccataactaaaatctatatattttatataaaatgcttttatgatttttttgtcgttcaaaaaaagatgaataacaacaaaaaaaacgaaattattgtgatcatgaaagtatatttaataaacattaaatataaaattagttactttatagctaagaaaatatcagattaaatttagtggtttcataattaaagtacctcttatgtacttattaattatactctctagtctcttcaatgagtcattccatgatcaaaattagccaacaacataagaatgagttatacagctataaaaacagattttttttaaaaaaaaaataaaaacatcatatatatatatatatttcttaatttattaattaaatccaaacataaaaaaaaaaaaaaaa

SEQ ID NO: 210275 - DNA, 546 bp, Cannabis indica
attaattttgttatcatccataatcaaattatatacacatgcttaaattatgaagatctaatgacaacaatgaattggcgatcattgtagattacaagtataaagatattttcttctcgattcttagcttaatctttgtttactttttaattagtcgggagacttgaaatgtatgagactatgataatatacttcagttatgatttttttttcaaactttgagacaattttatttttttatcgtctattggattatgctattttttttaactttaaggcaaatttatcttttatcttctatggattatgaagacataataaatatttgtaagaatattggtttaatttaaatttaatttttttaattatttatttttattttttccatttttccataatagatacccaataggttccccataaccgatgggtattccccccaccctgaatttgcttgttattagacgggaatgggggcataaataggtagaaaagatgggggcagggattgcattcctcatatattaaccgcccaatttccatctc

SEQ ID NO: 210276 - DNA, 808 bp, Cannabis indica
agagagagagagagagatttgaaaagaaaaaacaaaagctcgtggcgctactttctcagccttactccggattttgtgccacccgccatacgttctaatttgaatggttactattagcggtggcctcagccttaaggaacttacacaaaattacatcataatatataccaacttttctaaatttttatcaaaatacgcttaactattttttaatatactgccaatactcttttttaatatataccataataaatgtgtatcgaaaattaatcttttttatatttagccaccgagaatcacaaactctctataattgtttgtttttttttctctaaaactctcttatttttttaacaacggacttttttatttatttatcttttttcgttttgtctattttttcttttttaaagacaagtttatctttgtcttttttgtcttaatgaaatgaaattatatttctatttttatttttttataatttttattttttaaaaattatataaataagatgatcattttattacatggcatatattttttttatggaaaaaaaatattcataataaaagataatatttttcctttttttttccttaatcactaaattttaaatcaataaaattagatatgacaatggattttaagaggttattaaaaattattttattattaataagttcttttatttttttaaaaaagataatatattaaatataattttttagtttccttttgtatttaattagtcgaaaaaaaaacttttgaattaaacaaaaattattaataattagataaagtgttatgt

SEQ ID NO: 210277 - DNA, 647 bp, Cannabis indica
gacaatttaatgaattcgatgttgttcatcgtaaaaaggaatatacaacaatgacaactgaatgcatttgatgttgttcttcataaaaggaatatcaagggaccattatgaaggaaatgcatggttcattgccttttgcaatgtgaaaaaggacatttgtttcataagctgaccttcaatgggataatataccatgtaaaatacgaacatattcatacaatgaagaatgaaagtttgagaatcatcataccctttttgtcaagattgaaaaaaactgattttggttggaaacatttctttacaaatagggcagtccctgcatactttgaatctgaaagagaccaccaaacacgataattattaaagggcggggaggacaaggcacgcataattatctgcaagattatggaaattaaacttaagttagtaacttagcagtacacataacaattgctctaagcaatcttttacatttcataggggtgatccaataatgaaaaatggtaactgtgaaaagtgttacctgtttttcttcacgtgatgagctagtatcatctttcaactctgctgggtttttagttgcccctttggagccagcagcaggcatcctcacttcctaacatttataaatggttagaaggttccac

SEQ ID NO: 210278 - DNA, 689 bp, Cannabis indica
gttttaaaggcatttttgacaacgacaagtttttttcaatgccagctacaatcattcggtgtctagtactcccaccaatttgcatccttcaaatagactattaatccatttaacaacaaattgtcttttatggtggaaattacccagtcatatttccccatgttataatattccaatcaaggatcttccggaagtctaaccccctgcttttcttggtaagcaaacttgattccaagttaccaaaccagggccaatggtatctgccgaacgcttccaaagaaaggccatgcacatattttccacatcttttagcagctttttgggaggattgtgatctgggcccagtaagaatgaatgacaatcaatactgagttaattagtgtaactcttctcatgtatgacaagtttcttgagctttaaaatttgatccgggcaaccattttctctagtatttcattacattttgatgctgaaattctttgaaacatattggtatgccaagatacctaaatggaagttatgatcttacaaaacctaacatttcaagcaaacgggtaaccactgtctctgtcattccaccacaaaacacagttgttttttcttcatttgggaacaaagcaaatgaagaggaaaagagtttcaatcccttcaacgttaacaatatagtgttggatattattttatcagga

SEQ ID NO: 210279 - DNA, 755 bp, Cannabis indica
aagagagatcgcatctctttggcatcgaaataatcggaacgttctgatagctccggtggcgaataattgagacatggattgggctcgataacattaccggagggtggctgaatgaggtgctttgaaagaacatgggttcgccatgaagcgcggtccatggattgcgttttatggctttcggaagtctgtgattcgattgggtaagtgagaaatgagaaaatagaatagaaaagatgaagagaacgagctttttaagtcggcgccaacaaccgttccgtgaggaaaaatattaaatttacgcgcgcgagtgaggaaaggctgaaggagaggagagccgataccacgtcgcacgagccagccatttgcttcgcttttatattacatctcaaagaaaaacgcgccaaccgacgcaagtgtagactactcgctttaattatttgcattagtatattatgattttttttatccttttacttgcacggaatgttttgcgagcatactagacttagccgcaagtttattttatgtaaaacctcactaatattttgaggtattcaacacttcaaatgatatgagcttttgtatttatgaaaaaaaaagtaactttttgaaattcaatggtagatctatatttatataaaaaaaataagggtatataacttaacccattgaaatttctttctattactctatgcttctttttttgctaaattttattgtactatatatttgaattaaattaatcttattttagt

SEQ ID NO: 210280 - DNA, 1402 bp, Cannabis indica
taggaccctgagcttaattttggacattttttttaatacaaccaacttgaagacaatgctaatacgaacagatacaaaaaatataacagttttgttatagcacttttagatcggattataattaaactttatttgaacaaaaaatcaattcagggtcctattgtactattttagaaaatacagggttcattttgtcatttaacaaaagacagggtcaaattggtaatttttgtaaaacagagagtccaaaatggtatttaccctaaattaaactgatacaacatgtgaaaaaatttcatgattttttaatacattttaaatttaattttattatattcatattcctatttttattttcattctcattcttattatcattcctatatttatattctatttaatcaaataccactttaattttagtaattaaaggattgaagcaaaaactctatcaaacaagacctaaatttagtaaagtataacaacatgttttcacaaattgttatgaattgacatgttgaatgatgtgataatatttattaaaaaaataatccaaaaatatagaaacataaagtaataaactgaaaactattgatgtataacattttttaatttagcatgggggaagcttgtattgcaatctaattaactataaaattctcgtcacactatgtatataaaaatttgttggatcttgaaaaaataattttttttaataaatttaatcacactatccagttatcaaaattttaatatgagattaagatttggtagttatactaagtgtattaattaattgataaaattatataatttaaatatttaatgtttatttataaatttacagggtgttgcgaaactgctcgatcactggtccaattcctgagttcatcggtcaaatttcttcattaatacacttgtaagtaagtctatgagattgatattgatctgcagcaaaggaacataattgattgttttataggtaatagtaatattattttttttcttgaaataaagaaaacattgatgtatattgtcaaacaagcttttatttatatttgtgttttaagaaataatattgaatatatcgttgtgactgtgagcccaagacctgatatatcatcacagatagatttcaagagaaaatagaatttggacaaaaactcagctctgtattttctgagtgagaaacctttcatttatagacatgagtgatacaaagaatatacatttacaatcaatgatgtgttgacacgtattagcacagaaaacaatgagattctaacagaaaagatacgcccaacaatattggaaaaggcagaggaaataaaatctctgtacataacagaattcagggaatgatgcagtgtgtctgcagtccaccgtagttgctgtagggtct

SEQ ID NO: 210281 - DNA, 958 bp, Cannabis indica
tcaactgcgatgttagagtcgggttggacaccatgtgtgcggtagctattgcgagggatcatacggaatcaattttatgggtggcaataaacaaacttcgtttctctgaccctcttatcggggaagcggcgacctgtatgttagctttggagacggtggtcacaatgcatcacccttttgttatagtggagagtgattctaagatggtgatcaagaacctaaagagtgtcgaatccttttggcagcttgagaactacactcgacaatgtaatcatctctctacttttttcactagttgtaatttttcttatgtttctagaaactgtaactttgcggcccataatgtggccaattgggcttttgctaacaatgtttctggtatggtagatactactactattccgaatattatcctttgtaatgaccgtgaggtctgactgctatgttctttgcttttctaatatataaacgctttatttaaaaaataaaaaaataaatcaaaatattatgtcataaaaaagtaaacttttaattttttttcatactttaaattctacattatactactcataatactcagtgagcctcatttagagcatctccaatgattatgtcatcttttttttttaggaaaaaaagttattttatcaagaaattttataaatttaatattttaaatgtgatatgtgcaagtgggtaacttttaaagttgttaattaaatacttttgtaataaaatgtatcaaatcttacatgaaatgagaaaaaaaattaagatgatatgttacttttgtcaactatatatttttatttctctcattagagatgctgtgaatattgacttcttcaccatttatatacttggacggaggatagtcatggagtcacgttacttgtgatcattatttctattacaacataatatatgaaataataacagaatttatgcatttaattat

SEQ ID NO: 210282 - DNA, 518 bp, Cannabis indica
tggcttctaaagcatcgatttcagtatccattgccctgttccatatcttttgtttgcaagcttgtgaatacgattttggttcaacaaggtgagcagcaaggatagctgcttgaaattgtttagagaactttttgtatgatatataatttgcaataggataagaagtgggaggtgccttagtttgagtttgacatatgtagtcttgtaaatggggagggggaatggattttcgaccacttttggtgtgaatgttggagttgggtatagcagatggtgttgttggtatggctgctgggatttcagcaatgggagaaggtttttgtttatttttatcagatttgtctgatagttgagtggaaatatgtggatgtggtacaactggttgtgttggttggatttctgctgggatttcagcaatgggaaattgatgtggtacaacaggatgtgttgtttgggttgctactgggatgtcagcagtaggaaattgatggtttttagttgcatcagagttgtctgat

SEQ ID NO: 210283 - DNA, 675 bp, Cannabis indica
cagaattcgtgacggtcttaaaaatatttttttaagaccgtcgctaaaaaaatttagtaactgtttaaagctgtcgaaaaaattagtattcccaacggtttataacagtaattacaggcgacggtttcgattgaaattcgtaaaatatattgaacccttataggcgacagtttaaaccgatgggtcaataaaaaatcgttacctacttcttaccacatttctcacgtgtccacctacttcttttctattttccacatgcctacctatttattctccatttcccacaccctaaaaaaaaatcttaactttccaaaacctccaccacgcatctgcaccatcgccctcctctcttgccgtcttcctccctctctcgatctccctttcttctagtctctctcgtccatcgatctccaccactccttctcccgtcggtctccctctcctcttcgtcgcatacgtcggaccaccaccaccttccgtcggtgttcctctcatctccatctcatacgtcggactaccaccacttcccgtctgtctccctctctctcagagctcagtataaatacattgtttattaatatactcttttatttattatatatatttattttgttattacataaatttaatgtgttttaaagtagttattgtaataaaattaattagttattttat

SEQ ID NO: 210284 - DNA, 1139 bp, Cannabis indica
gcataatttgatttaatatttgtgatttgatttactaacatttattagagcttagagagtgtaatcaagatggaaataaatctgttcattgtataaatacattgaatgaatcaacactagctcagtataaatacatttgatgttaacaggtctaattaacatataactatatacaatatgataacaaactctaacaagaataattaattattgacttcactcacaccccctaaaacttagtgtgaccagactaagtttgtccttataaacttcaacttggtgctagacaaagccttagttaaaatgtttgcattctgatcacaagcaagagtatgccaacccaaaagttgtttgttcaacacattttcttaaacatagtatctaactccatatgtttggttcgagactagcaaatataagcattgtcacaccacatagctggtggttgttgaagttgaacactaattttagtgaatagtgattcattccaaataagtatgttgtggcaagagtaagacttcgatattcaacctatgtgcttggtctcaaaactattctttactttttagatgaccaagacacaatgttaggaccacgatagagataataccttgaggcagacctcctatcatctagatcttatgtttaatcaacatcacgaaactcagtgagggacaatgcagataggatcttcaagtgaacaccataatcaactgtaccactgagatatctaggtatctttttaacagttttccagtaggactcaaggagggtttgtataaactgtaaaactttattaacaacataagagatttctagccatgtcattatggcataatgtaatgtcccaactatgctcttataaaacgattaggggtgttcgcgatgccattggtgcggtttttgaccatttttttaaatcaactcgcacatgcggtttttctaatttctcaaaccgctctctcatcgtgaaactaaaaaaccgcaccacaaagaatttttaagtttcaacaatacaataattagtgggctttgggttggacattcacatattgcacttaaattaatataaaaattggaatttttttaatgtgcggtgcgatgcgatgcagtttgctgcatattaataattcaaaacc

SEQ ID NO: 210285 - DNA, 551 bp, Cannabis indica
cacatatcctaaatacctgattctaaaattgcctctaaagagtatttacaatatatatacctacgatttttacaagaaactgtctttaaatgtcaattttgaaccatacgggtatttttacaccttgtagcttccatttttataaaattgtttgaaaaaaaaaagcttctaaagacccatattccatattgtagtagtgtcacataactaacaataaagtaaaataaattattattattttatgtctttaacaacaaattaaaataaataaaataataaatttttaaaaaaataattatatgtacaaaaaatatttaattttgtttaaattatatataaatacatataaaaattaaataaacatttcatctattaaacttaaaatatatttatattatatgtgttagatttttaaagttttattttttacataaaatattaattatatatataattttttaaaaatttatataaatatgtgtagattggattatatgggttacttttacttaatgtcaatcaacataaaatttgcataagtacaaatttta

SEQ ID NO: 210286 - DNA, 515 bp, Cannabis indica
ttattttgggccctcgaaaagtgcagactttaagcacgggcctagcccgcttatacttaaggttggccttgtatgagactcgatatttaattacactaataacagtatactacaaacaaagctacttttagtaacaacataattttttgtgactaaatgtgacatttaatcacaataaaaagttactcaattatgattaaaacataatatttatatgtaagttgtcactaatttaattagttttaatcataatattattataactaaaaacacatttagtcacaataaattgtgatttttgtgactaatacttttaaacacagatattttaatcacaacttataattagtcacacatttacacaataaattgtgatttttgtgactaatacttttaaacacatatgttttaatcacaacttataattagtcacacattttttacttttaatcacaaattttgttgtgactaaaaattaaattttttatagtagtatgacacttataaagaaaata

SEQ ID NO: 210287 - DNA, 709 bp, Cannabis indica
cttaacttaatataaattatgtgctgaatttaaatagagaatgaaagtatattggacaactcactcacaaaaatatgtaaattttaaagaaatataatatgaaaatattttcgattcatgaatacaaaaaaatctattctttaatttattgttatatatatgacaaaaaaaaattaaagcaaaatctccactccaccaccaatgttcaattaggattatttttgttaaagaattaacctttattattaactaataataaaaataaaaaaatatgggcggcaaaactacttaaggtatattatttttataaatttattttttaataataaaattctctaaattaatattttggtgtggtctttatcatttatatgtattatgttttgatttgtcacgtaattttaattatttttattattataaaaattaattaaatatttaaaattaatttaaatactaaattctcatacctcctttaattataatttgatatatttgcaataaatattaaattattcttaagaaaatgtatattaaattattatttttaaaaagtattaaattattgatagtaatttataggcgaattaggacttttctcttccaaattttaatatgtagcaaatcatgcttgtctcattttccagactaatataacttcccttccaactattaaaagtgttgaattttaaaaaaatcgtttaattct

SEQ ID NO: 210288 - DNA, 558 bp, Cannabis indica
cataataatgggaagaatttctatagattggaatagccaattattttttgttctctctagaaaagtaatatgcaatgtcatcaatcaatttactgccaactaggatttcaaagaaaagcctaggttaaatttggtccaccaccaccaacttatttctaagaaaacgcaaagtaaaaccaactaacccggataaatctttctcgtgcagaggtcagcacctttcttgatttatcaaattgaccactgtggtaagctaccactccttccagcaactccagtctcaaatatctatgataagaatatgaaaagtaaccagaagaatacttcatcaaaattgtgttgataaaataaagattggtgcacttcaaatgaaagataaagaagaataggtaaaaaaagaagacagcaatttgtgaaaagtacgagtttaaatatgaaatatgcttacagtgcaagctccgggtagcgacccccttgaaggaatctgacacggtgggaatcctttccatgagaacgttcaaaattctgtcttgctttcttaaggcgctcccctgccac

SEQ ID NO: 210289 - DNA, 708 bp, Cannabis indica
gtttatttttcaaaaatattctattctttttcctttgtgaaaatacaccatggaagttgaagtgacagagatggagtcctacagtgcaagaataactaaggtcaatgggtgggagagaataatattggtaatgattacgacgtgtttctttatcatttctttctttgctttcttctgcccttgttcatggtttttttttttttttcaatcaaaatttatgtatattctaagatagacataaatacatgtgttgtgatcctactcacatcctggcattaatctattttttcttttcttaacaaaagatagatatgtatatttttttgctgggattatatatatatatatatatatatgaatattgatattgactctttcaacccactcaaaaaatttagttacgtctaacaaaagaagattaagatgaaaatttagatttactcaatactccatgggacaagtatctcattttccattgactttttcattctaaataaacattatatttcggagttttcttaattttggttatattttaaacaattaaggaaattgataggatacatcatatgaatagaatacatttgtacatttataagattttactctaaaataaatatatgaataattactcaatcattacattaaaaatgctagtatgatgactacatttttatataattgggtaaaaaatttatttttaaactt

SEQ ID NO: 210290 - DNA, 515 bp, Cannabis indica
atgttttatgccctataacagtagaaattcgacaatcttgccaatagtttcactatgatatggtttaatatcttaaaattagcaagaaaagatttatggatagatagaatattaaagttatgtagagtatttagttatgaccattttatccctaaatttgaagaagttaagtatgggcatttttataatttacctaagtttattttagtaattatccttagtaatttttttttaattaagagttataatgctagatattagttttataagccaaaaattagaattaataaaaaaaaaccaaaacaactctctctctcggcctagccgaagcccaagggaactcaagaaattttcaagactttgtaacaaaaaattcaactaaggaattagaggatttggagcttaattcaatgtaaagctctaatcatctttcttcctctttgaatttgttgaaaaacatagtattttgtatgactttggagaattcttttctgtatgagtttgtatgagttaga

SEQ ID NO: 210291 - DNA, 564 bp, Cannabis indica
atgttgctacgtgattcacgtgcatcagaaaagatagataacatccaactagcactgcaataagttccatttttttttcttctaaggatatatattttgtgatcattgagtaatctttacattatccttcttttgcaggacggtgtcaatatcttgggtgttacttatgggtcccctggggcatgcccatatcctcgacagttgaaacttgtaagtacacattttggtattgttgattgataaaagacaatagataaatataagacctttatgaagaaaaaggatggtgtcttttcttatatctctacctaacctaaatggatagataataagctcttggtaaatgtagaagcagttattttgcggcatagagctcacttgcaaccttttttactctgtatttcagccttcaaagtggacttttaactcgcacacaattttgaagaacagcgagcaagcaccaaggtgaaataatttttgcattacccactctttgcaagaaattttcctttaatgtataattagttaagtaccctcaagatttggtaatttgaggttgtattt

SEQ ID NO: 210292 - DNA, 588 bp, Cannabis indica
aaaaaaaaaatacttttttgggcctctaaactaggtgagctctaagcataagcctagtccatttatgcccaaacagacctgcaatgtgttataccagaaattcgactagcacttcagagaaggacacgtgtcaaccttagagaatatgaatcaaagaatataatagcaattatattagaagatattaaaatggaatagctcattaaatgcagagctgatagagtatatctataactcgttgactgtaaagtcttaagcgagacacaaatgtgcaaactattaattcacatattgatgagaaatcatttcgtatatgaagacacgatcataaggacgacatcagtaataggaagcgaggcaccaacctcgctacgtatgaagagatgtagatgagacatgttgactgttaaaacacttagcgaataatatacattgtacaaactaactataacaattgaataaatttgaaaacgaatagcgaggcatatgtctcgctataagaagacatactcatagtaccttttttaatcagcttcagacatctttcaatgagatccactcctctgtcgagtcagctctctaagatag

SEQ ID NO: 210293 - DNA, 504 bp, Cannabis indica
ctcttttatactcatctgtctgcaattctcaatgcttcctttgcttcttttgcttccaatcgactactctccgagcagcttgagtttttgaagagcgagactcagaaattaatatcccaatgcaaggatgtgtgtgagcaacgagacaatgcacaacaggagattactcgcctcaagcaagaagccgagaaagcgaaggaggaagcagagacaagaaagaaggaagacgagaaggaaaaagaggaggccgagaaggccctcatagtccaagctgattagtttgaggagaagcttgctgagaaacttaccgagaaagaaattgagaccttagaacggtgcgataaagttagtttttgcgctgtataccgggtctggctttggaacctaatatggataccagcttcttggaggagaaggaagaggagacttagcgctctgcgagaagaccaagatggaagaagatgacgacgaagttgtggaagaagaagaaattttgtccaagtc

SEQ ID NO: 210294 - DNA, 989 bp, Cannabis indica
ttaagccctaggtttattggaccatttttgatactcgagaaagtcaggtaggtagcgtatcagctagccttaccaacaacgttattgattgtccataatgtatttcagatttcaatgatgaggaaatatgtttcagacctgactcatgtcttgagttacgaacccttgaactagtgtcagacttatccttcaaagaacaccaagttcagatccttgataaaaaggaaaaagttcttcgaaacaagaccaacactttgatcaaagtgctctagaggaagtcacctgggagttcagttcgacatatggactcaatatccagagatattcaggttagatttcgaggacgatatccttttgacagggggataattgtaatgaccgcatttataatatggatcagtaaaggcaattaacaataattattgatattttaatagtcatttgtgaatttacttaattatgggtcccattatcagaaattggcattagagttataatttctcaattccagagattttattaaactctaggtgtattatttgtattatatttgaattatgcaaattttacaatttttgctcggcgacaacgaaaaatgtgatggattgctagttttatcacatgggtaagtctagaaccttagttcttagtgggatgtatatttgagaaaataggataccgagtttgagcgaggttatgctttttgagcattttacccctagactttaaaatgccttagtttaagcttaaggggtattttagtaatttcaaagcgagggttaggtggctgattttagaaggtggaagcttgccacttagctgttttcagccaaacgaattagtttattcattttagaaaataatggaattaatacaaaagccaaaaatcaagaaaacctctctttcccttctctctcttccaaccagcaataactagggggttttgctgctgatctttgttgtttccagcaaggaattcaagtggaatt

SEQ ID NO: 210295 - DNA, 556 bp, Cannabis indica
ggttgctgttcaagatgttgctcggaattctaagaagtccaaaggtaaagccattgctggtgcgaagcgctcttcttttgttcctcattctgttatggtgggagattcccttaggaatattttcaaaagagctcgtgctggccctgttatcaatgaagtcccttcagctgctgtttctccgcaacacccgcccagaaaaatgatgcttatgagttggaatgcccgtgggttagggagtccccgggcattccgtaatctttcccttattgtaaataatcataagcctagtttttttttattatggagtctaagttattagctggtcagtgtgatgtgcttaggaccaagctcttttttgacagtgcttttgaggttccaaggtgtggtcttggtggaggtcttttgttattttggaaaaaggaggttaatgtgactattttgaattactccttaaatcatattgtattgtcacttttgaagataatataactaatcatatttcatgttattatggctccccttatatttgtgataaacctcatacttggacgctttt

SEQ ID NO: 210296 - DNA, 1050 bp, Cannabis indica
tttttaaatattaatatatatatatgtgagatataggtgagaacacggtactgaattataactaaaactgtgaaacataataaaattgaaattcaatttcaattctctttctctctcatgcaacacactctttcttcttttttcacaggccacacatatactaagtgtggttttgtaatttttttaatgttaagttacagtatctcataagttaagtgcacaatgtaataataaaatttatttatcttgttaaatctatactttattcttatcctgagtgttgagattggtatggaagatttaatgtgaattcttcatcaattccattacaaaaatcttaagtttagagactattgccataatttgttgaagttaaagaatctacctcaaagtaaatttttgaagatgtaatttttcttaaatttaacatgagaatctattagttagaaacagaaacgattttcattttaaaaaagaaagaataataataagaaaaagaataggaaaagatatattgttttttttttttaaaaaaaagtaggggaaaagatttcatataagaaagagttgtaggaattaaataagaagttaaagaagtgtcatactcctatgctaattacttaattaccacatgtcacctaactctcttactttgacgtacaatacaaatacacatttatacttttgcgccccaatttaggaatttcacatattaccccgaaatccacgtttctgtaaaagaccagcgattactcacactcgcagatatttggcgcgtggggataggtatgtgggtgttggggctggcaaagaactctataaatccaaatccaagcccaaaaatctggacacaccaaagctttaatgagaaaaacacagctctcaagtctcaacaacaccgtcaccataatcaacacccaactcccttattactttctctctagaactttctttcctttcttattttcctgcaaaataaacttttacccaaaaacccccctccaaaacaattcacctagattttcagtcatagatctctctggattcggt

SEQ ID NO: 210297 - DNA, 673 bp, Cannabis indica
ttcagacgagtatacttcttattacaaatttcctaaatatacttcatcaaagatagttctacttccagccgacgaggagagtcaagattatgtggctgaggtacattatctccaaaatgtagctcctcgggaagcttaaagatgcatcccgaggtaatcaaagtggatggttccccactgttcttagggcaagacatacttttttagtaacttttaacgatagtcggtataacttttacatttggaacctcttccttatagattgtattacccataggtttgatagttggtatccaccattccatgttcaacttagttacactagttcttactatgggattgccgagcagcatgggactaacttgtatagagtgagccatcaagtttcagattgggatttagatctaattaacccctatgacatattcatgatcacaagatctagggagtttggtgaatactatagtcctccctcttcatcatttgatgattatggtaacatcccttaagtgggaatttatttcccattttcctcttcatcttttttttaataagtattgatgcatatctttgtcttgcagatatggatatagagaatctcctccactcttcgagtaaaaaagggaaaaagaggagtgctgcctcggaatcttcttcagatgttaatgtggaa

SEQ ID NO: 210298 - DNA, 1031 bp, Cannabis indica
tcaaacattcaagcgtgtaatgctattaaagaagcccttgaccagtaccaaaacatctctggccaacaagtaaattttcaaaaatcctcactgtttttctccccaaatacaagcctcacataccaaactctcatccaagactatatgcaaatccccatgacaaaccaccttgacaaataccttggactgccccagtgttttggtcgatccaaaagctcttccttcaactcccttaaggatcgcatctggtcttatctgtctaaatggcatggcaaatttttatcaaagggagggaaggaaattcttctaaaggcggtgatccaagctattcttagttatgccatgtcggtgtttaaactgcctgattccttctgcaactttgtagagaaagaaatggcaaacttttggtggggaatagctgatggtaaacacaaacttcactggaagaattggaagtctctgtgtaattccaaaagtatagggggcttaggctttcgatctctcaagccttttaatcaagcgatgcttgccaagcaggcttggagaattcaaacaaaccagtcacctcttcttactcagctctttcaggccaaatactttcccagaacacctttcttagactcatccctgggccattatctctcttatgtctggcgtagcattcattggggcaaatcccttctcaaattgggcctttgcaaaagaattggcaacgaggctaacaccagtatccttgatccttggattcctaaccatcgagtctttccttctcaaatcccatcttccctgactcatgtatccgccctccttctccccaatggggattggaatattccccttcttcgagctaacttccagcaggacaccattaatgacattttgtccctccctccccctgatcccacccaaccagacacctacttctggcagcactccacttctggacactactcggttaggacaggctaccatgttgctaaacaagccattaacctggttcaaccttcttcctcaaacacggaaaccctcac

SEQ ID NO: 210299 - DNA, 476 bp, Cannabis indica
tcaagctcaattagtcatgatgagcaataatacagaagttcatccatatataacctaagtagcttttcctttgattaacattacttaagtcacgatgaacaataacttgatttaccttacttattttacagtgaccatatggagctgttacaatcaatggttccaagaaatcatgaaaataaacaaaaatgggttgcagactagcatcgtcaaactttcattgggtggttaaggaataccattatagaaaagttgaacgaaccgaaacatggagtatctgatgtgttgagtcgtattgcccttaccaacttttgcagtagtaaagcatgaagcgtacattgtaaggggtaaatgtttccatacaaagtcaagagatgatgctcgagaggttcaaaatagtggcatacgtaccattgcaaaaaccatgcattttgcaagtgcaaaaatagaaaccctattttaagtactatgacgta

SEQ ID NO: 210300 - DNA, 675 bp, Cannabis indica
aaccatgttcagattctggtactttcttttcttttcatggctaatgtttaatcgtttcccaaaacttcgatccatcgccattttattagtttaattttgacgcttaagttcttctttctttttgtttttttagggtttgattttgtttccaaatatattaattgggtgggttgtcaaaagcgttttttttttcgctaaattttcgattgtacacgcgtcctgatcacttatttttgcgaaacaaattgggtgtttttccaagtcacagagatttagtctgttgatcaattatttgtagttggattgtattgtattgaattcattgtctaatcatttactcattagttccataaaacatcatggttcttattctgttcttcctatagaaacgctcttgtagtcctgtgattaatatggttgtgagttttttatgacccgtgtacttgaattgaggtgtaccgtgatttaatttatgaatgaggtcaaaaatcatatatcctgctattaaaactgataaaagagaccttgaattcagcaaatataaggcttgtaaacatggtggctctgaaaacttgtagtatctgtagatgggtgcctctgtcattccggccctaaacatcaattctaattgcatcgtagttcaggtagtgttcttcttgtgtagtcaagaaatca

SEQ ID NO: 210301 - DNA, 371 bp, Cannabis indica
aaaaagtaaaagtaaagtaaaaaaaaaaagtagcttcattttcttttgggtggagaagatgggtaggccccatgttttgtcatgcaccaaaagagttttatagacttatcacataaataaataataccccaccaccaccaatttacatctctctctctctctagaattgtgtgcctttgcttgcattttactcttaataactctctctctctctcttcatgcatgataagaagtgtaaaggtatagcaagaaacatatagataaatatagatgatcaagatttcaagaagaggaaagggaaaaatagtataattgagaggatttactcatgtgatgggtaaatcttaatatgtttgctactaataattagc

SEQ ID NO: 210302 - DNA, 1208 bp, Cannabis indica
tgattcatttttctaattttaatttgatcgtatctccaaaggatattattttaactgattgttatttttttaaaaaaaaaaatagattgttatttataaaattgtatgatttatttaaaaataaataaacaaaaaaagagcacactagtgacgtggaaatgagtttagtggcagatccaaaatttaagtgaagaggaagcttaattttttcttttgtagagaagagaggcaaaagtaagcttaaaaaaagtgttgttagtagaatttgattctttcacttctaatatatatttaatctaatttaaccattacactaaatttactattatgtcataaatattatcttttattacaaatatatattataagtaattaaaatatacataattttaaattaatttcacacgtgtgcattgaccgtttatgccttaagaattaagataaaaaagaagaagaccgatttctgtttagccaagccctaaaaatctcttccctatctgtgatactggtattcgaatgtgggattgggtcaaattcttatgggacctaaaaaacaaaggcattaatgcatatgaggctttcctttatgcttcgctaatttttgacacgatctagcgaactcggaatgaaaggtacacaacaatagtcttgttgacatttttaaatgcattgacactattcggttttcttttgcagatcaccatgcttacttgctcccttgccccaaattgtgctcgtcggatgtttggcgtcctccccctcaggattggttgaagctgaactgtgacagagtcgggttggatagcatgtgtgcagctgtggttgcaagggatcacgttggcaaggtgatctggattgctacttctaagctggagttcggtgatgctctctgtggggaagcggtggcttgctgtttagccctagaggcggctaggactcttggtgttcattttattattgttgagagtgattcgaaggtagtgatcaatgccctcaatgggaaggagtcccgttgggagcttgagaactatgtctcttttgtaaaagaatctctcccttttttatcggttgtagttttgaacatgttagtagacaatgtaactctgcgaccctaatgtggccaagtgggctttttcccatcagaggtttggtaccatgcctccatcctctttgcctgacaatctattctgtaatgaccgacaggtcta

SEQ ID NO: 210303 - DNA, 397 bp, Cannabis indica
aattttcccacaaattagagcttggtatttgattaagaacgcataatcaaggttctttttgctgtaattcttgaagaaactttgaatgtcattaatggcgagattcaaattggagaaattccatggaatatgagactttgcgctacggagagaaagtttaaaaggaattctagtacactagaaggtttcaaaggttcttagagatgagaaacttttagccgagaagaaacaagaggaaaaaaagcagaaatggaggagatggtgttctacacgatcatcatgtatctatcaaataatgttcgaagaaaactcatcgcaaagaagatggaaaaaggagtttggaacaaattagaagaactatactttaaaccattaatagctagcaagattaatttgc

SEQ ID NO: 210304 - DNA, 757 bp, Cannabis indica
aacgactacgacctcctctgctaccgccacctgaaaagccaccgttacggccacccccgcctctattaccgggatatccaccgttattcccaccatattttgcatcgtctacctcattaggagtggcatccactataatattgataagtcatgtgtgatttaatattaataagcaaaagttttagtagttagtactagttattttaatcacttctttagcaaattaagtatgaatctaaggcacaattgcacaactattcctcatgacattaagaaattatatagtactgctaaaaataattttatttgaaattaaaaagtgttgcaaattcatagtaagtaggcatatataattatatggaaaacttatgaatggttatactaaaaaaatttacatataaatattaattttaaaaatattaaactattaaatttgatttgtttgtgaataataaaagagaaatttaaactttatatttaatttaattacttaaataaaaattatataaaaaattaacattttttacactatataaaaatatttaaattaaagtaaacttttttaaaatttttgccggaaaacctttttttttttatgaaacaactccaacacaatacatgtgtaatgtaaaaataaaagaattttttaattaaatataaacattaagtataaaaattaaaatttttctaatcctgtaataatcacactcatatatatatataattagattcatattacgtatgttaattttatttt

SEQ ID NO: 210305 - DNA, 937 bp, Cannabis indica
tagttacctgtagctaatgtggtaaaccgaaatcctttacaatttccattcttcccatctccatgcatcccaagtgggcacttgcattggtaacttccaggtatgtttttgcattctttgcaattatttgtgatgatcataggatttgaacactcatcaatgtctaccaacaccaaaaaaaaaatgtgacataatataataagttgatcatgaccaggatttaggcgtattatgcctaaaaaaatatgagttaagatgtaaattgatctcaaatttaaaaattaagttagtaaatgagcttcaatcatacaacaaatagctctctataataaagaatggatagagagcttcctagtgtttttgctaatttttttagcatttaatcaaaagtattattagttttttattattttattaaataaatttatatttagtaaatttaaattataaaatattattaaaataattaaaatactagagaacataattgaagcaaagataatcatttattttaattttttttaactattttaattaaaatttaactaaaaaatagacaaaaccttagagatggtttaaccacttaaaaattcatgcatgatgcatagatagtaaatcactgcatgtactactgctttcttgccgtgtagtttgtcacaagttttgaaatattacatattaattcttcttaagaaccttaaataattattctacttaactacaaccatatatacatatttataaaataattaaattttagcatttagtcacttgtcaaaatattaatacaaccatatatacatagttagacaattcttaataccaacaaatatagagaatgtaaacaattttatcataacacatttagatcggattattgttaaattttagtttgacaaaaaattagttcatgagggtcctatttgtacccggggcg

SEQ ID NO: 210306 - DNA, 598 bp, Cannabis indica
tgtaatccgaactgagattacttacaccgaagaatcgacatcagtgaaccgtactagcaaccattgattaaagattctatgactttaatatgttgctgactattttattcatagttaagtgatcttagttctttatacaactacaagtcacattctcatatataataaaatattaataatttaacatttatgcatatattaaaatattcaactcttcattaataataagaaatatctttataggctttttaggacataattctaacaatgatgtagcatgtttttagtttagttctttaaatatttttgagattatctattataaaacatctaatgtgagtgttgcaggtctcttttagtaatttcttttgcttaatggtctgttttagtagttaaatattatagaaaaattctacaatacacctcttaaaaggggtgtatcgatgcactcctacctatttcagaatcttggagaattgtttagtttaatttttttcatggtcgtgtatgttgtagttgtttaagacgtcctgcaaaaaatttgagaaattcgaaaaaatttaatacgctgaaagtaaggttcaaaaagtttgttgca

SEQ ID NO: 210307 - DNA, 643 bp, Cannabis indica
aaaaaaataaaaggggttgtaagtgcttcgtgagtagcaaggcagccaaagagaaagaaagaaaaagagagggaaagaagagaaagaaagctagagagagaaaagggttttgccattttgcattgaagattaagtggtggattctcatccattttagctcaaattttgggtagtgaatccttgcaaggtgctcttcaagtctaccggttccgatttggcgattgtcctctctaaggtgctcttctataatacccacatggtgagacccaaactttttctatttgtgtatccatcttttgagatgatgatgatgattgtattggtgatccaagattgtttaatcttgatgttgttgtgagcctctagttttactagagaagaactttgtaatcccattattgaactttgtgatagtggatgatttgagcggactacggtgttttttattgtttgtggtgctttggttgatatttgatattgcatgttgtggtgtttgataagtatcccattttttacatacaaaaagggaaaatattgtggttaattgcaataggttttcccaacatctagtcataaagcctattattatcaaaattatgctaactttagcaatgagaaaggggtggacagtgaggcaattaga

SEQ ID NO: 210308 - DNA, 536 bp, Cannabis indica
atatttattaaagtttaaagtaaatatgtagacattaattggagctttttactttaactaagaagaacactgtaaataactttaataaatagagggttctctaagtataatgagtttattactttttactaaatatttttaataatattttaatcaaaacacaataattttttcactcttttataaaatatttatatatatatatatgtatatatataaagttaaaatcacctcaaatttctctaccttctccttattcaaatgtcactggtggtggcattcaaatgtgtggggttaaagaataataacttgacatgatctaaaacttcctaatttcatgtttccaatagttttttagaataataacttgacatatgatgatagagtcattttaacaaatcatatatgattcttttacaaaaaaaaaaaaaaaaaaacaaaataacacaatacaccaatagcagtagtggttaaggtaaagtagatagtcatttaactttacgtacgatataatttttttttagttttttcgaacg

SEQ ID NO: 210309 - DNA, 568 bp, Cannabis indica
tcaagcttctatcctttgccggtagggccactcttattcaatcagtcgctttgagtctaccaatttacactatgagttcctgcaaggtacctttaacgaattgccgggaactagacgcgttgattcggaagtattggtggacaggggatgctacgaaggatagataccatgaagtgatcagttgggataagctgtgcaaaccgaaattcgatggtggtttggggtttaggagacttgaagacacaaaccaagccctcatctccaaacttgcttggcatgtggctagcaatagcaacaagttatggatccaatgtctaaaggcaaagtattgcaaagatcaatccttctgtagcattgaaccacgagggaatgattctacaatatggaaaggcattctccaatcaagaggaattttgaggtcgtctttaacatcaatcccagcaaaaggggagtcaattgatttatggacccagccgtggatcccatggctaacttacaatgaatttagagatttgttggagggatgtagggaccgttttcccaccttgcaaacagtggctgatctatc

SEQ ID NO: 210310 - DNA, 591 bp, Cannabis indica
tatatttttcatcacaaataatggtacctgtcacaataccattaaaactaatttatcacttaaacctagaatcataaaatattaggtgaataacaattccaataatgatggtagaataatgtaaaacctaatttagcggtcgtttaaacaagattaaaatattaatcataaaattaagcatggaataatataaacaattcaacatgaatgaataaaataataatatttatcaaaacatttaataaatcatgtcttgagttttgaaataacccttaacctagaagaggactactctataatctcaaacataatcataagcataattataaataaatattaaaagagtttaagaagtaaaattagatgtgaatgtagattcttctcttctcttctcttgagttctctcctttaaaagcgtaatgaaaaactttttgaaaataaactctaaaagtcttatgtatagaaccctaaaaacaaatccaatttaaacttaaaacttgatttttatgtaaatcgtatggacttcgtgtggacctgagagtataagttgcgcctagtcgctcattcttggtttttcactgttgcgtgctc

SEQ ID NO: 210311 - DNA, 572 bp, Cannabis indica
aacaccggcttttatatcatagatcattctcaaatatactaaactaaattattaaagtcacagacaaagggatgagaaaataatattatgcttatatatgttttatggggccaattaattgagtcaagactcccacacagtgattcaacctatgtatacgaagttctccatttgtactacttttggcttaattattaataatgattgtatgtgcgagcgaggtgccgcgtttgcaatgtttaaaaaatactgttttgtatattatttgtaaaacaatttacaaataaagttgattgctagagcttccaccataaaattgtattttttttttttgaaatgataaaattgacaagattaatagtctcgttcattttaatttaataaataacatataaaaattactaattattatttataatgcattaaatattttaagatacctaataacaatactacactcttacaaagatctatgatgatgaagataaagctaatttaaatgtaatgtacattattaaaacattactgggtgagctatttctcatagataaaatattttagtaaattagcaa

SEQ ID NO: 210312 - DNA, 575 bp, Cannabis indica
atatcgtcaacatacacctccatagtctcaccaattaaatctacgaacatcatgttaaccagcctctgatacgttgcccctgcgtttactaaactaaaaggcattaccttataacaatacaaacctcaatctgtaatgaaggaggtatgctcctgatctggttcaaacatcgaaatctggttatatcctgagtatgtatccataaagctaagaagctcatgactaatttgggtagaatgactcccttatgaagccacatgccaaaagacgatctacttcttatttaagcgcttggtacctcgcggggtccatttagcggtgcttttgttggacacctcgcacttcggggtcaatgttcaattgatgacacatgacctgtggtgatatttcgaccatatctgagtgttttcacgcaaaaacatttagattttgtttgagaaaagtgataagcttttctatctgtcgaaaggttagcttagaaccaattttcaaaactgtattatgatcagagggatcgattggtacctcaattgtctcttctgcagtgtgtgtagtattagtgtaatcgaggatcc

SEQ ID NO: 210313 - DNA, 587 bp, Cannabis indica
gcagtcacggaaggacaccaccgagtattactcactgttgatgtgtacccttcgcttgttaggttcgcagaaggagtgttcttagagaaattggggatcctctatgttaataaggacgtggaaggctgtaaagtcccttcacaaaggaactgcaaaaaaaatttgattttcttaatagcaagctggctatggaggatattttcaaaccagcttaagggggagtgtaggaaaattagtatatatatatatattaggaataaatcttaagttgtaatatagtaggaaagggatcattttactctttattcttgggtttgtttctttttttgtactcttatctttatatacacgatcagtataaagaaatcataattagaaaatacacctttcccatttttgactgctgatgtggcagcacaggtcaaagagagaaaagaagcgagtcaacagtagtggattgggtataaatagtggttctaggacaccatactaatcctagggtctaagggaggttcgcttgcatggaatgccctgttctatcgtttctgaccgtggcaaggtcttcttgagcaaattttggtctgaac

SEQ ID NO: 210314 - DNA, 741 bp, Cannabis indica
aataaaacataataataatctaactaggaagtgttatgaccacgctgattatattttttgcatctgtttgttttaaaaactaaattcaggttggttatattaaaataaaaaaaatgatgaaaattaagctcaacctcagtgtattattatgtaatattttaaaaaaatattgtcttatttctttcgttttagataattttggagactatgtaccacctataaattatatgagactgatacttcacccttccttgattaagttatcactaacatacgtcgagaattctcatctcatcaaaaatgtcaccgctacacaataaactagtttttcaaagagtatgatatgtgactagattcgaatagttaactcaagtagaaaagaacattgttattgggcattaatggtacctagtataaaaacataattgagtgcctcaaataaaatagtatttcttctcaaatgaaaacaaattggtatccaaccataatggggaacatgagcagaagaaaacaaatgacgtgggaagtttctatgttagctcttaagtcactcaaatggcataatgggtatttgacacgtgtaaaggtgttaccttgttaagtggacaacagtatctttgatgtgaaaagttgaatagcaaaatttggatagtatattaatgtcccatataatttgcctattctactgtttttttctttgaaatgaaaaaaagaaaaaagagaaagaggtgtgaatgataa

SEQ ID NO: 210315 - DNA, 620 bp, Cannabis indica
aaacggagagagaacggggatcacactctctgccccgacagtgacccgttttttatcttaaatttttagtaatattttataatttataatttatgtttgtatttttttagtatatcagtatcttttttatgaattttaagttgtgttttggataataattaatttattgaataataattaatgtgaaatattttaatttttatatagtttaatatttttgtatattatattaaaaattttattataataaactttatttttctattagggaatttcctgtctcatctccgtcctcatcagtggattcctcgccccatccgtgatgaagaataagcgaggataagaattaaaatcgttaatagaaatgaaaacataaggagcactcacggctaattctccactttgtgtgcatgcatccttactctcatctcaagagtcttaactctttttttttttttttcaagataatcttttaatatttgtccataaaataaaaccccccaaaattaatttactagaaatcaatttaaaaacttatttgaattttatttttgttttttcaaaaaactcattttttaagttttgacaagtatcatgaaaacaagagatttgatccactc

SEQ ID NO: 210316 - DNA, 721 bp, Cannabis indica
gatagccacaatagatctaatgtagtcaaggcagacaaacatcaaacatcaatgctctttctcttagaatgcacatcaaaagagacgcatttacatacatacatgcatgttgtctttatttaggccatatatatataagacatatatttatttatttgtttatttatttatttaactattagttgagattgatgatggtgtaggacaattatgagagtggtgtgcagctactctcctgcgtgaactgtgtgtcaggctacttgtgcaactacactcctacttgatttacacaaatatcattacccaatatttcattgtgttacttgtaagtatacaacagataaaatgatgaaaagtaactatgtacagtacaagttatctcaacgtcaaacacaaaaagagatgacaactacataaaactatttcctccattcggacaagttacctatatatccaggcaatcaaatattagttgcgtaatataaaggtatgtctgtctaacatcttgtcatgagtctatttctttccattttttatagacatatgatatgtacgtctacttcctcttattatttaattatatgcctatcccttttatgtgatgtgacatactgaccgagacatatatatgtatattcccatgacataaatatacatgtcatgttttgcaaacacactagcccattccctatgccagcccattccatcctaatatatatat

SEQ ID NO: 210317 - DNA, 779 bp, Cannabis indica
attacacttactatgagattttttgacactagaagctactccggtgactttttcggcatcgacaccaaacttcgaaaaaatcatcggaattggcatagtcgccaaaaactaaagaaactagtttcttggtgatttttctagtgattttttcgacgacaatgtcaattctgataacttttatagtgttggcagcaactccgacgacttttccaacactggcacttactctgcgacttttctggtactgacatcaaactccagaaaattcgtcgaaattgacattgtcgtcggaaaaattactggtagttacttggtgattttttcgacgataataccaatttcgataatttttttcggcgttgacagtaattctgacgactttcttgatgccggcagcaactccaatgccgacaataaactccattgtcttttttcataccggtgacaactccgataattactgtaatttcatttgttttattttttaaaaaaaaaaatatgaagacaattttaatatttttttatggtaattcaatccaatactctattaaagataacgggattctacagtattttgagtattccaccacctaatcatatccgttggattcggttgtaaggtagataatcgaaggggcttcgtaaaagacacggagcaattgttcaaaatatcaaaaacaaaaataaaaaaaaatcaataaatatctaataaaaaaatcaataaatatcaattatttttcgacgtgaataaatattaattttgtttcgtgggcaagggg

SEQ ID NO: 210318 - DNA, 812 bp, Cannabis indica
agatcctggtaaaataatcccaataattttaaactacgatttgcaaatttcatgaacaatcctaaattatagaacattatgagtaaaaaaatatatgtaatttgaatgtgcctccacatttataatcaaactaaatttcaaatgttagctaattaaatatataataatagaagtttacttctaacaaattttttactttgctagtgaattaaaatggtatgttaaaatttgggattagcaatatcaattgataatgagacgagtagcttatttatcttttataagaccatttattttcacacattggcaatgtgggactaactctaatacactctccttacgtttagtcctgaaaagtgtgggtataatgaattacttttaagagatcatagggtcggacgtgacatttgaaagaatttaacaaggtcaaatatcgagaaatttatgggtgtacttgtcgggaaatttgtggatttgaaacaggttaaaggtctcaatactagaaattggcacacattgacaaacattggctgaaaggcccccaatggagattaaaggggaaagagcgggagttttttttagtttggctcgtcttttcgtatcggcaacacattgggttcacaacgggatcacaaacgactctgataccatgttagaatttgggatcaaatttatagagttccatctcaaaaccaattaacaatgagaggaatagcctattcatgttatatatgataatttatttccacacattattaatgtgagactaactctaatatggtatggtaaaactaagttgaaagaaaaaaaaa

SEQ ID NO: 210319 - DNA, 601 bp, Cannabis indica
tcctcttaggaccgtgaccttgttactgacatctttaatatgcgagatgcatccctcatttttgggctgccccttagtgcctcagctggagatgattgctggtcttggagtgtagaaagcaatggcactttctcggtgaaaagtgcatattttctgatgcagaaaacaaaaaaccagcatgttggcgctgacaattctggcttttggcgctctctttggcaactaaaaatccctccgaaagtcaagaatttcatgtggcgattggtctcgaatactctccccacttgtctacaactcattaccaagcatgtttacatatcttcgaactgcccagtatgcaaatgtcacccagaatctgcatctcacgccatcatcagctgctcttttgctagttcctgctggtagtatgcacatcccacggtagctattgtttccaacactacagcaggtatgtggctctgcaatttatttcaaacgtctgatatggaaactaaatgccgaattgctatgttatgctgggcaatttggcaagctcgcaacaacttagtttggaataaaaaagtcacttctccccaacgtgtttcttcatcagcattatcta

SEQ ID NO: 210320 - DNA, 1702 bp, Cannabis indica
agttgtgagagaaagagaattaatattattgaatgaataattgtgctagtgaataagaatgaattaagccgtactcttatctatagaacaggttgaacaaaacggattttatcggagtggcagcaatgaaaacaactatacgtggaccagtaaataataataatatattttaatcttttatatatatatatatatatttggcaactactatgagttatgtattgttgtatcttaaaatcttttagcaccttataaatagtttctaaattattcatgacatcataaattaattttttttagtcaaattttattacatgtagtaaataaaataataatataataatttagtcttttgttacattagcatcgtgtatataatttaaaattgaaaacaaaaattatgtattttttaaaaaattattaaattaaaaattaattaataattaataaaattacataaaattaaattaaaaaaataaattatttttttaattaattatacacgtaacattaacatattattgatgagacaattgattaaacagtcatagtcatgttatcattttatttattatgtataataaaatttaataaaataattaatgtataatctcgtcaataattcaaaaactatttttaatagattaaaaaatttaaaaaacataataatagataagttataagtgaaagcaagaatcctaaatatcataaatattttcgttgaaatgcgtaaataatagtaatttgaaatttgaaattgaattagagaagaggtgagtgagcaataataggtaggacttaggaggagaagtgtagctttatacataatcctagtttcagtagtaggctgatagacatcagtgtctgtaagggtagtgtcaccttaattaatcactcagaaacaggtttattgggatgccaacaacaacacccactcctccctcctttgacttttcttctttatttattttttccttaagtaaataaatgtacccactttcacaaataataaaaaaaaacatatataatatatgggatttctacacacttgtagtttttcccaggggaattatttaaagaaaatgaagtgtatatagctttagtttgagttatgtgggaattattcttttattttacttaaaactaagtaatataatcactctttgcgtgattaatttaaacttttttagtattataataaaaaataattatttattaatataataaataatttcataaaaatataattcttaaataaaataaaattaaaatatattatctaattccatattattattaataattttatttattaaaaataaattcacaattttattaattaatattttgagttatttatcaagaagtttaaaatttatctgtatttatttttttttaaaaaaattattgttgtaaaaacaataaatagagtggcgtaggaaaatagtatgttcagcataatgtattattttcatatttcgatcattcaaagccgttattattgtatctcacttgttgtttcatttatattctcattcatttttttattcaccgcatcttactatttgtgatcaccgtaggtcacttgtagtcgatagatgaaaagataatggaaagtattgtgggatggaaggtatttttatattttactattaatattatgtattattttttaaaaaaataaataagtaataaatatgta

SEQ ID NO: 210321 - DNA, 613 bp, Cannabis indica
gtgcgtatatacgaaataaattcaggtattatagaaagaacataagatttttgtttgagtaagtaaacccaagtgaatcttgagtgatcatcaaccaaggtaagaaaatacttatggttagaatgagaagtaacatgataaggaccccaaacatcacaatgtataagatcaaaacaatgagaagtaaagttggtattaataggaaaaggaagttttctttgtttagccaaaggacaaatatagcaaggttcaacagtatgtaagttttttgtatcacaatgtaaagaactttgaagtaaattcaagcatttatttgacaaatgacctaatcgtctatgccaaacttcagcagaggtaaaggtattaatagaaacgggtgtggcatccaagatgtagagaccattatccgaatcacctttgccaatcatcttcttggtgtgtattacctgtgtgtaaaacttgtcagcaagaaattttatttcatgtttgtcatcctgagttaaacaacttacagatatgatattatacttgaaagtgggaacataaaggacttctcgcagagtgaggtgatcgtttatgtgaacatttcaactcttatacaccatgagatgat

SEQ ID NO: 210322 - DNA, 723 bp, Cannabis indica
tttttatatattaatttatgtataaatattaacactaatttatataattaacaccacagatatgtttaccattgatttaaataatggaccacatttacgtggaatttagttataaaggtttttaaaaattaatatttagtttaacatttttaaatattacaatattctcaaatgtaaagcatgtttgaagttagatcggactgcctgcaagcggttcgtcttattaatggagtggaggtgggttgttggcaggaggatggtctcattgtggagattcaacgcttacttcagcatcattcggccaatggggttcggtttgtgtttcgggaagcgaatgtaactgcccatgtattagccaattatgctttgacaaacaaggttagtgctatgtggattggggtttcttcccattgtactcgtcatgcgattgagcgtgacttaccattttcttataatcgtctagttgtttaatatatattgtttaatatatatatatatacataaatatataaaacatgttgatttttgtgattaatataatttattttggtgtacttcaagttttaatcttagcccaccaaatgaaatataaatataaaacatgttcaatttttttttattttttttgggttgaactaaaaaatagtactatatattagttgtttatttttatatgtttttaccttatggaataaaggcataatgtgggtcttggtctattcc

SEQ ID NO: 210323 - DNA, 495 bp, Cannabis indica
ggaccataatgactcaacatgtgttaatatgaataacctaaagaatctgtcaaatttaggactaacagacttacaaaatatgtatatgtgaccttgaggattattgtcgcattttttgaggttgacgactaatccgcatcatagtgaactttttaagtacttttgctgcaaatttcctttgattttattctctgagcctagtccagtgtactagtattgaaagaatgttgatactgaaataactttgtatggatttttaatttttgtattatttattttggtgctgtaaataatactatttttgtataagtgacaacttgttattgcatctctttaaaattaggatttaaaataattaaattggtttttgtttttgttttttattttaattttaatttgcatcacaatgactttaaattgtaaagtgttataataaagtacactgtgtgctacgaatttcttaagtcgtcgtaaatctcaacaccttgataatgg

SEQ ID NO: 210324 - DNA, 434 bp, Cannabis indica
ctcatttaacaaaaagtgtgctcaaatggtgtgtgctccaatggtgtgccaaaaagtgatgtaaatttggcacatggcaaattttgtgaccaaatttagcacaatatttgctatgatgtaaattataccacaataaatacactactttttcgtttatatttatgtcatttctattatttcattagtatatttaacttattttttagagaaatgctaaagggcaccagtgatgcctagcaccttcctatgtgtcaatatcgctattggtacaactaagtatcgggtcccatataatttaatataatagtttttagggagtatcgctagccaatcgcaacgcgacatgtcgcaaaggtgctaggcaccactgatgcctaatagcaatgctatattttttattgtcttacatattaaaataataataaaattgatta

SEQ ID NO: 210325 - DNA, 711 bp, Cannabis indica
aagttttgaaaaatatctcagcatctctgcatttgaataactatcaattcccccaaaaaatggctctttggctatggaaagcactagctttattatcagatattgtcgtattgtaagacctttattgtactttttgttgtagtgacaataatataacatatttaatattcaaatgttttgaaaagtatctcagcatctctgcatttcaataaatatcaattccaacaactgttaacacacccccaaaaaaatggctctttggctatggaaagtactagctttagtattctttctagttggttatgttctaagaaaaaaaaccaaggagaaaaagaagaatctccctcctggtccaaaagggtatcctctatttggaagcttgaacctattaggcaagaaccctcatcgcgatttggagaggttgtcccaaaaatatggcccgattatgcatatgcagctcggtcttattcccactattgttgtgtcctcctctaaggctgccgagctttttctcaagacccatgatcttgttttcgccagtagaccgcctcacttggctgcgaagcacatgagttgggagcaaaggaacttgtcatttgctcaatatggctcttattggcgcgacatgagaaaaatgtgcacccttgagcttctaagtagtctcaagataagcactttcagagctatgagaagagaagagatcagccattt

SEQ ID NO: 210326 - DNA, 509 bp, Cannabis indica
gatccctatcaggggtcccgattccaggtttgggtaaggaactgggtctacggcccagttcgggtctaggtctgagttggactccaagttctggtcgagttacggttccggatctatgtcctggtccagttacagttccaggtctaagtcctggttgtggtcccgttcccgggtcccggtctactcccaatttttgttccaatttcgggtcaaaaggtacgggttcgggtctaggtttgggtctgggactaggttcaggtctgggtctgggttcgggtccttgtttgagttcaggtccgaggctgggtccctgatctagacaccgactacgagtttggtccaaacccttggtccagatctggatcctaatctcgagtcctggtctgtttccatttcaggtgctggttcatgagctgggtcctaggttcaagtttttgtttagggtcgggtactaggtcccggtcctagtttcattgccaaggttcctatctcgattctcggtccaagtc

SEQ ID NO: 210327 - DNA, 1068 bp, Cannabis indica
ggttggtgtggatttctgtgatgcagttgtggatccaaagaaagtgtctcaattcaggcctatttctctttggaatgtgctatataaggttattttcaaaatcattgcaatagaattagaccggtgctcccatggttgattttccttacacatgcagcttttgttatggggcataacattcgtgataataatgtgttggtcaaagaaatcattcactcgtttgagctcaaaaaagttaaagagggtttgtttgccatcaagattgacatggtaaaagcgtatgataaactaagttgacaatttatagaccaggtgcttcgcagttttaacggacccccaaaaagttttgcaattgggtttgcgagtgtatttctactactttgtttaatatcctccttaatggaggaaaagtgagcagcttactccctgagtgtggtttaagacagaaagatcctttattcatgtatctctttatttgggcagtggacatcctctcttgtatccttgagaaggccatcgatttcggatctataagaggtatcaagttgagaagagatggttttaggctctcccattcttttttttttttttttttttcagatgaccttatccttgtgggcagggcgactattgtagaggcaaaggtttttggaaatgcttggagaaattttgtgattggtttgggcaacgtgtcaataagctaaaaacatcaatcttcttcagcaataacactagcgagggaatgaaaagaggtactatgcaggagcttgggctaaacatggccactacaaacatcaactacctaggcatctcgttatttagatctaagcataaggatgtggacttcaattttattcttgagaaccttatttcaaaactccacgattggaaattgaaatctctgtcaaaggcaggtcgtgctactttgatcaggccaattgggcttgctatgcctgtttatactatgcaaactaccaagctttcaaaaaatatagactctaaaattgatggtatgataagagatttcttgtggggttgtgagcaaggaaactgaggtatctacttgaa

SEQ ID NO: 210328 - DNA, 606 bp, Cannabis indica
tattgaaaaagcaaagaaacctcattaccttgttcatccacggccacccggagtcctcgtttgagtggttcggtgatgttaatacgcaccctcaccttcataatgccgttcacaatcttaatatcttcaagttttccaatacgctccccccattccctcgcaaacaattctgtcatacacactaatgggacgttattgatcgaaatccaaaaggaagtgaagtcgaagttcatcttcgagatttcgcccagccccatcggcttgacaaaacaaataagttgcttatcaatagtccaagggccgcctccgtatactcgctgcctatcctcccggctcccaaagaaaaatcggaatacattcttggaattcagctcctccacctgaaatcggtggtttaatttccatacgcccttcatagccttctcgataccgtctttattggctggtctagggccaataacctttccgacgagacataaatccatacgcttcttaccttcctcaacgccggccttgttcagagaaataaccggtccatctccctcatcaagcaccagcacttcagccagccgattaaccagctccaaatccattgaaatcacacaa

SEQ ID NO: 210329 - DNA, 1023 bp, Cannabis indica
agtgagctggactgtcacttgatccctgtttgagtgtcggagtctgtgttggcttggatgttgacttggccttccctttgtgagctgtactgccacgtggcacagtttctgtccacgtaagcgtgctcacgaggacaaaaattgggataacatttgcctcccaagtccctgtgtggacgtctgtacggatagggactttaccaacaagattgatgttatcgggactgcagttacttttgctaaataaaaagtggtgcctgtgttgaagaattttatcttgattgtttgatcttgttgcaattgagaaataattcctttatgtgtctttttgatgagttggtgaagtaagtgagaaaaaagggggcccaaatgtacataagtgagttttgggggaaaacccttttttcaatttcatttttcacttttactttctctcactagaatttagctcttgagaaagctcctccttctctctaagtggtcgaacctctaggcttcaatctccttgggatttttttgttatttcaacgatccaagctccccatcttcgtcttcatcggaatctagttgcaagtaagctttctattcattctctttcacttgatttgaatgatttgccatgaatgcatgaacattatttcttgttttgaacatgctttgattcttatgttagattgtaatccattcggtattttgatctgcatgatagccttaggatgaacaatgtatgatttatagatgaaaaagagctgaatctgacctttgttgtgattcttggctctttgagtcacgaagaagacgaagaatatgtttgagttcttggaaaatcacgcgttttgatccatgcacatgttgatccatgaacaaggaggctttcccatgggtggctttcatggggtctggccagccatgggaaagccacccatggggactgtgtccctaggttggctggcctatgcctagaactagggttcttggccaaccgataagctgggtcttagggtctggccgacctctaggacc

SEQ ID NO: 210330 - DNA, 661 bp, Cannabis indica
tagaaaatttatagaagtttgatattatcaaactaaaaatattatacattttttgagtaaataacataattcattttatgttgttgataggttattattatttagttaatgttgggtacaccaatggtcaaggttttcttgcaccttttagaaggacacgatatcaccttaatgattggaatggacaccttccaaacatagcagaatagttctttaatatgaagcactcaactgctaggaatgtaattgagcgttgttttggattattgaaatgcgatgggctattctcagaagtccatccttttatgatatgaaaacacaacgacgtataatttctgtgttgttgtatgttgtataattttattcaaagagaaatgagcattgatccaatggaaaatggatgaacagtgtattaggaaatcatcccacaacagataataattatatcaataatatcgagtccttagatttatggactacttggagacaaaatttggcagaagaaatgtggaacacgtggctagcaaatagatgattagaatactagtatttatattttaataattttaattatgatttgatgtatgaaagacatatgcttatgtgtttgctttagtaacttttttttgtttcttaaaattaatttatgagtattttaagt

SEQ ID NO: 210331 - DNA, 781 bp, Cannabis indica
gacttcaatcgttgacctagtatttcacgtatcctgacacttagtatattttttattaccttgtatagtcgctaatgtccatttttatcaatcgcagatagatcggctcgtcctgtattggattttactcgtagggagatcattgaggttttaggtagcctgtctgttcaagatcgcgaatggcgactgttatgcactactgcaaaattgtgagaacataagctcatccccgagaacgccagtcttcagtgcgaactagtatacaaggagccttcagagaaacaaaaggaaagaatagacaagcgtctatctaaacagacattgagacaaaaatcaggtaatgtgtttggcattttcatgttcttttatgttgtgaaaatattcttatcctatggtcttctcacagaaatgactttcctaaagcaagctcccactctcaactgaaagcctaaggttggtactacaacgacttctctagtcattccgcagaagaggaaaagcgatgctggccctacacaagtggctgactcgttaaagaaacaacataaatctgctcaagacaaagggaagaaggttgtgatcgatcctgctgttatggcccacgacttcatagctcttcaggacaaatttgtgagcgatgagtttgtctgtaaggtcgagggggttcctgttgatgacttgatgccacgctctgcagaattggcctcaccattcatgaccatccatgttcttccaggcctttattgtaggttctaaggagcaggacctcctgaggacgcag

SEQ ID NO: 210332 - DNA, 615 bp, Cannabis indica
gacatcttacacattttgagaaattcagaatttatttaacaataataaaaagtagtgttaataaaagtctatataatgttctagtttaaaggtttgtcctatataataataaataggtatttataatttgcactataattaaaatgtaaaatttaatatataaaatttgtaaatatttttgaaataaaataatgaaacaaaagtacaaataaattaaaacaaagagaactaggcacgtgcataatctagttttttataaaaatatcatattttgcatatacaacaccaatcaaatttcaagcggtatatttaaaagtacagtattagagagtttcatattgctaatgtgtgaaaagatagcataatatataagattcatgagttactcctttcatgttggatttttcgccaattagttccgagatggaaccccggcctaacgactatctgatccaaaataaaataagaaaagtcgatccaaaaagtagagccgaaagtaaaaaagaatcacttataattcggggatagtgagccaaaaaaagccaccaacaatccaaaaaaaaaaaaacgaatccaaaaattagagccaagagagctacttgtgattcagggata

SEQ ID NO: 210333 - DNA, 622 bp, Cannabis indica
ccgggtccatgggagtatgattaaacgacaataataaagagaaaattaccctatatacattttttaatttgatatttttaatttttatgctctatttcaaaatcaattatgtttaacttttttctcaattatttttaccattaatttttattttttttttaagttcaaaattttgctctaacttttttgacaaacctacacattcatctataaggaacacaaatctattatgtttgaaattgtgctttagttatgtgagtgtgtgaggataatttaagtacaatacgcatgaaaaaatggtatatttgaaagtaaatttgattaatgtataaaaaaagtgagtattttttaacttctctggataataaatctagtgaaaattacatgaaatatgggatttcataacaaagttagaaaaatatggcatttttaagtttgccactcttctatggcattttttcacattttaagatttttttatggtatttgatatgccatatatttataaacttattatccaatcccatattttatgtttttgtttttagcttaattagtttttattttattttttaatttatttttacactttacattttagggtttctttttatttgaaaaa

SEQ ID NO: 210334 - DNA, 763 bp, Cannabis indica
aagaccttgtaaaccctgccacagttgctgccttccttgctcttcattaaatccatacacaaaggttgcataaaattggtatttaccatcaaaagttgtaacccgagtgtggataaattgactcgagcaagtcaggatacacactgtgaactgattgagattccaagctaagataatccttcctcccttatgccaagccaaattagtagtaaaacaccaacccgaaaacatattcatatataaggctccaagctttggagccttaactctcgtctcaaggagaccaaccaaaccagctttttgattagcaataaaatgcttgaccatattttgcttttgctggctgttgattcctcggacgttccaggagatgattttatccattgaaaacaggaggatctccccctcctcctgtcttctctgtttccatctggagtgactctactgacacttatgttacagcctcttctataagagaatgacagtgtagagcttgaaaagaattagatgtggatggtcctataattggttcttttgctttaactttccagcctttagttacttcttgaaactcccctggtgctggttgtggtttatcttcagctttccttttatcgttcttgaccacccatttttgtttcaaagtttctttctcacggcaatcagcagtggcatggcctattcctttacaatttccacaacttacaggtttccactcataaaagatttcaacaagtatattattaccatgctcatcttcaaa

SEQ ID NO: 210335 - DNA, 1559 bp, Cannabis indica
attttttataaaaacgattgaatgataaattaaaatgacctcctaattaaattttattaaaatgaccttttcaataaaaattaaaaatattcttcttttcaaaataaattttaatatattttcttcttactattacactcgttattattctattaaaatctcaccctacacatctcgaaaaattgtaaaatttcacaaggacaaaactaagactgttgtgatcatttttctattggacatattgagagaataatttgaaacataaaaatctatttcttagcaaaagaataatttgcgacataaatatttaaatttaacttccggttgcaaataaatacttaagtataattttcaacggtaataatagttaagttataattttggaacttctattgatgtctggctattaaatgttaagtaaattgctacgtgataatctctaattggtcaatatcattaaatttttattttaaaaaatattttaaatataccaataaaaaattacgactttatatttaatagctaggtaactacagagttctagaaatataactcatgtattattaatgctaaaaattaaacctaagcatttatttatttattataaatcaagtgaatttcattgctcaaaacacatttatacaaccaaatagcattctccaagtagaagaacctaaaaacaataaactttacaaactttacaatgcttctaactattctttatcactagttgacgctttctttggccatatacaagatattctcttctttgacatatttttaactttgcacactatactatctacactcggtatcaagttttaccataaaatgtcatttctagctcggcaaatggagtatacaagggctgccaagactgcagaaagaatcatctttttaaccttgctaaccttcgcttttcgtatccaccttactattcgatgcaaagaattggaagtcatcctctaagatagccaatcttttattttccttaacctaagtatttatttacaacctaaatatttataccgcaaatttctcttaacaaaactaaaagtaaaaaatcactttctcatatagaatcaatttcacatgctcaagagtcaaaagtcaaaaacagataacaaaaagttacaaacaacataaaaatgacattttttttttctttttttacaaatttaccataaaagaatagtttttctttttttttttctttcttaataattcaactaaacttagcactaataagtccttgaagtgatccaatgacaccagcaactgcaacaacaaagcaaacaaagctaaaagtcttgagaagaagccattttcttgtccatggaactatgttgttttgcacacagtacatttccactggaaaatatataaccataggccaaaaactcaatgcccctgacactcccaaaacttgattgaaataaggaaacaacatggcaattcctgttgtacatattacatacgcagttcggaaacataatcgaaagggatttagttcaattgttggcactaatggtaccttcaaactcttcccaaattcgcta

SEQ ID NO: 210336 - DNA, 558 bp, Cannabis indica
aatcgatcgggtgtgggaaaaaaactcagaggaatggacagtattttgtcaatgtcgatgggctgaaaatactggtgtagaagattgatattccattctcttgattcagtaatgagtgctgcaacagtgagtgatgatggaccattaaaagaaatcggttgaaagctgtaatggccaggaatccatttatcaattctagcttgaacattgtggccatttccaatcttaaaccgaagccctcaatcaagagctctcttccccaatgtataccttgccaagtcaaggatggtgaatggccaagtctagcctctaagaaagaattattggagaagtagcgatgtttcagcaaccggctaagaagtgagtttggatactcaaaaattctccatgcttgttttgctaatagtgcctggttgaagtgaacaaaagagcgaaatcccataccaccttcaaacttcgatttacaaagcaatttccatcttttccaatgaatctttgaaccatctttatttgccccccaccaaaaatttgccatcatagactccaattggttacaaa

SEQ ID NO: 210337 - DNA, 845 bp, Cannabis indica
cccaagctatggccaatattctaagtccaatcatgcaactcttgttcccagtgagtctattcagtacaatactctgtacatacgtacataagatcgatatacatatatatatggagagagtaatagagaattgaaattaccttatggccctcgtcgaggagaacaggggagagactgagtcgtaagtaaaggtctttcttggaagagaagatcaattaggagaagttgatctggaaatgatgtcggtgtaattggtgggaaggaagtgttcccaaacgacgtcggattgggctgcggagttgagagccacgtggatacggcggaggatcgagtggcgtctttgggtgtggtgagtgatagtattagacacacgcaaccctccggtaaggtatccagggtactacttgttaaacgctatctaatatgtgtcgttttgtgggttcttgttcttgtcgtacgagaatattcatagctaatgattctaatgtgaaattgggaattagagtttgactacttttgatttttcaagagtttttagctacatagaagtagaagttgagaaacagatgagtgattctcattatcagatgaatgattacaatgtgtatgagctatgtatagactaagacaactgaagagagtaactaattagttacagaaaatacaccagaagtaactaacaactctcactctaatagatctaactaacttacaacttcactacacactagactaatctatagtgccatacaatatcatcaaaaatcagaattataaaaaaattaacatgaaccagatttggttagagcactcagttaaaaacagttgagattgatgaatatgag

SEQ ID NO: 210338 - DNA, 776 bp, Cannabis indica
aaaagtaagtgtcaataatttcatttagtatagctttctggaatgttgctttcttgttataaggaaaagaatcaactgagtacatggctctcagtttttcacttattaaacaagtggagttttttttttattgtcgtggataaatgcatatgaaaggatttttttctcttcatggttcgaccttttttttttttttctgaacactagtgaagagtgttaaagaaatattcaaacaagagcattataaacactataatcaaatatattaatccaatgatgctcttacaactatccaagatccaagcatttatttagagcattaatggttaagaaaacatacctcccatattgctcatcccatcatattgagccattgatcaatatccaagtccaaaacacacaaaacaatatgctagagaatgaagagtaatcaagagacaattgtggagcaaacccacttatgtctaaccatcaacattcacacaaactatccatccttaatatatacatacctcacatacccatctaaccctaaagggttatataacttattgggttaataaggactaattgatggtggactataactcaatgggccaattatagtcatatgggtgctctcatgtgcctctaaataattaatagttgttaaccatcccattatgattgtatgagaaatattaggcacataattaatgattgttattatagtattatattagtccacaaataaataattctaacattctcccacttggacaatataatcaatcacc

SEQ ID NO: 210339 - DNA, 2076 bp, Cannabis indica
tggtggtacagactcgtagatgcgtggctgatccgcagaatccacagaccgtggatcctgcacgacagaatccacagaccgtggatcctgcacgacagaatccagggaacacgaggattccgccaaccataaatttcagacagccatcaactgcgggtcacggtgtggcgactcttgtgagtgaaatcgcacctggtgtgcaagagactgggaataccagttctgcagccaactagggcattcataacacagtcgttccgcccactaccaatgttcaaacgaccattagagaagacactaaaatctggaacctccgcgctgctcttggagtcatgcagggtcataccaacaccttgcatcatgatcaggaggaactccgcgccgcagtaaatctcatatttgaagagcagaggcgtatgttcgctgaatggagggacaaggagatggaaacgttaagggctcaacaagcagccattgacgaccgaactcgacaggtcactgtgtttatacgaaaagcctatcaggccgccgaacaacaacctgtaaccgtcatccccttgggcgaaacaaaggaagatccagtgatgagcacctctcagactataaatggtcagccacccaatccccggtcacagattcctcttgtgggccaagtggtaggcgggcagaccttgtctagtaatttatcagtagaagtcatacccaataatcccaacccagttaatggtttcgactagcaaattgaccaaaccaatcagtcactaaggcagccaggtgtttctgtatttgaaatattgggtctcatgatctcagaaatgatctgaacaggagtagaggattggacgaccagcttgatgcaccaatcgtgcagcccagaacctacgctcaaaatcctgcttaaagagatgctgacgcgactcaggtcgaccaagaggccgaacaggttagtccagccgtgcaggcacagttggacgaactaaaaaatatgttccaaggcctggccggttagaggaacaacgatctcgagttggaccgagcacgtggaatccctttctcccccaaaattaatatcctggaattgccccacaagtttaagatgacaaaatggaagatgtatactggaaaggaagatcccttatcccacctcaagtatttcaagatgcaaatggatctgcaaggagtacgaggagatgtatgttgcagagttttccctgccaccctcttaaaagccgctcaacaatggtatttcaagttggcgcccagattgttcaactcgtggaaggctttctccacggagttccatgcacaattctcctcctctcgctaactttcgttgcacctaggagatctggtcaaagtaaagcaaagaccaggggagcctctccgagcctacattagcagattcatgacgggggcgactaaagttgcacgggtaaccgaagaaggaaagttgtccacgatattggggggcattgaagtccttggcgaactttggaaggacataaggaagaacgaaccagtagactcgatgactaactttcttgaccgcgcagaaggatttattaagcttgaagaagccatccaacgagcagaaggtgagcagaaacctagccggccaaaagttccttctactgggacatccgtccaactcccccattacccaagcaattcaagctcaagtggtaaatggtccaacaacaataataggcaagggaatggaaaaaagagaaagttcactggcaagaccgaacaagctcctcagaagaatactgccaagtataccgcatttactgtcctgatggaagatatagaaagtatttacatggctactcagtcattagccccttacaagaagccttcacccatgaaaaaagatgtcagcaagaaagatatgacaaaattttgtcgttttcatggggattacgtattggaattattttaccaggatctagatttactaacacgtatgttattaacatcctaaatatgaacttctaaaacgatatgaaataaacacatataaagtatctgaaaccttacagtggttgcatttgaatataatgtctccttccactc

SEQ ID NO: 210340 - DNA, 949 bp, Cannabis indica
tctcctccaatttcttgacatccttttcttccagccaatcaaaacgcacaccatgatctaaaagataatcttcaagtaattcaggcaatagaataacaatatcatactcatcggacaaaaacacttcatcatcatcatcatcatcattatcgcttcgatctgagccactaattgttacttgtttatttttatcatcatgattgcgatcgtggtcatgatcatcatgaccccaaattatgttggagagctcaaacaccttctgatcgtgctgatgagtaggaggatgcaagggataacttgatcggttggcattaaactttttcttgaggcgacgaaatttgtcagataattgtctcttggttaggtttggaatagaggccatgagtgaatctcggatgaaaaggaagaaatcattactagcgacgttgttgttgttttgatgttgtttggatttggagtagttaatgaatccttgtaagagcgttatctcatcctcaaagctccatgttctactacaattcttcgtctttttcttcttcttctttgttattgtcatcttattgttattgcgattatttttgtctgtcgtaatagtacgcttgctattacgactacgcttattgctggcgccaatgctgaaattagtggtagccatttctggaacaatattgtaagttgaatctgagcctaagtctgtttctgaatttgtttcatgatcaaaaatgtagtaatcctcaaaagcatcaaaatcgaaattttcaccaacatacaaagatttcatattggctgaatggtgtttttgtaagagtatgtccaaaatcgttgtgtatttataaaatttatatagcaacaacaataataatatctcaaaaaaaaaataatgataataaatatatagatacaaagagaaatttagattgtggttataaaaaggatatatcaacgggtc

SEQ ID NO: 210341 - DNA, 772 bp, Cannabis indica
tcaaggatatgccgcgacactcactgttcagcgaaaaaatgggaaactttcctatttttggtctataaaagattttggagctaggttttcatataattcgaacttagagaccaattttgagcatatgaagataactaggattagaagacaccattagaggactccaaacagtgttttttctcatctatctttatattttatgttttaattgaatctttgttgttttagaatgactttcatgagttaattttctttaaggattattatgtgaactacttaaatttattttatggattaatgtagttattcaatttcatcttttttttttcttatttcaattccatgaaatctgatttaattttgcaattattgactgatcacctataattgttaactataaattcgaataaaaaattttaaaaagtgagattttaatatacattgattgttatgaatgtaaattgatttaagacaaagtatctagattatttgtataattttatgagttgctttatttaatgctttctttgtgataaactttatcatagggataaagagagcttttacatagattggatcttaataagattatgaactacttaattcaatttgtcaattgaataggaagaagataaattgtgcaattgctttaagaaataaaataaaaaatagttgggatcataataatccttgtttttctcattattatttctctaggttttaattatttattttgttttatttacttatctccaatatttttattaatcaa

SEQ ID NO: 210342 - DNA, 892 bp, Cannabis indica
ataataaaaggaatacctaataataacattaattagagtatttcattattaattaacttgccattcagctcattcttcttcatttttcatttctctattaatattgttttagaaatttaagtaatacaccttctaaagagatattctgatagaatactttgtttcggaattcaaaaagtcttacattgctaatgtgtggaaagatataatagaatgtacattacaaaaaatattatctttagtgacaactttttagtcacaacataaatattttgtgactaaatatgagtaatttgcaatatatattaagttgaagttacatcattccgtgggtgtaagggcctaatggaggcttgaagcgaagacgttacaatattagtttctggaaacatcatttataagtaataaagtgtttttaaggaaaaaatatattgaaaagtaaaatggtaattttgtccctactagatgtaaaccatctatagagaatcaataattggcgtgattgaaacaatggatatacaattcatatagcgtatttatacttggtgtatatatagagtgttctatggaatcagggatgcaatttcgaatctatagtggagtcacgaggaattaataagttaggaaattcactcagtaaatttcaagctttgcttattaagagcttggttacataggcccatggtccccatattgtctgagataatatcattttgtagactcaactaattgatttaataagtcaattagaattcaaaaataactgtcttatttgagaatttttaccatgtttgggtaattttgagaagaaaagagaaatagaaatttattcgttagaaatagaagtaaagtgttggggctaaaaaattgagataaaaacacaaagtacttt

SEQ ID NO: 210343 - DNA, 915 bp, Cannabis indica
tattgtgaatgctgaaggagtaacgattgaagagccgagggccatcattgaagcttttattcgatattacaacgagttacttggcagcagtatacaagagaggaagtcggttcagtagaacattcttagagaagaggaatttctatcccagcagcaagctgattttctcttgagagattacaatcaagagaagttaaagaggtaaatttttgctattcctggtaacaaggctccaggactagatggtaattgggagcttcttttttcaaataaattggaacatcataggcattgaagtagctgaagcaatcatcagcttacttaaaacagggaagctgctcaaagaaataaacaacactgttctaacacttgtgcctaagttgaaatgtcctaatacagtgagagattacaggcctattgcttgttgcaatgtgatatacaaggcagccaccaaactgatatgctcgagactcaacttcatttacctcacttggtagctggcaatcagggaggatttgttcaagggagattaattgcacacaatgtaatgatatgccaggatctggtacgacttatggaaggaagttgacaaagtctagttgtgttatcaagcttgatttgcaaaaagcttatgacacaattgaatggaatttcattgaataaatattgtatggattgcattttcctgataagtttcattcaacttgtgatgatatgcattcgaacccctagattttcattgatgattaatggatccatacatggctactttgtggcaaaaagagggctgagacaaggcgatcctatgtcccctttgctctttgtactgggtatggaatatttaacaaggatcatgaggaaaattgggcagaaaaccgacttcactttccaccatagatgcaaggatttgacttt

SEQ ID NO: 210344 - DNA, 311 bp, Cannabis indica
ttggtgagagttagagagggagagagggccaagagaaagagggaaggtatgaagaggggatatttgagatttaattaattttagagtattaaatttttatgtattttaatgttgcatattaaaagaccatgtacaatttttaaacaaaaattgtcaaattttcctttttgttttattatttgaaggcattatttgaaaatatcatcttcaactcatttaatatgagatttgagagttgtttaactgcattacaagcatttagattatgctgattgtaaaattaaaattaagaaatcggaatacttctttta

SEQ ID NO: 210345 - DNA, 547 bp, Cannabis indica
ggtaatgccagaagtaaattaataatataaagaatagtaaaatatctttgtatgtacctagatgtataagatgaatgaggttccatctcaaaactaattgacaatgggaggagtagcctattcctcttatatattctattatctttccacacattgccaaatgtgggactctctaacaaaatatgcagtcattaacaaccaagatagatgctcatgttctcaaatactgagaatatcattagcatatgtttcataatgcataggacacaaactcttaaatactaacattttgggcagttccacatgtaattgagcataaattatctgatgatactactgttcatatatcattgaagcttttaatgttttacaaagcctaggattatgttactgatcttatacaacattattataaagcaagctttgtgacagtaataataaactatactacaatgactgtcatagtgtcatgcttaaatggtagtttttactctgttttttgtttttatttttcttttatggtttatgattgctcccatggcatgcc

SEQ ID NO: 210346 - DNA, 593 bp, Cannabis indica
ggtggtatattcatggggataggaacagaagtatttgatataggtatagtgggaggaggataagtggcaatagggatgggtggagtgggggctactggtggaaattcttgaggaagagtatggggagagatggtagtggaatgtaaatccatgacttttttggtttgagacacaatattgcacgatttagtgcaaggaatgggctgctttaaggaatgattagtggtattatgggtatcatgcttatcaataacagtgtctctcgatccagaagaggaagccagatcagatttgtagtcaccaaccgatgtaggagggctaatcaattgcaaatgttggaaactcttattagcagtttcaaagatctgagtagactccaaaactcctttgcctttttcagtattagtaacacgaacaggagtagcaggcaagtgtctcggatgaatgattatgggattgatagtatttcgagcaagacgagttatgaaaggccatggcccctcctttgagaaatcttgacgatatctgtcataactagacttgggcaaagacgatccttccatccagggaccataaggaagatcgggatgaag

SEQ ID NO: 210347 - DNA, 685 bp, Cannabis indica
tgattttgcttggtttggagcttaatatttggagactggtggagtctagctttgaattggaagtgagctagtttccttactgaattttagttgaatttcttgctgaaaatattgtaagaaaagcatgttttaaattgttgagtttgtgaagttgcatgttcttggattttgttgtgattttaatgaattgagtgagaaattgcatgattgggttgggattcatgtttgttgagcttggattgtgattttaggttattttctagcttgaaatccatgttattttgatatgtggctgctggaagataattgtggatgatggatttttagctcaagttcttaagtttgggtattgttagtttgaggcatgaattatgtgttttttgcaatctgaaattgtgagtttattattggaaattgatacatatatatgtgtatttgatcagctattatttgctagcaatcttacttgttgatttggaagtttggttgtgaatttgaagtgaaatggatggaattgttgctgaattttcgtgttcttcgtggctggtttctaggttttcaaaggtgccgcggcatgctctgggcatgccgcggcctgcctctgttgagggaacctaggagttggccccaggtgccgcggcatggctagggcatgtcgcggtccgccctggtgtttttgggcaat

SEQ ID NO: 210348 - DNA, 521 bp, Cannabis indica
ttgtcatatagagcataaattcagtagtaaagtttatatatactcctttatgttattaaagtttcaagttcgtttatttgcataccaaatgtttgtgaatagtttcatgaggtttagctttgattttctgtatgtccgtaccattacaggtttgatccaagcttcttaaccctttctctcataggtttttgcatattcagtataattaacaaggcagcatacacctatacataaaggtaaagttttattcaaatatttcactttaattgattattatataatatttccaaaactttgcttcatatttatgcaaatttcttacggattgtactattgaatatagtaacacaatacttgatgggcttgataattaagttattacttatacagatgttttaattcttctgcaaattttaatatttgatgtttagggtttaatgcaaatttacaccatataatgatccttcaaattgtataaaaagaactatataatatattcttgcttttagctaaattttgtt

SEQ ID NO: 210349 - DNA, 546 bp, Cannabis indica
aagagttgagagattaaaaaaaaaagataggaaattgacaaaaatattaataattggtaaaaacaaaaacaaaacacataaccctggatatgacaaataaaaaaaaatcaaattactaagataatcttattaagtttgaaaaaatataaaaaagagaaaggacggcgggaaaataaatagaaaatttaaagttatcataatttaattaacaaaatatttttatgtatcaatacttattttgttttgaagataaaattatatttcttcttatatatttaagatatttacaagtaatatacatatatatatatactgaaaaaaaataaaaaaaaaactaaaatataattatttttttttgactaaagagaatattcattaataaaagacaaaacaagcaaacactaaggccacaaccaaccggcccaaccacacaccaaacagcagctactaggcgtaaaaacatgcctctttcagcttgtataaactacctatcttttaagctatacaattttatatgtttaattatatcttttatatcatttacaa

SEQ ID NO: 210350 - DNA, 1071 bp, Cannabis indica
gattacatggtacttgattatgaatgagattatatgaataagcttcaagaccttatggaaaattggttgttgaaatcctcctaatatccaactattagttgttcacgattccttgtggaaaacctcttgatgtactgtgcaggtttcattgtgcttgttcaactcgatataatatttgttatgttttccagttttttttctttctttctattgataagaaacataattttttaagttcagaaataatgtgaggaggaaaagtacagtacaagattgtgctctactctagaacatatctgtttttctttaacaaacttttcgtattattttgccttcgcttagttttttcaattctcttttgtaattagcttgaaatatatatatatatatttttttttctattcttccccatcatatttgttcaaacacttgtttacatattgtaactagtcttctatactagtatttcattaaccctgagatatttcttcaaacacaaaacttacaagtgatagaacacatttaacatgatctgtaacttgcaggctttggcagcagcatcaaagactgttgattgtcgcaagaatgtccatagtttgcatgtatattttctacttgttggggattttgatagtaagtaaattaccattggtctttcttatggttactgttgtatgtaaagatctcttgccatgtattctattatccaagatattctctcaggatttgatgatgagtataactctgtgtgtgtgtgtgtaatgagatatagatattaagtaaaagtaagcttctccattgacaaatttatgtttgtattgaaaaatgtattgagcttctaggtttttactgacccaagtagattgccagctttggattcttacaaaacttccgtaacataatgtagttgctgccacatatttgcatgattttgcatggaagatgaaatttataatcttttaaattcttttttctatttatgctttaattggcttggttttgtttttaatttattttttatttctaaacactacgatgaataatttttggaactaaagttcatttgaaaat

SEQ ID NO: 210351 - DNA, 526 bp, Cannabis indica
ctcttattagttattactatttagcttgtccaattggctctgggtttgaacgatgggaattcgaattttgtttttagttatattatgatttgggtttgagagatgctaaagtgcaacgtgcttaggaccctagtatgtgtcaatatccttattgcttcaactaaggatcacgtcccatatagtttaatataataaattttaggaagtatagctacatgtcaagaaagtgctagtaacctggcgcctaatagcaatgctctttgggttttggttctagttgcgtggaattatgtttatagaggcatgttagtgtagtttcggcccattgggatctatttgcttttggtggagattgctagttagatgagtaaaaccttatcgtagtgacaagtgccaaccaactttatttggtttgaaagagttttcttaacgagtttcattagtttgatgtgcgaaaaagaatatgatatgcatatagagaaggaaggccattgtaaataaagattgtagagaagcataatgttca

SEQ ID NO: 210352 - DNA, 697 bp, Cannabis indica
agaaacaaatatggggtgcatcgatagaactcttttaaggagtacatttgtaacgtctccgctttaagcctccattgggtccttacaccccacagaatgaatgactcttatacacgagtacgccacgagtgtttccagcgtgctttgttgtaataccctggaattaaggaaatggattagcaaagccctaactagttaattgagtattattgtagaattatattatattataatttattatatgcgaattaatatgagaaatgacatgttaagaccccgttggtgagttaggggcattttagtaattttgacccgagaagggtaaaactgtgaatttaatttatttatgtgcttatgaactatattattatatagtatatctggtgtgtcctttttcaggtgtgttctgacaagttggcgcggtatagtcacaatcgggtatttcgggccgaaccgggttcggggccgaaatataattttgggataaattattggcattttatttatgtgtgaataatctgaaattatttaaatatgtgttatatatgaaatgaattcaatgcccttgattgtttgagtatgtgagaaatggccctaggggcaaaatggtaaatatgtattttggatttattttcaactaaaggcattctttgtaaaaaaatgaaattcatttctgcatttaccttaactctaaaac

SEQ ID NO: 210353 - DNA, 557 bp, Cannabis indica
cctcaccccaatcctcaactagtttatgcctttgcaaataaactccagagtatgaagatgactcttgatcagagtatcacttcatacttgctcatgatgaacttgaaattccagaaagaaactatgctgggaattgtcttattaagagagcaaagagttcattttattctcaacagcttatcacttgagtttaaccaatttgttgtatcttttatgattaacaattagaactcatctgacatagacaagttggatgctgaattgcgttcttatgaaaagacattgtccccaaaaagtaatttagcgtatcgcttatcagttttacatatcttgtgacttaggggcctataaactgtcgagcagcagtttctacttaggttgaccaaaatacctgaattcagaatcaaggtaagattagtataataattgcatatatttttgcatgtttagcgtgcatatttataaatgtctaatagataacatatcagtaatggcggtattagtgtatataaaattgcagtgaataccaacagttttatgtttggcgtagtacagat

SEQ ID NO: 210354 - DNA, 629 bp, Cannabis indica
ggtttttcaacatgcgggatctcttcaattctgaaaaacttcctatcgaggaggaggtgcttcaagtaaatatataacatttactgatttcttcttttctgtgagtttcagtgctatgttataacattccctagaattcgattgtactcctcgcactaatcccacactcgtaggggtaggaaatttcatagtaagatgatagattgaggtgactatcttcatttctttaatattgggcggcctatgaatgcgttgtatgcagaatattgatcgatcactgcaaaatcagccattaatttagcaataacaggggcggttgctagagtgataggcaacttgattattccctttaatgcaattgtatgtctagtatatccataaatgctcgaggttactagtcgcaaatccctctcctgcaaccccattcacttgaaagcctggaaattgaggagattgactgaacttccattgtccactaaaactcgatgggcatgtctcctccaaaatttgcgactattacaagtgcgtcagcatgggggtggtgtactcaccaagcgtcactctccataaaagttatgtcatcgcactctttcttgaacaactttttcaggttgctcacttagattgtt

SEQ ID NO: 210355 - DNA, 588 bp, Cannabis indica
gaatgaaaatgaaaataggaataggaacagaataaaatttaaaatacataaaaaaatttgataaaaattcattaaatttttttcttgttacattagaatggtctttccttcctttttaaaatgaaatagtcattccatcaaaatagtggaaagaacattctattaaaatgtcatttctaatactttcaaatgcaattaaacaaaggaatgaaatgaaaaattgttttatttccattctatttcatttcattacctccggccactaataaacgctacctaacagttgttagattttaagatggaggtgtttgggatttcaatcttaaaattaattggtaataaaataaatagttcatccatcttatatttgatattatgaattccacacattattaatgttagactatttctaatatatccctcctcactttttttgcagatgtgggtataataaacgacatttaagattactgaatcaatcgaacattatatttaaaagaattccgcaataccaaatcgagaaatttatctctgtaaacgtcaaaaattttgtaaactttttgaaaaatgtcaaagatccaacatcac

SEQ ID NO: 210356 - DNA, 734 bp, Cannabis indica
gccagaaccgtggataaagagggtggtatctgcccgagaattgtgaaatcccatctgcaataagctctgttttaacttgtcattccaagcgcggggtgcctgctttaacccgtatatagccttgtgcaacaaacacacataatcgggatgttgttcatcttcaaatccaggaggttgttgcatgtacaccacttcatttaaagtgccatttagaaaggcattactcacatcaagttgagtaacttgccaattgtttgatacagccaaggagagtacagttctaacagtcacgggcttcacaacaggtgagaaagtttcttcgtagtcaatcccaggaagttgtaagtatcctcttgcaactaaccgagacttacatcgatccaaagatccatctgcatttagtttaactcgaaaaatccacttgttgctaatgacctgcatatcatcagttcttggaactaaagtccaagtctttgccttctttaaagctgtattttcagtagacattgaagcatgccacttcgggtctttgagggcggccttaacagactttggttcagtgggtattaatgcttctggtagaggatgtttagtagcacagtacacttttggttttcttatgccattttgagaacgggttgtcatggcatgggatcgggtgggatttggtggatgcaagtgaggtagagactgggattgagcagaagtatttggtatatcattgttggtggtat

SEQ ID NO: 210357 - DNA, 760 bp, Cannabis indica
atctgaactggttattcttcatatgttaaatctggttgtagcttaagattttcataaattagtacatgagtagggtctaaaatatacttctgcggcataaaaacatggaatacattgtgaactactgaaagagcttgaggcaaagctaaacaatatgccacttgtccaaccttctcgagaatctcaaaagatcctgtaaatctagggcataatttgcctcttttcccgaaacgtttgatccccttcatcgaatacacctgtaggaatacatgatctcctacctaaagctctacatttctatgtttcgaatctgcataactcttttgcctactctgagaggcaagcatcctagacttaatcttttctattgcttcattagttcgttgcactgattgtggacctaagaatttttttcgcccgtttcatccaagtaaatgggagatctatactttctgccatataagaattcatagggagccatccctatggtactctgatcactgttgttatatgagaactctatcagtggcagatacttactcccggagctctcgaaatccataacataggctcgtaacatatcttttagtatccgaattgtcctttcggattgtccatcagtctgaggatggaaagctgtactgaatttcagtttggtacccatagtccgttgaagactctatcagaatttagaggtaaacttcggatccctatccgaaattataggctttggaacaccatgtaacctcactatttcttt

SEQ ID NO: 210358 - DNA, 703 bp, Cannabis indica
tttaaaaaaaaaaacaaaaatgttaaaagcaaaaaagttggaaaaaaaattaaatcgacaaaatatatgtaaagctaaaaaaatgatgattaaaacaaatttaaaaatctcatctaaataaacatatcaaacacattgagtaactaattaacttaatctataaaaagataaaaaataaaatcatcacaagtaactatttatcatggttttattattgttatttttttttctaaaaaaaaagaccaatctttttgaaaccaaagcgttatatataaatataattagacatcgcagtcattacaaatgatagttctaggtatcgaggatagctccacgaaacctgtaatgttctcggtgaaggcccatttagccacattgtgggcagtaaaataaaattacacattctagaaagaaacaaacgaaaaaacaaaaagaaaaaaaacacacagagttgattacagacataaacataattatcaatattccaatcataatgaatttctttcagcgctttgataaccgtttctgaatcactctccaccaaaacatagcaatgctttcttaaaccgagaagaccctaaagcaagatggcacgcagccgcctctccaatcaacgggtcacagaagttgagtctggaggtaacagcccacacctactgtccccagtatgatctctcgccaggccgcaatgaacatggagtct

SEQ ID NO: 210359 - DNA, 506 bp, Cannabis indica
aagctttcttttctctgtcttttgtacctttttgtatacatttatggattttgatttttatataatatgaagatatacatgatttttaatgaatttatatataaaaatgtttcattaagtataatttggtagcttggtttttctttttgcggagaacattggtctcagtcattgtgacattgtctcaacctcgacctctaatatagaccagacttttttctcattgcagaattacatttatggttgttctatgatatttctctatttcatttcagattttgagttacacttttgagcctcttcttttcattgggttaaatttgaatatctctatttatttcaatgtggtaaagttgtttcaattttatactttaaaataacaagtaaatttttgatcctataatcatgtctctgcatttttggtgctcttcaaggtcaaagtcactactagatttattacaggaaataaattcctacaatatcaaatgcctctatgtaatgtattc

SEQ ID NO: 210360 - DNA, 1166 bp, Cannabis indica
actccctccccgaagggagcgagtcacttaaagatcaattttcaaccagtaaggaccgagagcgggtggaaacacccaaacaacaatttgagaagtgaatttaatcacttctgatagttggatccaccaaactttagcaattggtatgatttaccccatgtcaacgcacaaactccaccagctaggcagagaagagtgggcgacaaggccctgcgtaacttagggctggccatccatggagaagtaccaaactcagggctggccgactattagtgtaccctctcccagggtatagccggataggctctggctaatttgaggttgtaactcaatcaaagaaggctaatcaaccatgcccctacaacaatagatccttctgtgcaagcatagttggattaaatacgagacatgaagggcctagctggtccaaaaccatcagaacttgatttagacaggtcaaggggatcagcattctcgacatacatcaatgccttgcccttgcccaaattcaagatggcaacttggaagatgtagaaggagaaagaagatcctgtggtacacctaaagtactttgagatccaaacagatctccaacaatctagatatgtgcgatgtcaaatcttcctagaacatctaggtgaaatagcccaacaatggtatttcaagctagccccaggaaaacttaactcttgggaagaattctctcaagaattttgtattcaattctctactttaagaccaatacctgcccgactggaggatcttgtcaaaataaagcaaagacaagatgaacctttgaaggactacattcaatggttcatggttgaggctgccaaggtcaaaggcctgacagaagaaggccgatatacgaccataattagaggcatcgtaccgctgagtgacttctagaaagatatcaggaggatctcaatgaacaatatggaggagttccttaagtgagttgattgcttcatatagttagaacaagttttttggcaagcccagacaagagggtaggacattaatgaacaaacacaaggccttcatagcgccccaagtattgtccaacatgcgtaccagcacaaaaaatctctgtctattctcaatcaatgagaatgatggaggtacgcacaacaacgacgactctaactaacataatggcaaaa

SEQ ID NO: 210361 - DNA, 528 bp, Cannabis indica
ttttaaaattttctaaattattttaattaaaaatatagcttattttaaatatcaaataaggccattttataaaattaattaaatattgtaaaatataaaatatctaaccttttatttaaaaataagatagaataataaaaaaaaatatggtgaccaattaagcaaaaacttagattttatccattttcaagttcaaaatctactaatatttaatattaattaattttattttgatacttagatttgagatttgaaaaataaaaaatttaaatacaaaatgacacaaaaagttcaaaattacctccatgaaaaagcatgaaaaaatgaaaaaaaaaaaacgaaaaaaaattagcatttggtgcggatggtatattgcataccatccgcacgcgcagggagggacgctgatcgaggatttccgcgcacgagggattcagatagcatctgggcaagctccttcggacaagccccatgtctgaatgtgctgcacccgagtgacactcgggtccgcgcgcgcacgtgggcatc

SEQ ID NO: 210362 - DNA, 860 bp, Cannabis indica
ctggtaaaagtaacttttaccagtgtatttcgcaaactgcgctgacaaagaggttaaaattttaccagcgtacatttgcagtggctaaaatctaacttttaccagcgcatttacgcgttgggaaaagttatttttgctagcgctttcattttatgatagcaaaagttataataccaacattgatttgccaatccccttttgccaacacatcacaagtaaattctattttaccagcgcaataccagcttttgtcaacacaaaaatgtattggcaaaagagacatttcttatatatatatacaaatatttaaaataattcaacttttttatctttattttactgaaaaacgttttttttttcagcctaatttgatagaaaaattaagcataaaatctcaaattttcctaatactacccattcatgggtaatacccattcatatatatatatatatatgggtaatatatatgacgaaattatactaacttttacttaactaaattttaaaaggtgataaaaaaatttaattcttgtttgttattaggttcatatgagaaaatatagaaattagagttttattaaataatttagttgtaaaacaaaagaattctataagggaaactgaatcctgtcattattttatgttgttgtatgtctttagttaaaaatattgtgattagccaattcagtgttgcgttcttaatgaccatttatcaactctctttatggctaaatatttaatgtctatgtgctagctaactttgattataactattatagttcttagccatagatattgtagctgaatttgtcgcaaaattttattaattccctgaacatataattccgaactctaggcct

SEQ ID NO: 210363 - DNA, 1131 bp, Cannabis indica
aacccatatgagaggacagtgaggaagatcaacctgtaattcagtgagaagagagacaatccatttcaactcagctgcagtgtttgctagagcacgaaactcgctctcagtgctagatcgagcaacaacctgttgctttttagctgaccacaaaatcaaattatcccccaagtaaacaacatagccccctgttgatcttctgtcatcaacacagctagcccagtcagcatcggagtagctttgtaggatcatttcactggctggtgtaagaagaagaccatcagatataatgcctttaagttatctgagtaatcttttgcaagtgtcccaatgtgaaacagtggaagctttgagaaactgactaagtttattaaccacaaacgcgacatcaggtctagtcaaggatagatactgaagtgccccgatagtgcttctgtagagtgttggattttcaaaaagttccccatcttgtaaagacagtttggtggtgctgctaatgggagtattgcagactttggctccttccatatgaagtttgactaacaagtctgtaatgtacttggtttgagaaagaaacatacccttggaatctcgacagatctcaacaccaagaaaatagtggacatcacccatgtttttgagagaaaactgattatttagatcagtaataagctttgtaataagtgtctgatttggccccgtgaccagtatgtcatcgacatacacaagaagaataatcacattgtcaccagacccataaacaaagagagacgtatctgacttcgatggtttgaatccccactaaagtaaactaaccctaagcttgtcattccaagctctaggagcttgtttgagtccgtagagtgccttacgaagtaaacaaacatgatctggtttattttgatcaatgaaaccagggggttggctcataaaaacagtttcagacagctgaccatttagaaaagcattgctcacatctgattgagtaactggccaattttaagtaagagctagggagaggacagttcgaatcgtgactagtttaacaactggagaaaaagtctcagcataatcaatccctggagcctgcaagtaacccttttagcagccaacctagatttgaatctgtcc

SEQ ID NO: 210364 - DNA, 1120 bp, Cannabis indica
atttgcctattaaaggggatatcttgacttaggacaatcatagagacggtgccaatcacattaagtcggccctggacaaagctcttgtaaataatggttggctgcaaatctttcctaagacggttgttcggtctctctggacctgtaattctgaccatcgacccctctttattaataccgacacttcggtctctaacgccagaaggcctttccgctttgaagcttggtggacaagggacccccgtagttccttggtggtggatcaagcgtggaggtctgtttcccatgtttgggcccctgctagagtgtttaagaaagttggtgcgacccgcctggccctgagtaattggaatcgggtgcaatttggcaagttggattcttgcatctctaagttggagggtcatttacatgctatccaaagtttgcctgctggtgacagaaattgggctacagaggttgaggtgaggaaagagcttaatgaggctttaaggcggaaagcaatctattggcaacaaagatccagggtttcttggattagggatggtgataagtgcactaattttttcttcatttctgccacgattcgtaatagaagaaactcgatggatagtatcttgaacaaggatggtgtgtggataactaataaagaagagattggtaatgcgtttactggttttctgggtgacattttcaaaaacccacctcagagccccctggaaagcttagactacttaatccctgatcatctctcccctttggagcagtctgagcttgaggtgatcccgggtcacgacgaaattagacaaacgttgttctctatgggaagcttgaaggctccggatcctgatggtatgtcagttctcttcttcaaacactactggaactttgtggggcaagacttttgtgatgcagttgtggactttttccagtcagggaatatgcatcgaggctttaatgctacaaatattactctcattcctaagatccccaaccctaaaaaattatcccagttcagacctatctcgttgtgcaatgtgatttataaggtgatctcgaaaatcattgcaaatagaattagagtgtttctacccagattgatctgccctactcaagcagcttt

SEQ ID NO: 210365 - DNA, 557 bp, Cannabis indica
tagtcctcgtgggatcgacccttgcttacagttatactaaattaattgtaggtattggaaataaagattagtaaatttgttgtggcttacgacccacatcaaatttttggtgccattaccggggacgatgacaaaggcctcttctagatcctaataatggctttcagatatctttgacttcactaacatgtcatagatgtatacctctatgtttttacccaggacattcttgaatatcttgtttaccattcgctaatatatggctttgacattcttcataccgaatggcatgaccttgtagcattagatccctttgttagtttggaaactagtatgttcctggtcagccaaattcatatttattttgttgtagccagagtatgcatccataaaggttaacaacataaatcctaaagtggcatcaaccatttaattaatgtgaggaagtgggaaatagtctttgggacatgctttattcaaatctgtgaaatctatacacatcctccatgtcctgtaatgcttggggaccaacactgggtaggcaagccatacatggt

SEQ ID NO: 210366 - DNA, 521 bp, Cannabis indica
atctaaaaatgatttttattattttcaggtttattttttttatttaaaaaatatgtgcacacatatatcatacacaaatttgatatatacttattgtataaaaatcagttgaataagatgattaacccgttaaaattacttattattagacgtgttaaatttgtatgtaatttatattacacgtattattgcatctcaaaaataaattttatggtacttcaatcaaaataattatattaaaataaataatatttatacatatcactaaataattctaaattgttgaagaattggtacgcaacaagttcatttgcacaagctcgccgtatttttctctcactagtttaatcgaatttgaaggttggcataaggggcttggaatggggtttattcttttccttggagctagttgatccgatagtagttctgatggtggtttgagtggacgtacttgctttattggtggcttaatttagagttgagctcgaggtttaactcggggtgatagggttcgattatga

SEQ ID NO: 210367 - DNA, 619 bp, Cannabis indica
ttctttgccgaagacttctatttggctctccgtacaccccggtaaatctaaactcaggttgtccttctaatctcaccgtactgtcaatatgattttgagaaaatgagtcaaccgaaacttcatcttggttcttccataaaagcgctaatcccccacttcttccactagcttcaactacaaagcacccttcaaagtctaaacctctaccaacttgctccactttttgttttttacacaaagtttcacacaaaaacacaactttgggccttttctggtgaaccagattttttaggaactgaatgtttcgtgttggcccaagcccacgacagttccaactcaaaagtttcataatgattggcgagccccattgccaaggcccgccaaagataagttttttggactatttcccatgattatttccatatcagcattccctcccttttgttcattttccaccttgcgttttttactatcattaatcacagtattatcaagttgaataatgacagcactttccttgtttagaaccatttctctcccttggtttcccataattcttggccgtgtatcttcattcaatccccccaaagtagcagagttattaccttgattccctgcc

SEQ ID NO: 210368 - DNA, 911 bp, Cannabis indica
aatcaaaacatcattggctaaaatatgcgcaacttggttggcttctctaaatacaaaagaaatccctgccacacattcattttgcagcagtcatttaatttgcgcaatgagcccatcgacatcccgacatccttccttctcatgcatcactaagtgtactgcttgaaggcaatcagactcaacagagaaggagggaagactgcgttgtataccagcctgcagacccatcaaaatcgcttgtagttcttcctgcaatggcataatgttcttttgcacatacctgttagcagccgcgacaacccgaccttcatcatcccgaacaactgaactaagcccagcaatgccttccccaaccttgacccctgcatccacattgatcttaaaagagtctcgcctaggtggagtccatcttgcctcttccctcggctgtccacgttgcttcgacacattactctctttaaattcatgaagaaacttgctacacctaaatatgttcagaactactacgaagtgcgctgttgtaatgattagtgattattttataataattaataaattaaaataaataaaattagatatttaattataatatattgtagtggtgcttgacactcttttaactttcttcatattaaatttgagtgttgctattacactaattgtggtgcttggccacctcatgaggtgatacttttataaatggtttaacaattttttataatcatttataaattaaaatatgaaaaatttgataaatttagttgaattttcattaaatgttttcttttctttgaaaattgtaatatttaattagtgatattatttgtggagcttgtaaatttttatgccaaattaactttttttttttttacgagaaatagcaacttaattaatttagcattctgaataca

SEQ ID NO: 210369 - DNA, 1027 bp, Cannabis indica
ttttgtcatagcacttttacatcaaaatataattaatctttcaaaatcaatttagggtcctatttgtattattttagaaaatacagggtctattttgtcatttaacaaaacacagggtccaattagtaacttttacaaaacacaaggtccaaaatggtatttatcctttattatttagaaaaaataaaatatctctacaaaatgtttaatttataatttaaatagaatatttcacttttgaaaaaaaaaatataacaaaataaaataattttctaaaagaataaagattattttttttattagaatattacatgtttctatcatgattttcattattaattttatattgttactgattttaaaagtatttcggagtttgtaggaagttgttgaataaattatactcgtgtatttcagtctctaattgtctaaaatatgaattcatcgctatatcgcttttgaatagagtaaacaactctcttgcaattctcaatttatctctatattaatcagtggactaaatttgtttgaaattatatcaaagttgatgttgaagtcgcacttttttagtaagattgtcggtttaagatgagactacaacaactcatgtagtgtctactagtactcgacgttgtattcggctaaagctgtcgaaggccttaggggtcaaggagatttccagttgattgaagcttcatttattttcagagatcttggttgaatgcaaggagttgtgaaatcgattatacatattattgcaaagtagttttaatattatactaattgtatgttctcatgctttttttaaacttttatctatatcattttgaattttatcttgtaaaagtatacatttcgtgatctccataattaatgggttaaaatttaattgatttatggattaaaagtcaaaacacatcaaagcttagagtattaaaatggacaaaatatattcacatatttgtaacaaataaacccctcttggttagaattgaacacctaaattactaaaaagaaaaaagaaaaa

SEQ ID NO: 210370 - DNA, 803 bp, Cannabis indica
tgttggcataagtgggctgtttttttttttctttgttttccttttatttatcatttgttttgctttggattattttttttttagagtttttaacaaaatactagataaaaatttacaattttactgtcacacagattttttttataaaacaaccgtgaaacaacaaaatataataattaaaaacaatagtagaacaactaaaaaataaccgtagaacaacagtgaaaacttaacacaatacacagtatgaaacttaaatagtatttttaaaaaaaattatgctaaaaaaaaaaagttagatttttcagtgtaaaaactctttattttaaaaaaaaaaatgagaaatatatatccaaatatgtcataaaaattatatttttttccaataaaattagtttaataataaaatatctttatatattaaaagtgcctatctgacggcaattcttggtttaacgatcttgttttgtttcctccgttaactttaacagaatattcccaattaatttatattattttttttaacaaaaatttatattattttaaccaattcgtttaaaatgatggattgaattcttcaaatttaataactaacactaaaataaataatattaataataggagatatttaggattttaacaatataatcgccaactctctgtttgaaaaataaaaatatataatataagatagaaatttcagtcgattattctcttattctattttttattttcttggtgaactgcgattctgggcttcagatctcaacaccttctctctcctctccagatcttacgccacc

SEQ ID NO: 210371 - DNA, 896 bp, Cannabis indica
tcaagttgatatgtccttatttttttagaaaagtactcaacaaataacatatacatatatgctgctgtcactgcatacatatatacaaaagataaatcaattaagttttccacaatctactttacaaaaagaagtagctagtattaagaaaaaaggggaaaagaaagctaactacattgaactgcaataatacattaaattagaattcctgagcggagcacacataatcatatcaaaatttaacccctttaactttccagtcaaaatttaatttccaaacataagttaatcaacatgcaacacactgaaaaaatgcaaaattgatgaaccacttttggcaacagaaagccaatttatttaatgcatctccaactaaaactaaatctacaatgaccaagtctttaactaatacatgaaaacacttacaagcacttcttcccgaacatcctctacaagcatttgaaactttgatccgcttcttgatttttttagtctgatttccaattcccgatctctagttttcctccttttagaaaacaacactcccgagttccttctcaacttcactgtacaaaagacaaaatctctaagaaaggcaaggactaatacttgtgagtaggactccagtatataataacatagtcaaacctgcgatttcttcttgttttcatagtacacaaattggttttctctctaggttaatacatatacaggcttggaaggatctcttcatgggtttgaatctaccactgactttaaattaaaaaaagtgctaatgtgttaaaatatttttactcatataataaggattaaggcacattcgatttaataaaataaaatacaaaaatagtctctttgacagtaactaattacttagtcaatcaaaaaaaaaaacg

SEQ ID NO: 210372 - DNA, 985 bp, Cannabis indica
atctactaataatgatattggacttagttaatcaaaaaaatcataattatatatgtattgaattttaaaaatattccatacaattattatgtcgattttggatgtgatttatatgattaatacaaattttattgtttatgattatgttttgtaactattaatatacaattttgttaattagtaggcttactcattaattatcatatacattagtcataaaaatagttgcacaaatctaattatagtgagttgactcattaatatatctattataattaaattaagaatttgtatgaatctatgtaaatatatttttaaattcgtacatttttaaaattgtatttttttttcacattttttgtaataaagttgtttttattgtacaataatgaaaaagccccaagtttaaaataagatagcctaggttgatgggtgtatttttggctaggatgagatgcatgagtaattggtcaatgaaatttatctcatcttggtgccaactcctaggtgcaaggttagctacaatgaatttgtggagaatttttgcctctaaagtaagttggtgcctttttggtttcataataatagggccattaccacaaagatttctagaacactcatcaaagttaaagatgtcatcatttttaagagagagtttgggttcaagcaaaatgccactattgggtgctcctaacatttcattgagagattctacattaagttcaaaagctattcctctaagggttcctttaactcctaaaggggctaagcaaggtttaatgcaagcataaaaaccttgtacaagtctaagatatatatatattggagaattgatttgaataaaagatgtccaacctagagtttcaaaatgatgactaaaatctacataatcaaggctagggagatcacaaattttacctttgagaatcttcctagaagagaagtcattgacaaatttttggtgatcctcatcattgtagaataa

SEQ ID NO: 210373 - DNA, 577 bp, Cannabis indica
aaaaaaataaaaaatgagaacaaaaaatacatgtaacaaagaaagctgcaaaagatgaggtatagtacagaaaccgttaaagatgcacaaagacaaaaatcttctatctaataatgacctgggacatgagacatttcctttcttaactggtctaaaatttgataaagtaaataaataaattttaataaaaacatatcttccaaaatatttagataaatagaaagaatttaaattgaaaattaataattacaactttttattataatttcttaattaatttttactttcgtaaatcacatgttggaatacttttttctatgttatagttacaatattgtttttgtaaattttttaaaaattctttatatttcagtctatcacgtgtgctcaaaaaattttaaatctatttttgatattgtaaattatttaaatttttttaaaaatttacagggataatattgtaattgtaacgaacaccgctataattttttttctttttattgaaaaaagaattctacatatgtgtttgagtacaaaaactaattaagaaattgtaataaaagacagacattataaa

SEQ ID NO: 210374 - DNA, 778 bp, Cannabis indica
ttttattttaaattatttaatttattaagttctgaaatatatttgtatcatatatgttagatttttaaattactaatttttttacataaaaatattaattgtatatggattggattggatcggtaacttttatatctcaaacaacatccaatccgcacaagtgcgaattttgaatttttcaatctaatccaattcgcacaagtgcgaatattcacactttacaaattcaattggattgaattctgcggattggattgggtattttatgaacgataagaagacgaaaagaaaagggcatcccgacccatggaactttgatcggggttggtggaactagagacaaggaagacccatgatttaaattgtcattgcctagagtcagatttgttcatcctccaacgacacagatctagatctgttgatcatttgtgttgttaaatctaatttgtagttttttttaagttttctttgcttttattttttaggcgttgatttggatctaaccaatcgattgtcacactctgagtcaggagactcgattaatcgaaccagttaaatcgatggtgaagacatcacgattcaagtgactcttcgagtggaagttcacaagtgtcttgagattttttgcacttgcgccttgggtgaagctaacaaatatttttgtcgagctttgtgtgcttagcgaaaaagttcataatttcattcagggaggtagtggaaatgagaaacaaatttctatttcaactacttcaaggtgtggtaccaatgttaatgtgtc

SEQ ID NO: 210375 - DNA, 1129 bp, Cannabis indica
ccatttttttcacctcaattcgtatattcctctaggacttgattcacgactagttgagagtcactaaatatgtctaggtggtcagcccatacttcatgtgccagcttgaggctgaccattaaggtttcgtattcaacctcgtgtttgaggctttgaatctaaatttgattgctccgtgcagttactgtcccccaggggttataagggcaatgcctgcaccgaataattggtcgatgcagcttctgtcaacatggagtccatgttggttcttcaagtttttactgttgctgttgctctcgcttcttctctgtctcttgcttttctcctgaatcttgcgagattttaagagattagtttgtgcatttagccacgaagtctgcaagggtttgaccctttatggttgttcttggttgatatgtgacatcaaactggccaagctcaatggcccacttgagtagtcagcctgatgcttaaggtttatgaaaaacctactgcaatggttgatcagtgtacacctttatgggggtgtgcctggaagtaggaccttagctttctagaagccaagagaaagttgtgagtcagcttctccatgagtgggtaccaactttcagtgtcgattagtctcttgctgatgtagtgtacatgattctatacaccatcttcttctcttgtgaggatagcactcaccgtatgctctgtgactgctaggtacacgcctagctcttcattgtctagggggtttcgacaacacaagtggttgagctaattgtttcttcagctccttaaatgcatattcacattcctctatccactcgaatttttgttgcctctaagaatgttgaaaaagagtagacatttgtttgtagacttggaaacaaatctgcttagtgtagcaatgcgtcccgttagtctttgtacttccttgatggttatggggaattttttgttcgtgtttgtctattctgtcgccatttcaattttcctctagaaatcttagaaatatttatgttttccacagacgacgccaaaagttattggaggaaattaaacaacaccaaataatgcgagtattcaagcacggtaagagcactcactagcagttatgagagtattcacttagaatagcgag

SEQ ID NO: 210376 - DNA, 777 bp, Cannabis indica
attggttagaatgagtaaaacagctatgacattgtttcgatacgaaagttaatttacattaatacattgtttttcaaagtaagtatccaaagtaattgttagagtttttgaaatcgaaattctagtttaattaattgaatgaagtttcataggtggcatcagtagcttaatttttgaaggcttagttaattgtgtgttagtatgagtttttgagtcttagtttttagtcttactcaagggcgagtaagaatgtagtttgggggaatttgttaggctatttttagcctacgtttgggtcactttctatagttatttttctactttgttattatacttggaatgaaattacgcttgttttctttggtttcaggtttcacacttggaatgtataaattgatcaaatttcgaaaaacaacaatctatagaatagagaaaaaatttcaagaaattaaagctgaaacttcaagcctaaatttgattatgttctgatggattttggagaaagtcaaaacatagaagctttagatttctttttattcttttcaacgcatcttgaattaactcatttagagtttgtatgtgaaagttatgcatattttactgaaagatgctgaagctgtcaaatttgcttcaatagtcgcgaccaccattttccatggtcgcgactaggaggccagacagagagcatggaccttccaatttgcctatggtcgcgactaagctttatgtagccgcgactatgggctaaagacaagatttttaggcagttttgtaatt

SEQ ID NO: 210377 - DNA, 683 bp, Cannabis indica
atccttcccccgtcgagtaatccttgccccgaccctgctttaatttaaacagatattggagcgggtatgggatgaatttaggaagaaggtatgggggtgggggagcaatccccgcacccaccctgtcccgtatacatccttattaaaagaacaagagtgtttaaattgcacactataagcaaattatgcattagtaagattattaagaaaataaaaaaaaataataaataaattttgttgcacatttttatacggagtgtcatcctcgtctctgtccctatttcattctccatttagataaagaactgctcctgtggggccctgcatgtgggacccatccctatgcatccctaggtgatcaactacatttaataatattttttatacgtagttatctgtaatagcttttgtcctataattacacttccctatatacatatatcatcaacaaaaaaaacatagaaacatatatatatttctagaaaatgatgatgatgaagagtttaatagtagtatttgtggtggtatgggactagagtagcacatagtgttactatcatgtattagtgtctaaaggtattagcaagacctgtcgtatgaggcaactgatataaatacttgataaaaaagagaaattctttcgaagcgagacaatgacagtagtgaaggtgactataaaaaat

SEQ ID NO: 210378 - DNA, 838 bp, Cannabis indica
tgaaggtagtccattgtgatttgctggcttcatacctaaccatggcagtggttactacgaggcaatccatgttgtttcaagtcatactcgcatttgttctctttctaagcattttgaacaatgtgaacgcgggcataacaagcaccttcatacggtctgagtggccagcaactgatatccctcttgacaatgaagcatttgcagtaccaaatggtcataatgcaccacaacaagtaataatttgcttgagagtactttagttgataataattgtattatttgatctaccatatgtttcatttcatttctttcccatatctatatgtatttcataaacctctttctgtgttgtaatatgcttgactactttgtgtaggttcacatcactcaaggtgattatgatggtagatctgtaataatctcatgggtttcccccgatgaaccaggatccagtaaagtacattatggaaaatctgagaataattatgagttcacagcagaggggacagtcaacaactacaccttctacaagtataagtcaggctatattcatcactgccttgttgacaaccttgaggtaataattcaattcattttaacatatcgatattgttgagcaccacacactaatacaagttcattttaacatatgtgcaatgaatttgcaagttcagtatagcaccaagtactattacaaaattgggagtggtgatactgcccgagaattttggtttgaaacaccaccagaaatcaatccagatactccttacaaatttgggattattggtgagtcattgtcttaatgcacagggtctccttattcttctggctatatata

SEQ ID NO: 210379 - DNA, 512 bp, Cannabis indica
tttacgttgatatgtggaggttgaggaagtgagagagcgggaaagaggttgatatcctatgggtaatgacagtggtagtagagttggatgacatttcataaggcgtttcatgagaagaaggtgaagacgggtacattacatacatactcaaagaaggcctgttgagcttgaagctcgctcgttcgttggtttagctcaccaaagctcaaacagacagttcagagagagagagagagagtactcctttcctttggtaccaaacatggatctcaaaatctcttcctgtgtctttttcataatataaacaatctttaaacaaaaaaaaaaaaaactaatgtctcactagtttgtgtgatttatattgcacctaatagctatcaaaccatagttatactataaaaattttgataattagataaatatgttactttgattaaattttttaaaaatttaactttgtggttatcccatattacttatatattactcgtgtgagtgatttataatattta

SEQ ID NO: 210380 - DNA, 760 bp, Cannabis indica
cgaaaaataattattaattttggtgaaatgatgtggaaatattaaaactattaatagtggggttttaacattgtttttggttattctatcgatgttcatcaaacagttcaaattgaccccactgtaaaaaaaaatgcagtttcactgtaaaaaaaaaaatgcggtttaaaattatttacagtgtggttaaagtttgaatttttcttaaactgcacagtgcggtttacggttttgaattgttaatatgcggtttaaataacaccgcatattataaaaatactaatttttatatttatgtaggttcaatatgtgaatgttcgatccaaagctcactaattattgtattattgaaatttaaaatttattttcaaatttttttaaagttttatggtatttttgacaagtgttactcaagcttcgttgtatttgtaatagtttaattattggtgataatccaagcagcaaaagctgcaccataccattttttgtggtgcggtttctgcgactttttagttttgcggtgcagatgcggtttgagaaattaaaaaaactgcatgtgtgggttggtttgaaaaaaatggtcaaaaatcgcaccactcgcaccgcaaacacccctaacaatcaaattacacaagttaaaccaactataataaaagaatcattgacagtaatagtcttacctttcattgaaagagtgaaattttgaagaaaaaaaaaaaggatgtaagttggttagaaaaagaaataacataacaaatgc

SEQ ID NO: 210381 - DNA, 732 bp, Cannabis indica
aagaacttgtgcgagtactcacccagaatggcgagtattaaaatttgggacacaaaatacttaataaaaactaactggaaatacaaaggacacaatagagtatagtggttcagtcagatcacggtctgcttagtccactgttgcaaggatttcggtctccttttttatttcacggtggatcactcctttatatacaaagcaagtgtccgttcatttacatagagtttgaattcattatcaatccgtttatgcattgaattacaataattaaactaaaaaaatgtaaacataataaatgaagaacaatttcagcttaattcactaaatacagtaaagtatgcgacttctataatgtgagttggctgctcacattcttacataagctccagacttaaggtgcatttgagactagtcgagtctaggatgtttgcatcctattcaagtcgcttatacggacatcttgtaatcaattgataaaataagacatgcgagtctgtattgatttatcaaggctgttgggtcaacggaaccggttcacagaatagagaatcgatatctatgatttcgtaagaggatatcggggatgctcgtatataccctggtacatgcgagcttaaaaccgttccttggtcctacataatgtgagctatatgaatgcgattaaacctggtcatgtttgcatcatcttgctgaatcttattcaggcgatgttcgtattcgaggggtctctca

SEQ ID NO: 210382 - DNA, 1093 bp, Cannabis indica
tttttttggatgattattttgcttggtgggctaactagtgtgatattgtcttgacactctttttcggcttaaggtttcttctactaagtttactcataaaattttaatgagattatttatttatttttttttaaaaaaaaagttaagcaattaatgtataaattaatagccaatacatttaatacaaactattaataaacataacagagttttggtaaacaaaaagataatcaacaatattgtaccatgaacaattaaataattatataaaaaaagtatccaagcctccagagttatcaagtcaaatatctctaaaggagatcctaaatatatgtgcatattcttttgagactctttttttagtccgatatattctttttgagactttagtctaacaataaacaataattaagcacatggttatagactatagagacctaatattgaaatagaacacacaatatagatacagactacacgatattttgaaataatatattatttcttttttccatttaaactgcctataaatattaaatagtaagtgactgactttaaatgaatgaataacatttttgtatcgtgcaaggcgtggaaaatataaaagtgatcatttgttaaggtggcattgatatttattattatttgaactcttaattatgttctgatccatatcgttagtatttttttgggtactctttttctttttgaatttttccttatgagttttgttcttaaagggttaaaaattttccaaaaaagcaaaaaaaaaaaaacgatcacaagtgaatttatctaattaattagtttactttatttcacttttatgaatttattccactgaagaaaaaatgattattatcattaccatgcatccatttattggtgaagttttattcttgtgcatagagtcatgctgtgtgtatcggccattattaatattataatcttcaactataaattagtacgtaatactatagttgagaaaaaaagtctaaatctggtagacgggcgggtgttgggttaaggctgttaaacgtggtcatattactaaacatgcaaaaattgccaatatcaattgaaatgaattata

SEQ ID NO: 210383 - DNA, 593 bp, Cannabis indica
tttgtgaaataatctcaataaaacatgtatttggctcaaaaattttaaaactatttatagatttttttcttactaaaagaaaaattaatattttacaccataccatgacatgaactcatcccacctcggatcgaatcttggactcgaactcgaacctcggacttcaaatcggaccccgacccagacccagacctaggactcggaccccgcgactcgatcctagactcggactttgaccccagacctgaacccagacataaactttgaccccagaccccgtactcgggacaggttcgggttcggatctaggattcgggtctatggtctgggtctgaggtccaggtcggtgtttgggtctgggtttaggatttgaggtttatgtttgggtctgggtccaaggtctaagtctcgatccaagtctgggtcctaggtctgggttcgagttgaggttcgaggttcgagtccgagtttggattagggtctgggtccgggacggggtctgaggtctagatcaggattagggtcttggtccaaatcaatattaggttcaggtctggatcaagattggggttcgggtttgggtttgggtccgc

SEQ ID NO: 210384 - DNA, 1060 bp, Cannabis indica
tagttcttcaggagaagttcgtgagtgaggagttcaggtcgaaggttgagaggactccctctgaggagcttatgcctcgatttgcagagttggcttcgcaatttatgactatgtttttgaaggccatcgttgctggttctaaggaagtcgagcttttaaagaagcagaatgtccagcttcaggagaacgtcaagaagctgaagcaggaagcgactaacaaggacaaagagctcaaggaattctgtaagcaagttgaacttgaagccaagaaatctaaggcgaagattgaggaaatgtctcgcgacttggaggccgagaaggagaatggaaagaagcagtatgaccaagcagtctctgactatatatatacaactctttccaagattctagacttcgacttctcgatccttggggcagaggcggctgagatggctgaggcttttcgagctatgtcacctacacagacccaagggggtgggggaaatctttttcccgaggacgttgatgctgcgaatactaaagaggttgctgatgaggctgccagtaaagtcgcagatgaatccactactccaactgcccctatcgctcccaatgcttagtttacttactttatgaatattttgccaaactttttaagcggtacgcgggtgctcgcgatttgtacttagacaaatttctctttatggtttttaatattttgaacaacatatatcacttcagggatatttatttatgttatcatactcgcagtacacggctactcgcgccttttgctatttcgattgcggtattatttacagcttggtgtaaaaaaacgctaaggtaaaatgaattttttttttaaaactcgagaaaaatttaactttcataaagaacaagttaatcaatagtacaaagtgagtgggctatatacccctatacttagaacatttatatagataaattaactaagtatatatacataacgagtacatatgatacaatgcgagtactattgataataaaaatttcaaagctttcgccattccacgctctttggattgcagtcccatcgagttct

SEQ ID NO: 210385 - DNA, 668 bp, Cannabis indica
agcagttcgttttcctctagctgatattgattcagactgccagaatttggtccatcgcatcaacaagttctcgcctgaccgctcagccctctctggcctgattaccaagatagtctcctctttgtcttcttttccaggtgtcacggttcatcacattccccgctccataaatactacagctcacaacctcgcccgccttgcacttggaacgaacgaagagtcaactcggaaccttatcgtttcctccttctgaagatcttagtctcctcttagccttcgatcttcctctcaaaaaaaaaaaaaaaaaaaaaaaaaataattttccatcatgaataatatgtgataatagaaaataattaattgcacaaattaaaatatatatatatttttgagtttaacaaagtaacatgttgttgttgttgtatgggatgtgtaatgactttttgtctcacattcttattctttaaattagtctaaatctttatttataagattctacttttatttaatattcacaagtttgattcattgatggtaaattatgctcatttggtattattaaggagtgtgaaggatttgcataagaaaagggcttgagtatatgaggaaatgattggtcaaaagcaaaaggttttgttgaataaaaattatacaatttttttattctt

SEQ ID NO: 210386 - DNA, 752 bp, Cannabis indica
tcaattttaactcaaatatgactctttttgcaaatcgtacagactcttatggactcttgctgcctaggcgctacttcccgagtttctcatgttgtatgctcaaatcagtattttgaccataactcgttcaataaagcttggaattggacgatttaagatattctgaaaagctgagaacaatatctataacttcatgttcaactccaagtcagttcataatttaaagtcatcaaaatccacaattatgttttgtcttgttaaattgagcttccactattttccaccaaaatatgttaaaatctctctaaatgactccaaatgcatgattagtcttctaaaatcttaaaaagtcaaaatcgcactaataaataatttaaagaattaattttagaatattaacacatatatttggccatatttataagataaatatggacttgtcatttttggctattttttttttttggatatttaacgaaggttaagagataaaaggtaacaaagttacgaatcaatagagagatttcttccatctaaaaatctcatcgtttatttattctaagggaatacttagtcaatctatagaccacaacttttatgttgcaactgacacaagaaagaatttcttccagaaactaaataataaaactttataataataataataataataataataataataataataataataataataataaaaccaactttctattccattaagggaacatctacaaaataaaaaa

SEQ ID NO: 210387 - DNA, 687 bp, Cannabis indica
taaatttcatacacttatataccgcttgtgttttcttttggtgaattaaatacttaatgttacatttatattactttcgtcactaccagtctgttaaatcttattaaaatagactaagttgacacgtgtcaatatattagttgtccattcatattttcaatatgaaaacttattaaataattttaaaatttttaaaattgtacataaaacataataaaaaatgtatatttttgttaagtatttttcaataaaaagccttattaaataatattaaaatttaaaaaataactatataatatttatttaattaataaaataataaaaaaaaatactatttacaagtatatctctgtccgtgtttcttattcttcttctcttagaatgtgattgccattttctaattttattattatttagttactttttaattttagaattatttaataattaattttattgaaaataaaaataaaccactaatatattaacacatttcaacataatttatttttaataggatttaatggaccaatagcgatgaaagtaatataaatgtaatttttgatatttaatccgttagaataaaaaatgtggtatataagtgtataaaatctaaaacatcaagtacttatgctacaaatactctaaatactctttaaatctaatttaacaaaatagtaatgatgg

SEQ ID NO: 210388 - DNA, 822 bp, Cannabis indica
gaaagttctgataatgaatgtgaaaatgaaattactttattaaacaagaactttcaaaaatatatgaaaaagatgggtaataaaaagaataatctgaaattttcaaaagtaaatacaccttttaaatcctttgtgactaataaaaaggtaattcagtgcagggaatgtgaaggctttgggcacattcaatttgagtgtgcaaacactctgaaaaagaataggaaaagtttcaatgtcacttggagtgatgatgaaactgagagtgatgaacaaaattctgagaatgttactctaacctcatttattcctagtttgttgtgtgattcacaggggaaacagaaattgatatgtttaaataataccattgaaaaagaagattctgattcaaatgattccaaaatttttgaagagtctctcgttgaatcatacaaggtcatgtatgaaaagtggatacaagttacttctgaaaatagagtcttgtctaaaatgaataaacaattgtctcatcaaattgaaacttttgaattaaatattaaagattttgagattgactttttcattaaagatgaaaagattactctattaaagaaggaataacttgaaagtctcaagaaaaatgtttaaatgcttaaccctggatcttctatttttgagaaagttcagaatgcatgtcaaagaggctttgctggtcttggatcagatggtactgaaagttctggaatcacaaaaatctaaaatctagtgccaaaaaagtttcctgatgttacaaatttaaagtttcctgctgtaaattcaaagtatgtcgctgcaaaggcagaaaca

SEQ ID NO: 210389 - DNA, 737 bp, Cannabis indica
taaggtaagtggacctgtgtagcgaactggtttgaaattagtataactaggaatccaaggatcgattccagtagctatattaactccattaccaattttatatctcataccttgaaccaaaagatccctaccccaacaaatactttgccatgtatatgaaggagaatgtcccaagtgagcatcaaaaaaagatgtggttgaaaaatatcgatgctttagtaatcggctcaacaaggaattcggcatttcaaaaattctccatgcttgtttcgccaatagcgcttggttgaaatggacaaaagatctaaaacccatacctccttcatgtttagatttacataaagagttccaccttttccaatggattttggttccattttgatttgtaccccaccaaaaattggccatcatactctccaattggctgcaaaatttcttggtaagtttgaagcaactcatagcataggtaggaatcgattgaaccactgctttgagtaacacttcttttcccccgatcgaaattttttttcattccatgaatgaagaagcttccaaactctttctttgatatggctgaatatttcttgcttgtctctaccagaataagaaggcaaacccaagtaccgttcatgacattccgtaataggcatattcaaagtttgagcaaagaaatttttgatgacatcagctgtgtttggagagaaggacatcacggatttattattgtttaacatctg

SEQ ID NO: 210390 - DNA, 540 bp, Cannabis indica
caagtcatggtagaagtgataaaagtagcaaccttatcaggaactgaagaaagagggacaacctgacgaaaacccgggatccaatgatcaagggtagtggaagtgttatgcccgttaccaatcttagtaataagtcctttatgcagcgactcttttccccaacaaatactacgccaaacgaaagagggggagtgaccaagtgaactatttaggaaagatgagtttgggtaatacctggcagccaagattttggacacagtggagtttggttgttttaagatgcgtcaagcttgtttagccagcagagcctgattgaagtggactagagaatggaacccgagcccgccatcctttttggacctcaaagtttttgccaactttgccagtgcgtctaggtcgattatattgttaaaaccccactagaagttagccataatggactccagagagtggcaagtggccgtaggaaggcgaaagcaggccataggtataagtgggggatggcctgaataacagacttgagaggatttctttccctgc

SEQ ID NO: 210391 - DNA, 654 bp, Cannabis indica
gagagagtgagtgaatattcgtctctgcccccctccctcagtcccagtgtgggcctatttatatcatggaaaacgactacctcttgaaacgtggtccgtccttagagaaacggtcttccccccccttctcccagggatgagcgtcatcttttgggtttgttcctagatgagcgtcctccccttagtgtatcactcagagggttgatattctcgctccgctatgctagggaagatcgctattttcgcgggttagttgggaaacttaacgttcttcttcctccacgcgtcaatcctaacattacactttaaaatcaagctttattgtgggctggatattcgaatatgggcatgacccaaaaggcatggattgggcgtggcccatgtgagccactgggcttatgggttctttgtatctaacttgtaagtgggttttgtaagtacttcgatcgttgggccttttcattgggcttagagcaatttttggccactacaagtttacctttaattctcattatttattagtaaacatgatgtagattccgagccataataattagatcaatactatagattacattcaaatttatataaaaaaaaataataataaggtaacaatactattactaattattaagtaggtacaaataaattaat

SEQ ID NO: 210392 - DNA, 513 bp, Cannabis indica
ttggggagccggcagccattatggggacgccgagttgtatcctcaaggtatactattggattctgatcccctcttgaattagtaaacccttctctccagcttataattgcttgctttttctttttaaagaaagtaaaccctttcaccttcatcacaactgattttagtcccatatttttcgacattcttcctacgtgctctgcagttgcttcagcagcataccgagactgctttgctcctcctttcatttcgggcaaagatccagctgaagctcccatctttttgtttccctttgaatctgtaactgtaacaaatgtattgttgcgcatcaactttatgtggacaaaatcagcatcatgctcaagattgtatcgaggaaagcgagaacccccgaacaaatttctttcatcttgttgtaaaataccccttacaaagttcatggggtttctttcatctcgttgtgtaaaacccctttggtttctatcgtcttgtggtatgaaactccttgggaag

SEQ ID NO: 210393 - DNA, 716 bp, Cannabis indica
ccaaaaataaattcgtgagagtttaggctcaaaataaacaataatatatcaatataaaattagatggtaaccgacactccttagcttacatatacaattgaaaaataaattgtttagaaataattatttcagtaccataaattattaaaaaaaattcatgaaaaattagtgtaaaaatttaaataactaaaatatatatataatgttatataattaaaagaatttaaattataatttctccaagaacccaaaaaagacactcttaccaataaaatcataaaagtaaaatcacaaccctatcaatatatatgtgtgtttcatgaatatgaatatataataaggcaaaaagcttatataataatatttatctcgatgatgatgatgatgatgatcacctatctttatctaggctaggctgttttttgttttgttttggtattaattaagtttgttcccaccacaaagaaaaagacttcaactgtcgatatatacaaaatatgcacacggcagtgttcactttttcagcattgacattctcatccaaacaaacttattaagtactcatcatgcaacatggtgaagtgtccctatatatatatatataaatatttatagattaattaggatatttataaactaacatgtaccaaatcatgcttcttgaaattttttgactgttaaaaattttcctgagctattgagattggtagttagat

SEQ ID NO: 210394 - DNA, 899 bp, Cannabis indica
tgctattagatgaaattcgaagagaaaaagtgaaagataatgagggcatgcaaattcagagaagaggttgattgagagatttttgaagtctaaaggctttgtgggcagtaatggcgaaagtgaagggaaatttgaaatttatatttgaacggtgctaactattcgattaagagaaggataaatctaacggatgggaactaaacgagaacgaaatagtcagggcattaaatgttgaaatgatttgcctcgaagttttgaaccgtcaaaataaaagcatgcaaaatttaaatgaaaaaatatgatcgtacccttgaaggcatttaaaaagttttttctttaaacaacacttttagagggcaattgttatacctaaattttgaccagcaataagaaattgacacgtgtatcaaggttagaatatgaaccagctcaaaatgtgcattaactaaatacacattaaataacttgcttcgaaaaatatattcaatagaaatattcaaactcgccgccatataggcaacaacgagacatgagtaataactattgattaatgagaccagcaagacaaacaagtccatcttgggataaacataatacataataaaagttgttcagaacgagtaaacaaagagtttgcagcttattgattcacatactcgtgagtatgtttaaggaatgaaaacaacttcaacatttactcacctcacttttgacgcgttgaagtaaccaccttgctaatacatttctcaatgacaaagaaagactgggagatgcattgtaactcaacacttgatattttgtataaagctggttaagaaagataacatgtaaacgacaagaaccatctaaaacagtcatcataaccgtcaatagatgaagacaaagaatgattaggaagt

SEQ ID NO: 210395 - DNA, 666 bp, Cannabis indica
agaaaataagttggaagcagctaggatttgctgggatgaaatgttggcaagaggattaaagccaaatgcttttacttttggagcttttgttagggcatatactaatgttggggacatggagatggctgacaagtattttaatgagatgctagcgtatggtctggtgtctaatgatgaagtttatgtagacttaattgatggacagtacaaaaagggaaacttaactgaagctaacttagtactgatgcgtatgctagctggtggaattctcccagttgtacaaacatattgggttcttataaatggtctatcaaggaatgggaaagtgctagaagctctaagtatcttatcagaactttgtgagaaaggattgaatcctgatgtgtacatatgcaactctctcatcactaggttctacaaacaaggtgatgtagacatggctatgctgcttcttgatgagatgcacataaagggtgtaaatcctaacattatgacgtacaatgttttgattaatggattatgcaaggcaggtgatgttgaataagctaagaacctattcattagcattgaggaaaagggattgatccccaatagtgtgacatacgctacaatgatagatggttattgcaaattcggaaatgtagccgatgcattccaactatttca

SEQ ID NO: 210396 - DNA, 825 bp, Cannabis indica
ttattccttctctaacaataccatgatcagtagttaaaagttaaaatggatggtgagtaaaatatataataatggatggtgagtaaaatatataatccataagcccaaaagtgtaaagacaaacaaagaaggactactgaaaattactaataattttttttttttcttatttcttctgaatttacaaataaatcttctaggtaatagagagatgctaaacaaatagatttgagagatagagttagattagacgtgagcaattttcttttttaatatttacacttttttttataaatttttatatttatacttaataatgaacatagggtgtatattgattgattatattatatatatatatatatatatcttcatttacaggttttatgtgggttgactttgtctaaaagttattgtaataatgaccaacgttgatcctttttcttcacccaagtggccaccaataaaagaagcattcgagattcaaaagaaaatatgtgaaatcactacaaatgatgttgtgggaaaaacattaccatccgtcgatgagtggaaatattttttgacaacatacgcgaagtataccagtttcagcgtccgaagagatgatgttgtccgcgatgatgaagacattatcacgatgaggaggtgggtttgctccagtgaaggatttagaagacaaaaatatattgatatgcctgaaagacaaaggagacctaaacctatcacaagaactggttgtggggtggcgtttagaatattgcgttcaagggataagacatgttacactgcaaaagaattcgtgatacaacacaaccatcccac

SEQ ID NO: 210397 - DNA, 724 bp, Cannabis indica
agacatcgatctcgttacaatatgcataacattatcaactcctcaacatgtatttgtattacgaaattctttttttacttaattttgataacttgatttatctttttatactactatattatttttttcatgaaatttgttattaaaacttcatactttcaacttttttttattcttttttgagttagtgacagttaaaataacgatttattttttaaaagttaaataaatagttaaattaataatagaaataataaattttatgattttaaaatggggtatatgatataataggtaatatataattaaaacaataaaaaattaaatagataacaatataattttaatatgtcaatatctactagtgtacattgtatcaattaaaaaacaaaaaaaattatcattgtatttctaaaaaaggtgtcaaaaaaaaaataaatatatgtatctacatttacaaaataatatacatacaacaaaaaaaaatctggaaataaactaaaaatatacaacataaaaaatacacatggataaaaaaataactgtgaacaaaaaaaaaattatagaaaaccacttaaaaataactaaaacataacataaaaataacaaaataaatgcacatatatataataaaagagaaatttgacaatgcatgcttaaaataaatacatgttctaattatatactcctctctaaaacatcaaataaaatatactacttcatt

SEQ ID NO: 210398 - DNA, 2143 bp, Cannabis indica
aaataactataatttacatgaccatgagaaaaattagactaaaaaattatttcggatactaaaaaaatagagaaccccctggaataacaactggctcaactccagttctacgctggagagacaggcccgggagtgggcgagccaataattggcaagccccacctagacctaggacaagatcttgagttggatagactcagggagttgtaggccgtggaagcgtaactgaagaaccacgtgctactgattgcgatgttttttgctcagcaaaattagattactgaaactgagaggccagcgatctaataagacaattcaattagagaaccgatagaagaggcgaggatctccttagggatcaacttcaaggaggactgccaccaagttcctcaggaactaggacagatcttcccctaccagagggaggacaaacctttccaaaaaggtcaaatcacaagaacagccagatctcagtaaccagcggcatgggggccagccagggatctctggctcagcaacacccctcattgtgtagccattagccagctataaggagctttaaattatgagctttattataaggatactcgatctccattgttggttctacatagttcttattttagtgagattcatccccaatagatggacattcattagcaatttaacaccgttgaatcttgagagaaaagtattattgtaaagaaaagtattattgtaagtgttttattcttagtaacgtccatctaaatagtggctactaagagtaggacttacaaagtatgaaacaatggtagaagctcatcaaataagaattaccttgactctcgactaaaacgaagcaacgtaggattctctttttgatcgagtataaggttgctagaatggtgttcattttagatgagttgattgctatattcaatgaataatatctttgactctcgcctaatacgcagcactatatcaatttgtttgaaaccttgtaaattatttaggattgtttgtttttgtattttgactagtcattcctacttgctaagtgcttaataatttttgaatgtttatgattttgtatttaaccttacttgatttctatttattgatatttgtagtacccaatatgactatgaacaaccccattgtctcactgttaactgacaacaagctctttggagctaactttgtcaaatggaaagagaacattaatattgctctcataagtgaaaatgcactgtttgtgtttactaaagaagctcctgagcagccaggtgagaatgcaaccaaggcaattaaggaaaagtttgagcattggcagaatgctaacaacaaagcttgatactttatgctgtctagcatggttgacaccttgaagacaaggtttgctaatactctcatggctgtagaggtcatgaaccagttgactaaactgtttgggatggcgtcagatcaagctcgttttgaggcgaccaagaattttatcaatgcacggatgaaacctcatcaaacttgagtgatcacctactccaaatggcaagttacttctaggaagttgagaatcattgagctattatagatcatgaaacttaagtgagtttgatcttaaatagtttgactctagcttttctgccctttacatcaaattatgccatgaacaagttgacttttgacttccatgagttaatcaacaaccttcagacattgaaaatttgattagagatccacataaaagaggaagcaaagctcctagttctagtaatgctactaatggtacgaccaaacttgaggaaaatattgcctctacttcaaaacccagcaaaaagaatgaatggaagaatagcaagaagcctcttaaagttgttaacacagctaataagaaaaaggttgctaattccaagtcaaatgaaaaagaaaagtgcatctattgcaacaaaaaaggccactaaaaactccagtgtcctaagtttttggcaaagaaataaggtatttctaactttattataaattcatgtgttttagagaattattatccccttgggttattaattcttgatctactaaccatgtttattttcttcttatttcaactctagctgcttaaacttggattgctatcctaccgtgttgagtcagatggttggataga

SEQ ID NO: 210399 - DNA, 655 bp, Cannabis indica
ccaggcattttcaaacttaaagctacgggaaattgcttgttgagtttgtacgacaggggtaagaagaattagacaatgatctgaggttgaaacctcaagattggtgagctttgcattgggaaatttgtctagccaacttggagtgacaagggctcggtcaagcttgatctcaacccaattttcagtaccttttcctctttcccatgtgaacttgtaaccttccatctccatatcaatgagattacatctactcaatacatcttgaaacccatcaatgagccaattcggatacggtcatccccctttcttgtcactttggcaagttacattgttcatatctccaataagacaccaaggaagattgataatattggcaagatcagtgataagcttccaagtgagcttccttttagacctgtttggttctccatagatgcctgtgagacaaaattgaggccactcaggagtagtaataatcatatcaatatagttagtactgtaagacttgatctccacctcctccttgtttctccaaagaacaacaatccctccactatgtccctgacttcccacagtaaaagaaccctcaaaaccaatagcaaatttcagcctttccacctttcctttttgagaaaatgtttcacaaagaaaaaca

SEQ ID NO: 210400 - DNA, 654 bp, Cannabis indica
gtggtaacacttgctcagttggagttgcctggatcggttgcctaaactgatgcaactcatcttcctaatagagtataatggtttgcattttgagaaacatctgttgcagtcagcaagtggattagcattgctaactcccgcattatctcctgaattttgtggaggcacaaaaggtgtcagtaaattagtttggttattaccgggctcgccctgtggtttggttgattgatcaagatccattttctctcaaatagccctaaaatcaacaactttatcgagtcaggcaccaaatccatacttacacacttattgtcttaaccctcactcatacatactactttttttttcaaataaacatttattcacataattactaatcatgattttcttataacattatatcttctaaatgctcatatgctgcctataatgaatagcagtaaacatttaatcacaaaagcagttaagcatttagtctcaatacttactgcaccacgagtcgagcttgtctttggcgatgattgtacatgttcagctagactacaggaagtttaaaaactttagcgctctgataccaaattgtaacgccctaacataaggaacaccacatattgcgactgaacataaactaatcttgctaatttgggatatact

SEQ ID NO: 210401 - DNA, 667 bp, Cannabis indica
ggttggagttgaaaagtctacactaaaacttgatggaattggtattggattgatggagttgttgggccacgtcaaatcatcaaaaaagataaaaaaaaattgtcacaaaaagtgacataacacgtcaaatcattcctttttaaagtattattttttaaaaaatgaagaggctaaaccccatgaagacacctataagccacataatatataaaaacctataactaatggccatatttgaaccaaggcagtatactgccgaattaaaaaaaaaaccaatgaaaaagttatattcagcgtgtcacagtataattgaaagaaaattagaaaagttagtaaagcatgtaaatttcgcttaatatttttaaaattaatatttatagttaaattatttagcaaccatcaatgggtaatacccattaagaagtattcctatatataacgaattatattcaagttaccaaagtgtatttgtatttatatcccatatatctgcatatgaaaatacactaccctaaactaaatgattcgtgtgattgtgtgctattgtatttttaaatttagatcaacttctatgtgataaatttagataatttttaacatactaggtgaggttagcacgtgcgatgcttgtgctttgctcttcttgttacattttatttttattttt

SEQ ID NO: 210402 - DNA, 592 bp, Cannabis indica
acacaactcttctttaaatttaactgttatgtccttaaaatcctcattcttcaacagtcattattaattttaggtattatattctttgaattttttaagtcgttaaaaattcttctcaaactattgatattgttagatttaaatacttgtgtccaattttattaacgaaagtctaacatgaatgaaaatttaaagagcacaattcagtacatgttgaagtttaggaggtaagattttgtaaatatcaaaatttagaggcaatttagtatatggataatcgtcatattagtaaaatcgaataaaattagacaaaagtcgttaaacccaataattctaatagtttaagaaaaaaatttaatggcgaaaagttcagagccatgatttggtacatgtcaaagtttaggcggcaaaaatcttaattaatcttaactttaatagcggtgaaatatttcagtccaaaaattttaaaactatttaatcatttgtatttttttaacatgcagtttaaactgcaatatcaaaatttaaaactacaaaccacacaacaccgcgaaaatttcatacaacacttttttttagtgtggacagtttg

SEQ ID NO: 210403 - DNA, 696 bp, Cannabis indica
ctgggttcgggtctgggtccaggcccgaatcccggtctgtgtcttagttcgagtcctcggtgttggtcaaggtctaggtctgggtcagggtctcggtctggatctaggtcccaagtttcgatcccgatctaggtctgggtctgggttcgagtctacgttcgtatccaaatgtctatctagctttaagtctgggtctaggatcaagtcccaagtctaggtctgggtccagctctcggtgctggtctgggtacacaacagtgtctgtgcccgagttttggtctcagtttggttttggggctaggttcgagttcggtttgggtttgagtccgggtcttagtcactatcctagtcttgttcgagggtcctagtctggaagttcttgtttaggttcccgttttgggtcccgagtctaggttagggtccagatttgggtcttgatccaggttcgggtcctggtctgagtcccaaatctggatccctgtcacgtgtcccggtctggttcttgttcaggtccccggtcccaggtctgagtttggggttcgggatcgagactgggtgcggttctaagtcccagccccatttttgtgtcccgagtctagttttatgtttggttctgagttcgggtccatggtcggcaccgagtccagatctgggttgagatccaaatctggtccccggttcaggtctaggtctggg

SEQ ID NO: 210404 - DNA, 971 bp, Cannabis indica
tattattattaaaagaccacaatgtgtgccatcaaatatggaggccaataggcagatagaataagttatgatgactacacaataattggaatactaattctaaccaattctacactagcaaacttggaggagctaataaaaaaggagataaaatgcaacaatgatgtaacaccctattccatagggatgccacatgtgtgattatacaaactagtttaatactaatagattaattaattattaaaaattgtgaggataataaaatcttgactaaaataaaatattaaaaatggacattataacgacagtaaaaaggtgtttttcggggatccctgttataaaaagtttacaaaagactatatacaacaatagtgcaaaacacaaaattaaaatacacaacagatacactcactccaaaacaactcctgacaactgggcacacaggctggtggggtcaatatgtacattgctggaaaagattgtcatctcatgactgctctaaatttttcttgcccttacctacacaacagagcacccgtgagtcacacagactcagcaagaaaagtaataaagaagaatacattaaataactaattatacgttttattatcataaatgattaaaccataacattcaataatagataatataactagccatatgcatagaaatagatatgctcatatattcgcattgcctaatcggtcaagctcgtattataatgcaacatcatatataatatcactgcaccacctaatcaggtgagcccgtgcaacaacctggcactactatatcgcattgcctaattagacgagcctatacctatgcccgatactcatatgtcactgtcgcccgtacctaatatggtatgtcgccaagaagaaacccaacaatagtttcaatctatgtcgtagcctggcactaatatatcgcatcgcctgattagacgagcctgtacttacgctcggtac

SEQ ID NO: 210405 - DNA, 1068 bp, Cannabis indica
acggtgcccagcctatcaaacaccaaagtatcaggtggtcttggcgtctaacatgtttggcgagtaggttggccagagattttagtggggtgaagttattgtgtgtaactccacccaagggacggtcaggcaggatctggccgtctaccatttggcccacaggttggacttgtggtcgtggattggatggctaatcgttgtgagtttgcacagtatgcccagctacatacccttctcaactgcccaaagggatactagatgcggtagccggttattgattgacgactttgtaggccttttttatcagtatagtggtctgccttgtgcgattatcaatggctgcttgctgagcctttaaagtttccatctccctgaccctctattctataaactaacgtctttgctcgtcgaatgcaaggtttatagcagcacgaagatcctcctgatcatggtggaaagcgttattatgacctttcatgagtccaagggctgctcggaggttttgggtttcagtatcatctccaactggcctctgaacattagtggtagacgggacctcagtgttgggagtggactgatcggctgctgaactggtattcacagtctcttgcacgcctggtgtgatcccagctagaggggaagtcactccatggctcacagtgggtggttgcgtattgacctactcggtgtctgtccctggtggtcatctcgtatttctaggagtctgcacattgggatttgtcaccatcgggtcgccctgattagcaaggcctctacaagtttgtacaaccatcttgtatgcctgttaaaacttaagacgaaaaaaaaactttggtttttgctctcaatgaaagcaccaaaatgttgacctcgcttttaaccaacgacagtgagtcaattaataaacgattaataatataattaaaagagagaaaaaactgataaagtaaaaagaataccaggttttaaagaggttcagctccatgagtgtggtaaatgcctactcccctcgtgttgtattaacttgagagaaatacaaagtgttttcctctttaaaagctcttacaa

SEQ ID NO: 210406 - DNA, 626 bp, Cannabis indica
tctatcccaaactaattttttactatttatgaaacaaaaacatcttccaattatagtttcttaaatgttaattaatgaaaacaattaattttataaaaacaatgttgtacaacttttttcatatcggtggtctatttttaaaataggaaaacatatatagtttgaagatttttttttttaaataaaatagatttttgataaaagaattgatatttttaattatttgattttaaatttgttcaaaattagtgcattattctcaatgaaaaaatttgaaccaaaatattttcatgatgctgaaattgtaggagatgtgtcaatacactcttttttcaaagtgcaataagaagcacactaaaaattattcaaatatatatagttttggaaaattctacaatgcacccccttaaaatggatatattgatgcacccctatctgttttagcatccgaaacaattttttagtcaaattttttctcatggtcatgtatgttatagttacttaagacatcctgcaaaattttaagaaatttggaaaagtttaacataccgaaaactatgttcaaatagtgtgttgtacgcgtgactattttattttatacgcgtgtaaaatagactgtttgaaca

SEQ ID NO: 210407 - DNA, 1124 bp, Cannabis indica
tcatacaaagtcaagcacaaataatgcaatttaaagaaatatccaacaatataaaaatctatacaaattcaagcaaatcaaacacaaataatgcaaagaaacacaatctaagtatgcctcctttctcgtcataggtcaaacatctctctagctatgttgtccctccaagaagtccaagcgttagatatttcaatatgtgtataatgatcattgcctaaactttcatcttcgtcagaggaatcatcctcactttcctctacgagttgttctagaggatctacatgcatttctcttataattaggttgtgaagaaggtaccaagcaaaataattcgacactgaattttgataggatagtatgaccgatctctaaggattgcccatcgtccctttaattatccaaatgctcgttccgagcagaagaatatttcatattgaaaaattcagcaggagtattaggtggtacatcccaatcgtttaaatgatatcgctctcctctatacggtattaagaagccttcaccattagggtatctagcatcacataagtagtaatatcctgtaaattgattggcgaaattgtaaacttattatgaaattaacttgtatatgtttgatattacacatggaacaaaaagtctaccttgtggaactttcaacccatttggcttggatatagcatcttgcaacactctaaagtctgcggctgatccttcccatccgggtaagacataaataaattgcatatcttgagagactacacctaatacattagtagcaatttcaccctttctagtccgatacctaggcttatctatggcaggcacattgactttaatatgtgtgccatctagtgctcccaaacaattcttgaaccatttctacctctcatcagttgaaccatcaagtattggtttagccttttttaataatagctcgtgaagacgcaacaaagcattcaaaacaacattaaattgtctactcattgtttcacccgaacgtgcaaattgtcgtctcacaattctattcttaatgtcatgagatataatatgtaaaaatacagcaaccatttcttcaactttcatattctttgtttccttcatacccccgatagttctaagttggt

SEQ ID NO: 210408 - DNA, 880 bp, Cannabis indica
aaatctgagatgcgaaaattatccatatatggaaatttgggtaccgacttggtagcaacgacattgaaatgagagaggaggagatctcgatgcgctaatggcgacgaccatgccagcagatttgggtagaattaaccttgtgaacgaatctgagtaatgataacgaagatttaggcagtgatgacaaagtatcaatccttgttatactatcgatttcctaaagattaattagttttttttttttttctagattagttgtttttaagaagatttattgtagttgtagttagaattctacaatatttatattatttcatcaaatatttcataattattattatttgtgagattttaaaattttagatgttaaaattttaaaaattacagtttctaaagtttttttttgggggggattttgataattaagaattttgtttgatctggttttaatcttaaaggtattgtgtggttttaattttaagattttgcatatgtttgttcttttaagaatttttttatcatatatcccataatttaatgtatctcatctcacataagtaaaataaaataaaattttaataaatgacgtgtcaataccgtatacacacccatatccatggtcgataattaaagattgataattattgttaacttttttttacatactaaatatgagaatttcttatggataattacataaaatatttacatatttacatttgaagttaattttttttttaatatttttacggtattctataaaaatacaagaaaataataagaaaattactcgaaagtaataaaaaaataacaataaaaacaacataaaaaataacatataaataacaaaaaattaatataaaataaaaaaacataaaaa

SEQ ID NO: 210409 - DNA, 1630 bp, Cannabis indica
ccttgggtagtagtatgcaccagttaaacaatgctgacaaggagttgcctagtcgggcatctaatgaagaaactctcagaatgggcgattaccgtgatatattaagccttacaagagttctggtgtacggtccagaaagcaaagtagatgctgaccttgtgattgaaaggtaagaaagtcttaagagaagcttgtatgttcaataaaatagaagtttgcagtgattgtttggagttgaggtgactggtgaagcaggcttagcttaatttctttgttcaatgtaaataggtgtgcaggtgctggacacttgagagatgatatctttcactatagcaaggaactggagaagtttccggttttggatgatgagcagggagcgtacttaatggacatgggcatcaaggctttaaggtatttaatttgcgtattttcagtaaaagaagatgatatttattatgagatgaaagttgaaagtgataaagcgcgataatgattgtgtatatgaatgaatgaatgatttgccgatgtgtgcaggcgctattttttcctggtgacatttagatcctacctctattgcactaaaggagccgatacgacattcacctcatggatggatgcaaggcctgaactcggacatatgtgtactaacctaagaattgacaagtgattttttttcttctttcttttataatgtgtacagaataaatcccattaatagccactatttgtaaccaacctctagcgagccatgcattcacttgttttctttttaatcctacgcctctttcttctcttaaaacttcacccaaattcatagcactagcaaagcaaagcaagcaaaacatgaaacatacattgccaaatatcaccttaaggttttcttttgtgctctcacctatcttgcgttttttgcatctcactcggttgaaatttgcctctttcaaagactcatttaattttctcaaaattgttttgtgcttgccattattattattattatgatcgtttgagacaatgtaagtaatgtatttaaaggtttagggtgttttgttttggctacctatataaatatattgtaatttgatggaataggtttgtataaattaaacgtttctagaggtatgtttatacaagaatatatatttttttagttgcctacaaaatatttggtatattttatttgaatttttatatatttttttctttttcaatacaatttgctagcgttatctcaaggtgtatgctcgatgatcagattcattctatgtttatgtattattttctcaaatttgttactaaaatttattcagtaccatgacttggtgagttcgttaaaactgttaaaaaattcaaatcattgaaatcattgataaaatatgaagatggttgttaaggataatgttagtaagcaagttgagagttagttattaatagcttaggtagttatttgttactagttattggtattgaatcggttgttggtttgctattgattgtaacagttagtagtaacaacctgtaagtccttaaatgctaattgtaatttctttcaattgaataaaagagtcgattctttcttcctcattcttgatagaacattacagtattagagtttcaatcgttctttaat

SEQ ID NO: 210410 - DNA, 519 bp, Cannabis indica
gcaaggtgaaaatagagcaatgcgagattaaaggcataatgtcgtaaaccacgaagttgtacaaaatattgcagagaaagctataaagtttcgagcctagattttctatgtacttctacaacaagtcaagaataagggcatttcctacaatggaaactcataaattaaaaatgaaaagttaaaagaggagaagattgaaaacttgctcactgtttgaagcctaaatgtagtccaaacgaagctgctcaaatggctcagatagaaatatcatgacacacttgaagaaaatttcctttttgctctattatagtgagatttctctcacctagaaactcgagaccagacccctatttagaggacacgtatacgcagatttccaatgaaagctgaaatgtccatgagggactcctcgaagtttcaaacctcgcttaagatagaataagcgagagatagcgagcatgaccaaagtctgatcgcatttgagataagagagtagctcgcacatatcgaattatgtcc

SEQ ID NO: 210411 - DNA, 856 bp, Cannabis indica
atggtaagaaaggatatatggctgtaaagcttgatagtgagcaaagcctatgatcgtgttgaatggggatatttaagagcagttatgcttcaaatgggctttgaccaaaggtgggtaacttgattatgacctgtgttactagtctgtggtactctatttttcataatggccatgttatggggccgatcacaccatcccggggaatccgacaaggtgatccgctttccacttacttgtttataatctgcgctgaaggtttctcggctcttatctctcggtttgaaagggagcggttgttacaaggttgtcgtgttgctcaaggtgcacccataatctctcatatgctgtttgcggacgatatttacgttttttgtcaagctaataatggtgctgctggtagtattctatccctacttcggcaagttgaaactacgtctggccaacaaattaatttggggaagtcatctattttcttcagtccaaatgttcatgatcaacttcgcaacagtatttgctctatacttcatatgcctgaagcttctaaaaacagtctttacctgggtctccctaacataattgggaggaacaaaaatgctattcttggttttcttaagaacaaggttttgaacaagatcaatagttggactggtaagctgttatctagtgcggggaaggagattcttttaaaaacagtggttcaatctcttcccacttatgctatgagtgtcttccttatccctctcggcacttgtgatgagattgagaaattaatggctcggttctggtggaaaactacaagtagtaaaggcaatggaattatctggatcaattgagatcgtctttctcgaccaaaaga

SEQ ID NO: 210412 - DNA, 536 bp, Cannabis indica
agagtaaccgtcaagcacacacatacatcgaactgtaattcgaggcagaactatcaattagcattaaatgggtagaaattgaagagacccctagtcaaggtcacgccatttcatcattcgatacttaggacacgcatcacccatctcaacaagactccagattgagtgaagtccacgtacgactaggaaggtcccgcacagacttgggggtaaatgttatcctattttttgtacctcaacgtggcagtagaactgaatgacacgtgtcccatgttcttgatacctgagcagggaaaagtgtcccgggcagcctgtgaatgccctacaacacctgtcacacttcgacatccgagcaggattgtgaagaagatgtctaaccaggtatggatatgcctgtcgagcaacttacaagagatagtaactttacaataatctcgttatgcccagacatgaagacaatctctataatcgtgggattgagttagagaaatatggtaacctgctcttgtttcatatttcatatattgtaattatgt

SEQ ID NO: 210413 - DNA, 574 bp, Cannabis indica
aatccatttgcatctcaaagtacctgagatgggaaggaggatcttctctcatagtatacatcttccacgttggcattttgaacttgtgaggcagtggcaggagattgatctctagtgagaagggagttccgcatgctcggtctaactcaaaatcattattacgctgtctaaccatgccatgaaacatatttttcaattcgtcaagctgggcctgaacggctgggctgacctgctcgacattctggtcaatttggattacgtcagcgtctttctgagcggggatttgagtacgagctccaggttgcacgatcgttgtattattctgttcatccattccccttcttctatttagatcgttccttaggtcatgggttgctcccaacctttcgaacacagaagagcctggttgccttagcgattgatttgcttggttgacgggttgaatggcaccattagtctagttggagccgtcaggtatgactcctcctgatgaattaccggacaaggtttgctcgcctaccgcgcggcccacgagcggaactcagaaacgtggattgggtggctgaccattagt

SEQ ID NO: 210414 - DNA, 574 bp, Cannabis indica
aggaaggaaaaactggagataccttccagttgacttaagacaaaaagtcaacaaaaaaacacggtgatctacgagattacctagacaagaagaaacatgtatcagcggtctctgcgacactaaatgaaggaattctagctgagttggcaacactgcgcaaggacatctctcgggtctcccggaggcaaaagggggacgactttgattccaattgcgaggaccgagaaccatgcgcctagcacatattggaggcagagctccccaagattattaagatgcccaagatggcagcatataccagggacttggacccaggtgatcatttatcctgtttcaactgggtaatgacagtcatgagggtcagctatgatgccaagtgtttgtgctttccattaacattaagcggttcctctgaggaatggtttaaaaagttggaaccaggatcagtagactattggaacaaactacaagtaagcttccggaggccgtttgtcgttgcaaggaagattaacctcgaagtcagcgccctaactaagataaagcgattgtctgcagaaaccttaaagaacttcat

SEQ ID NO: 210415 - DNA, 563 bp, Cannabis indica
ggaggagataagagacttgtcagttgatgatgaaccatcaggtcttgctcaggaaaatgcttcttctgaagcgcaagatactccatcttgcctttaacttccttgattattatgctttcatacttctagtgcattcttctaaccatgttgcttttatttcgtgcagacatgtctcagaagatgctaaaagctctaaagaagagagtgggaggaagctcgggcttatctcctccggccaagagatctagaggtggtgagacaacatcgtccagagagagggcatcgatcgaagctgttatcgatctctatgaggagccaagcgtcgtggatccttttgtcctgaaaacaattaagtccagagactcctgaggaggaagctcggacaggcccgagtagtcaaagggcagattcgagctggtcaagagcggatctgagccaattcgggctcctaccccacctccagcactacatccagagactaagagaggtagagatattctcacccactacgtgactcggtcagtccctgaggtgagtgaacagctggccggagctgataatga

SEQ ID NO: 210416 - DNA, 422 bp, Cannabis indica
cttgtcgctgtttgacttcgacaatgtcttccagctgcgatggtactagtcttgaggatgagaattgtgtgtagaattctcgtgagaactcaaccctggagttgaacctccccggggtaagcttaaagtaccactgttgggacgtcttcaacagtgtagctgggaatatgcgatagtgcacatcaccggtgaccttctggaggtcaagttgcatatcgaagtatttgatgtgagccagcgggtcctcccgtccggtatacatctttcatgtcgacatcttgaactttggtagagggagggcatttatatatgccaagaacggtgatctcctcgaccgatcaagttcgaggtttgaaggcttcgggccagctatgccctggatcatgcccctgagttggtccaactgtgcttgcatagaaaga

SEQ ID NO: 210417 - DNA, 751 bp, Cannabis indica
gtccttgtttgaagtttccacccttgttcttcttgagagtattttctttatcagctggaaaatttgtcttgtagttctttttcaagaatttggcatagtttcttgttaacatggcaacagcctcgtcagtgatgccattcaattcttctagaacccggttttttgtttcttgatgaatgagggcaatactcacattagatttatccttgaccgcatccttctgtttctttgttttcttccatctggacagtgacagctcataattctgcaaggacccaatgagctcatcaagatcaagttcctcaatgtaatctcatttcttcaattgaggtcactttagacataaatcttcttgggaggacaccaaggacttttcgaagcagatttgaatttgagtaagttttccccagggcataggactcattggagatatcacacaactttacatgaaattcagctactgactcgtcttcctccatggtcagattctcaaaagccttggccaaagctcgtagtcttaatttctttactgcatctgttccatcatttttcattttcagcttctcccatgcttcctttgtaatttcacagttagcaatgacctttaactggttcgtggagacagcattcaacagaccatgtaaggctttgagttgaagttagccctttccatttcttttgaggtccatcggctcatgggtttaggggtaactatttcattctccgttatagttggtctagaccacccttc

SEQ ID NO: 210418 - DNA, 520 bp, Cannabis indica
taggtataactccacccaaagggtagtcaggaaggatcgggtcgtctactgcttggcccataggttagacctatggccggggattggacagctaaccattataagtttgggtggtaggcccagtagcatactctgttgtattgctcagtgggatactagacacggtagctggttgttgattggcaacttggtaggccctccttattagtacggtggccttcctcgtgcgatcatcaatgggtgcttgctgagccttcaaagttaccatctccctgtccctccactctataaattggcatctttgctcgtcaaatgcgaggtttatagcagcacagagatcctcctcatcatgatgcaaagtattattatggccttgcatgagtccaagggttgtacagaggttttggatctcagtatcatccctaaccgtcctccgagcattagtggtggacgggacttcaatgttaggagtggattagttggctgtagaactagtattccagtctcttgcacacctggt

SEQ ID NO: 210419 - DNA, 702 bp, Cannabis indica
gaagttaaaaaacttacaggagggtatcatttttgcctttactataagatatcaaatattgctttttagaaatgttgtactgaggaattctttgtctaacatatgtgaaagattggcataatgatttgcatttatgtccaattaaagttggatgaaaaataaggctttttttaacatattctgtcatatagctatgttgtcacttgtcacttgtcacagcttcactactgtatattgtggaccatgtacttgaattgacaagtcaactacactcctcggtcgttttcagtcttggttaaaatatttaatttggaatacaatcccttatgctacagtagaatatcaatattcgtctccaattgcagtggttgagttttattcttctccaaaggtcaattcatcacaaaagtgccacagtggaacgagagaaattatggttttcttaagttcagatgattttttctttttcttttccttttttgcttgtgtggtgtaaaatgacaaataaaaaatatatataattagtcatctttcagtgctaaaaatttgcaagtctgccatgtaacaatacagatagcaagtacagaagttaaaaccaaaaacgattagggcttctccaaggagccatcaaaacactaatatgtgtgagatttttcctccaaggcacgaccatctacggctgcatattgcccgtttgtgcta

SEQ ID NO: 210420 - DNA, 695 bp, Cannabis indica
ttttgtcaaacgactcgaaaattaggcgacctattggttgacttgtatatttctaattctaattattgttatctctaacgcgtgaaatatcttaattgaatgctattattttaattaattattattgtgatttcttaaaataataataataataataataataataataatagcatgcaattacattttattattattattattgatattgagtaacaatgatctgattatcagtttttttttttttttaaagtaattttttatgagcttaaataaaaatgaaaagtaaataaaaaatctagtgtaagtacgcatgttaaaataacagatcatctttaataataaaattattattgagtaagaatctcataacgagattttctaaagttttttatatggttaacgttaaataaaaatgaaagtaattcaatgaaaaatctagtgtaggtatgcatgctaaaataacacatcatcctttcaaaaaaaacaaaaaaataacaaataaataaataacagatcataaccaagataaaacttagtaatcacgtaccgtagagcattcacatcttgtcaggttcagctctaggaatagataagactcatccattttaggagcccaaataaaaaaatatcatttaaaaatatacatattttttaataattttttaaaaaaaactatttatctttatagaaag

SEQ ID NO: 210421 - DNA, 633 bp, Cannabis indica
ttttttttttgaagaaaattcagcactgttttaccatcatttgagtgtgtctctgccgcttccactcattttgatacacagtccataactagaaagatataagaattgttgtatgacggtggaaaagggcccatgaagttaataccccaaacatcaaacagttcaacttccaatatacctgtcaaaggcatctcattcctttttgaaatattgatcacatgccttgaaaaattgatgagcatctttaaagagtaggccagaaaaacccactttgtagtacctttgtagtagttcgaattccactaaaatatcctccagattgtaaactatgtccacgagttaggatagagaacatctcatcttctggcacacatcttttgataatttgattggaacaatgcttgtagaggataggcgtttcccaataataatgtttgacttctgagaagaatttctttaattattgcctcgtcaaatctggaggtgtaatattggcagccaagaagtttacataatctgcaaaccatggtactattgaatctaaatgaagcagctgctcattaagaaagtcttcattaatttggacctcttttgtattttggctgtctttaagctctaaccttgatagatgat

SEQ ID NO: 210422 - DNA, 686 bp, Cannabis indica
ttatctcgtcttttgtctttaaagactctttaatggatgacctggtgaaacaacaacaacaaaataaattaaaagatgaaacaacttataaacaacgttaaatcaacatagccatttaaaatatttagataaagtctctaattcataaaaagataaaacttagatcaacaaaagtaatatcaaaataatatcatgaaaatacttaacttaaagtttaaacaaaatcacatttgaatatgccttacttctttaagctaatgaagaagacttaattctcttgagcatttcaccaaacacctagtcagggccggcccggaaaatatatggggggaaaattgcatcctatacccattttgggttaactactttcatttttaccttccttatctatgtattttatttataccttcatttatttgtcacattcccaatatacccttatctaataaccttcctcacctgaacagtagccattcctcaccactttcgttcctccattcaacatcgccagccccttccaccctatgatttcagccctcctccttcgtcgcccttcctaccttcgttccaacatcaccaccggcgattttgtacctgtgcatcatcctttctgcaatatcaaagttaggtaaatttcatttccatttaatatcctctgatttattttttaagtttgtgcctccacc

SEQ ID NO: 210423 - DNA, 500 bp, Cannabis indica
taaccctatggtgtcggttattgcggattaactgacgctataggtgccgcctttagtcgacacgtggcacctatggcgtcggttaataccaaataaccgacgacatagggttatttatcagacccctgtatcgtcttgctcatttcacacctgcttgctgaacacaaagaacagccaccacataacagccctaaatccacgaaaaaaccctcacaaaccaccactaaaacaacctcattctctctcatttcttaaccattttatcccatttttaagatagtaagtatatattaatccataattgagttctactaacgagttagtatatataattcatacacttattgcttgaatatatgcgtgcattaggctcaattagaggagcatcttactctgggacaaattcaagtctagggccaaaacgatatcttaatgcaggcactcgggacaccagagcatcttggacgtgccacggcagctaggtatgctagtacttgaaa

SEQ ID NO: 210424 - DNA, 844 bp, Cannabis indica
tgcaattgtttcttccaacctttggtttttccaccttaggtaattcattgcctccacaatactgagtaaaaccatttttctttgtcgggtcagtgatgcgatgtacttggatcttgtgggactcatagtaggggggtaccatatcaaaagatgggacaatattgtggccttcaattgtttctggtgagggttgttagcaagacactagccccgaatttcgtgtctatatgtacttccatcacctgggcttagttttcttccccgatgactggagttataggtgtaacacctgctaatgggtcctttatattggttgtaatcattaaggttgtttcctcccccactttctccatcgagatgttttccatggtgccctccgtctaggatgacctcgccttcttcttcgtcatacactacaacaattaaacccaatagcggcggagttattagcggcgggcactctccgccgctaataagaggggtattagcggcggagggtggggtccgccgctaatagttggccaaatttttttttttttttgaatagcattagcggcgggcagtccgccgcaattgctccgccgctaatactagtagcggcgggcccgccgctattagtattagcggcggacaccgccgctaatactccgccgctaataaatgggcgggataattcccgctcatgtatttcaaactattagcggcaaactattagcggcggaggtccgccgctaatagtatttttttttttttaattttaatactattagcgacggacccccgccgctaatagtccgccgctacacatattataaatacccccatcagccacacttctccaatt

SEQ ID NO: 210425 - DNA, 618 bp, Cannabis indica
ttgttgttcttctagctactgaaagttttaacaagtttgggtgtggtcaatatgatcctatctggaggacacaactattggccttaggcttggtcagtctacatctgctgctagaaaatcagttaaaccaaaaaattatctaactaccattgaaaaattcattgacaaatataaattagaggcaaaattagatttattttttaaatgacaaatttaaatgtatgaagtatgatggctctaaagaattgagaggtgaatagattcttctacttctgatcttcattgctgctgaagataaagattgacataattaaccaataaaacctgcccatttttaacagctaaaaaggaacataaacaactaatacaaaacaagatcatctaaacacaagttcaccggagaccagcaggccttctagatacacagttatagcttatataaaccccaataataatattggttgctacaaagattttgcacattccattcccaaacactaacccagaaaacacaaggttcaaaaacactggctagtaagactaggacatatacaatatagagcagtttcacgtccaaccaaccttctacagcatgctatctgtccttgctggaagccg

SEQ ID NO: 210426 - DNA, 947 bp, Cannabis indica
ggctttccaaacgcaccttaataataataaaaatataacaagaaaagagactaattgtggacattcccaactccattatcgatattcatgttgctataatgggatcttcattaaaaaaatctgtaacatctaagtgcgtaatatccaaaggctctttgaaaaaatcatcatcttgataggaaaaatttgcttctactttctcctttcctttcacaaatgcttgataaagatcaacaaggtgttttgccgtagacaggtacgtgcccagtgtccttttattccacatctgaaacataagttttcaaaatttttacgattattattttgaggaccttttcccttgttctcagtagttgtgcttttcattggagtatacgaatttttattctggccactacgatgtcaaacattacttcgactacgaccgcgaccgcgactttgattatggtcacgatcacgtctattactttgattatgatcacgaccacgactatgattatgattgtcagaaattgttgcattcacttcagggaatgggatagacccagttaggcgagattcatgatttttcatcaaaagttcattattctgttcagctactaaaagacatgaaatcaattctgaatattttttataaaatttcgctctctatattgttgctacaggagcacattagagatatatgttttctaacatttcatagtcagtagctgtttctccacacaacattaatttataagtgatgttaaacactgcaaaattataatcacttattttttaaaattttgcaacttcaggtgcaatcaatcattcttagcatttggcaatatgacagttttctgatggtcatatctttctttcaaatttttccaaagcacaagaggatcttttacggttaagtattcagattttaaccccttatggagatgatggcaaaggaaaatcat

SEQ ID NO: 210427 - DNA, 805 bp, Cannabis indica
aaaaaaaaaaaaaaagaagtatgcgcgtaaatttttaataataaaattgaatgatttattaaaataaataaataaactgctataatcttacttaagggacgaattcaaagtaataaagattttttacttactaaacctgtcatgactcaagttagtattggtctatgttgatgtttggccatgtatggtttgagatgtacaagaatttgttcataaaacgtaatggaccaccaccaaccacgaatacagatacttgcacataagccatatatctgaaaagtgtggtccaaacatattttcatatatttttttttattattttttttggtgaacaaacatattttgacattgaggaatacaaatcttgtcaaaaaagtaaaaagaaaaacagagagctaagaaatatgctgtacatgttttcatcattttcttagatatcaatatttgagggatttacactaaatcattccattttgcaatatttcagacttagctggtttgccttctttattttcttggtaaaagaattttagttacgacaaaatataatgttataagttaaaatttaagctacaatatcgtcacgtgaatcacaatattaagaagtaactccaaataacacttgccacaaatacgataaaataaaatagtattaattctattgtaccaaatattatattatacaaaagttataattctactgattcactccatctaaagttttatgctttccatatgtgttagtatgtctaaggaatgcacaaacaagtgcatatagtaagatttttaatataaatatatataa

SEQ ID NO: 210428 - DNA, 454 bp, Cannabis indica
cccgaccttaaaaacccaaaatttaagtgctttgtgtgccatcagacggaatcgcacgggcatcaggaaaaactcataccattgtcaaccctattaactaacagatctcttcctaaatagcatcaaaaattgaaggaaaaaattgaaaaaaaaaaaaaagggttggggcggtcgggtgtgggcagcctgcgtggacggtgggggtggtcgggtgtgggcggccggcatggacagtgtgggcagtcttcgtcaaagtccggtgtgcgtggtgacggtcggaatggttggtgggtttcctgcgatggggtttcgggcgaagaggcaaagagacagagtgagtttgaagaaaggagagagaaatggtttgggattttgagaggggtatttttggaatttacgtaaaatggtcctattttaaaagttacccatactttttgttctcctaaccaattat

SEQ ID NO: 210429 - DNA, 552 bp, Cannabis indica
aaaaaaatatagatttaggcatgctacaaaaaatatgaaaacacaccgtgacaaatataaaaacttgacaagcacgctacgaatgtaggaatataaaaaacactaattaattcctaatataactttgatttttaaattatatatttctttaaaagataaattatttttaaatgtatttgtcaatttaatatattatcatttatgtttttctaaataaaaatattttttaataaatgaaatttcattgaaaaacaaaagtaccataagaaacgccttgaagctacaatcaaaaaactaatgtaggatgcatgaagataggccaagccaccaaactctagctgaagagttagctaacttaataagggaatgagcaagagtattcgctaatctattacaatgcgcaatcgaaagattagttgaactcttgagcaagtgtgttatgtcttccaacacaagaccaaatccgaaaaactccatcgctttgttcttaacagcatcagaatgacgaaaagataccataactgcatgtaaaggagaagaccctatcgagca

SEQ ID NO: 210430 - DNA, 1077 bp, Cannabis indica
gctaataaatatttttataaaggctatttttataaaatactctgattatataatcccaaaacccaatagtttaagcttttttcactaaaaatagaattcaatttaaataggtttgtacataaatttttataaaccgcccaacccgcccaaactaaaccgagataattcgacgaaaaatgcaaaccgaaaaacccgacgaaaatataacccgcccaatctacccgaactaacctgaccaacccgatgaagagagttttatatatatatatatatatatatatatatgtttttatttatatataatctatttattatataatttatatacatatttataaaaaaatagaaagttcaaactactatattttttttttattaacagatgatttgaactttaaaattcaatatttatatttatctcattatcacaataactaaaaaagtaaaaaaatagaatgtaaaaaaaaaaaataattaagtgcttggtttggacgggggttaacccgattaaactgacgaattcattaggcgggttgcacttagatttttataacctgatccttacattgggttgaataaaatgtaacgtaaaccgaccaaaccgaccgacatacacccctaataaataagtattgaaagcttaggtagatttttttttcgtaccgagataaattatacttcatattttaatatataatagtttataattttttaatggaaatttttctcaaatatattttttttcatttttatttataattttaaaatttaaatttattatttgcagttttataaatttatttttttaaaaatacaattttaaaatttcaaaattataaaaatacagactttctcattaggaaaagaaactcttgaaaaaaaaactcatttgtagacctttaacaaaaacaacaaaattttcattaagttttgaaaataacaaaaatatgactttttcctcttctttaatcatgagaaaacaaaaactcaattaaatactcataccaagtacgaagtggttatttcaagccatataaattcttgtctaacttatatacatgatgaaaagtgaagatc

SEQ ID NO: 210431 - DNA, 522 bp, Cannabis indica
gggattgaattagagggatatggaagtctgtctcaatccctcatttcatgtattctaattatgtaataaatgtcctttccaattatagatattgtaagcaaaaaggaaacctttcctcatgcattaagcccttataaatagtgatctagcttaactgtaaaggggatcgagagaattgttttagagagagatctaagagaaatactcagagatttttcattgtgagagctttgagagaggaaacactatgttctttgttctcgagttaatacaatctaagaggagtaggctattaccatactaaaggggtcgaacctcttcaaaacttggtgttctttattgcttattagttttttctctatttttattacatttctaataatttcataattaactcattgtcgttgactaaaagagaggtcaacaataaggattgaaatagctaaacaacctaataaaactagccatgctcaaactacataaacaaagatcaaacaaattttgaaccaagttaaaaataaa

SEQ ID NO: 210432 - DNA, 658 bp, Cannabis indica
tatcagtagggtcttttacagtggtgtattgtattttttatatattatttattacttttataccgtgacactacgtttgttaattatttttattgttactttatgtacaattctttttgtaaagcaaaaataaaacttataatacctcagtttaacacttgtctcatatttaataggattctatttaatatctaattaaatttttttaaaaaaataataaaatagtaaaagtttgatgtgaatgtttggttgtcacatttatgacagtatttctttttttttttccttttaatttaatttaataatcaaatatatcattcattatgtacactatttcattattctacttccaattacttctcattattgtctctccatgttcatctttttatttgttggttttttttttgttttgtttcaaaatccataggttattatttttttttctacccctttattcctcaagttctctctctttctctccattaatatatatgtttttttttaaaaaaaatttatttattgttcaattcttcttcttcatcttcttttttatttttttttagttttttgaaattttcagtcacgtttttaggaaaagataagagtgtggtttctttattcttattttctaaaactgagcttgcaaatatagcat

SEQ ID NO: 210433 - DNA, 641 bp, Cannabis indica
ttgtattgagaattggtgcctcttcctgatgcagagtatcgattgagtgttccagttgcagatctggtagagccaacagcaagatttgctgaaatcttggtgctagaatcagctaagttgtaatgtctttccaatctgctttcatgcgttagtagtaaagattggatagattcaagagatagatcatcaacaagactagtaacatgcacaactacagggtcaaattcagggcctaatccattgagcaagtgcattattaagtcattttcgtccattggagtaccagctactgaaagagaatctgcaagaatttttaccttgtcaagatagtcaaaaatggaaagatttcctttttgaattgttgaaagttgagacttgatctggagaatacgggctttagactgactggcatatcgttgttcgagggcgcggcaggcagtgtatgagctttggaattgagcaagtgagccaagaacagattcggacatggacgatcgtagccaactgagaagaagttggtcctttctcttccagatcgtgaattcaggattggtttggccattaaccaatctttcagggggagagtgacctccaaggagtatgtcatcaagaccatgaccgattacggtgggaatgacttg

SEQ ID NO: 210434 - DNA, 617 bp, Cannabis indica
tgtatttttttataaatttcatattgtagtatactgtacgtgttaagttttcactggtgttttactagtgttttttagttgttctactggtgtttagagttgttctgttttgtgttctactagtgttttatgacaatatttttgtaaaagttattccaaattctaatatttttgtaaaagttacccgcccattacactatttttttaaaaaaatttatatatattttaaagggtcccaaaatcaaatttgtcttaggcccataaattttcaagggcagccttggttaagctaccttacacatataataagtcagtggttcgagtcccccttcatctttatttttgggttcgccaatactcgcacacatatattttaattttatactataaataactttaaatactcaccttaatttggtgttgtgaaaaaaatccttgacaataatgcacacaagtcttgccctaataattaagttttgctaatgggatgataaaattgattgatgtacagtactagaactagggggtgggcatcatccaatccaatccaattgaaccgaaccgatccaatccaatcaattacaaaaagttggatatccaattacaattggattgga

SEQ ID NO: 210435 - DNA, 797 bp, Cannabis indica
ttctttttaatagtatcttttaatgtttcattaacagcttcaacttgtccatttgcttggggtcttgaaaccgacgagaagctcttgataattttattcctttcacagaactcaataaacagctcgttgtcaaacttagctccattgtcaaatactattttaatgggtattgcaaatcttcaaagtattttcttgacaacaaaatcaagaacctttttacaagttattgaaactagaggttcagccactgtccattttgtgaagaagtcgactgccactaacgcatactttgcgcctccttgccctgtgggtaatgcctcctaataagatctatgcctcatattgcaaatgggtagggcgaggtcatcatccttagttttgctggtggtacacgaggtatatgtgaaaacctttgacatttgtcgcacctcatgacaaattcatgtgtgtctttgttgattgttggccaatagtatccttgacagataattttcttcgataagctttgccaacttgcgtgatctccacaaaagcctttgtgaatttccttgattattttgtttgcttctgttagcagtacacaccgtaagagaggcattgaataacccctcctatacaattttccctagactattgtatagcgaggtgctgaatacaagagtttgcgtgtctcgttttgtctgttcgaagttctctgccgattagatatttgagtataggtgtcatccacgtcggcaaggcatctataatatcaacctcttcgttttcacatatattaaggtcgttcaaaactttga

SEQ ID NO: 210436 - DNA, 727 bp, Cannabis indica
taataatattttatatattaagactgtttctaataatcttttcttctattttaagattgcacattttctttaatttttgttacataatgtttgctttaaattttgcaaaacttatatcttgttcctccaaattttctataagtaaataataagtattattttgtcatgacttatacttacccaattatattttaccaactaattataatagcacaaatattactttaatgaaataaatcattcgcatgatcatacctttatatacaatctaaataaaaaaaaataactaaactttaaataaaactaatatttacgtgcctcggcacgtaacttctaactaatatatatatataaaggagaagaatgtggcggtgacatagcggtctaaaatcacttcaaataggtttttctattttctcctttattctctcttttttataattttaaattttatttaattatttttcttaatattttattaaaaaaaattgaattaagcctaccaacttctattttctaaaaataaaaataaaaaatctctattaattattaaaagtaaaaaaaaattagaagaattactcatattattaaaagaaattataaaatattattaaattttgaatttagatataattttataacttaattatcactaaataaaatataaccgcacgcgaagcgcggtttgtttcctatttatgtatataaaaaaagaaaataaaaataa

SEQ ID NO: 210437 - DNA, 864 bp, Cannabis indica
ttaccattccatagcatatcattcgagccttccaaattgcttaaccaatcatgacagtttcttcaaccaaccccatattgcctactgccaacacttccataaaccagtcgaaaaagttggttgttgtagaatggccaacccccaatgcagatctaatccaacatgaatgagcaaaggaacattgaaccaaaacatggaaaattgactcttccccatagttgcacaacacacaatgcaaatccacaggaacatgtctactatgaagttgagtacgtgtaggcaaacaacccgaaagagctttccaagaaaaatgtaaaaccttgggaggggctttaatcttccacaacaccttccaaacatcatcttccatggaagagttccaactaccattggccaattgtaagtgcttgtaggagcttttgacagtgaagaaaccagttggatccttgttcccaaaccaagtatcatccccaagattaacactcaaaggtacctgtttgataagctcaacatcacgggaatcaaacaaatcatcaataatctccatgtccagttgtctactatctggcttcatgagttgagatactctacagttggtcagggccggatgagtagataccacgcatggattagcctcagacaacaaccaaggtgtgtttagcacctcagtagatgaaccatgccctattcttcttcgagaaccatctttgattagcttttgcgactcaaagaaacttcgccatataaagctcagattgccacccaactcggcctccaagaatgaatagttaggaaaatagcgagccttatatatccgacccacaagagagtcctggtacagaagtaaccgactcacaacagttt

SEQ ID NO: 210438 - DNA, 707 bp, Cannabis indica
caatttgatgtttaaaaataagacctaatcggatctaatcataattgaatatttaatgtttgacggttggttgtaattggatcgattagtttttattaaattagatcaatttatgcgcactcctactcataagtgagagaagttccaagctaattttttgctggttgagaactgatttctatcaatccaataattaggtcattaaatgtggtatttagaatatttgattatatcttgtcactagtagtaccaaaaattcataataccttaattattcatgactcgagagcccccagtaattgtgaaaccaagtcatttgttctcacaactcacaacctcagctaatctctcacaatttgaagcctaatttcgtactatcagactgttataatattagcctaacatcaatgataatgataatgatatttaacctaacagaaaaattaaatataagcttacattatactgataataacaatatttaatgttaaatataaattaaataaataaatatttaagaagaactatttaattaaaactaatagtaaaagaatcattttctcaattttgaatcattattttataatgttcattaaataaaaaattaatggtgattctctaaaatatttttttttataaaataaaattgtatcaaaagaaatttgagtaactaactattgtacttttttttttaaaaaaaaaaaaaa

SEQ ID NO: 210439 - DNA, 572 bp, Cannabis indica
acaaaaagcttcttgctgccgagcagaaggtggctgagccgaccaaggatttacaggcttctcaccaacttgaggctgctatgacctccttatccaaagaagtgaccgacctccaggaagaaagagaggttcttcgaactgttttctgtaggttggaagtacaaaagaagtccaaggaggaggaccttagcgctgaagtagagaggctcaaagggaaggtgaatgccttagagatagccagtctcgagattttttatgacttttggaaggctaacccttaggcaaattttgattacctaggcaatgccaaagacatgtatctcgagtaatgtgcttcctgggtggcctatggagagtccgaggcaaccacttttacttccagtctgaacgttgacatgcccctacccagacaacagatcctccagctgataccagcccagaagacccgtacaaggagactgggactccacccgtctaaacacttctctttttatccttctttttttttatatctgtctagccataaggccttttttttagttacaatgagaccggccaagcggtctttgaac

SEQ ID NO: 210440 - DNA, 899 bp, Cannabis indica
ggtttgtcttttttttgatcatttcgaattagattgcgagtccaattgagtaggaagaagttgaagaatactttcaaattaatttaattcataatatctcttttttatgagtattatatttaaattattcttacacagtcacatgattaagatataatttcatatacaataaatttgtattatttgaagatggatgtgtaggtttgtgggaaaattaaagtaaaattttgattatagatgaatgaaaattatcgtaaagtgataagggtaaaactagtacaataattaaaaaaagaggtaaatataatagattttaaaggagagggtaaaaattagagacaccaaattaaaagaggtatatagtgtaatttattcaattgagtctgggtttctcagatagttgggcacactcctccaacaataggactggctctagcctaaggggggttaggcccgcgcttagagtctactcattttaggggtccaattctaactctggcgatcctatttgataagttagtagcatttgaagttcgctagactttgaagtgattaaaaaaaccaaaatttatttagatatttggtgtcacataaagaaaaagaagacaaagaaatatatgaaagataagggaataaaggggtatgaaaatatagtttacatagtgggtaggagagaaaatagtatatagcagcatatactttcctttttatataaatataatttatgctaattattcttattcatattcttttttactttttttttttattttattattttgagggattattctttttactttgatgttatttacttatttatgcttgacttttgggttaaggtaagcgatatgttatggcctcggatattaaaatgggccttctacaattaatacttc

SEQ ID NO: 210441 - DNA, 537 bp, Cannabis indica
ctgaaaaatagcaacgttaccctatcatttccagcgacccccagaaaattcaaaattctctctatcaccgtgagccattgctcaacatctggacctcccaaaaaaactggaggttcttgcttgcaaaacttctcatagagtggctccgtacggttgccatcaataggttgttctgctagcaccgcaagaattaaagcagcctgaacttgtggtggaggcactgcaagggaccctactgccttaatctcagaatttcttcatcttgtttgcgaatatgatcttgcatttttgcaaatctatgttcccaatctggaggagcttaaggtgggttttcatgtcgaccaccctgaaaccttccacagcctctaccacgtccacgaggattccggggaatttgatttccctgaccgcctccggtgtcgaccctatttcccggactccttgtatttcgctgggcgtccatttataggacttagtctgcgaacccatatgttaagcacgtcagacagcgatcacaaaacttaataccgctcttat

SEQ ID NO: 210442 - DNA, 540 bp, Cannabis indica
tatcgatggtcgtaaaaatcaatatatcggaaatgtcaccaaaaataggaatactgtatattaaaatgaccacctcgacgagtagatcattcccatgctaactgtttgtcaaaacagtacacgatgtcgccagaaagttgtcggataggggcagagctacaaaaatgtcaccgaaaaaagtagcgagttggacaaaatagctaagtgtgggttgttcttctgtcaagctgagtctattggtgaagacggctcgtcaaacggacaccggaggtgattggaaaatccgttcaaagtttgaaccaccaaactttgacttacgattctgagctaatggcggcgaaagaagcggcgccgcttggggggtgaggtcgctggcacctgggggttcgaatggtctggtgcatgggtctggtcggtggccagtggtgggtcgccagagagtagtggtgatggtggtttgtgggtttccttctgtgttttgaagagagagaaaaagagagattgagtgaggaagaggacgaaatgggatgatttaaatgt

SEQ ID NO: 210443 - DNA, 590 bp, Cannabis indica
aaaatacaaggtaccaaatatgtagacacccgttatttaattcattaaaatttatttaaataagttagaatttaaaagttagttggatatttaatttgaattgatatattttacgatattgttagatttaatatttttttaatattgtataactatctaatttaaatttatgatactcatttttaataatatttatttaacaaacttttcttatttgttacatgtttattaattgttatcctaaattttgtcaacctaacgtggcatgtccacataagctaagaccaattacacatggaatacaaccttaccaatagtaggacaaagtcttcatacaaggtatggtaaaaccgtcaagtagcaagcgaaaggagttaagctagccatcaaggagttgtagcaccatgtctagccagccaaaaggggagcatataagttagccaaggagttaagcgagccgtcaaggagcggtatcactatgagctccaaagtgtatctcgcagagttacctcgctaggatagcaacaataaccctaacagcgagctgaagcttttcccatgtcaatctgaggtcgataatataaaaacca

SEQ ID NO: 210444 - DNA, 909 bp, Cannabis indica
acgaagataatccctacattcatcggattaaattagagaataaaggcaatgagcctcagtttcccattctttgcattgtaattatggaattaacttagtttcttattttacttattatagattaagggaaactattcttcctgtaataaactcctatatatagtagttgaatctcactattcaggaggggaaaatttgattcagaaagacactaaaaagaaaaaagaagcgacctaagagagagttactcagatttccattgtaagagctatagagagagagagagaatactttcattctttgtctctcaagtcaatacaacaaaaagaggagtaggctattaccattctcacggggtcgaacctctacaaatttcagtgttctgtttacttattgtttttgctttctattatttatattatataatcgttttatcatgactcactgtcgttgtaacaccttaatagtttaggcattatctcattctcgatctctcttttcatctttaactcgcaatatttaatatattaatattaaagaaaaataataaatttgtaaaaaaaaactattagtgtaacacaaacacaattactgttatcctatatgcactatgacgtggtagtgagctggatgacatgtatcttatagtttcatacctgggcggaaggttatactcctaacagcccccaaagattgatagaaaggtccatgttgaatgtgcatagtaggatgtccaaacagagtcaccaagggacatccgaccaaagctcaatcgtgtgatcaactcgcatataccagacaggatgtgcgagtttgaaatttcagagataggcatcgttgcttttacgacacgaagataatccctacattcattggattaaatcatagaataaaggcaatgagcctcag

SEQ ID NO: 210445 - DNA, 620 bp, Cannabis indica
catgaatcatctaaatctcacataaaacacacaaaattgttttaaattcatattttaaaaataataaatattaccatgactctaatactaattgttagaaacttgttttatcgggatcttatttactattcatgtatgttaaattaaggctaatctaacatcctaacatggataccctaaaacaataaaataaacacataagaaatttaagaaaaccttacattgattgcaacgaaaataaattgtctccttccgttcaactctctaaatcttgttcctttttgtcacagagtattaccaagaattaaatctggatcttttttcttcaattgtgttcatcacagtctttcacaaaggcctgagtatcaacttgaataatgtgggttgattctcaaaaccccttagaaaaatattgagaaagaatttagcatagtaaattttgaattagaagaaagaagagaagagaatcgcctcacattgaattttgtgagactagagttatgaaacttaggttaattctctcttctcatcactttctttgtataggcttcacttagggttagatttagataagatgagcttaaaataaagaattgggctgaatctaatcctctaggccg

SEQ ID NO: 210446 - DNA, 959 bp, Cannabis indica
cacacacaacaaaaaaaaaaaaggatttaaagtaaacctaacaagaacaaaacacatctaaacccttttcaaggttgagaatcaatataagaaaaaaaaattccagtgcagacaactaaataataaattccgcagtttctatatcgtataagttctgtacaaattaaaattccagaaagaataacattgcattgagtttaaaagacaaaatggatgcctttttgtattggacagtgaagataactaaaatgaaagtctcctacaagccctctaatctacccaaaactaaactgagcctcccatcccatttaacaaattgaaaaatgtcaaaggtccttaggaaatgaattgccacaaacatcaaaaccacattaaaatccatccatcatgattaattgcatactttttcgaaaggcaagaaatctgcttccacattcattcacaatagagtaatttttccatatttatttttagtccacacacctgaaatctatagacacttcagcaaacaggcattatagaagtagagaatgaccaacggcagtggccaaaaaagaaaaaaaggcatatgagagactaaattgattagggacccaaacaacacaacatgaaatggaaatcccaaataggtttcataaaaatgcgtgtgaaatctaaagaaatgattccaggtctatgcaagtaaaactaaacacaacccgataaataacttacactacagacaacctccaattaaggtatattccccaaaatcactcaccaaaccaaactctatcacgcatgagttgagcattgcaattaccacacaagattttttttcttctataaatttcaagtgctccttttatttttttttatttttttctactggatctttcagcttagccaacacatatttccatttctatttatgataaaagcataacaaacaaaaccattgtccatgcaatttttgaact

SEQ ID NO: 210447 - DNA, 549 bp, Cannabis indica
aattgataaatagatgcaaattatacaccttttattctctttactttagcgattgaaaaattaaaactataaatataaattattataatgaaagaaaatatgttttattttattagctattcacctaaaaacggaattatttaattgcattcatttatcaacaagtaatacttcactcattttacaataaaatttaataaaatatgatgaaaggaatttgttactataaaagttatatttcaagaggtattattagagtcatataattaaagggcaaaatttggtagtgtaaaaattgaggacaaaatattaattattcaaaaaaaaaatgatttttaaacattgaacaattatttgactttatttcatatgcagcacctgaagagtattcttaccatgaagcataatgcatggccaatcaaatactaatgatcgtgaactaggatctaatttctttcttgaatatgcactgagagagaaagagagagatcattacttaaagatgtcaatatatgtggtgtgatccaagccgcacaaatcagatgcctc

SEQ ID NO: 210448 - DNA, 949 bp, Cannabis indica
aatttttaattactgatagtgttcataaggaaatataagctgttaggcacatacccgaatttgatcctgtttgggctttccctggacgggctgaatttttcggaccaaatcttgagtcctgatttcatgttcatgctgccgcctttgaatacttcaaaaagattattgtgttgtatgtactattgatgttttgtagtattttcttttgttaacaaattgaggttttgttgccttaaaatttaaataatagagtccttagcagttaagtcttcaacacaggccagcgagcaactggcactcataatttgtttatatattttcttaatgctctaatctttgacaaccttttccactttgaccctttcttttaccctctatgtttcctttcccttagtatatacttttgctacactaatcaaacctactgtattgttattaagaaatcttttattattcataaaatgaagttatgtgatatttaatattaaattaccttaattatcttaatagttatatgacacttgtgacattgaacacttctcttttaacattcctgtatttattgtactaaattctcttacatctgcaatcataagtcataataaaaaaactcagaaagggaatcttattagaactgagaaaataaaaattataaaaatgttttgcttggataatgtaattattatgattaagaaaaaaagaaaaaaataagtgttggcagcgtttgtggaggttgcagggtgcgtgactccacgcgcacagcaacaacgcgtggttttgtcttacctacttttgggtgattcctcctactgtaataggcctgatgacgtgtcttcattattagcttccacgtggattgttgaaagagggagagagagaagtaacagtgacagacagacaggtacaacctcattaaaattgaggaaaaacaattcaaaaaaaaattaat

SEQ ID NO: 210449 - DNA, 815 bp, Cannabis indica
tatatacaaattttcaaatagaaaacaatgcaggaaacccaaataagagaatgagaatcgaaacataccagtcagaaaaatcaaacccaaatcatcaaccggcgatcaaagctgaaaccaaacaacaaaattcagaaaagagaattgggagaaacaaacaaaagggtgtttgggtaaaaaatcagaattgggactctgatcaaaataaagaaaaagaaacaaagagaaaaaaaaagagttgtaggtagagtgaggaaggagtgaggcggcgtgatgaagaagatgaatttcttttttataaaaaaaaatatgaaatatatatatatactgacacaccaaagagagcacacaccataccataccacaccacaccacaccacaccaccacagtgatgagtgagaaatagagagagagtcagagatatacagagagaaagagaaggagagagagagctatatatgtatatatatagagagagaaagatagagaaggtcactcaccaaacaagaaataccaaaactttggcttccctttacataatcgtgcatggaaacgggaaatagcccaaatgggtcgccacatttaatgttgtgaattttctctctcttctatatatataggtatatatgtatataaaaatcaaatctttattataaaaatcaattcttttgtgtttaaacaacttaaaaatcaaaactttattataaaaatcaattcttttggtttaaacattgaaaaatcaatttttattctgtttcgatttaaaatggtttttattgttatattattatatacacgtaagacttggtctctg

SEQ ID NO: 210450 - DNA, 957 bp, Cannabis indica
aagcaactcaagctactcttctaaaggggacacacaggaatggcatgcatacttttgatgcctctgacattcaagttcagtccaagtgctcacctattccaaccagtactgccttactaaaaataaatgctctatcaccaaaaataagtgttcatgctgtgttgagaatttatagtattacataatcaatttacaacaattaaataatattttctttgaaaatcatgaaacatgatgatgatcaaaatactgatattttttagttgtgttattattgagtaatttgtatttgtgtgatgtagatatgatatttggtttgtaatgtagatatatttggattttattttctatattgaatagtttttgaaaagaaaaggatgttaaaagtggcattttgctaaagaaaaaaaaacaatacccaataagcctaacttaacctgtacccgatgctaactcaaccagacccatcccaatccgacctaactcactcgcattcgaaacctaaaaataggcgagtattgtaacaccctaactatcttaggcgtattacgtgatttttaaacgtactgtgcagctcgttgctaatcaacgaggtttatggaaaaacgtgattaattaaaattttgctttttcattaaacttataaaccattttacaaaaagtctcgggatcccgatttataaaaatatttacaaacgtttttactgttcaacttttacatcaaaataaagtcgtctaacgacagttacaaaatctcagccgtgctgtcccgaggatcgtacgctccaggcctaaccgccccgacatgtacaatcccataagctcgctcacggtccatcagcaactgccttgcctttacctacacatgaacgtaaactgtgagtcgacagactcagtaagaaaagcataataatatcatacataaaactgactgccgtgtccaacacgatactgagt

SEQ ID NO: 210451 - DNA, 752 bp, Cannabis indica
gaaaaaaaaaacaaacttggcgtgattaacttctcaagatcacagtaagatgggagtgtaaatgttccaattcagtaggtcctacaccaaattacacatttattactttacattagactacaaagaaacaatttaatcaattataacattctagattaaagttcaacataattcttaagttgttactagatttgaattcatctaaaatgaaatgagatgcaatggaatgttataaattcttttatttttctcatgtctttttaacactttttctctctcttaacaaaaataaaataaaattattaagagcactctttctatatttttttatcttttacatgattagtaaaagtagtttttttttttttaatatgttttgtagtttatttagagttaatttacgaataattttatattttgatgatgtattgttatttttctgttgatttataactgtttttttctttttttttgataatgtctttttgttattaaatagttgttttatagttatttttatgttcttgtttaggtattttatagttgtttatagttgtttttctgatatttttctgtattttttttgtatagttgtttagtttatgtacatttcttatcttgtatattttaagtttattccagacaatattttttgttgtatgtatatgcatttggttttgctatttttatgttgtttttagttgtttttaagtggtttctataaaaaaatttgttgaacaattatttttcag

SEQ ID NO: 210452 - DNA, 1001 bp, Cannabis indica
caatatcggtcccttccgatgtatactccatacatccgatactggtaaactttgccaatgccctggaaaggacataacacttatccaaggtgtaagaatacctatcgctgattataccatgccagtctaaatccagtgttctgacaaatcagggaataaactttcgaacatataattaagattatattccactgtgctgacaacactataatcattaacaaattcatatgttctggacttaaatagaattcatacattatatgtatataatcatgaaataaatcatgtgaaccatgcaacataaaaatgttatttctgatctttattaataagtaaatctgattatattgaaatgggttttatttagggcacaaaacccaacatgaggttcacggtggaatttgtccacggttagagagccaaagaggagttcacgagctttctcttgggcccaacattctttagaagggcatgggacaatttgggcctgagtgcctgagtgcataatattgaggccttataacagttgatgtcaaaatattgtttgttgttgaatttctaaaactagaagcagaaaaactctctttgtcactgtattcttttagcctcgctcatttctccaacaaaatcttgccagaattttggggattctttataaaaaactctatgatgcttaactcaatttgagtatttagagagaaggaatttaatgagaagatagacaaaaattgcttagtgagagagtcaacttttttttttgttttacttctttttaccttatctattattaggattttatgtcctaaataaaacacatttcaatataattttattttttattcaatagaagattaaaagtcatttaagttaacatgtgttttttattgattatggtttaatatacaatttctattaaatccaaaatatagtattaaccacaattatagtgatgccaacacagtgaaaggtaattatgaatatatatttcaaagcttatgtcc

SEQ ID NO: 210453 - DNA, 745 bp, Cannabis indica
tttttcatttgatccagctaattatagtaataatatacttacctttcgcatatatggcaagtgtaatgttcggttcacatatgagagtattgttcattttttttttcataaataggagtacgtttggcaaaattcctgccatcaacctctcagagttggcactccttcaatgctgatttagttgtgctttattatacaacttttgctcacatatgaaaacctggtaaataatttcaacatcggatatcacagtaatatcaagatcacatacaaattattcatgtgaaaacaaataccactcttgataagaaatatatacctgaaggaggactattgcagtagtacctcctgaagtagatgttactaggttaattagcacgcaacagatgggcagacataatgaaaaagcagcctcagtactacaaaaatcttagtctacaccgagcacatgtgtacagatgacatatcctcgctaaagctattttctcactagcgggaatgttcgcgcttattttttgggtttagttcttgtaccgaggacatgttctcgatataggtgggtataccgaggacacgtcttttccaatataatttaccaactctttctcttccccttcgtcatttacaaaaatccatgacacttcactttcaaagaaaaaaacaaaaacccagaacccccaaaatcgtcccaaacccagcacatcactttctcttccttcttcgactccctctttgtcagctctct

SEQ ID NO: 210454 - DNA, 358 bp, Cannabis indica
caagtcaaagaaccaggcaacttcgtgaggagagggcataccccatttcttggaggcatagaggacgaagagggcagacaaatacttgatgcccttaggagtgaagtgggccgaacagaggccaaaagagtccgccacattcttgaagtattgatgtaaaggcatcaatgccccttgttgaccatgggcacccgaccaggcgcacattccctttttagggatttggcgtccagtattgccatttggtcgccaaaatacctgccaaaagttttgccggcgacaataaacaccagcaaaacttcgtcaggggcacgatcagacggtggacctattaccggtgaggtcgttatgctggcaa

SEQ ID NO: 210455 - DNA, 554 bp, Cannabis indica
cagccatggcttctcaaactttttaggtattaaagaagactagtgagaagtacaagtttagtttgttgagctcttagagagagagcatatatatataactcaattccttattataactcaatttatgtagtaaatttagacttagtacgtagagtaatatattcacaaagtgagagaaataatttacattcagagtaaatattattaactaatattttatagttagttagacatcgtcttattatatactattactacaataaaatttatcaatagccgcaatattattagtgatgggtaaaatttacccctaatagtagtagcattagttgcggaaccagaaatcgtcgctaattctacttatttatttttttaaaaaaaaactattagcgatagacttcgccgctaatagtattagcggcgagcctcaccgctaataatattaaaaaaaattgttagaattattagtggcaaggcattaacaacggtcccgctactaataattgtatatatacccaactccgacttttagtacctatttcaaaatttatttt

SEQ ID NO: 210456 - DNA, 1185 bp, Cannabis indica
gtatatatatatatgatgtttgtgtattgcagccgaagacattgaggaacttggatggtcaagtgtgtgagatatgtggagaccaagtgggattgacagtggatggagagttgtttgttgcttgtaatgagtgtggctttcctgtttgtcgtccttgttatgagtatgagagaagagaaggctctcaaaactgcccccaatgcaaaaccagattcaaacgtctcaaaggtacatacatatattctaaactttttatatgaattatgaaggtgtacactatagttatagtaagcattctgtatgtttttgagaaattttgaataatttgttgcataaaaaataaagtttaaaatgattagttacacgcatataaaataaaataaatacccgagcaactgactatttgaatcatatttttagcacgtttgttttttgttttttctagtttagtttaacaaaattatgtgggttgttcatagtttttgattaattaatcagaaaactattttaaattattaccaaacaatacttaaattattcataattttctgaaagtggatagatactacttataatgtataaatcaatttttctaaagtgattctctcacctaattttttatctatatataattacatctataatttgaattataattttattaattatatatataatgctgttattgaagggagtcctagggtggagggagatgaggatgaggaagatgttgatgatattgagcaagagttcaacatggaagatgaaaagaaaagacaagaacatattgtggatgctctgcttcatggcaaaatgagctatggaagaggccatgaagatgaggacacttccaatgctcaattcccacctgttattgctggagttagaagtagacatgtaataaaaaaactataatacttaaaatatattcacttgaatttgctctaaaacttatgttcatgtaaatttcacatgtttacacaggttagtggagagtttccattggcatctcataatcatgatcagcaaatgttgtcttcttctctccataagagagttcacccatatccagtttctgaaccaggtacccttttggttgcttattatatttctttataaagattataataaccttaatgattcttacatttgtatttattggttttgaaaatgaagggagtgaaa

SEQ ID NO: 210457 - DNA, 603 bp, Cannabis indica
aaaactatgttgaacgttgtttccagtagatctcctgttgagctaaaatctcaaaataattacactgttcggcagagaaatcatgatcgtgagaatcgccattatccactttcagctttgccattttcttcttactctgtttcaaccttttcttgaaatttccgagaagctcaaaaccccattcagataaaagaatgctgcaacattttaacttttcagcaagggataaatgactattcacggcccaacaatctttcacaaactcaaaacacaaaggctcacgagaccaagcattttcatatctaaataaacgcacaaggctagtaaaggtcacagattcaagctcaagaaacaacagagtatgatcagacgaagagtaatcacagtttgacaattttgcatcagaaaataaagaaaaccaatcatgattcacaaatgccttgtctaacctgatttcaatgtgagctgaggtcccacgtcctctctcccaagtgaaccgataccctttccaatcaagttctccaagctggcagtcatggagcgcaaggctaaaaccattgatcagagaatcggggtaggatcggcctcccttcacatcatcct

SEQ ID NO: 210458 - DNA, 523 bp, Cannabis indica
aaataaagaaggttcatcttcggatacacagaatacaaaacagaatgacaatacttagatatgttgagatactaatgataatatttccagcattcatctcagaattgtcatactgtgatagcatctcgcatttgcatcactcaacatttatagaaagacgcgagaagtattacataatatatacttaggcaatgagaaccctgttcaaagtataacaccttgagaagattgtttgtaccatgagatgaataaagcatagtaagcataatcacttacagatagagacaaagagcgattatagctgttatttattatattctcatgtgatgtaaatatgaaacatggagattgtccacgtctcacaaacaattacagggataagatcccaagggaataactgtcaccctaaactcctataaatagggacagaactcagggaacaagaaacgatcaatttaagaaaaaaaaaagaagatattatatcaatatgtccttgcattctgtataaaatttattaaaaatt

SEQ ID NO: 210459 - DNA, 925 bp, Cannabis indica
tatatgatgattctacaatgtacccccataaaagggatgtattgatggattatctacttgtttcgccatctacctagttatatatataaatttagaaattaaattctataatgcacccccttaaaggaatgtattgatacatctctatatgttttagtagccgaaataattttttattcaattttattacatggtcatgtaaattatagttatttaagacatctgcagaattttaagaaattcgaaaaaatttaacacgctaaaaacaacgttcaaatagtgtgttgcacgtgtaactattttattttctatattgtaaatagtctgtttaaacattatttactatattctaaattatttcgaattttttaaaattttataggatatctataatagctgtacatgaatataaaaaaaaaattagactaaaattttttttggataatgaaacaaataaatagtgcaccaatatatatattttaagaggtgcattgtaaaattaaccaaaattatatatagttgtaataagctataatcaataatttttggttgaaactttaaatcaaaaaataattttgctttcatattttggaagtgttattttttattgtaagatgatggtaaatgatttgaaagatgtttatgtcaattttattagacgttctgcaaatagtgttgctcactttttagctcgaaatatcctatttaattactgatcgtgttatcagaactagtgatgttactcaagattttaattatataatcattatggattttaattaataaagaccatgatttatttccaaaaaaataataatttggtcgaaacatagacttttcaacgtgtaatatttggggccaaaagattagaaagtatggtcttgtttacgtgtttttggttggttgacttataaacgtgcctcag

SEQ ID NO: 210460 - DNA, 684 bp, Cannabis indica
ctcaaatttttatatcacacctttgaataaattaatagataatcttagtttttcattttaatagttttaattaaaaattataatattcagtattatatttagaaatttttttatttttacactttaaatagtttttttacggaaatccacgtagtaacctatatagcaactaacggaacaagttaaatctggttttgagatggaaccccatgattcttaacatggtatcagagtcatatcccttgcgggcaagtgatcatatccaatccgcacctatacagatagtaaccatgtctattctgatacggttcaagatttttttttttttttgataaatcagaagttgtattgcaccaaacaatatttacaacctaacggcaccccctcgggcccaagttgtttcaatctatacacaatcaattctatacaccttacaaatcatgaaaccaatctctatccttatcttggatctttctaggtaagtacatgttacatctcatttttacattccattttatttcatcacaaaaactgctactgttcagagtatttccttgccacatttttccatttctcatcttccacacggcataaacaagggctgctatagcagcttgatacaccagttttcgaaacttggagagcttggctctttgcacccatctcagcaacatcggaaggctg

SEQ ID NO: 210461 - DNA, 592 bp, Cannabis indica
aggctaggatggcagtgcaagaagaggttactcactaaatacaagaaatagtcattcagttgcaaaccctgattgcatcaagggggctcaacctagaggttccttcttagccactggagttcaaattaacatcaatctgccaatggctatgagaaagtttgatcatcaagtagctggattgtcaatactagcaattgagaaagggaaagccatagctgatgatccctaaaagaaaaccaattcgtcgaggcctacacgagtgctcctgtgggtgaatagaaaatgattactttctaacccttaaaaggttaaccaaacccgagggaaagttcccaaaccaatttgtaaaggaggctctcgcaaggcaataagacccatgtacaggcactgggacttaacgcctaaggaaggaaagatcgccctagtgcttcagttaaccaaaagaagattttgaggatcttaatctggaaggaagcgcttccacggttgacctcgaggacaatttgaacgcgcacaaagaggaggtgatcatgatttttatggtcaaaatcaaagtagaaagcggaagcgggttttataaaaaaaggtttta

SEQ ID NO: 210462 - DNA, 525 bp, Cannabis indica
aactttctccaaaagccagaattctcctgcatattctatcttccattacgcacttgtaaagcacgataggcactccttaccgaatatccaccaaaagtttcaaacgaccaataccatgtatccagttctggcaacgcaggcagcggaattttacaaatgagatccacacctctgggctcaaataaatcatctaaaagctccgtatcccaacacattcgattagggtgaagaagattagagacagagcaattctgaagagcctcatgagaagaaatcacatagggattatccactgaagggagccacggctgatgaagaacagaaatcgaagaaccagaacccacacgccaggtttctctctttttttttttttaattttaagtgttaaatatatatataaatccattaatatattttttaaataaatatataattatatttttaaatatataatataattggatgataattagatcggttcagttcagttatctattggatgagatgtcccatccaacaaccgat

SEQ ID NO: 210463 - DNA, 382 bp, Cannabis indica
ttagttaaaaattaaataatatatttttttttaattttgagtataattttcgtccagctactatgctggacgcgaggttaaattatttaaaaataataattcacgcctacctagaggcattcaatactattaaaaaaacttatcagatttcaaaaacagagtaatttattattatttaataaataatatattttctctttctctctccaatttaaagctaaaaaacctatcaaaaccactcagccgctccactaccttctctctcaataatatattttattccattctttctaacataaaaaataaccagattgttaagccaaagtgctctcaataatattctctctctctttctaggtcgtggggtttggtggggaagacg

SEQ ID NO: 210464 - DNA, 771 bp, Cannabis indica
aagctgcctgacttcgacttcaccattcttggagcggagaagctgaaatagtcgaggaattttgtgctctgttgcctactcaaacccaaagatgtggaagaaacctttttcctgaggatgctgagaacgcagatgcagaggaggtcgttgatggtgctgcaagcaaggtcgcaaactatcccatcactccagtttctcaatttttctaagttttttttttcattgtcgaactttaatttcttttgttagcagtacacgggtactcgcgctttgtacttcaaacaaattatatttattttgttatcgcacactatatccttttgaggatactttacttttgcatacttatttagcagtacatgggtactcgaattatttaagctgctcttttgatagttgcctttgttgtttctattcgcaatattttttaccaatatcattacagcttggtgtaataacttagaatataaaaacttgcaaagaagataaaaaaaatctaaaaatttcgaaaaatttcattataataatcaatagtacaatattaggttataccccttatacttagtacatttattgaaataaattgactaagtataaatacatgcgagtactattgatagtaatactttaagcttttgccattccaagctctcttgatcgttgtaccgttgaggtcagataatcggtaagtcgcattaccgatttttttagcaattaagtacggtccttcctaattatttccaaaaaatccatgtgttgaattgagtgtgt

SEQ ID NO: 210465 - DNA, 892 bp, Cannabis indica
tataattctaacactttacatctcaaaacaagcatgagacggttcctgatgataatcacaacaaaaagctaaccgaatttcaaacaacaaggcagaatcaacgaagtgggtattaatatttcttgataaaatctatgctattagcaagaaaatgtatgaatttcaaaataaagtgggacaagggcaatcctattttagcccatataaaatatatgtgataccttctaaatacaatacttcgataaaccccgtgattattttcaaaattgagtctttcttaataaaaataagagatgaattaacactgcttatggtatcaggtgttaatacggcaaatcggcggttataaacgattaaataaaagtgggaagaaaagaaaagttcggattaacttacaagctgctttctcgatatgaaacaattgaacagaatcaagcaattcgagagagagagaaagaaaacctgctttgagttcgtccggtcattacagggtttctcttgggatgtcaaacttttattattaactcgataataagtaggatacaatccgcgcttgcgtgcatttaaatttgtgcgattatttatcaaactatcaaacaaaccgctcatgtgtggttgtaatttatttaataaaaattaataaatcatataattatattaaatttttaaattttagtaactattctactaattttttctaaataattttgatattgtaaagtgttaattcttttttaattattttaaatataataactaccaatttttttattaacttatttgttatacatatattattagttttcaaaatatacattgaaattaaaaatatatataataactgaaaaaggaggcagctgctcaggccccatttaaaaaaaaaaaaattaaa

SEQ ID NO: 210466 - DNA, 508 bp, Cannabis indica
tcgcacatattgtcgatagagtaactttatatatttagttttcattgaaaagtcttattttatttatttatttatttttataaaaggacaataattacattttttttcttaaatataggctaaccctgagataggggaacttccaactgttgttgacacttttcggaagttctaccataaaggcgacacttggcgcaacgaatacacggaaaaagttcatataagtttacattaatattaatttctaaatatttattttagtttgttttatatccatattaaatatttaatttatttgattaataaggaccaaatggttgaattggctgtaaatcaaccaacgcccactgaggatcaacctgatgagactgctcttgatcccacccagtaccctcgagacttgtctgttataacgcaagtactcaatgaacaatctcaacatgtgagaggttttggccatctccagaaactgaagttatgagtacttttctaaatagattcttggatg

SEQ ID NO: 210467 - DNA, 682 bp, Cannabis indica
ttagtttattctaatattttcaacaacctacaacattactgtatttgtatgtgtataccctttcttgagtgttgcatatatagaatgtgttagtgaatatataatagtgtatatttctataccaacattaaaccataccttcattaggtttcactctatttcacaatgtttatctctcgaaccatttaaattgatctactcgatgcctgattatttaagagttcctctcttgagtaataaattcacaatctaaataatagcgtaattataattacatcaagcaaaacaatacataaatcataataatagcaacaattaaacaaggtagcatcacataaagaatatcaaatgaaactaaactttgcattaaattataaaatcaaaatcataattagagatccatctgaaaactagttgcacatagtgtggtttatcattttaaaatattatttaaaatctgaataataattgagaaaaaaaaaaaaaagaatgaatgaaaactcttgaatgcagcttcaaattgcttcttgcatctttcaaaattgtttttctcctttaaaattgtatttctcagtctctttagtcgtctccagttctccttaggatcgtttttaggctttaaataggtccaaaattgacacatgtcattgaattaggttaaaaaacacgtttaaatcttaaa

SEQ ID NO: 210468 - DNA, 904 bp, Cannabis indica
acccggaaccaaacttggacccgaccagacccgtagttggtgttgaaatagagtttattaaaaatatattatctttacacaatctattaatacatgtcaataccaaacacagtattgtattaaataatactaatacaaaattaaaatgaatataaaattataagttaatattaaaattctttaaaaaaaaaagttgggtcggatcagatccgatccgattaagtccggtcagatctgacctgatccgaatctagcggggcggggcagatccttacatgatttggatcaggtcgaatcttagctagatcatatatgacccgacccatttacactcctatgaataatggatttttgtttttatttttctttttttaaaaagaacaatgcactcttttttattagtataatctcaaattatttttcttttgttataaatttaaaaaagagttattatatttacaccccataaatatacaattaaagacaccctatttattataaatattaaactaatttattttttaaaaatatattcttatacttttttcaatttaatttttacattattaagttattttttgtaattattttacatattttaatttatttttcttttatatttttttaaattatgaatatatttttaattctttttttaacatgcaaaattatttttagagtaataattgtggacagaacgtgcatcatcgagggagtagccaatttattaaatgaagcaatccctaaacgaatatcatcacaaacatgcattttccaagaaaaataaataaacaaatatcatcaaaattatttattaatgtattattgcaaaaggaaaaactagtataaatgtatattatgtggtattagatcgcctttgatttaaatatagtattaaaaatta

SEQ ID NO: 210469 - DNA, 668 bp, Cannabis indica
ataacctcgtaaactgggatcccgagtttaaaatacagttgaaaatacatttactaaatataaagtttcgtaatattttctttttacaaactatagggcagttacaaaatataattcaaaatgttgtagaccgaaaccctccaggttgcactgctgcgatatgtacaatccttgccaaggctcaactcactgctcctcaagctttgctttattacctacaaaagtagcaaactgatgagtcaaccgaatcagtaagatatgcataacatatatatataagcaatgctataccggctttatgcttaaaccgtcctaagcccaattgttaagctcaccaaatgattaagaacgttctcaacagaagtacgaccagtgttccatatgcactagagcaccgactccgtacttgtgttggtaggtccattattatactttcgggagttactaagtgttgtaccacatgcacgacgtaccccctggtactcgtgttggtaacattgtaattatcctaaaaccccacactgtactaacacccttataaatacacatttagcaatgctagtagtgtaaacatataataacatgcattcattcacatatacatactttatgctatcttacttcgtttctaggttcaggtgtactggtcagcctgagtggaactgcag

SEQ ID NO: 210470 - DNA, 504 bp, Cannabis indica
cagtacgggcatagtactggataagagcgatatcatggcaaattatactcttgggtgctattgatgctatcatagcggtacaaacatagtgttggtcccgcagtgcgatcatagtgctggtagtgggtgatatcatggtcaatagcactaaccattaaaaacgttcttaatcagttggttagtcttgtgaataggtgtatgggcgcctagactcaagttaattacatatgatttgttatatgcttatcttattgagtctgtcgactcatcagtttgctaccttgtgtaggtaaggataaagcttggctggaggagcagtgagttaaggcttggcaaggattgtacatatcgcggcagtgcatcttgaaatgaatctatcttaccgtattttgagtcatattattattatcgccccgtggattgtaaaaaaataaatatgtatatataactatattatgatatatgtgtttttcaagagtggttttaaactcgggattctgacta

SEQ ID NO: 210471 - DNA, 570 bp, Cannabis indica
ttaaactattttacatttaaagtctgaattttatagtgtttactttaaaatttaaaatttatagttgataatgttgattgtatttgaatattgaagttaaaatttagaatttacatatgaatatattttttttattctatttttttgaaaaatattatttaatactttaatgtttatccaattcataattattttttaacattaatttaaactataactattttaatttgaaaggcatatactttacatttattttttcaaatcaattatttgaacaccaaaaactaacaacaatgaaaaaaataaaaaataaatatcggtttaaacgggttaacccgaccaaaccgacaaaaaatattaggtgggttacacttttttttatattttcattggacgggttataattagatatttacaacccgatatttatattaggttggcaaaaatacactataacccgactaaactgaccgatgtacattcttaatttgaactaattttttgtcatatttttacttttctcttttctattttttactaatatagttcatctaatattgtgagtgctct

SEQ ID NO: 210472 - DNA, 743 bp, Cannabis indica
tatgtgattaaatatagtcccacaatttataagtacataagatttccattgatatgctaataaacaatgtagtttacttacactggggtagtgttatgtcttttctaaggcattggtaaagtaagcttaaattggatgtattgttatacatcaaactggaccgatattgaacttggataagacgtcacaaacatactgtaatatctttctaagtcaatatcacttagttgattttagatcaatgatcttaatcctgagatggttaagttttagttcaattgtattatttgtgttcttcgatttgttcgttaaagttgaccaattggatcttcccaatacttacatcttgagaacatggtagttcaattgagtaggagcaataatcatagatacataatctatagcttatataaatgcatagaagtaaattgatgatttccttcgagcttggcttaatagagataaatgggcttaattgtgaagaaaagagattttagggtttatttattaattaagagactttgtagggtctaattagtaaataagttaaatgataattttatttgataattaattataattatgaaataaatatttttaacatttataggattaaaattaagaaatatgacattagtgaaagaaaagataaattattgaataaaatggcaaaattgtaactagtggagtccaatatgtatggtcgaccacttaagtatattttagcaattattttatctttt

SEQ ID NO: 210473 - DNA, 1509 bp, Cannabis indica
ccttgaatggtgcaccgacttctgggaccaacagtgttgtttctagcatttttggggtcaagccatgacccttttctttttgttgtgccaatctgtggataggtacatcatgtttgctcctgaacaggtcagcccctccgaggtggtgtggtgtcagactttggcatggggagatcagggatcacccctaacccatttacacccaactgaagttgggccagcccagagctctccccctggccccattcagaatgcctaccgtagggttcaccttccccaagagggtagtccctttcgaccctcttgatatgtagagggagaaagaggtaaacagggccctaaaagggcgtctagagagagagagaggctacaaatttgtcggcgggcggtcgtgatgtcagtagtctgcaaggcggagcttatagaggagggtggggaagattgtagaggtggaggccctagagaattgactggcctataggctggggcgtgaggctgctccttttgctgcagagctcttggaccaggtggccgggagtgcctcgaagctacccacagagacttaggtatcctacaacaatgcgaatgtttttgtgctggctcacttcgcaaagtggtaagccattggggtaagtcttcaagacactagctttttatttttctctgtcctttgttttggcgtttcaaccttcttacttggctttatttcttaacaggcgcccttgctggcaaaaagggccaccgtggaggttggcgcactagtgagggagctggagtgggtcaaggcgtcgaaccgtgacctgggcattgacaacgagaccctctaggctgagctcacggatgccaagtttcaaattgagggcctgttgcaggccaattaacagttggaggaggaaagtgcccgccaagctcgcttcatccaaataatgaaggtcgtccacgacctttacacggagactgtggagcggatgtctggcgtgggtccttcctctcgtcaggggatgcgcaaccatgaacctccaaccgaaccattattaaatctatttattttgtatttctttttactttctttttgttagtatatccctctccttaactactctttttcaaccgcggagacaattaacttttcttggctgcggggagctttttaatagttgaataggatacttttgttgttcctttcttagagacttgctgtgatagactgtttaggggctggttgcatttcgaaacatctcgttccaacggctagtgtttcaaccttttcccttagccttggttgtctcctagttgcttcaggaactattttttatttggcccttcctttcccggggccgcaatttattttggctcgcttcctggaaggttgcttgtttagaactagccaagaaatgacctttctttgtgaaataaggtcttccactgtccccttttgggtctggtctttccacaaagtcaagcttcaggagcattgtctacgattgccttaagcattttccttacttt

SEQ ID NO: 210474 - DNA, 611 bp, Cannabis indica
gtatcctcgcaatcgatgttccccagagtcaaggcagaaaccaatgataaagatgccctttttcaattttcgcgccaagaagtgaacagtcgtaaaaaatgtagtcgtttctagaaaatgactcctcgatggtcgagcccttccatcctcatccgattgacacatgaatgtattaccatcacaaatggaagcccccttgcgcagtcgagtaacattcaaaatatcatgattttattccttagcctccacatgtccatattgaaagagtgatgcaagttgccaccatgcacaacattctcgaagcttgggggtaaatgttatccgcgttttcggtattagacacgtggaatctaggtcagcatcgaagacccatcagtgggatcctcagcaaaggtaaagtgggccaagtccacttggataagtccttccaggaatgtatcccaatttcgcaattgcaaagccttctaccttcaacgagctgtacccaaaagaatgtctagtaccacgagactggaaggacaagacagcgtgttcctgaaagacccttctaattttcttttttattcctacgttcaaaaaaagaacttgcagctgccagatcgtaacagagt

SEQ ID NO: 210475 - DNA, 616 bp, Cannabis indica
aataaataaataaattggattttcttcttaacaatgatcaatgtaaaattttacctcaagcttattttgggtaagaaaaaaactttaaaatattctgttattcttttttaaaataatttatttatgtagtcactagtcacataaataatttatgtatgaaagttttttttcactaaagtacttaatttaagtataacttatcaacattaaacatataaatattaactctgagaataaaaatacataattttagaatttatcagttgattgctatttatgtacgtagtattttcaaaataatgtaactaaagaagaacatttgaaatgatttttatatttctgacagatttttacctaaagaaaaaaaaattcaaaaggtgaaaaaaatcatattatattatatatatatatatatacatttatatatagtgtgttatgcatgatgttaaatgtatggaatattattttaccctaaaaaaaatagattttaaatgttctaaagacagaaagggtacaaatcttaccatgagaacagccttagtgcagtctctagtgaaattgaaaaaatctgcaatactcaagattcaacttctctctgtgcatagcaaaccaaatc

SEQ ID NO: 210476 - DNA, 564 bp, Cannabis indica
ggtactaaaggagaaaaaaataactagaagggtaaagcaataatttgaccaaaactaattacgaaccaacacatggagggctaatcaatggaattgattatatcaatagacactgaagtaaaactcagtaaatataattctataattactaagagttcaattctatatttatagtggagtaatcatagaattaataaacaaatattttatgattgatgagactcaataaataatctagcttattggagctcaaaattataggtacatggtccccgaatcgctgccttgaaacattatcaagggaagagataaagagttgtataatgttgttcgaaaaaatttattttgaattggaaaaatagtaattatttatttttgtaataaataaataatttttcaaattaattaaatatgaaaaagacaaaaattgttaagacaaaatttgccaagacaatatttgaattgagacaaaagttgtcaggacaaaagacaccatccttatcctaaatgagacaaggtaggcgcttgccgcccgatctagctatagtagggtgtccctattag

SEQ ID NO: 210477 - DNA, 1232 bp, Cannabis indica
agaaattaattaattacttttacttaaaaaaatttatttttaaattatatattttgagatacaatttggttacctctaaaatcttatttgcaaatatcttaataatcaatagctattttcaagttattgtgttgtcttattatttaaaatatatttgggtaaccttaaagtttattttcgaaactaatgagtttgtcatataatataataaactactatttttatttaccaattattttatatacctttttgttactttgaaacttatgtatttacttttagattatattaaattaatttgttattttaaatactttacgttacttttatatttttcttttgtaaaaatatttacttaatctatttaataaactaataagttacaataaaattaaaaacaaaaaaaaactcacataacttattggtaaaattggtaaatattgatattgctaattatttattttaaagttatatttttagttaccttttaagtttacagtagaaattaattagttttcatattgtataacaaataagcatagatatgaaatagttttatttagtatactttattgtaatatttaaattaactatgatttagataatataccaattggttacttttcacaaaatgatcaactttagataaaaaaatatctcccgtagataatcttcaatttttagattagttatttaaaagctatatattcatttttaacttaagtgagcaacgatatggttagaaaatagttttcgaaatctggttactttttggttaactaaatgaaaaaataaactacttttcaatgtggtcattttgacatgtaagaaaaatgtgtattttctcatcgtcaccataattaaaagtaactatttagttgtttatgataccgaaagtgaaacttagaagtaactatgaaattatttttctacacaacacaaaaaatgattcattcttttattaatatgtatttttttattgataaataaaatattttcagttgtttactatgtcaataaaaaatattgtaatgtcggagtttttggtggtgactgatgatattttaataaataaattaacataatactaattggttacttatttataaaaaatttaattttataattataaattagtaaaatgtaactaataagtatataattgatatgataagtaactaaatagtgactttaattttgaaaaaaggtgaaaaatatatactttctacatc

SEQ ID NO: 210478 - DNA, 551 bp, Cannabis indica
caagaagatggaaattttactagtgtgtttgttcgtgatctatggtgtcaagacgatccatttatacttgcatcacaagcacaaatggtattttatactaatgatgataagaatggatctgattggagacttgcacacaaagtcagtcatcgaaatatatgggatgttccaaatattaatgtcgatgctcaagcagatgaaaattactatgacatcccaatatttcaagaagataattcttctaattttcacatatggattgaacttccagcgcttgataatatgcaatttcatccttacgatgatgccgaagcagaagatgtcaacgctaatgtagatgaactacttcaagtaagggtgaataatgaggttttagttgatgatggtgattttgaagatgatacacttggagaatatgaagacgaggaaagtcatctagaagatgatgatgatacatctgattatgaataataagtatatttgtctctttttattcttttcaattttatatttttctattctaatatttgattatgtttatatcttttatt

SEQ ID NO: 210479 - DNA, 797 bp, Cannabis indica
ggtagcgtatcgactagccttactaccagtgttattaactggtcataatgtatttcatattttaatattgaggaaatatgtttcagactcaaattatgccttgacttatgaaacccttgaactacagttagacttatcctatgagaaacaaccaattcagatcctcggtaggaaagaaaaagttcttcgaaacaagaccgtagtcttggtcaaagtgctttagaagaatagtaaggtggaggaagccacctgggaatttgagtctgacatgaggactcaatatccagtggtattgaggttagatttcaaggacgaaatccttttaacgggagaataattgtaatgactgcaaaattttgatatggattattaagtgctttggaaattaattaattattattattattattattattattattggtagttatatataaatgtttatattaaatgcaaaaactattatttttgtgattctagctgggtggcgatggaaaatgcaacagagtgttattttagtcaaatgggtaaacataaaacctttagttttaatggattcttgtatgttggacttgagtgttgtgtttaggcgggataatagttttggaccattttacccctaagacgctcattgatttaggttttgatgcaagggtaattcggtaattttactttaagattaggtgtcctttcttttgtggatagctgccccatttatgaacatgatagcaatatttatgtttttatttttctaacctagaaatttagagtagcacaaaaaataagaaaaaaaacct

SEQ ID NO: 210480 - DNA, 658 bp, Cannabis indica
ctttataaccggtttctctaataataggttcataagttttgtgtagatagaaacatatgtgacaaaagccatgttgatgagctcattaatggactcattctgtgttgatccacctattgatatcatatgggcactgaagatgtgaagttttcttttttcctttttcttttgcagaaactacaaaaacaattattgtctcttttcatgtacaaaaacttgtgttgtgttcatttttttgttttatatatttactcacagcatatgcaaaaaggaaaagtacttaataatccatttcttttagctgttgagatgaaattacatctagctcttagctcgaaaaaaaagattcctaatctccaaaatttctcaaataaaatgaaataaattaaataaaaatgctaaaattacattgtaaatacacacaaatagaaatcaattaatacaaaattcttgataaaaaaaccttgaaaaagaattaccttgattagggcttttcaatttcttccccaacaacatcatcatgagcatcattaaaaactaagtagtacacggagcactgcaaagaaaaagaaaaatgcatcaattaatcataaacctaacctgattcctaatttttcattgaaaatgcataaagaaccatttttggcaaaaaaaaaaa

SEQ ID NO: 210481 - DNA, 935 bp, Cannabis indica
tttgtattgcttgatttttctttgtttgtaagccctcacggattaattcttagggttactttctcaaaaaatactacataccaataaaaatattgtttattcttatatacccatgatcttttttatgtctaaacaatataaaactttggttactcacccaacactatctaatccatcgatcacgactccttatatgagggtacataatactattttatttttagcaaaatgattaaattaaatgtagattttgatatgtattcgttaagaaaatagaacttgatatgtattcgttatgaaaattggtactagtacaaactaaaactaagtaaatgggagaatatgtcgtgtaaaaaaatgtgaacaaaaaaaaaagagagataatgtcctcaaaatgaagtgggggtgtgacgatagagttttctttcttaaatagttaggattggttaattttcggcccatgtacttgagttttcctacatttcaggcccaacactgtctttggtgttattcattatagtgagaggacgcaagagatttggtgcatgtatatacatgttttgtgttagtctctttccttctctatttctttcttattattttaattgatttgatacatttggattcttcaacatgttgtctatacctaaatttatcaatttatatgcaataacaaaaaggaatttcaaattatttcaccaaatatattttgcacgagttacttatgtagtactctttttttttttttttttgtaattcggtgtattactattgctttgttcctcattttttcattgtttctttaatggtaatatttcttccaattttctttgtataaatgtagttaacacaaaaagggcattattttgattatgaatctatgaaccaataaggaccaaaggcaagcagagacatatattatgaagctaatgttt

SEQ ID NO: 210482 - DNA, 538 bp, Cannabis indica
agaaatgctaaagggcaccagtgcctagcacccagctcctacgtgtcaatatcgttattggtccaactaagtatcgggtcccatataattcaatataatagcttttagggagtatcgctaactaatcgcaacgcgacatgtcaagaaggtgttaggcaccactagtgcctaataacaataattttttacttattatagctttacagtcttcgtatcttcacttagtaggcctcatcttaactcttaagtacttcagtagaaatgttccctccctaaattgaataatgtcctgtattttcaattttgatcttctcatcattattcactctagcattgtatacattaaatttggtcttgttagtaataagactagaacactcattgaatttcttgaaagcattaaaaatacaatttgcagactctactgatcccttacataaaactacaagattatttgcaaagcatatgggatttaaattctttactcttagccttaaaaatcagcaaccttgtgagatactctatcaccaatacaaat

SEQ ID NO: 210483 - DNA, 742 bp, Cannabis indica
acgccaatcgtcgagttagaaaaccaccaactcagacgccgcttggaggaggcaaactggcagattgctgagttggaacgtgaggcagccgctgccagggcggcataggagaataataccaaaaatcaacctaaccctggagtgagaagaccacgaggcagacctcgtggctcacaaaataggaggcaggagacagctcaaaggaaccctcagaacgctcaggaagaacagcctggggaaactgagggtccccctgaaaacgaacaacctggggaaaccaaggttccacctgaaaatgaacagccaaatgattagccagaaccatctcatagaaatgagaatatgaggctaccagaaaccaaggaacaggatattccttgtggaaatgagtgaaatcttgggacacaacctggaacacgtaggtcaccagcgaggaaccgccaaaggacaaacaacaactcatggcaaatgaccaatttgccctcacatacaccaaaaagcatgcataccacctaggggtattttggtcatttctacaacctcatatatttttgacattcccattgtatatctaagttgcctcgttactactaaaatactaaaatatgattctattggccaaactccgtagttccaatgttgtcgggtcactaaaatatgaaaaacataaaacttcatatataacatatataacacacctagaattcaaataaatttctataaattcataagtcataattag

SEQ ID NO: 210484 - DNA, 559 bp, Cannabis indica
atctaaaaaaaaaatagtgcacactgatttgaccatttggataatgtacgttatttgcatatattttcaaaattgctaattatatttattataaatgaataaatagtccataattataagttaagaaacacgagtacttgaagtaagtttcaagactttcctcaaaattttaattttcgttattttattaaattgtctgatgagattaccaagatcaagatctagagagctagagagggagaaattgatcaagagattcccatgtttatttatggacccaaaaataggtaaatcttgttgttattgtacttgtttcttgaatatatggcatttttatctttaatggtagctttattattattattattattattattattattattattattatttaatgtgttatttgtttgctgataaaagtttaaagtaactcaatcatttattcctccatttcaccgtccaccaatagatcgatagtgtaagaagcttgttccccctgaatgataacctcccttctaagccaagccaaacataacacaagcattcccatatcaaa

SEQ ID NO: 210485 - DNA, 511 bp, Cannabis indica
aaataattctaaataattataataatgtatattcataaaaaaaagactagaattaagcttttctgaatgtggaaacaaataatttttttactgaaatactcattttggagggtgtaccacatatttttctacaaaatcccctacatcaatattttgtaacaccattaatccttaccgtaaactcaatataaactattaatccaatgcacatgtgtgaaattattataggtacacttaaacataaaatttactaatagattaaaatgttatttctaaaaataataaaaaaatacaataataaaacatgaaataaattaattaaaaataattttttatgaaaccatatttgttaaagaaataattgagtgtaataaattcacattctaagaaatgaatttggtaaaaaaaaagaatagtaaagattacttttatttttttaatattcattgaagtaaataaatttatgaaaaaataataaagtaaataaattgggatatttccagcgaaactc

SEQ ID NO: 210486 - DNA, 1444 bp, Cannabis indica
cggcccgtaggcccaatattttcatgccttgttcggattcgtgtcgtgctttgcttgtgtcggcccatatttcttaaacagccctacctattttcatattcggacttgaattcctgctttactttttcatattttttcttcacaattactaaagtaaatatatgtattattttataactttagttatatttatataacttttcaacaatgtaaatagtgataatcaataaaaaaattgtcaatgtaattagaatttaaatatttacttataaatacttatatttttatatcacaccctataaataaattaaatcttaattttttatattttaataattttaattatagaattataatatttagtattatatttaagttttattattattttaacttatttataatcgataaatacatatcttataattattattaataaattataagatttttcgtatgtcatgtcgtgctttcgggcttttcgcgtgtcatgcttttcaagttagtctattcgtacttacgtgtcgtgtctttcgtgcttctcatgtgtatcatgtttaaggatatgtttttcgtgtcgtgtcgtatccaagcctatatttcattgtgcctagtcgtgctcgtgtctttcgggctcgtgccgtatcaaaaagtccaacccgtatttacaacactatttaggatatttacactaattatggattatatatgttttttatgcactaggttaaatctttttatcatgtttgtaacttaagtattaagtagaaattagaagatttaaagactttacttttttatggttttttttttaatacatttaggttatgagtttttacaaatatttatatttttatggtttaaaataaggatttttacaaaatattgaattttgagcaaaaatttataattttttttgcaaaaataatgtctttctataaaataatcataaaacaacagtggaacaattaaaacaacagtggaacaattaaaaaaataactgtggaacaacagtaaaaacttaacacaatatacaatataaaacttacacagtatttatgaaaaaaaaattgccccacactaaaaaagttataaatttgtgtaaaaactcctttaaaatatgccacatttttggaatatattttatattttatattgccatatttatttttttttggttccaattatgtctatacctttttccttttttgtctatacattcgacaattttgaaatcgtcagctgtatttcctctgtcgtcgtcttctttcatgggaacgcgatcagaaccaagcccttgctaaagacatctgatcgtcaaaattgacatgtaaatgtaagagaatttagaaaccagaagataccagagagaaaagaacaaaaatggtggaacaagtgacaaaagttttcttaaaaattcttgagatatcgacctcgaggattc

SEQ ID NO: 210487 - DNA, 606 bp, Cannabis indica
gtgcaagctaactttattgtttactattttttttcaacactatttaataaatacataaaaccggccagccttttattattttattatttttttattaaaaatatattaaaactgtaaaaaaataaaaaataaaaaatttagggttatgatatagtgacgcgccaggtgtgtcgggatacattaatccagtcacccctagtgcgtcactatatggcagtattttttaaattaataaaaattagaaaattttaggttttatcttttactgcacacattacgggtgactaacactcactataagaaatgtcatttttgccagcatatttttgtgctggcaaaaattggtattgcgctggtaaaatagaatttacttgtgatgtgttggcaaaacggggttggcaaatcaatgttggtattagaacttttgccagcataaaatgaaaagcgctgggaaaaatgatttttcccaatacgtaaatgcgcaggtaaaagttagatttgagccactgcaaatgtacgctggtaagactttgacctctttaccagcgcagcttgtgaaatgcgctgcgaaaagttacttttgccagcgcagtagcgaactatgct

SEQ ID NO: 210488 - DNA, 590 bp, Cannabis indica
ccttaatatttgatagagggacagtatgttaggaaactttcggtattaagtagtggtgtttacttattggtttaatctagatttttaattttttcaaactaaattagtattaagatttttcaaaaattcaaaaccaaactagataaattaaatgtcaaaccaaaccaatccactcaatgtggcgaattgggcttttactcacaagttgtacggttctattccgattgaatcggttccagtggacctttcatgtaatgaccgagaggtctaatttacttatttaatggtacgaatacgcttattttcaaaaaaaaaaaccaatccactcaagtttaaaatcatgatttgtatttcgtagttgttcgaacaaccacgaaataaattaatgttacattaagaataataacaaaatattttttaaaataatattaaatcaatattaatgttttacttaaagttcaaaatatcaatatttcatctgaaatatgtattattattattataattattattaataagtaattattaataagtaatcttaattaaaatatataacatttaggaactaaatgatttttgttttatttctt

SEQ ID NO: 210489 - DNA, 639 bp, Cannabis indica
ggcatgtccacgtatgccaaagatagagcacatgtggagtgcagccccgctaatagcagaacagagcctccatgcaagatatagcaacaccgccaagcagcgattgaagggagtaaagcgagcccacaaggagtcgtaccaacatccttggccagccaagaggagcctatcggccggccagggtaagcctataggctggccaggatctatgcacaagctagtcggccaagaagtgacttctagacccaaggagactctatttgaccaagggaacctaacctcttcaaagaaacaatgtacaaagctatcctcaacttgaaaaaggctgaccaccgcactcaaaggttggcctcctcttggtggagctatagtgacctgtcagttcctagaggccttgtcttgccagactgcaggccttgtcctgcaaggtcctggcaggactatggccgaccaagattgacctggcaggaccatggccggccagacttccctataggcctatggatggccaagattgacctagcaagactccatgtataactctccatgtggacacaagatatgggctccaaattgggccctaaaagcctaaagactggctgaagaatatctacaattaaaggcattttggtcttttgt

SEQ ID NO: 210490 - DNA, 574 bp, Cannabis indica
tatctaattgtaacccgttcaataaaaaataaaaaaatgcaatccgcccaatgatatttgttggtttagtcgggttagcccgtttaattaactaattttttattttttatttttttttattattgttaattttttgtgttcaaataattgatttgaaaaataaataaatatatagtatacgcttttcaagattaaaaagggttatagtttaaattaatgttaaaaaataaatataaattgaataaatattaaagtattaaataatatttttcaaaaaatagactaaaaaaatatactcatatgtaaattttaaatttcaacttcaatattcaaatacaatcaaattatctattaaattttaaatttcaaatcaaacactataaattacaaactttaaatgtaaaatagaactattaaacataatttatttattatagatataattttagtataaaatatgtaaatcagtttattcaatttatttgtataataatattcaacccgcctaatatattcatttggtagtttgaattttttgtaaagtcatttgagttgtattttttatcagtttatt

SEQ ID NO: 210491 - DNA, 1298 bp, Cannabis indica
agaaaaatcatctgagattgagatattgttgtttgctttataatttgggactatattgaattcaacaatgaatatactcgttcatgtttaatcctttttcgccgtccaaggtctcggccaattaataatcaccacgtgtccgaccattgactaagaagatgaagtcaaaaaccacatgcctaccacgagagacaattaaaattttgtgtcaacttttgctttttccttcaaagaacgataataagatgcaaactaaaaaaacacatatatattgtatgtattttttgtgagaataaaacaccaccaacgatgtgaatgaaaataaataaaattcaaaagagaaaaccaaagaatttcaatagcatttattgcatggtttcattcattttcttccgtattattatttattttttaatttttagttaacattattgagatttaaaaaagaaatataactacaatatgtattttttggtgttcagtttaaaactgtcactcatacttttagtgtcggttcatagaatcaacacctattctacagcacaaaaagtcaaaatttaagtgtcagagttataaactaagacaaatgagcttttgtgtcattttaaaactgacacttaaaatgtacatatatattttttcctttagtatcggtttaaacagatactaaaactgagactaataagtataagtgtttgttttaaacagacactagaagagttattttcaaaaaaaaaatataattattaaaaaaaataaatttagtaaattctgaaattataaaatttaaaatgctataaacttattttttttatatatatatatatatatataatttatatattatttatatttaaattataattataaacttttttgtttgatattagattgttgagtttctttattatgtcttcataaatttattttaataaaatttcaataataattacaataaatagtattttgctcatgatttaatctaaatcatattaaaataaaaaaaaatgatagcatatcattcaatcttacaatataatattttaagcaaaaaatattcatcaaatttgataaaaaaaatcaataacaggtcaaagattaaaaaaaatatacaaaatatacaagtctcggttataaactgacacttatgctcaatctgtatgtatatatttttttaatttaagtgtcaatgtcagtctactaacccacactaaaagtttcaagccatgttctgtcgtgtaataacctagaacagtagttgtaaacattcaagttcatctcttttatcacagcaagcg

SEQ ID NO: 210492 - DNA, 855 bp, Cannabis indica
tttagtattgtccaaattcatcgacaataattaaaatgaaaaatttatttaaatcggccatgaacttatatatatatatatatgcatatacgtatataagctcaaatgaactaagacagagataaaaatttgccttgataccaactattagagattttatatgaaaacatgaagcatatatgattgtgtatgaaaagcggaattaatcgaacatatacacgatatagttaaaggatcgaaatatctccagccattgattctttgagctttaatcccccaccgatttgcaaagaaaggaaactaattagtgtgtgtaatcagacttccaaactctctctactctctttaaatagatatattgtgtgtcacagaatgagtagtgagctcagggactgagaccctatatttatataggtaagacattttattaaagtctctgccacattaattatcaaaatattttaaaaattgattttaacaattaaattgggtaactgaaatatttagtaatcaaatatgaccattattagaatattttgattaattattaaataattagttatattctataaatcaaatcaaataaaatatttaatttgttattatataaaaagtattgtaaatgttttattatatatataaaatttgataacaattttttcatttttaaatatatatgttcttaggtaatttaacttttttacgtaatttatatagtttttctattaaaaaaaattcagacaataattttatatttatattaataattatgttgcttttatttatttttattgatactgttacatttacattatgttatttttacattattttcgataacaatgtaaataaaaa

SEQ ID NO: 210493 - DNA, 362 bp, Cannabis indica
aaaaaacctgaaaaaaaaaaaaaaacttaattacctgataactttatgttatttaatttttgactaaaatataatatttagatataaattgttattaatttagtattaattacaacaagtattgtaattaaaaagtaaaaatatattaatttatttgtgactacttttagtcgtgatttataatttgtaacaacttttttataatcataaattttataagtattagggtttagttagagtctttaattaattgatttatttcaaaatggttggcttgagttcaatggctttgtttgggcccctccattgtttgtggccatgatattatctacctccctctatatggaaaaatattttgtttt

SEQ ID NO: 210494 - DNA, 666 bp, Cannabis indica
tgaaaaattgatcaggtttttctagtttagattttagggttttcttttatcagatgtgtatgcaaagttcaaaattgagggagagagattatgcagaagtgagttagggaagaagagaatcaaacacagcaatttatagaggttcccccttagttgatggggtagtcctcttgagctcgcctcagaaatgagctaagcccttgcactattaacttcagattcaatacaagctttcatggtgcttccagctacaagatcaactggtaagttttcgatctcctaatgctatttaatttctttctggtttctactctattctctctcaagaacaatctctttcttctcacagtttctcactctctctctctttttctcaactctgagttcttatcattgaactcagagcaattacaggttctctctttctctctagtattcagatctatctatggaaatcgaaagcagggagtgcttatttatactgttgcaataggagtagagtaagtggtctcggattggtgatgtggcaggtatatgtcttcgatttctgttattttagttaggatctttatttgtaactgtattgaagttgttatacttgtgcaagttgcttttccatgtaaccgacatatggttagaaggacttagatggatttaattccaaca

SEQ ID NO: 210495 - DNA, 1132 bp, Cannabis indica
  modified_base (1082)..(1082): a, c, t, g, unknown or other
tattgaaagggttgtatgaggatcttagacttaatgtgttgaaggtctctgctcttggaaactttaggcaaccattaatggctttgcagtatttggttagttttcctgttggagctaagtctttggttaatcatccatggtggattccaaaaggtgtttatttgactgggcgtgctattgaagtgacaagcattttgggtcctttctttcatattagtgctttgcctgatcatactatttacaagagtcagcctgatgttgggtgagtctgatatttactgtttatatttgctttgtgtttgtgtttacattgctttaattttcatgttgctcttgaaaagtaaagttttgatttttggaacacatgaattgaaatatgaacaatgtcctaaaaatagaaacagaatataaactttgttgttgcattgaaactgttaactatagcactggttaaagaaaccaaatgtagatttggtggtgtttggttggaggtaatggaaaggaatcaattttcattctattcctttgtttggttgcattttattgtattggaatgtaattctaatggaatgacttttccacaattttagtggaatgactattacattttgttatgcattttaaatttgattctaatccattctcatttctattcctaagtttttattccttccaaccaaagccaccttggtgtcttcttatacttttatccttttagaaagaagtattttgtatttacctttgtggttcaagttgtgagtacaaggtataactaatgcatatgttaagcttcatttatgctataatttaactctattgagtttttcttttgggtcaaggcaccatttttttatgcatgaaactgtggtactggcttttttttttaatcaacggatataaaaatagtgtttaagaacttttctcttctttttttttcaaatccagtcagctatgctttgcagaagcttcaactcggcgtccagctgatctgttatcttcttttagtacaattaaggcacacatgaataccttatatgatggcctaacagatgtcttatgttactccttaagaatcaagcacncgcggcatgtcttgattttttgctgaaggttatcaataaaaaattcttcg

SEQ ID NO: 210496 - DNA, 544 bp, Cannabis indica
agctcttaagctcaaaccttaaacaaacctcacaaatagccataaaaacccttcaattcaatataaacatacataatctaactccagaaaacaaactcaaacaccaacagcaaccacagaattcaaatacccaatttcatgcaaaagaccaactataaacataagaaaattaaagataaaagtgctagagctattaccttcaaaggattcaccaagaatcaactataatccatgaaaaataaactgaagaacacccctagctgctggttctccaagggtttcgaaagagaaagagaagagataaatgggcttctttgatttttgtttttttttctttctaatttttgactaaattaagataaatgtttatccaattaatctaagggataaaaatcaaattaacatattatactaaagtccactaaaggacaagaaattaattaggcaaaatgaccattttgcccttcacttagccaaaagtcataaaaccacctagggatattttggtcaactctaaaatatcaactaatcccgacattcccaa

SEQ ID NO: 210497 - DNA, 587 bp, Cannabis indica
agctagtgatatgagttgcgtgttaaattttttagtttgtacatatatttatatattttattttgttcattattatttattttttattttgaagactgtcattctaatataactgtatttttggtttggtgttgcattgtttttcagtttcgctagctctagagacaattattaataatgggaaggtgttttcttaatgtgatgtggtgctgttctgaagacatagcttgattgtctaaatttttgggggcagtttagccccatgtggctcgggataagaattctgcagcacatggtttggcaaagcatgcccttcggttagacaatgagctatcctggttcgaggaggtgtctctgccgattgtggattgctgctttcaccgcgtctaaaaaaaaaaatatagttgttatgttattaaaagaaaaaattaatgcaataacaatgctacttaattttgtttttctagtttgttattattatgattgtacgttattattattaaacagtatgaattaattaatagtatttagataaaaaatatttattaataataataataatagataataaaattaaaaataactat

SEQ ID NO: 210498 - DNA, 1053 bp, Cannabis indica
gaaagaaaaagttaacctctaaaaacaaaaaaaaaaaaaaaaagaagaaagaaaaagcaataattttttgctgtatacaggtggacgaaagggctgtgttgaagcactttgagtggccggagcaaaaggcggatgcactaagagaggctgcctttgggtattgcgatcttaagaagcttgtatccgatgcgtcgtcgtttcgtgacaattctcgccagccatgtagttcggcccttaagaagatgcaggctctattcgaaaagtactgaactagtatattatgttataaatattaaccgttgttttgttttatatttattaatgatgataatgttttttcaaaacagattagagcatggtgtttacaatctatcaagaatgagagaatctgggacaaagaaatacaaaagttttcgaatccccacggattggatgcttgactctggatatgttacccaggtaaattattgttgcattttttttttctaaagattgcatttgttaataataagtttttttcgagaaattttcaccgttgataataattagttaaacttgcatttgctaatagttggaaagggtaaattatggttgcatttgttaataatcttgttttgccttagcaatcccacatcggttcttaaggtagttatataatttatattttatcctcaggtcacttatcaaccctatgataaattttgtgatgtggtttacatctctaggattaaaattagaaataatttttaaggaaaaaaaaaaaaaataggaaaattaacttatatactatttttttaacttttttttgttcaaattggaattttaaagttgttgcagcgctagttgcaatagagaattctaagcgattttttgttgcaatttaagttgcagcgctaggattaaaattaaaaattttaagcaaaaaaaaaataggagaattatcttatatactattttttttaatttttttttctaaactggatttctaaaatagttgtagcgtctagttgcaataggggattctaaacaatcttttgttgcaatttaagttga

SEQ ID NO: 210499 - DNA, 321 bp, Cannabis indica
ttttgttttatttgtggcatcataggccattctgaaaggttctgtgttaaacgttttgatcatgatatcgatcaaatcgttaaaccatatggcattggcatgaaggcgtagatgaggagaaggaaccatcagattggatcccaatggctgcggtctggaattgagcaacagtcggtggtggagatggacagtgggcgacaatttgggacagatgggcaagctgattctgtggctaaggttatggaggttgattccgacacttcatagtagtagtatcaattctgctgaagccgagaaggaagaacgtgggcaagtcaaagt

SEQ ID NO: 210500 - DNA, 557 bp, Cannabis indica
ctggtgagtcaagagattctatgaggataaccatgttatcaaatgtaaagtttgaggtggagaaatttgatgacaccaataactttggcatgtggcaatgtgaagtatcagattattgtttcgagaaggatctaatattgctttggagtccaggccaaaagattattctaaggaagattggaattatgtcaatcgtcaagcttgtggcacaatctgactgtgtttgggaaaagatcatgagtactctatcatgaaagagatgttgggttttgtgccctaactaaaactctatatcaatgttatcttgaatttcatttatcaataaaagaacagaaattattttattaattgtttaatataatacttggttcacatgtttgtttcatagtcatttgtatgatatatagattcttttaaattcttatcacattgttattcttattcatgattattgtgttgtttacatagtgaaaatttattaagattatgtgattaaactattagtcccatgatttaccagtacacatgatttgcattggtaaaatcagcttgtcttg

SEQ ID NO: 210501 - DNA, 562 bp, Cannabis indica
ctagagtagacaacgggtcatctattgatcaaaatccctgtttatggctactcctgtccagcttcccttaacacaatcaccaagaaggcaagaactttttctttttcttttttcttgaaagttacttcttttagtgtggaatatatgaaattgtactttcaacaggactggatattccatacctacaccaacccatatatagtcctttctcaataaatgtttagtcttcctctttctcactggagtccttaattatacatttcccattggataataaatcctttgttacatatcaacaatgagtggaaaatgtaaaacagatacggactatgcattgaccatgcatcaatctcccttcattttaaaatttgtaaattaatcacttttcacgtaccctcttttgtcttcaattgtattctacaaaaaaacatcaccaaatcatgcccactcctcatttcttacttaattgtttttattttttggaataattacttgattgttaaataatcaacattatggatgggaagatccagtagaacagtacgtagtagtatagtacaat

SEQ ID NO: 210502 - DNA, 1031 bp, Cannabis indica
aaactaaaatttaaccgaaaatttagtttaaatttgcataaaactaatgtactgacttcaattttcagatccatgaaaggcagatctaggggtgttcataaaaaccgataaatcgaaactgaccagatcgtaaactgaattttcggttccacgtcatcaccgaatttggcggtcggtttcagtttttgaaataaaaaaatggttataccaaaaaactgccaaaaatgccaaaaaccgcaataaaccgtccaaaactgccaaattgaaaaaactactaaaaactgccaaaaccgtacggtcggttttatacggttataatttttaacggtcagttacaattttcgtaaaataaaaaccgtaactgacaggtcggttataaaattgtaaaaaccgaccataaccgactgattttcacccctaggcagatctcaaaaagttgaactagagttcccaaacaaaccaactaagtattatccaaaaaaaaaataacataaatactatagtaaaatatttatcctggtgtattttcgttattttttaaatgtctaatagtaaatttgttcatattaaattataaagagacatgtagatagagttacgtacgtggaaacaatgttttgatttttaatgtttcataatagttgcattacggttgcataaacattttgctaacaattatttcgtcttattaaaaccttcgtttgatacaaccttcaaccaaccacccagtaaccacactgcaactatcgtctaattgataaccttcctctgatgcaaccaccctacaactatcgtataattgtgtaagtgatagtctaagagatattttgataattaaaattacataaaaggtataaatataccttatgaaagtatttttatatataaaatatcaattttatttttaatgtaataattttagtttaaattccattcataattaattaaaaatctaatttgttttaatataaatttacaaaatgattaacacagctcaaagcacgaacctaataaaaaagcgtataaaaata

SEQ ID NO: 210503 - DNA, 852 bp, Cannabis indica
ggggtggtgttaagacatgagccctcacctcagctaatgtggtacgcaatacagaggcgcaaacctgccccaatcatacagctcaaaatttaatcattttagaatatttcctataccgttacatggaattatgtaccaaaaatttgtattgattttattaacgatttctgttttgattgtacaattaattctcgctatctgtcagcatcaagaggctctccatctatgtaatatcactagaaatggaatgaaatctctcagtttgagctgagttttatatttttttactctcaaatatttttctctgttagttgcagtgaacagttggtaaccaacagaaaactaagtaactaactattcactaacaataaaatttatatatattttcagaaattatcattagttattattttgagtgatgtagctatatatttattaacaaataattcaaaaaatgaaataaaaattaatatttatgataaaatatatatattttcatgatgtaagtgtatagcattttccttttcaaaaatagtacaagtttttatgtaattcggtgctaacatatacattatatatgagcattgttaattataagataataaagaggtgcccaacatgcattacaatatttatgtgatattttattagtgatttattaattttttatattatttattaaattaaaatttgtagaaatttaaatatttagattatactagaaaccatttcaaaataaaaaaaacgaaaaaagattatactagaaacaatatggcatattatgagtgctttttgtgaaaaaaaaactgggtttagttttgtaaagttttagtttttgtaattttttaaacc

SEQ ID NO: 210504 - DNA, 614 bp, Cannabis indica
ttcaggtcagtctatctctgattaaaatccattgcatcagattgaatatatgaaatgactaatttattgataggaatttcaacataaaaatggctattcagccttctctattgacactcaaactcagaaatacaagctcgaggatcccttgagcctcccaatgaattctaacgaattcccactattacaaaataattccacaccccctactgacaccattattttatcccacatttggtggaaagatgtaacattcctgcttcaagtctccgtccttacaccaaggaatgatgactcttatacacgagtacgtcactttggttgcttcatggaatgacgactgaccctacaaaccaacacaaattccagcgtgctttgtcctcactcgcatacttcctgagaaaatttctcaggaagtcccccatccttaaattaccctaggtcaaacacacttgccatgtaggattgcacaagttacccaatattttttttacggatcacggaactactgactgtcacaaaagaataatacatcattagagttcaaaaccgagaaggatcattgaaattcaattgcagacagttttttactcttatgttctgtcattgtgcat

SEQ ID NO: 210505 - DNA, 532 bp, Cannabis indica
gtacgtagcttttcacttttgatgtgttttaacactttacataatcacaaaacactcaatagtacaacacactaatttgggataatctgtaattgtaataggtgttgatgtgttctcaattaaatccctttagtttattaatgcatgacaatttattattttcagtctaatggtttttcattttaaatggatttggttagtattatgttatatgaaaataatgtaagagcttattactaatttgtaaatagtgtgacagcttataaatatgtaattgtgtagttattattggatatggaataaaaaatgataagaaattagaattttggttaagttgagatattggtgtaccgtctcaaagagtgcattttgaacatttgtcctatacttcaaggtgctttaatataagacaaatttttgaaatacactttttgagacaatgttaatctttcaattcaattaaaattttaatttcccattccatattcaataataactacataattatataattatagactttcacactatt

SEQ ID NO: 210506 - DNA, 568 bp, Cannabis indica
tggcgtaagtgctgaacttttatgtacttattaataaacatatctttgcttgtagttcatcagaatatgcctattctctctgttcggatgagaacatgcttgttatgctgcaaatatttgcggatttttcatatttcacttgtactttttacaaattttacacaatgttgtgattattgtcactggctatactatctgattacaattctatcttgttgcagtgctgcacctggtggtaaaacaacttacattgccgctctaatgaaaaatagtggtattttatttgaactttttttccattttcatttatttactctgtatttataacgttgttttgacctaattgcattgtataaaactaaactagaataggttggttacacagccaaaaagtgatcataaatatgctattaagttctgaactttttttgcttctgtttctctacttagtatcctatattttgttttctttgcttgaagtgctcttatttttatttttattatttctaagttgcggaagattccaattatcgtggttcctctttatctcaagtactctgttataaat

SEQ ID NO: 210507 - DNA, 552 bp, Cannabis indica
aaattcaaatttccctttggagaatctcctcttaatccaaaccaacaaaatattaaaacaattagaatatatgtcttgattttcaaatccaatgatcaaatttgctatcattaaatacttaatgtgttatcctatcacttaattagatcatttttaatggtaaaatttaaatttgatgttaaagtgatactaaaaaattattattttaacattgattttttttcaatttcaatcacaatactaaaaattacaccaaattttatattatttattattctattattttattgatataatacaaatattttaatactaaatatatataataaattagtttttttctttaaaagtattatttaattattaaatttattttaaaaaaaaaattaatgtagtctacagtgtcctatttaatttagtgagacactgtaaattaaaatcatttatgagtataattttaatattgtattggaataaatatagttttaaaggccaattggagatgcccttaaaaagaaaaagaaaaaagagaggaagttaattgaaatttat

SEQ ID NO: 210508 - DNA, 555 bp, Cannabis indica
tacacctgataataccaattgtaatactttgccaattaataaagattctacaattgttgattactctgtatcttcccctgaagtctttctcacttcagttagtaaagacattaattcatggcactgtaaaactggtcatccagccccacaaatattgagcaaaatattaccacatgtctctcatactggtactcttaaagacctccaattttgcactgcttgtcaattaggcaagagtcatactttgccatttcccaaatctgaaacccgagccaatcaaccacttgccttgatccatactgatttatggggcccctctcatgttgattcaaaacaaggatacaagtactatgttaattttttggatgattatagcagatacacatggatttttccacttactctcaaatctcaagcatttgaagtcttcatcaaatggaaaggtttagtggaaaaacaattcaatcttcctatcaaatcggttcaagcggattggggaggagaatataggactttcaaaaggttcttggaggatcaaggcattcactttcaaca

SEQ ID NO: 210509 - DNA, 726 bp, Cannabis indica
tttgactagttttcttacattttctgttccattttatattttggtttgggttttgttgaattaagtcgtgttttaatttagttcttcatgtgtttctaataatatttagttatttgattaagtttactaggtgatttatttttgtctttttcttttcctattttttttgcactttggttactgttttacttggtataaatttcttaatttttactcttttgttttgagttggttatgttttgtataaagtttttcttcattaagtttttgtgttttgttttaagttcttagtttgttgcttctagccaaagaataacatatttagctatagatttcattaggttttagttgagtttttgtagttagtttaatttaattcaattaggtgtttttaagccgaaattttggctctttttgtaggactcaattagtcttattcgtccagaatctcaattagagtggtctattcagattcattttatccggtaacaactatcaacaaagaaatattattttttaacaagctgagagtgctgtttgaggatgttataggtttagtgtctaaattttcgagggcagttttgtctcatgtagcttgcgataagaattttgcagcttatggtttgacaaagcatgcatttcggttagaagatgagctatcctggttcaaaaatattccaccgccaattgtaaataactgtattattaatcatgagtaattctaat

SEQ ID NO: 210510 - DNA, 593 bp, Cannabis indica
gggagtggattttgtcaatggtttcgtagtcactcactctggtcattgtaattattggatcaaaagttgatttacaatttaaaataaaagtacaacaaatacttcaactaaagtaaatcaaacaaagctttcagtacatcatggaatggttttattgttataataaggagataaattccatatagattttacatctcataacagcctacgaaaaaatcattacacaaataatgatttactttgcgttaaaaaatcctacattagggaaagataatatcatatataagatacatgaattaagtactttttttattgccaactaattttgaaatataacctcatacatcttacacatatcctattctaacactttgatcactattatagaaagcaccaaatatatctctacaaatattatttaagctcataggctgatgttagattattattaattaaatgcagaaagaaaaagtgcagtttgagcagataaattttttaagataaattctgaaaagagatgggatgaaatggaaaaattatatgatgaagaagaatatctatctgtcatattaatgtaggtggaataagctata

SEQ ID NO: 210511 - DNA, 962 bp, Cannabis indica
aaagatgaagctttcaaaacttttaaggattggaaaactctagttgaaaaccaatctggaaagaaagttaagaaactaaggatagacaatgctttggaattttgttccacatagtttttaaactattgcagagaagttgggattgagagacacaaatcaaaaccaaggactccccagcaaaatggcttagttgagagaatgaacaaaactcttattgaaagagttagatgcatgttggagggtgctggtttggaaagaaggttttggggagaagctgttaaaataacctgctacttgctgaatagaagtccatctgctgcaattagatttaaaactccacaagaaatgtagataggtcaggttccaagtctagaaaatttgagggtgtttgaatgcattggatatgtgcatgtcaaataggacaagttgcagcctagagcaatcaagtgcacgtttctagggtatcctgatggagttaaaggatacaagctatggtgcctagacaaaggtttcaagaaatgcatagtgagcagggatgtagtttttaatgagaaagtaatgaccatgaaaccagaaaacaaagatgagattagtactgaggctagacaggtacaagttgaagtaagggcagaagtaaaggcaagtgacaatgttgaacaggaacttgtagaagaaatagatcagactcaagatagctctcttgatacctatcaacttgctagagataggatcaaaagagaatcaagggcaccagctaggtttggttttgtagattacacaacctatgccttgaccattgtcagtgagattgaaaattctgaacctgccacttatgaagaagcgatcaattgcaagaacagagacaagtggatgcaggcaattgatgaagaaaaacaatccttgttaaagaatgaaacttggacttttcttttaccagaaggtgtaaattgattagttgtaaa

SEQ ID NO: 210512 - DNA, 738 bp, Cannabis indica
aatgcatccctagggagctcactgcccagttcttcatcttcttgggatatctctttgagagtgtatggaaagcaagaaatgaggctatattaaaaggtcaaattactgggattgacattgctaggaagaacttactcactagatatgatgaagccatcctagtaagtaaggttgaccctgaggcagcgaccgtgaatcgcaccccctgcaaacaactttttctctatgcctaaatgcctctcttatctgtatggtggatgcttcttggaaagatggaaatgtatgcttagatgtaattcttcttgattgtgttgcagattcatggaaatggtatgctaagagtgaaaagactgcctcggcacttgaagcagaattgatggccattttttgggcactgcagctggataaggagctgggtcatgactcaattgttgttctgtctaatgcacagataatggtgaaggccttggaggacaagcgttgtccaccggtttgggaaacctgacctctagctctctctgttctcaatacttgtaatagttttagttttgtcacttttgttatattcctagactagacaattctacttctgactttatagccaagaaggctagaactgatgatggttattcagttggtcattgtattgggaggggtcccctattgtgatgcccaattttcttctgcaacgaactcttttgtgttcttccaaaaaatatatatatcgctaccaactta

SEQ ID NO: 210513 - DNA, 552 bp, Cannabis indica
taccattctttgatatgttgcacaaacattttttagtttgaaaggcatgaccaagtagcagtatacccccttatcggtcctgaagctagtgtattcttgatctgcaacgtacatcttaatctggttataggcggagtaggcatccatgaaggacaatagagtaaacccagaggtggcgtccaccatctggtcaatttgaggtaaggggaagcagtttttagggtaggccttgtcgagatcggtaaagtctatacatacccgccatgtcccatttggctttggcaccagcaccggattggccagccattttgggtaatacacatctcggattaggccattggctagcagcttatccacttctttctctaaggcatccgcctttattgggtcaagggaacgtcacttctgctgtactggtggcatatttggattgacattcacgacatgggtaatcacatgcggagttatgtcggtcatgtctccttggcaccacgcaaaaaaatctgtggccgcccttaatgcttcgataattttctctctctccttcggctc

SEQ ID NO: 210514 - DNA, 507 bp, Cannabis indica
attttaaaataaattaggaataactaaccttatttataaattaggttgttgttttccaacctcctattctaacttcttattcaatcttaaccacttggggctagctcaagtggccatagggggtgcgtgtgtgttggaggtcctagattcgaatcccaagttatgctgatataatatataaacgcttaaatcaaaaaaaaaaaaaaaaacttcttattcaatctttggaatcgaaattacatgtcaaaattttattaaaaaaaatttataataatatttattataattatataataattataatattatatttataaattttttaaaaatttaaaataatttactgtaataaaaataaaattatatgacgaatattattataaaaaattacaaaaatattctaccatcaatttttaagcacattacttaatagagaatttataataaaaggttgataatatattactactcatattgatttttatttgtcacgtgtttttcacgtgc

SEQ ID NO: 210515 - DNA, 561 bp, Cannabis indica
ttttctttttctttacgaaaaggaggctggtgaccagaaaaataaatagtcttattctctttttccgtcaattttttttttgtaaatattttgagtgctacattaagtaaatattaagtattattacagtaaatatcctttatatttagtaaatgggacaataatatctcatcttctttcataaaaaaaatatatcatcttcatattgtgatatgtaggaaagtaattggccaatcaagagatacccaacttgtttcccttgattgctgcatgaaatttttggaattgggagccctttagttggtccctttaattttgcttggtggctatatataaccaaaattgattaattaggtccccaactttccaacttgcatgtactcgtctttgtagtgtaatagtagtcatttcaacatttgtggcaaattacgtgaactaaatcatatccatcgtgttacttaggaaaaggacacaattaagaactaagaatatctttgagtgaaattaacaaaatcttgattaattaataatttaatatattatacggcgcagtctattttg

SEQ ID NO: 210516 - DNA, 1393 bp, Cannabis indica
ttttatacaattttccaaaatacatatgtcagttcgcataacgactacaaaatagaaaccccagatgccccgagaccgaacactccaggtcacgcagccatgacatgtacaaccccattccagctcaggctcactcctgcccagcttttgcctttcctttacctacacatgaaaagagaactgtgagtcaacagactcagtaagaaaaaacatataacatatcatataataccgacttgtatctaagcgcccatacacctatttacaaggcttaacagattagtgagaacgttccatattagggtacaaccattgtaccacatacactacgtacctcattgcacaagtgttggtagggtttgtttcgtaccttgagtaccactgagtgatataccatacacaccctgtacttttccgtacttgtgctggtaacatcgtaatgtactccttaacaatatacactataccaatgcactatataccatatccgtacaagtgttggtagtgtaacaaacttataagcatgcatatacacttaacatatatatacattcgcatattcatattacatattatagacagttcttacctccttttccagattcaagtgagttggccgacctgaacagaaaatctcgtgctggatggatgccctaatcacataacataacaaggtaaatcacaagttaaaaccctaattcgggaaacccgaacctacaactcaaggttctgctattactaatagggactacaatatcctaggaaacagggaaacacccaactaaggcactgaaatgggcaagaattgagaaaacgagttcttcggggaatctgtcaaaaccgattgaccggttttacaggacctggcaaactggttaaccggtttgcaccacgtttccctaaagaactcccaacttgctcaaaattcatccaaatgccaccaaaccttccagagtacctaaaacaaccatacacaatattttccaaccaacaaaaaccagaaaaacacactgatacaaaatatgccattgatgactcaagtttgagttttcaaactcaaacttgatcatccaccaccacaaacaacaaaaccagcaacaagaacttaaaatcaactcaaaataagcttagaattcgaaccatacacaattcaaacactaacagcccctataactcaaaatcacatatccaaactaacatcaaagcttgaaaaactaagagcaaatgatctaggggttacctcaactttgaatcccacttgaatccttgctgaaaacacaaaaatcaacaactaatctcgttggttcttgctggttcgaagagagagaagggaaagagagtagtgttttctctaattattggtttttcttctttaattctttactttctaaaa

SEQ ID NO: 210517 - DNA, 951 bp, Cannabis indica
cgattacaattaaaaaaataaagtaaaaatcagttcctagaaataaaaatgattataatttttttttttaaaaaaataaagatcaattctaaaaaatattgaggcataaaaataaaaagaattggtttcataacaaaataaataaacacaaataatacacacaataacttaaatataatataaagaaacatgttatatttatcaactagttaaaaaatttaagataaaaaaattgatttagtaaaacaactaagataaaaacttacacacaaaaactagtcaaataaaataactcaaacaaaaatatttattcaacatgctccaacccactaaatagttatcctcataccatatctactataaaaatactcatttattatgttatataaccggtttgagttattttgtgttatttgtttttatttattataaaattattatagaaccagttccattttccggcgacactaactttttcggcgtcggtgactttttcagcaaaacttattattattattttacaaatatgagattttcatcttttttttttttttacaaaaatatggtataaaaaaatcatacaaatgtaaaaaattaaaaaaaacccatagcccatggtattatttatttatgccataaaaattaaacttttataatttttccatatattgtgtaatttttactaaatttaatataatattacttttaatattattttaaaaaaataactaattagtcacctaatctctttctttatatttcttatgctataaaaaatagttaatcatttaattaataggaatatttgcagcgaaactttcttaatacttgtaattgttacacatataatcctaataaaaaattagcggcaaaagtactttatcttacgattttgttacaatcgtatctttttttgattgttaatttccaattaagtccgttaagtgtcaa

SEQ ID NO: 210518 - DNA, 778 bp, Cannabis indica
tatccaatgtttggcggtcggttttgattggatcggtcagttgttattggattggatcgatttatgcacacccctagtaccatatatattgtaatttacaggtgagaagatttcagtgtagtcaattccttccacttgagtaaagcccatagccagaattgggacccagcacccaggttgacatattatcaacctaggttgtttctaatcaagttcaccaaaaagtatttggagtatattttctgtcatcgtgaataattaagattcaagccaacttggggagaaaactacaaatctgagcccctagaaatagggccaagcgcctaggttgataatcaacttgggatgttgccatcaattactcaaatcccaaaatctgattcaatcaatgaatccaaaatagtcaaaaacacagaatgagacatcgtccttaagttcaaaaaccttgaaattatcaaaacgagatcatgggagctcgagaatgagtacataaaaaggcataacattaatggaggcccccaaatctaacatacaccgcttaatccttgtattgtcgatagagcaaagaataataaaagttctaagatcgttatactttggaggaagatattcttttggagaattgctgacacatttttgactattaggtgaatagtaatcctaaaatagtaataggttaaagtaaaacttagtttagtgatcatataaacaagattaaaataataatcatgacattaaacatagaaaaatagaaacagtttgatataatagaaactag

SEQ ID NO: 210519 - DNA, 508 bp, Cannabis indica
aaaagttgtaatcatatttgttaatagtatcttatgtaagttaatagtatcttttatataagttcagtcatgtttttctgatgtaagttaggctattaatattttggtatatttattatattgtatgtcgtttactgcattctgtcaactgtggtattttgtcgatttatgatatataatatgatatgctttcaagttagatgtgagattcaatttgtgcaagattaattaatttgcgcttttattatacacatcttccagttgtaattaatggtgtagaattgcaactgtgttttgaattaatatcagtattagaattggatttgcataactacatttctaccttaccaaactctttatctgatcactcacattcacttaccattttattatttttaattcatttatatttttaccatattctatttatactaatctttagtggtaatttaccactttgtggaacctgtttactaccgcaacctcagtataactaattgggcgacat

SEQ ID NO: 210520 - DNA, 686 bp, Cannabis indica
caaatctatctcaatgtgtttgcttctagcatgaaacacaggatttgcagctagtgccgcagcactttgattgtcaatccataaaactggggtctgagataagggaatttgcagttcagagaggatagatttgatccattttacctcagctgcagcattagccaaggctcgaaattcactctccgtactagagcgagcaacaacatgttgcttctttgctgaccaggacaccaaattgttgccaaaatacatgagatagcctcctgtagacctcctgtcatcaatgcagctagcccagtctgcatcggtgtacccttgtaattgaagatgatctgttggtttaagccacaatccttcatgtagggtgccttttaagtatctaagcaatttcttgcaagcttcccagtgtttgacagcgggagcatggagaaattgactgagtttattagtaatatatgctacatctggtcttgttaaactcaaatattggagtgctcccaaagtactcatgtacagtgtgatattgtcaaatggttccccatcaagtaaactcagtttcgaagtagaactagatggatttggacaactctttgctccctccatttgaaccttactgagtaagtcagtgatatatttactttgactgagatacataccagtatggtctctgtagatttcaaccccta

SEQ ID NO: 210521 - DNA, 589 bp, Cannabis indica
atatatgtacatattttttcctattagtaaaaaattaaaataggaatacactttgttgttatgtacataaactaaaaataataataataataattgaataattatcatctcaaaaacaatgtgaggtgagcagattatcaacaatactaacacctgaaagttaatggaactttttcataactttggtcccatctttctttcttctttcgttgtatagtgctttggtttgtttctataatgtgtcaagttaaaggtgtgtagcctatatagttgtgttgtatgtaaatctagtcagctttggtgtactcgagcagcatgtggggtgacctgtatattttgaccagtgtccagtaaaggacctcttcaaccccaagctcatcctctgctcttgctgcatatatgtcctcacatatggccagcaacctaccacataaacaaaaatgttaaagattgatggtttgaaatgggagggcatagtactagaaaagcagtgaatatgatcatttgtattgatggttttaaataggatactaatttttttaatctctgagtaaatcacagaatttgaaaatggggttttgcccaagga

SEQ ID NO: 210522 - DNA, 770 bp, Cannabis indica
aacatttagtcaataaaagattgccattttttttttttgataaaaaaactgttaaaaaacttatttgaagttccaatttcttaataaaagtctcgttttttaatttttccacagacccaatacaaactaaagacggacctgtaagggtcatactatgagaaatttacattgggcaccaattattcaatgtgatttacaattttaaccttactcattttttctactgtttgtttttgtttgccatagctttgtagtgttttttttatttggagtaacattcttctttttatatcattttcttattttttttttttttttttatttttgttaactttaaaaataaattttaatcactttgttattcagttgaatgatcattgctattagataccagtgatgcttagcaccttttataggtgacaccttacgagtagttagcgatattttctaaaaactattttcttaagttatatgagatctgatatttaattacactaataacagtatgatactgaggagggttcttttaacaattctccttaaaaaaaataccattgtgatccattattattcaatgtgagaatttcaaatgtggggaacatatgttttttcattatttccccaaaaaaaaaaagaattattacatagaaatataaattgacactttatttacaaaaaaacttactataaggtgtagacaatatttatacctttatatgtatttaattaccaaaataccacttacactactcacttacacaatcagacat

SEQ ID NO: 210523 - DNA, 723 bp, Cannabis indica
accctattattattagtagtaaaattgttatatgaaagtgactcgttatataagatattaggggaccttttcaaaaaatatatatatatatatatatatatatatataaagatattagggatgtgtttaaccaattatcaagaaagctatattggcaaacttgttctgaattgaatttgttaatcgaaataaaaatgttatctatatccaagttacttcgggccatatgtatttatttatttttgttggtgcatcttaacactttttttttaatttcatttttaaccccccaatgtgcacatatatccatgtatttttcttatatttaaattcaattcatattttaattattttaaataaaatatctacattaatttagaataaaaaaggctcgaatttcaagtttcggttggaactcgacttaaaagtagtccaaattccgaagcatgatgatctctcagtctttctctctgctccaacttgtttgggaaacccaaacaaaatcaaaccacacacactctcaaacaattatatccacttccacattacggccgcccaaacttcccacctccataccattcaattattattcaatatatatatatatagatttgattttgtcccgttgtactttcacagattgtaattcgtgacgtacggtaatcatcagatgagagagttattgatctgacggtgagactgatttaagagtaattagggtta

SEQ ID NO: 210524 - DNA, 716 bp, Cannabis indica
gataatccattagctgactacttaaaacggtcaggaaatccactttttttagtagtgtccattcattattgattggttttgaaatggaaccctatgatttttatcatggtatatatcagagtagtatccctagtggactttcaatctacacctattcagataataaagcatacgagatctgcatagtacaaagacacttgagattcgaacaaaataagcgagcaaataacacaacttgtgataaggtgatttaaaagaaaaaataaataataaagtaataatatttatattttaaggatgtgagacccacatgattaattgtttaaaatttcattgcttctcatcctcctccttccccgatactcttcttcttcttttactattcacaaacataaccatcagcgtgttgaccaaactcttaagtctccttattttttatgattaacaaatattagattattatttgttattaatgatttgttaattttgcaactaaagagaattaagcctttaaaaaaaaaaaattgacttcacaagtaaaatggtaatttaatcaaaattctcaaaagtgactcgaagtggacttcaagattcaagaaacttaagacaagactccatgaatatttatttacattttctagtcttgtatagtgatttacaagtctacaattaaaaattctaagaaaaaaatttggttcactaacttgtgcgacaag

SEQ ID NO: 210525 - DNA, 612 bp, Cannabis indica
atacttgacatcaattcaaaccttaattttgtcatgatttgattactaatagtttcagttatagtagtgcaagaattatcttccataatttttaattggtcaaatgcctctcctttcctaatttaatagattctagacttttgtatttattttctttatgtagttctaccaccatagaaaattatttcgactgagttcttacagattgaagcatctggtggccaagctattacttttggatgagatgtttcaaaagaagctgatgttgatccaatgatcaaaagtacagtgaaaaaatgttcttcttcatattgttttttcacgttgtatgttaaacggtggaatggtttgtaatatttctatctcaatctgcaggcagttgatgcttggggaactattgatgtattagtaaataatgcaggttgtttgaaatttttcttttcttatgttgttttcattccacattcgatctcttgatgctttttcggtgtttttcaggaatcactagggactacttaatgatgagaatgaagaaatcccagtggcaggatgtcattgatttgaatcttactggtgtatttctatatacactgtttaatctctttattcaca

SEQ ID NO: 210526 - DNA, 512 bp, Cannabis indica
aatattaaatattttttttgatagatttaattacataaaatatttaataattataatgtgatatgtgacaactttttttttttaaaaaaaatacatataatatattaattatcttctccaaggtatattaatataataattgacataatacacaatataatataatttattcatatgtgataatgtactatcatgacaactatttatacatttgttttattactttttttttataaagaaaataaaataaaataaaaagggagttgtattacaatcttaattaaaactaaaatattataacaaatattcatggaatatgttagcatatatgaattggtcttagtaagtttgtgatgtggaattatatttcaaactttcaccattattatttttaagtaggatttttttttcttagagtttaaagagtatattttgtacaattatttattaagaatttatatttaaaaaattaatttttacacattctttaaaaagcatagataagtttttgg

SEQ ID NO: 210527 - DNA, 1163 bp, Cannabis indica
catatgatctggacttaactaattttgtgtgtaaatgtaataaacatattaaaccattagcatgtaaaattcatacaaacataaatcacttcaaatttcttatattgataactaatcagattgtaaaggattttatttagggcacaaaacccaacagaaactacattgaaaagagcatgaagagccttagagttaagtttgccttttccatttcttcagtactccaatcattggtttgtttaatcttttatcccttctcatcaattacagagggaggagaccatccctcagaaacaccatccaaactctttcatcaaccgctttcaagaacacccttatcttggttttctagtaaggatagttagctccttcaagcataggaggatgcgagatggaatctccttcccaaaataactccatttcctattaatctgcaatcatacacacagattgagaaacaagcgtaatacttcgagatgagactcgaagccaattagttttccaaaaaatcaagaacaccgaaacaacaaaacataagaaatgagcaagatctaaaacaaaaagacacatgactactaaattgacacgacgcaccaagatctcaatctaaataacaagataggtctgataccaaaagtcgaaacctaaatatcttaatttcttctaagtatatttttagaaataaaaacttgtactaaaaattacaaaaagaaaattagtaaaacacaatggaattttacaaagcttcatctgaccctagaaatgcattctaagcgactagtgctttaggttcccttgaactagggtaataactttcattatgaatcaatcaatctacaatatccatttctggttacaatttccaaatagtaatcgaaaattaattcatacaaagactacctacaaacttaatcaccgatcaagtctaaccatctaagttcctttagacatctaaagccaagatccccttctttcctcacaattgatattcctttcaacaacttaattttgaactctcttcagagagaaatagatcattgatttctcctttagctcttgaagatctaataaagaataacctacaaataaaccaagaaacacaaagaaaaagttctaccctagtagaccaaaaatacaagagaaagtctttcaaagacgaagag

SEQ ID NO: 210528 - DNA, 598 bp, Cannabis indica
aatttaaatgccttatgttttttctttgacaatgattgcctttttcattttatagtagagtggactctgtttcggcatagttaaacttgtaagtttgtaggggatgatgacaggtagttcttattttgaacttagattgtatagtgctggggttaatctcatttttgcattgaaaccgctagccaaattttattttgttaatgcttttaaagagaagacaaattctctgctttgaatatctgtctaaccctttctctatatgtatgtatatatgagtgtgcctatatgtatcataacaaaagcatgatggaaaagagattaatattattgttggtaatagagtcactcacacattttttttattgatcaacataatgtgattaatctagaataatggcttcagttgtgtttaatctagaataatggcttttaaagagaagacaaattctctgatttgaatatctgtctaaccctttcttttgttgttaattaagtaggaagtggcggagcttcttacaattgtggcgattttggccatattgctagggattgtagtagcgctagcggtggtggccgtggtggaggttctggtgcttgc

SEQ ID NO: 210529 - DNA, 617 bp, Cannabis indica
gaaatgagaacataaggtaacccagaagtacggaagaagagatctctcgaaataataagagaaatcctgggactcaacctaggaccagtggattaccaccgagacaccccaagcgtccttctcaaactgatagggaggagtcatatacatacctcaatagagggtgtatgtccaacctttttcgaaggagaagacttgtgtaggacaaggaaagctgtagctcagggtattatgctaatcaagagagtatgagcaatacgaggagctaccaatatgagagtttctcagatacaaggtctgtgagtaactatgaatgaagacaaccagatcttcgtgaacatttgaattggagataaccccatttatgcaagcacttaaatcagaatgtacctaatttacgacaaaacacaataataaccgataacaagaggatccaatctaattgcaaatcattgagttggaagatcaattcagaagataccaagatgaggaataagggaaattgcctggttatgactcgcatgaagagcccgagcctttccatccatacattaagaactctaaattcccccaaggatttaaaaccctcacatctcgcaatacaatgggactttgga

SEQ ID NO: 210530 - DNA, 1296 bp, Cannabis indica
agaaagaacctagaactggaggagaaagataaaattgtcaaagcactaagagtagccacggatgtttttgcgtggtgccaaggagatatgactggcataagtccgcatgtatttacccatgtcttgaacgtcaatccagacatgccacaagtccagcagaagcggtgtccccttgatctcataaaggcggaggccctggaaaaagaggtggacaagctactaaacaatggcttgttccgagacgtatattacccggagtggctagccaatccgttactagtgccgaagccaaatgggacatggcgggtgtgcatagacttcactgatctcaacaaggcatgcccaaaaaactgcttccccttaccccggattgaccagatggtggacggaacctttgggttcaagctattgtccttcatggatgcctactccggctataaccagattaagatgcacagttggggatcaaggatgcactagctttaggactgataagggggtatactactacttggtcatgcccttcgggctaaaaaatactggtgcaacgtatcaaagaatggttaaccggatgttcaaagaccttctaggatgaaatatggaagtttacgtggacgacatgctagtcaagtctaaagcttgcgtgagccatgcggacgatctcacagagtgcttcgaagtggtctgaaggtacggaatgaaacttaacccgaagaagtgcactttcggggtcaaattagggaaatttttggggttcatcgttagccagaggggaatagaggcgaatcccgaaaaattcaaaccttattcaacatgtcttcccccaagaagcaaaaagtcgtgcaaagcttgaccgaaaaagttgccgccctaagccgattcctttcccgatcaacagacaagtgcattcccttcttcaacattttaaagaagtgtcagaaattggaggggacagaagaatgcgaggaggcattcaaaaaactaagaaaacatatggtcaaacctccaatcctatcaaagccggttcatagagaggacttgttactgtacttggccatctccgagaacgctgtcagcgcaaccttagtctgagaagaagaaaaagtccaacgtcttgtgtactatgttagcaagcgtatgataggggctgagatacggtacccattgattgaaaagttagttttctgtctcctaatggcatcaagaaagctgagaccctacttccaggctcaccccatcaaggtattaacaaaccatgttgttaagctagttggacatacactacataccgcgcac

SEQ ID NO: 210531 - DNA, 506 bp, Cannabis indica
tacgcatcccatgttagcacatccaccaagttctctcctcgagctagagcctgtgcatttattggttatcctccaaatatgaaggcctacactctactagaccttcaaactaaacaaatatttcattcaagagatgttctcttttatgaaaatatttttccctttggttcggtcactaacactcacactatatatcagttttttccacatcatactgagacatgttcatctcaaacacacgacacttcccctgttcttactgagcctacttcgactcaagaagatagttcaattcctgaacattccaacactgacttcaatcagtgccaacaacaaaatcaaaataagcaaactacacaaccatgcactactaaatccggccgtgcacctaaaaaacctgcttatttaacagattatcaatgtgactctgtcaccaccaatcatagcaccaatcactctctgataaactatttgtcataccaaaaattctccccagaatttcgtgc

SEQ ID NO: 210532 - DNA, 636 bp, Cannabis indica
taattattaatttatttatttgggtgtggattgatggatcgaatagctccaacaaactacgcagtactatacttactacttccatgcttaaggaatattttacagctctagagtaaagtaacagctacctttatatatttaatgtacggcaggttaattttcaggattcctttcacagatgaataatccagatttgtgaaataattatttaaacgatgacgtacttgattgtgacgtttgtaatcctgaaatggattaattttgtagaaagtcatttaataagaaataataatagtatatatatgttcataaataatagtgcagttatatgtatgattaattacttggttaaacatttcatatcaaagcctcttctgataaagatatgtacacaaaacatgcactagcctattcaatatagtgattcattaataatgcttataaattataattacctaattatgacttgttcctcactactctccttaaaattaatatatatatatgtaaaaaatgaatattgaaaagccgttatatatttcaaaccttaaacaatttttacagtattattataccaatgaaaacgaccgagataaacactagctctacacacaaacatattctaatttttgtttc

SEQ ID NO: 210533 - DNA, 606 bp, Cannabis indica
tacatgtgttttggaaggtttggacacgatttgcatttttgggatttgtttggggttacatggtgcaaaccgattaaccggtttacagaccttgcaaaaccgattaaccagatcagggactggatttctgaaaagttcattttgtcaaatcgtgttatttttcaaaaccttagttggttatttccttgatatttagggtgttgttataagaactattgatatcagacaccttagtagtgagtttggatttttcgaattaggtttttggtgtgttatttacccgtttacgtaaatgtgacttagggcatccatcgagcacgaggttaactgttcagccaactcacttgaattcagaaacgaggtaagactagcatagaacatgttatatatgatattatgtgtatctgtattatatacatgttgtatgtgagttgtaaaagttatgaattgatatcatagcagcacaaccatcgtgtcgggtcggcagtacgagcatagtattgggtttggcaaatattcaattccagaaagtattagttggcgctatcataggggtacaagcatagtactggttcagcagtatgagcataatactggttaagagtg

SEQ ID NO: 210534 - DNA, 1099 bp, Cannabis indica
cagatgttcaatttcttttcacaccacccctcaagcgcagaggtgattccatcagaccaagcttgctcgtaaggaattgaaatctggagtgtgtcagcccttttgttaagcaatcggctatttgatcgtgggatggtatgaatctgatctcaagcttgttctgtagaattttgtctcttataaaatgaacatcaatctcaatatgtttcgttcttgcatggtacacaggatttgaggcgagtgcacttgcacccatgttatcacaccacacaaccggtttttcgaacactttgaacttcatctcttctaacagctcctgtaaccaagcaatttcagtagcaagatgtgccagggctctgtattcagactctgtgcttgaccttgcaacgacactttgtttcttcgaagaccaggacactaaggtttcaccaaagaagacacagtatcctcctactgatttcctatcataggggcagcagtcccaatctgcatcagagaagcctatgagattaaggtgatcacttggtgtaatatgcagaccgagatgtgttgaccctttcaaatatcgcattattctcttggctgcattccagtgagtagttgtaggtccttttaagaactggctaagcttattaacagagtaagagatgtctggtctggtgtgacttaagtattgcaatgccccaatcaagcttctgtacataaaaggatcgttcagcaactcaccatcgcttatggacagtggcttccctgctgtcataggagtaggacacggcttcacattcatcatattgtgtttctgcaagagttctgatatatactttgcttgagacaagtaaataccagtgttgtctctgaaaacttctattccgagaaaataattcaagggccccaaatctttcaatgcaaaactcttgtctagtttagaaataaaggcatttatttccctgccacaactcccagttattattatgtcatcgacatacaccaacaccactgaggacatatttggggtgttgtagcataaacaaagatgaatctgctttagagttgctgaaaccccaactcgatgagcgttttctttaactgtatcatccaa

SEQ ID NO: 210535 - DNA, 1494 bp, Cannabis indica
atatgatttgttaaaaaatctcttacgaactttttatatttacagaaattttttagtcattctgttagatttcgtcctattatttgtttaaatgttgacatgtcgttaaaaattagcaactttgcaccctaaattttgaaaactatcaaatcgtaccccctacaaaataaaaataagaatgattcaacaattttttaagtaaattttaaaaaataaatttagatcttaaaagaaaattattttgaaataattaaaaacattaaaaaaggagattaaattttaaaactaattaagtgatttaaaaaattattttttttattaaaaaatctatttagatataaaaaaaaatatattaacaattcaatttttgtaaaaactaaatttaggggaacatgtttgagtctatttttttctccaaaaatttagatttatttaagtaaacatagctatttttttttagtttattttctaattttttttaaataattttatatttttattgaatttttaattatgttttctttattttttaaaatatgagttcataaatataaataagtttgattttttcttcaaaaaatcttagtttatttaatttatttattgaattttcaataattttgatttgattttttaaaatacgtgtgtataaataaaataaagtttagaaatatttttttaggaataatttagattttttaagtaaactatttattttttaattaatttaatatttttataaggtgttctaataatttttatcattttttttaaatattagtagaatattataatttttaaagttaacgtttattaataagaagagggaaaaattttatattaggcaaagttcaaggggtaaaaaaactaatttttaatggtaaaataaataaaacataataaaaggggcataatatgtaactgttatgttttagagagaatttttaacaagccatatattttaggggagaagatcaggtagtgtcgaaatttgagggcaaaaatactaattattctttgagctattactgatttactaaaagtaaaaaacaaaagctatttgtaaatcttcatgttttacttggactaaccaacattatgaaaaaccaacatttattagaaacataaaagaattaggcttgaaaatcatagaagttgcaatgagctccaacaaggaaaatgtgcagatctgattttttgtatattacttctcgttctaagagtgtaatcacatgtcactttaaaattgggattcaggtagtttcaaaaaatttctcccatttttcccatgtattttgatcacttttttgtgttattttttaaagtttacaccatacatttatagatttatccatgctgattttaatattttaatactttttgttagaaaatttaagttaataatgacatttttaatttataattagagagtgatgtttttacagagaagttcaaggaaaattataaaagggaagattcaattgactcgatcca

SEQ ID NO: 210536 - DNA, 672 bp, Cannabis indica
acgacaaccggacagactccattcgtcgtggcatatggatatgaagctatgctgcccgtagaactcgaaccaccatcccacagaagattgacatatagccaagaggccaatcatatactccttaccgaatcacttgatgaaatcgaagagaagcgaaccacaacaaactttaaattgatggcccatcagcaaaaagtagctcgtatttcaacaaacaagttaaggctcagaaattctctgtgggggatatggttctaagaagagtatttttaaacaccaaagacagtacgggaggtgtgctaggacataactaggaaggatcgtattaggtagtcgagttctagactctggagcatacaaattgggtaagtatgatgaaaaaatgcaactcgttctggtaccaaggtattggaatggggaacatctaagaaaatactaccaatacaagtaccaggtcgaatgaccatattaagtacgaaacaaaagaacatttactcttatgttaatggccttctgggcggaccacgctcaaaggttcggataaattttaagtacttaggtcggatgaccactattgaaggtaccatatttaatttctgcaatttgttttatttcatgttaagctaaagatcagatcagatcattatattagctttaatgtaagttactatg

SEQ ID NO: 210537 - DNA, 855 bp, Cannabis indica
acacgatctgatatgtacactcctgttaaagaatatcaactgaccgacaaggatttaagaaaatttggagtttgctatgcagactccaccccatatccaacaatgcgtactttcttaaatctgtcacacaccattatttgggtgtatcaggcatatgtattgggtaatgaacctatgcttttaaagaaacttggtaaatagattcgaagtttatccatactcaagaattttaatatagtattctctatttaaatttgatgtcactatattaatatgcaaattgtattatttttctacttaagatttaaatgccaatataacatataaacctttaattttgttgagatataatttatttgagtaatcattaaaaaattagatgaaaatttttgtgaaatacgagttcatatctacaagtgttatttattgacttgtatgaattctaatatgacaacatttcaatttggaccattttagcttgttggtatatatacttttccttaatgcaatccacacaagttttaaataaaattagtaaaattaaatgagtaactccaccatttactaacatttattttatttatggagatatgttatataatttttgatgccataacgtagataattcttattaataacaaattttttattgtcaaattgagcatgcatatcttcatgagtgacattattttataaattaatgtagtaaaatatatctaaattaagtttctaaacaaacttagaacataaaagtctttgagaatattaaaacaaaaccacttctatattgcttgttccttaaatttataaatgtgagaactcatcttttctctggataagatttactcacaatta

SEQ ID NO: 210538 - DNA, 968 bp, Cannabis indica
tgactcagcaagaaaagttactatatcgtaagcactgaaaatgcaagtattttcatcacaatatagtatttatacttgtagtttaattacatattcagcatgcatatataacttagcgtccaaacaaacgcacatgttatgcacttataagaaaaatgataataacttatagtcatcaacttcttcattacatttaacggatactcactccatacacaaccacataattttagtgcttcacaaagcactctaatcatacatcaccataaacacataatctcagtgcttcataaaacactcttatcacacattaccatgatcacataatctcagtgcttcataaagcacccttaccaccgttattcacaagctatgtatgtcactatcgttgcccgttaacgcaaacgataagcaagaaacctatctgcggtttcaacaagtaattactcataaatataatgatagtatctttattcatttacaacaacggtaatgactgtgtcttttcctcgatcataatcaagtcacaaacgataataatcgtttcctgtcatcacctcaatcataatcgagtcacagcaaatacacatcattaatctcaaacttaaacgaggcactaacgattataactgcttcttatttaaccacttagcggtgcataaaaattttcttacctcagtcaagaaattaagtgtgcgggccgacctgagtggaaatagagctagacgatcccagtcctatgtcacgacaaccaaaacccaaaatatgccttaaactgaaattctgaaacaaaatcccaaatctaaaaccggacataacctaacttccaacaatcccaaaatatgctacacaacacataaataacctaaaacaagtactaggtaccaccccgagccaaaacagaactcgaagaaaaccccgggaattccccctcgtaggacaactagtcgaccggtttctagcagacc

SEQ ID NO: 210539 - DNA, 1435 bp, Cannabis indica
cttttaattaattagttaacaaaaagtcacaatgttataaggacaaaacaagagtacctactataaaaattttctatatatatatttatagggacatgattttgtttcacggaatgtattccatagtatattaaatgggtctcacggtacgttaccatttttttaccctaattacccttagatcaacctcaaccctcagatcaaataactccccatctaacggatgtcgtacatcacggaatacattccgtgaaagtatatcacgggacaaaatcgtgttcctatatttatatttccttaagaaagatgtgagagagaggtggccgggctttaaatgtcggggtccggggaagagcagaggtaccctattgtagggtgttcattaattattaatatcttcacaagttttcacccttaattattttttccttcaaaaatagaaacaggtgttgtgttaaggatccttacaaccaaaaaaaaacaaagtgttgtgttaagggtatttgtttaatttaagtgatcagtagtggttttgtctgttatctccatttggctttattatgattagtttaactagacaataatggcattaggtgtttacaattattaggttctggtggaatgtttggagagaaatggagaagatttttctcgaaactgaaatataataattatatagtaaagttcaaacaagggctgtttttgctatggttgctaattattatataatccataaattatagatctgaaaccccttaatttgatgcatacaaaattatatattattataaagtagataaagacgaacccttgatgaaatcatatataccattaatagaacaaaatctctttatcaatataaaacacaaatattaagtgattaataaagagccgatcaaacaatataaaaaaggtgtttctatcggtagtttggtaccttccgtttttatcttcacactctctttttaaattgattaatatattttttaaagtataaattttataaattaaaaaattacttattaatttttattttttttaaaaaataatattaaaagttttaaaaattaaaaaaaaaataaatataaaatttaaaaatattaaaatttaacatacttctaatattaaaaataacataaacaatatattaatatttatatatatttaaatcaataaaaaattagtataagtttatttaatctaaaacaaataatattaatatttatatatatttaaatatgattatttcacaaatacaaaaaaattgatttatcaaaaaaataaatatacaaaaacaacaaaaaattacaaaaatacggttgtatggaattttaaatatttttacgatttttatgattttatttacaaaaaaacgatcttttgatgtatttttatattgtactcttgtttatttgttgttattttattattattt

SEQ ID NO: 210540 - DNA, 663 bp, Cannabis indica
cgccaatagaaacttccttactagtatgtttacgtttagagtccataaaaaccattccctcctcttccaaattggaattgctatcctctaccgcctcccatcctttactcccattattttcgctcaacgcagctggagaacaaataagcccacaattatctccattattcatgacaatcaggttgacagcaccacccgatccctggaaacccgaccctgtactcatcttcgactgcctaggctcaaccatcatcgtgccaccaacattagatgagctagaagccccagcccagagccatttagctcccattgcatactgaggtcatcgaggcattgccttcataaacgtgccataaggcttaacgattgttgaggttggttgagtaaacaatcgagaacaaaactgatccgtatgcccaatcaccccacatataaaataaaaaagttgacacaaattcatactgaaaattaatccagaatcaatcaccaccaatctgttatagcttcattctacgcttcaatggttttttgatatttaaatgaacccaaacccgtaaataatctctccaaacacaattaaaattattctcatcaaacttaataaagctaccaatataattcccagcatcccgtataacctgttctattttgaagcccgactta

SEQ ID NO: 210541 - DNA, 676 bp, Cannabis indica
tccaacataattctaaaatatttgaggaccagaaaactatagctattgattgctatgtagatgccatagagaaactcgaacctcgaaccttgtgggagaaaaccacaccatttaagatacccatcttgttttttgtttttttttccttaaagaaaaggtggtcctattttcaccaattacttaagttttaaaatcatcaatttcttacctatctctgaattctaactaaatctcaatacatacaacataggtgattgatgcatcaacattgtaaaacaatttctactttacagttttactaatattagatgacataaatcatctagcaagcaaatactgcataattatgtggaaagatcagaaattaggaattctcaccactttcatatttaactacatattcatcgacatcaacacctggaagagtaaaacctgctctggtcaaaagatttccagcatctcgcacctaaacaaaacaaccatttaggggactcaataaccaatcgccgaatgttcatacaaaaaactattttgcattcagtacatcaatgcatcactcaaccaaaaaggaaagaaacaagttcattaccttcaaaagaaggaaaaaactgacatttaacagccttattaatcaaacatgtcaagaacaacaaataaataaaatcttggaatgcaa

SEQ ID NO: 210542 - DNA, 525 bp, Cannabis indica
attaaatttaaaacataaatattttaaagcggatacatcatgtttaattataaatttaaaattaattacagataatagtgcataatttttgtttataaattattattaatcttactattataaaagtggcttcttggagttatagttggagactattttgtcttcacaaatctaattttatgataaatctattcttttgttcttttttttttcttttctttgtggattttttatcattttaattacaaataaaccatagcacatgaatcattttttttttttttgggttttcaaaaaaatactttttgctgttttgttctctttatgtattttatgcagtcagataatgaattgtgaaaaagaaaattacaaatatatatttataggaactaattcattatagaaactattttatattaaacataaagataattgaaaaattaatctcatatattatttatttatttttttaaaattttgcgtattgggttgctttagtagtttctatgtgggttgctatgtaaa

SEQ ID NO: 210543 - DNA, 1122 bp, Cannabis indica
atcaaggaagtcactcatagaatatactggtctgttcttcctgatgtccttccaaagttcaccaagaaccacaatgcccccaatattgcagacaacttgctgtcttcggttacccgtgcaaccttagttgcctccgtcatgaatctgctgatgtaggctcgaagagattctcttggtctttgcttcactttgaccagatctcctaagtgaaacggaagttggcgagaagaggagaattgtgcatgttattctgaggagaaagccttacatgagttgaactttccagtcgccaacttgaaataccattgctgagcggcctctgagagggtggcaggaaaaactctgcaacatacatctcctcgtgctccttgcaggtccatttgcatttcaaaatacttgaggtgggataagggatcttccttcccagtgtacatcttccacgttggcatcttaaacttgtgaggcaatgctaagacattaatctctggggagaaaggggatccacgtgctcgatccaactcgaggtcattgtttctctgaccgatcaggccttggaacatattttttagttcatccaactgtgccggcatggctggactaacttgttcggcttcttggccgactagaattgcgttagcatctctttgagtaggattttgagcgcgagctccaagctgaacgactggtgcatcatgctggtcgtccactcctctccttctgttcagatgatctcggagatcatgaattgttcccaatcgattaaatatggaaacacctggctgtctctgtgacttgttggcttggccaatcggctggccgacaccattaacctgagtggaagaattatgtataacctctcctaatgaattgcaaggcaaggtctacccgcttaccgcttggcccacatgtgggacctgtgaccaggtattggacggctaaccatttatagtttgagaggtgttcattgatagatcttcgtctgtctcgcctagggggatgatggttgcaggctgttgtccggcagcctgataggctttttagtatcagcacggtggcctgccaagttcggtcatcaatggctgcttgctatgcccttaatgtttccatatctttgtccctcca

SEQ ID NO: 210544 - DNA, 822 bp, Cannabis indica
tattaagcatataaattggtttcccacaatacccattatgtgtgaacataatcaacaacacagaggcacaaactttatggcagttaaccaatcaatgatttgaaacaataagatgatgacaacatatgacaatcactcagcacaggcagatgtacaacatccttgtaacaatccaacaacaacaacaaacaaacaactatgtacaacaacaattagatcagttcaagatgatgttattttggtcgacactatgactttaacatcagagtcaacaatgcaacaaccaaaaaaacaacaacaaaaaaacttctacagaagatgaatattatgacttcaccgactacgcaaagattgttgctccacaaacagtacaacaacttgaaaacaaccagaaggaagaagaagtcaaaaatatagaaatgattatcattactaataaatgacacaaaacaatagaaaatggacaaattaacaaggacaaaaatacattgataagtgcactatgctactttgtaatcaagaaaatatttcaatacaaggtagtgaaatcttgctgtaaagaaataatgttgtttgtttggactcaaatggcaaatggagtttaaaatcttcaaaaaaatgaaaacgcaaaaatattcataataaggagtgattaagaagaacacacatgtacagttcagataagatttgaagatcaacgacaagcaacaacaaagttgatagcagatttcgtaaaattaaagttcttgaacttgaaaaaaaatgtagtcctgcagatataaagacagaaatgaaagataaatatagaaaaaatatgaatta

SEQ ID NO: 210545 - DNA, 657 bp, Cannabis indica
ttcccaatactgaggcatctcaagcctttgcatccaacatttctggtaagaattccttatctaaatctttatgggttgtggacagtggtgccacacatcatatttgttgcaatttagattttttttaccatattcataacaatcctattgctacatctattaaattacccactggaatgcaaatcgaaatttcccaatcgggtagcatccagttttctgcatctctggttctgcacaatgtcttatttgtgcttgattttcaattcaatttgttcagtgtccctacatttctaaatgatgaatccaacagtgctttctttacaaaaacttgctgtcttctccagggttcttagaacaagaagatttggattgctaaacgggttggacatctctattttctgctgcaacaacctgttcttccccttcatactttttccaaatctgaatgtaataaatcatgtcttagtgttcattcttggcatgctagacttggacacccttctatgtctactacatcttttatcaataaaatgcttcatgttaaagctcccaataatttttcaccatgcaacatttgtcatatggctaaacaaaaaaggctgccttttatttctaacaatcatttttctccctccagttttgatattatccatctag

SEQ ID NO: 210546 - DNA, 767 bp, Cannabis indica
acaaagatctaaaaccgatctttgttagatttagagaaagaagagaaaaacataaaatcacaacagaaatcaaccaagagatcacacaagattgatatcggagttccccctaaatcacgaggtacgtctccgtcaagcgaccctctaagtagacttgattctccactataaatgtcaaactcggggttacaaaattttggagattcctaagctacaaagacagaaggtagatttaataagctagaaatttgaaaattagttgaatatttaaattttaattgagatattttagaattttattagatttaataatttttaaatattttttaactacctaatttgaattcaaattaagataattctttactaatattttatttattaaaatagaaatatcttaaccaattttccatatcttgttacatatttttttatttaattatttaattcaaaaaaattaataaacctattatttatttagtttaaattgctatgattaacttgttgatagatcctataatttaaattaatcatagtcaatagtcaatagatcaaataaataatttataagaggtaattttgtaattttctttcatgataaacctagtaacatgatagggcccattcaaatcaattatctatgtgagcttatatgtttgccattgggattagatgcatataggaagcctattttttttatatttaaatagactaggttgctaaaataaaataaccaatttgatagttttatttagtatcaattagta

SEQ ID NO: 210547 - DNA, 808 bp, Cannabis indica
tattatatttaatttattgattttatttactaatttatctttctttcattttaaaaaaaatatattgaaaaggtttggaactttggacttggaggactttggagtttgttgaattggacaatggatacacaaagagaagaacacaatatacacaagggaagtaaatacttttgaatagttataaagatgaattattgatacttttggttatgaagtttgaatagttatattttggactgtgggacattttgatatgatccatatggatatggattagatttggactttggaactttttgatatgatccatatgaatatggattagatttagaatttgagactttttgatatgatccatattgatagattgatactttttgatatagatatggattagatttggactttgagactttttgtatatgatctatattgtatggattggatatggattaggattaggatttaaatttggatgattaatacttttttgatcaatagtattagtttattttgagattttgagattttttgtgatatgatccataatttcatattgtagtttagattggacaatggatatggattagactattttttttttcttttgtgggtttttgatttgagttttggttctagttttccttttctttttcatgtatatgttttgattaataactacagtgttctttttcgaagtaaaatagctatattgttgtttgttttgaatatttaaattggtaagtaattatgaaataatgaatgggtttgaatgagttttggttcatttttttttttttttttctta

SEQ ID NO: 210548 - DNA, 645 bp, Cannabis indica
tctttagtaccaacatagtgaatagggtcaaacatagtatttgttctacattgggtattagtgaagcaggggaaggaagcacttatttggggctgccaaatattgtgggtcacaataaaactgctttgcttggctttttgaaagataaaatgcgaaaaataattcaggggtgggaaggtaggctgcttttaaaatcgagaaaggagttgttaataaaaaccgtagctcaatcactaccaagctatgcgatgaatgtgttccttcttctggtggagacctataatgaaatggatcagttgatgtgtaagaattcattggaagaggtgggacaaatggacaattcataagtcaaaaggtggcaagggtttcgaattctaagagactttaacttgaacttattgtgcaaacaaggatggagactctttagccgtccggattccttggtaagtaagatcttcaaagctcgttattatcgaaatgggagcttcttggctgctgaattaggaagcaatcctagctttgtgtgggaagtatcttcgaaacacacgagttagttcgtaaggaggctagatgcagagttgggacatgctttatggtgagtgtgctattagagctgtggcttccaaatgaagagaatccaagggt

SEQ ID NO: 210549 - DNA, 559 bp, Cannabis indica
attgcattgcatggtattaatcattatgaaatatatattttaatacaatgcaaattttattatttaatacataacaagtgatttatattagcgtgcattacaatatttaaaaaggatctggggttggggattgaagcctaaactaggatcctagaccctaccctaatgccggacttgcacccaagcacggacttggacccggggcccagacacgaccctggattctgacctcggtgctagactcgcactcagacacgaacttgaaccttggatccatacccaaacctaaacttggacttggaccttggaccacagacctcaaattcagattcggacaaagaccgaaacccaagacttgaacctaggcttggatttgaccttagacctgaaccttcaactcggatacgggacctgaacccatgtctaggtctaggaccagggttcgggtcgagtttatggtaaagatagtataattttaaacaatctattcataggagtcaataccaaatatagtcttgtatcaaataatattaatgcaatagaatataattcaacacaa

SEQ ID NO: 210550 - DNA, 526 bp, Cannabis indica
ccacaaaattcggaaattgggtgcgcctggcagctaggttgcaagtgcagccccaggaggctgcaaaagtggccttacgggtgtggaagtgagggtgacgtcgagaaaactcggcgctagcagcatctggttgggcgggattgcagggtcacacgggcgtgtgcagcgtgcgtgaccaaggcttcagacaattcctgtctgaaggacgcacgcggatgggcttccttgtgcgagtgcctggtgcactcgatgcacacactcgacaaccatgcatccaaagtttccaaaattcataacttcctcaatttttatcggaatcgaattctgtaaaaaccaaaattgcttaatttttcccaaggattccaaataaaatattttcaaaaacagaaaaaataatttttttgaaaaaattttgtacaacacatacattcatcaaataagcacataaaccaacatgaaaccatctaaaacaacacaaatcatcgttctaattcatatttaaagaaagtaaatcattatcatggat

SEQ ID NO: 210551 - DNA, 689 bp, Cannabis indica
atatttttgccttagaaatgttcctatattattgaaatttctttcacgagagaataattggcattatatatatagagacgtacgagaggaaaaatcattacacaactaacgtagatgctaagtatatatcatctttttctcttataaattttaagagaattattctcgctaaatttgatctccacaaccatattataaaaaagataactatagtataaaacgtatacataatacatatatatatatatatatgcgtgtgtgagtggagaaagagagagggtgctggagggaacacaaaaactaggtacagaaaataatataatctctcattattataacttttattagtaacaaaagtaattttctaaaaccaaagtaatatagagtttgttttttatagccctatttatttatcgatattcttttttattatttatgattttaatgagtttaagtatttgttttaacacagtgggcacattttcctcacatccactttgggctaaaactggatggcacaaacaacaagcaagcaaaacttgacaaaacaattgcaggagatcatcatcagggaacccaaaagaccaatggattctactgaaaaacaaatggtacttctgtgaatatatatatatatagctatatataactagctatatttagctagttttgtttttgtttttggtttt

SEQ ID NO: 210552 - DNA, 1104 bp, Cannabis indica
aatttttttaaaaaataacctatacatatacatatagaattaattatatatcacactaccataattttaaaaactttaattctaaactaattaaattcctactacctctcattctcattcacaataaatatatatacaatacaagtacacaatatacacaaatagtatatacacaatatatacacacacaatatatataaacacatattcaataataaaataaaaaatatatacatatatattatatatcaagttaatatatatttactttataaacgcaatccgacgaaaaattgtgataacaatccggccacctatatatagcacacacaatataatattaataaaatgaaaaaacctcaaaaaaaatttacaaaattgaaataataccaatgtacattaataaaatgaatagaaatcacatttatatcttaatgaacgttgagattcaacgttttctccgctaaaatcggtggccggagttataccaccacctttttttaaaacaggttcgggtaaagtacaaatgtcaatttcgaattagatgggtgttttcacaccctttagcttccctttttataaaatgggttaaataagggaagctaaaggcccatattgtagtagtgaatgtaattttccacggtatcaacatttaattttcttaagaaaaaaaaaaatgaacaaatcaattttccttttaaaattatgttaaaaaaatgtattttttttttttaaaaaaaagttactaattggactatctgttttgttaaacaataaaattaactttgtattttcccaaatagtacaaatatgatcataaactgatttttttgtcaaaataaaacttaataataatccgatctagaagtgttataacaaaactaattatattttctgtatctgttcgtgttagatattgttttcaagttggttatattaaaattaaatcgaaaattaagctcatagtcttatttttacaattttgtaaaatacaaattctattttatcatttaactaaataaatggccaattaacaattttttcaaaacacaaggtcaaaaatttacccttttaaaattgtaaacgtatttttttaatttatta

SEQ ID NO: 210553 - DNA, 758 bp, Cannabis indica
tatatatctattaattaatatatatgctctcttttctaatttataaagcttttgcttttataacttctagatatgtattccatgtactaataaatgggtgcgtacttttgtcttgttatcactttgatcatattcttatctttctttgttttttgatatatttttgttatcaatttatttggaaagctgacatgatttgtgagctttttttttctttttgtttggttgttgacaaatgatttgcgagcattatttattgtattctcttttataagcattttgaagtaagatcaatatgcaaatatatatatatatatataactaaataatatgtccatattgtcttcttgcatgtatagatcatttataaaaagagtaatatcaatgataaatatattgtctgattttgtctagtatatataattctttttattttttaattaaagatggccgtattttattcaaagtatactcagaaaatacaatagttttaagagcaaaaaagagcatcaagctcactaacttcacaatttgataaggaacaaaactctctagcgacacaataaacaaccttattagcataaaataatactaaagtaagcaaaaagaagcatcaagactcactaaattacacaatttagtacaagtaacaaaaccctacctagcgacacaatgaacaaccttacttagcatatcgtttaactaaaaactaaaagacacaatcattagtagaagagatcaacatacgacaatactcg

SEQ ID NO: 210554 - DNA, 1218 bp, Cannabis indica
ttagcataatacaaatattttagtgtgtatatataattttattgacatgttacatatatttaattattatttttatatattttaattgtatgatatattatttattttaaataatatttaattagtttctattttatatacaatggtagaacataattttgttgtcatgatatatattttaattgtggtatacaatttagttagtatagtatacatatatatatatattagtaatatatatttttattattattgttgttagtatctatattttagtgaatgatatatgtattttttgttatacggtattttatttttttaaataatatttaagttttattttctattgtacttttgttgacatgatatataattttattagtatcctatatatttttatttttatttgttgttgttatacatatatttctactgtaaggtatatgttttttgttatatggtatataagttttactgtatagtatatcattttattttagatagggatatttgcggcataaataccaaatattttcaattttatacacttaaataccacatcttttatttcaacggattaaatacccaaagtttagttttactcactcccgttactacttttccgttatatataacagagaatatttctatgccaggtgttactcacgtagtggtccactacataaatttttttaaaaaaataaaaaactaaataatattaaaagttatctctcctcctttttgtcttcttttgataactgttgtatgtcttcttctttttttcgcatactgtaacaataatgacaaacaaaaaaaaactatccaggacataaataaaaacctaaatcttcattttttctttatgcaaaaccataaatcaaactcattaaacaatcagaacccaaaaatccaagggcaaccaccaccctcaaaaatcaattatgtctctctctttttcttcatgccggcatcaatagcggatcgatgaacattgacgatgaatgcgagccaccaccctccaccttcttgtgcggctcaaacagacctctttcaccctctcccttgctcgcgttgctcttggaccgaggcactacaaatcctctcattttttctcgggagcccaaacaaaccatgtcagatctctatgtttcatcggcatccatggcagatcacttcttctcgctcgtttttgcatgttctgcttgtgtccatgactga

SEQ ID NO: 210555 - DNA, 932 bp, Cannabis indica
aaagtgatcaaaaatgagactttcatgaactttgagtacaattatatattaatcatgataaacatatttaaagtaaatcgaatgattgaatatatatctggcgaaggattattataagaaactaaaaatgacttctttttcttattttacaattatcttttcatggcttggaaagaaattctaagacaagatgatcaatagacaacttcatattactctacaagtagatacttatatattcattaacgtggaccagtgagttttgatacaatgaattggaaaagcaacgtaccattaaatctatatatgatatatccacccaaataggattaattatagtttgtatgtatatatataactttaactttatagtgcaaacatgccagctaaaggggacaaaatccattgttcaaaatcatgaactgaatcaatggctctttcttatcacatatattcataaaatttattaatctgaacctggagatcataaccaaatagatggtaaccacaaatatataagatgaagctggttttaaaataaagtaagatcataataatcatgtcttaaaaagtggtgcatggtggatcaagtacaagaagataataaagttgaaaaaagtaccatatacggtcatagagaatattagcttcaatcatactctcttaacaccattaatgataatcattaatcaaaactatatttttataaaccagttatttgtttatacagataaaacattattatatatattataataatgatctcaatcaaaaccccaaccccaagaaaaaatcttatttaatttatatgaaaaaaaaaacaaagagctatatcgaaggattaaataataaattgaatttccaccttggctttagtgtaaagacagactaagctcacgttgttcaataattataagagatgatgaatagcc

SEQ ID NO: 210556 - DNA, 511 bp, Cannabis indica
attaattagtataatgaccgcgcttcgcgcggttatgttgtttagtctaatataaaagaatgaaaaaaaaaatcatttttttttatttattatatagtcattgacatggggaagggggaatttggattttaacttttgatattatcaaaaacaaaacaaaacaaaagtggtcataggcacaaagtagtggttccacacttctcctctcaaagaggatgtcccaagttcgaatcctcctccccaatataaaaaaaaactaaaaaacaaaaaaaatctaacttttactaattttattttatttctattttttttaaaaagggtaaatctattaaatttgcgtcaacaagctacataagaatagtgagatgacgagcagagagaatttttttttttttttttactagagagaaaacctaatgtatccattgatgatgagttaaatgttcaggatacaagcttttttatctaagcctaaagtgtacttagctagttgatgagtggcagtatttat

SEQ ID NO: 210557 - DNA, 1343 bp, Cannabis indica
gagtcaagtatccaatcatcttaaaaggatgaccctgcaacataaacttccccatcttcataacagtcactcaaatttacattttggtgatctattttatttttagggtttctggaatctgaattgtagtcatttctttgcccattaaattttttctttctgtttttgttcaagaaatagcagtctttcttgaaatgtccaagttttccacagttatagcatccttcagtgtcttgtggccctttaaagttaggtcttcctttgttttgtcctttgattggacccctgctatgactttgactccttcctttcccatgccaaggctttctttaagtagatctgcctctactcagatttagttcaccattagagccaccattcctttctatcttcatctctaagtcctttgattttaaggcagagataacctcatcaagagtgatagaggttcttccatacttaattgttgtttttacttctctgtaagtttctggcagtgcattaagtatgatgatggcttggttctcatcaatgagtgcctcattctaccctgagtttgcaagttcaaatatgcattctcaagaattcatcaagattttgatcaaaggttttggattggttcattttgaaactaaaaatcctttccttgagataaatcttgtttgtcaaagatttctgttgaaactgctcttctagatttttctaaatctttgatgaagtgtcttccttgtctaccaatctaattattacatctgatagattgaagattaggattccagtagcagtttctaagtattcttcctgctgaatctttgaggttccttctggcaattcaataggttcatctagcacccttagcagtttttgttgagctaggagagacctaattttccttctccagattctgtaatcacatgtaccatcaaatttatcaatatcaacttttatgttactcatattaataaaattgaaatcagataaatttttagaaatctcagtttgtgatgtttctgtttttggatctgaatttgttcagaaatttgatcttctttcaggtttcagtgcattcttaattgttaatctttctttcaagatttcttgccaatttccttcctgatattctttcttcagttttcttgatcttccttagccaaatcaagctctgataccactgtaggatttttgactaaactgacctacaccaacaaaacacttaatatcagtatacaaggtcgaaaccgaccttttctttgtctaatttaagtttagacaaaaacggcaatgtttaaaccccacgacactaaactttgtgtcgtattgaacctaggcttaaagacttctca

SEQ ID NO: 210558 - DNA, 900 bp, Cannabis indica
gtttacattactctcattatagtgctcactcaattgaagtttgcacacgacgtattgtctatcacattttatgtgtgccaaataaatttcttcatcatttgtgaagttaggagttccagcaccgaatcctttactagtgttttcatcagatatttattttgggataccaattgcatcaatatactaacatattcagagaaaaactcaacaacctcttctgcaatgtaacattcaactatacaaccttccggcctactatgattttgaacatatccctttaatatattcatatatctctcaaatccgtacatccacctcatatacactgacccacctaactcaacttccctaactatatgcactgtaagatgaagcattatatcaaaaaagatggagggaaaaattgctcaagcaagcataatgtaaactcaatttcagtttgtaatggcttcaaagaagatacatcgatagttttggcacaaattgcattaaaaaaagaaagtctggtgattgcagctttcacatgagtttgagatgttccacgaatagcaatatggattaattgttgcattaaagcgtgacaatcatgagacataagcccaataagtcttaaatctttcattgacaccaagttgtggatattggatgaataactatacgggacttttacattggccaaaatcgcacacacttgatgttttttcatcttttgtaagattaaaacaagcagctggtaataactttctcctttcaccaaatttaacaagaggagctaaagccgttctaattcccatttccaatagatcttgtcgtgctgcaaaactatcctttgtctttcctggaacgtgaagaaaagtttcaattatgctttcataagcatttttctcaatgtgcatgaca

SEQ ID NO: 210559 - DNA, 741 bp, Cannabis indica
attgctcaaatgtcaaatttaattcaacaaatgaatccataatggtcaaaatagggtgggagactttgtcctcaagttcaagaaccctataagtatcaaaacgagatcccgggagctcgggaatagggtacccaacgcataggttgacaaatgacctggtgcgctgggctctgctaatctaattctgattttattttcgactttccgtctagtttttttacaataaataagatccaggaagacaaagaattcaaactcacaacttttcatttctcatttccaacatgggaaactcactcggaaatgaagagtttcgagtctctcatttccgcaaaacatcaacatctctaagaactggtgaccagcttcaccagaacatagaaataggctaagtaatgtaaaaatatcacttaagcatcataaagtacatcccttggacatttttacacaaacccgacgtctaggttgggcgttgggatgtcaatcgaggtattagatgtcaacctgggcaatgggtcatgaattgtcttcagtaaaacattcataactcactcaatattgatctgattgatgcgattcaacttgcatttgaagttaattcaatgttaataaagtcatgttttacacttcaattgtaattctgaagctatcatcccaaaatttcactcccaaggaagttacaaaaataagctccgagttactcgcaacaggacctgccaggctctgaaaaatggtcatcac

SEQ ID NO: 210560 - DNA, 676 bp, Cannabis indica
aataacattgcaaaataatattattatggaaataatataaacttagattttaaaagcatttagagtgggtattagaaacatttagaattttacgaatgataattacatagtcacctagaaagttttttgaagaggttaatttaaacatgataatgataataattttgtgtacacaatatttttaatcgagttattatcttgttgaaaagttgagacaggtcggatcaagactctaactgtcgaagatgtctttaatcttgatattgctacatataactaatcgtgtaagaaaataggttgtggtaaatagatttcaacgtaatccaatgtttgtccttgtgacttatttatagtcatcgcgaaacttaatcatattgaaaattgaattcttttgaatggaaacccactatttttatctacatttggcaagaatagtatccttaaaatgaacactctttttccgatatggtgtccgacagcaatgtcagcatctacgatagtttggttgaatggccggcatattaaacgggtttcattgcacaaaccttcagaaggattaatgtttctaagcagcatgatgggacaattcttttttggtgtaattcatgggggaatccattgagagttagagcatttgaaaattcttccatttaaccgagtactcagtattatctat

SEQ ID NO: 210561 - DNA, 824 bp, Cannabis indica
ttggagttgtacaactggaagaaacattttcggaatctgaagaagccacattatcacaaattgcatcagatccaatagaattaacttcaacagcagcctcggctgttttaagtaattcgacattgctagaggcagagctcaatcttctattaacggaggtacggtcgatgatatcaaccatagaatttgggaagttcctaagtacactgccacaaaatccaccggtgctcctcctctcatcattgaaatccaaaatcctatccatacaatccggctgccgcaacttcccaggccaccgctgcggctctattggtttggaattctctctatgatctccccgccccggtgttgtcctcgccatcctcctctctagcgtacccttcctaacacttggagacggcacaggctttacgttgctaaccggaaacgagaacgattcgccctgaaacgaaaccgataagctccttgtagacgtaaagagcaacttctgaactgcagtcatctcagaacccacaccacctcccccaaaatgcctcaattctaaagaactaggtcgaagagttgctgtccgccttctctccacaaattgagctcgcttggtagtcggcatcggggttatcgaggcggtagaattagacgccctcaaaatcatcggcgacggacatcgcctggaactgaaagaagtagacgaagccgaagaagaagtagaagaagacgaggttgacgaggacatataccgagaagttacttctcgggttttggggcggcgagcaggagcaagaccattgtcgggctcagtaggcagaagaggatgcttggtgggg

SEQ ID NO: 210562 - DNA, 1222 bp, Cannabis indica
gattgagtcattgagggccccatttggtgcgcctgtgttgttccaaaagaagaaggacgagaccttgaaacatgcatagactattgcgccctcaacaaagtgactgtacgcaataaataccccattccttttattgttgatctgtttgaccagctaagtggggcaaaatacttcacgaagtttgatttgagatcagactattatcaggtttggattgcagaaggcgaagaactaaatacgacttgtgttactcaatatgggacatttgagttttgtgtcatgtcgtttgggttgacaaatacaccaactacattctatacactcgtgaatagtcttccatttaatacttaaataagttcgcggtagtgtacttggatgatatcgtggtctatagtgccactttagaagagcatcgagaacacttggttgcggtgttctagaagttgaggaaagaagagttgtatgtaaagcgagagaagtgctcattcgttcaaagaaagtatcaagttcctggatcatgtcatggagcggcgggaggattgacatgtcaaagaaagtatccctacttttctctatatcaaatcgaatcaagtaaaatccatgagacaacaatcctacgttatctatcccttttgtcttccaaattctcctaaaaaaaaccttctatcactcccaaaagagggttatctcccaaaatataacaaaccagtgaagatgcccaataattcacctcatcctcaatatcctctttgtctattttgacacatttttttttgaaaccgagacaaaccactccctctccgatcttattttccaaaggattcagaataggaagtgggaatttaggaatgcttgtagcatcttcaatgaacacgacctcttccaaaattgatttccttttctgctttgaatccattatcgtggagaaatcattccttatctctgatttctttcattccatctcaatcttcgattgatcattgtgctctggatcgtcattatagcatcactgtctaaatcagttgtcgagaattccactgcatcactgccttttctttcctagtaatatctcactttttaggtcgctccttccctgccatggcccatctattgttgaagaaggagaaataacctcatatcgttttctaattcggtaacatgatcataactagttgtattatagttattatgattggtttttttttttttgtttattatttta

SEQ ID NO: 210563 - DNA, 806 bp, Cannabis indica
tggtattatcttattaagctatcatcctatatacattttctttgtttaatatcatctatgtatttaatatggggtatcattgacttgagaacattttcttggttcatagggtaattcagaatttggaaggtcgaatttatttttcgatttaggtcagattatgtcgtaatctatcaagtgggtttatgaacatgggatcgttgtagtatatttggatcttagtttcgatacctcgaatcttcttcatcaactattaaagattcgaatatgccacgcacgacgaattcttttatttatatatgttttttttgttgatacatggatttcttgatatttattttatatgtttcatttcgctttggaagaaattaaaggcggcggcccctgctgttttgttcaaacatttcaaagaaatttaatcactcaatagcaccgttgacaaattagcatataaaagaaaatcattagtaggcgatattaacttaagaatggatccatcgaaaatgtatagaagaaggattgtgttgatcatcaaacattggggaaatatgctgtgttcaacaaacattggataattgttcgactatcatttaacataattgggaatgttttatgttgaactcgttcaatcagagattattaatatttgttataaccctcttgtggacaacagttataatgatcaaagcatatttaagcaaatctattctgcagattactaaaatgccagagtccatagaactatcgacctgcctttactggcaaatgaccaatctcattgatatgaaacatcaattacctacaag

SEQ ID NO: 210564 - DNA, 796 bp, Cannabis indica
ttatttttttttatttttttcacatattttttttattcattctttatttaagtgaagttatatactttgttgcctcggatttttcctaaaatatgagaccgcgactgtgtgtgacacgtggatctcaaggacacatcacccacgaaatcagctaagtcatgtgtagacgggcaggtgcacttcagggagtgagcccctgtagaagcacataaagcatgtctctcctctctaggaggtagaaatacagcaaagcatatccgggagagagagaacctgttcgaacggacacttcgtatttgatgcggcatgggggaaacgtcttagaacgcccataagaggacatgacagattgtgtaagcttcgtttacgccgattacacaataatcaaattaaagggtctagtgacggctccattatgaagaatcacatcaatcaatgaaggataaagattactctcacctaatccctatgatacctacagcataggtcatgtataccctattttacatctcttagaaacttgtgcacatacatggctggcactcaaagataagtaatccctttttagtgattcttaccaaactctataaatacccttgaacaaaatgggaaaatagataaaaaaatgaaagagagagagaactcaccaagaacattccctgtataagaactctcattaataaaaaaaaaagactcgtttactatgacacattaatgcccgaaccacgtaaaaatcacctgcattaattattccacagctctcatcattatctcatctaattggttgtcgaaaact

SEQ ID NO: 210565 - DNA, 559 bp, Cannabis indica
gggggccctctcggatcacagctacttcctagtcaaacacatcaaggttggtaaccgtggaattaaaccttttcggttttgcaattactgggtgtttaaagaggatttcaaatataatgttctctctacttggaagaagcacatggtcacagatctgagttcgttacaccagcaactgtttagggtgaaacacattctgaaaacttgctatgttaagaagaaagaggatatcactggtcagtacaatgaagcccgagacaagttcatagaagctcaagaagacttggctaacagcacgaattgtcattcagctgttttaactgaaaaaatgagccgtgctaactaccaagatgctcgaaaacagtactttagctatcttcatcaaaactctaaagcttgttggttaaagcttggtgatgaaaacacaagctattttcatgctatcatgaaaaagaggagagctgaaaacaaagtgtgttcgttcactgataatggggtggtcgttgatgagtatgacaaagtggttgagcatattgtaaaccacttccgcaatttcatg

SEQ ID NO: 210566 - DNA, 602 bp, Cannabis indica
cttaagagagacaaagatgtacaacctattaactcatgcattgacgagaaaccatttcacatcagaagaaacaatcataagggtggcagaaataataccaggcggggcatcaacctagctacgtataagaagatagcgatgagacatgttgactgttagaacacttagcatataatatacattatacaaactaagcgtaacaactggttgagtctaaacaatgaatagcaagatttccatctcgctataggaaggcatactcatggtaccttcaataatcagctttagacatctctcaatgagatccactattttgtcgagtcagctctctcaaatagaagctgacattcaaatgatgttgactgtggaagttcaccttgtcaccaataactgcgattgtcagatggggcgttatgtcttcaatagcaaaaatgacgatatttacattattaacctcagaaagacatgggaaaagctccagctcgctatctgggttattgttctatcccagcgagatgacccagcaagatacactttgcagtgtatctaaatccacattaacattgacccgataaaagcggataaataatagctgtgtgatt

SEQ ID NO: 210567 - DNA, 726 bp, Cannabis indica
agtttgataagttgcttcgttttttggaggagcttgactttgcttttcactctcgtttgattttttgagtaaatgactcttaaaaaaaatggaagagtttagctattttttaaaaaaatacattcaacctatttcactttttacattttaaaaattaaaataaaaaaactacataattacgtgtaataattttaaattaaagttataagtataataaaattttaattataaaatcatatgtgtataattttaaattataaagagttttactatgaaaaatttaataattttagagcaagaaaaaattacaaaaagatccttatttaataataaattacgaaaaattaattaataattataaataatttaatttaattttaaaatataattaatctttattaaaattttataaagaaataaattattaagtaattattaagttactggttaattattatttatttttattaaatttttaaattaatcacaactattcaatgataatttaattactaaaaaaaatgtaaccggttatatatttaatgtaagtattaaaatttactccataggaatatatatatttggtataccttttttgatccaattcaatatctatatatatatatatgcaagtatatctggaacaaaaatgaaatcgtaaggaatctgattcctccgaatgattaaacacatttgaatccaatcatctgtgttcgatataaagta

SEQ ID NO: 210568 - DNA, 745 bp, Cannabis indica
ttacaaccatctaaatatttggcaatagatgaacaagttgcaatgtttttacacattatagctcatcattgcaaaaatagagttattaaatttagattcatgagatcgggagagacagtgagtagatattttcataatgttttacatgctgtcatacgcctacacaaagaattatcagtaaaacccgagccgattcctgagaactccacagatgaaagatggaaatggtttaaggtattttatgtaaaattttaattagttatggaaaagtaagttattgcatatatattataaatttaattacattatttgtttgttttggtgatagaattgtttaggagcattagatggaacctatattagggtgagagttccaatagaagatagacctaaatatcgtaatcgaaagggtgaaattgctactaatgttttgggagtttgttcacgagatatgcaatttatatatgttttacctgggtgggaaggctcagcagctgatggtagagtactccgcgatgctttacttaggaatcatggtttgcatgttccaaatggtatgtttagttgttcataggatgtcatataagtattatttataacaacttcaatgagaagtttatttatgttgtttataattatataggtaattattatcttgtggatgctggttatacaaattgcaaggggtttcttgctccttttcgtggacaatgttaccatcttagtcattggaaggagggtcatc

SEQ ID NO: 210569 - DNA, 877 bp, Cannabis indica
agagaaagtaggtcggagtccagcattagggtctgtgtctgggaccaagacgggatccaggtctaggatttaggatcggtgctgggtcgggtccaggtctggagttcgaagtctagagttcgagtttgggtttgggtcttgggtcggggtcggggtccgggtccatggtcgagacccaggtcgtggttcgggtccgagcctgggtccgtcgttggggttaaggtctgggttcgagttcgggtctgggtccctgtctgagtccggggtccgggtcagagtccgatttcatatattaatgatagaaaatacaaaaagagtataattagttttctttttatttttaaaattttcaaaatttgtttatcaattttaaaattaaaaagtcaaaacatttttatagaatatgtttttttttaaaatatttctacttttctaattaaaaaaaaaagaataattagtatttttatcccatgaactttcgacactatctgatcccgcctcctaaaatatacactttttaaaaatttcccttaaaatataacaactatataattatgccacttatgttagatttcgtttcttttactgttaaaaattaacatttttacatgctgaaatttgaccaatacaaatatttttccctttttattaaaaaaatattaactttaaaaattataatgttctattaattctgaaattttttaaaaataagtttacttaaaaaacctaaattattcttacaaaaatattttcaaactttatgttatctataaacacgaatcttaaaaattaaaccaaaattatttaaaatttaataaataatttaaacaaattaagattttttaaagagaaattcaattttatttatatttataaa

SEQ ID NO: 210570 - DNA, 964 bp, Cannabis indica
tcatatggtgtcttgaacaagatgttcgctgtaggctccattgtctatcatagttcaggccactgttttattagctatctgtacttccaccactaatggatcattatgcgggtaagaaaactttgacaacatcatcttcattgaacgttatagtgggttcccctacccgtggaatttttggtttcgctttacctttctacgaccgccagggaccacttctttttgctcatgtttgtaaggtttgggcatacctttctcgagctttgcccaaatctccagctgtatacgggcctccaatgatgacttgcaaatgtccatctactgatggaggcagtaatgcatcttggttattgtctacttgggtggtccttttattctggtcggccttgacatacttttacacatgcgggttattctttctaattaggtaattcaatttcccgcttgcattcattggtgtcatggccatacccatgaacgacaaaacttggacatgtccttcttactaatgtcctttttcatgggagcaggtttcttctacggaactactgactgagtggccatatagatggtctctaaattgtcagtcaggacagagaaagcagtgaatttggaaggattttctctaggggtctgttcgactttgccagcgaactttcccctttttctattgccttgtctgttgttgttgctagatctcttactacctgagcttgaactgcttgggtactggggtttttgaacgaacgttccaactaagggagcttatgattggcccagtttagggtcgacgtctgctcgctgaatggcttcttcaagcttgatgaaaccatctacgcagtcgagaaagtcactcatagaatctactggaccacttttcttgatgtccttccacagctctcggagaatctcgatgcccccagtatggcggctaatttccattcttcaattaatcgtgccactt

SEQ ID NO: 210571 - DNA, 533 bp, Cannabis indica
attaatattatattatgtgtgttataggtggcaagatttttatcgcactttattgccggattgcgattataaggtaaatatttattaacttgatttataatatatatgtatatattttgtgttttattattgaatatgtgtttatatatattgtgtgtatatatatattgtgtatatactatttgtgtattttgtgtaattgtattgtatatgtatttgttgtgaatgagaaagaggtagtaggaatttaattagtttagaattaaagtttttaaaattatgtttgtgtgatacataattgattatatatgtatatgtatatgttaatttttaaaaaaattaactatagaatttagtaactagtaacttgttacattttttattaactagtaagtaatttaatcattaaaattctaatttggttgtatattgcattatattataggttgtgagctaatatttgaggttcgacatatttcagtgttgatcggatttgcaattggtatatccattccctaactttttgttattat

SEQ ID NO: 210572 - DNA, 602 bp, Cannabis indica
ccctaaacaataaagatgaaaattgctttagacaaattattgatacaccttcaaaactgttatttgatgcaactgaatctggaaatttcatgttcttgtttgagctcattagggtttgtccggatttacttatagaaagaaatgaagatgatcaaacaatatttcatgttgcagctctaaaaggccataaaagaatcttcaatctcattcatgaaattggcttcaaaaaggatattattacatctatggaagacaaatttggtaataatttattacatcttgcgggaacatttgtggcttcaagtcatgaatatgattatgggatgagacaaatattacagcttcgacaagagtttgaatggttcaggtaccttagatatttatttgtaactaaaagttaaatttagatatttatgtcgcaaattactcaattaacaatttaacacccattcaaaattaaaaaaaaaataaaataaatttaacactagacgccaacaaggcatcttgatttcaaagttttaacgttattctttaaaatcaatcagcaatgaaattgcgccacgtaagcatgacaaatacgacactcccactttccttttctt

SEQ ID NO: 210573 - DNA, 624 bp, Cannabis indica
agatgtttccatttcacacacactcacactcacataatactatagttgttatcatttttcatatatatatgtacttcttgttggaaaaatagtcgactcaatatggttattctccattgtaaggcacaacgggtactttgtgaaatctgaatcttttttcttcaactccttgtagaagtaaaactggaggtcatcttctatgtggaatggagggtagttgtcttttccttggtactctatttttaggattgttgatttaagatctatcttcagctcattacatatcattccaacattattgggaatgaccattccgcgaacttgaaagttatagtagtgcaatattagaattaccatacagatacaacatggtgaatctagttgagcttactatctgttttctgtatcttctgatggtacgtatagttttatttcatctttaatatatatgaattgagatggttggtttgccataataaccacaatcaaaataaacaaaaattaatttctatgccaatattatggcatagctgataacaaaaatcttcccaaataaaatatacaattacacacaataaaatagtacaagatttgatagctcaagaaaaaattctaatcatcata

SEQ ID NO: 210574 - DNA, 583 bp, Cannabis indica
tctatttttgaaaccttctctctctctctctcttaaatttttgtccctcttagtgattgagtacgtgccgacacataacaagtctagtactcaatcatagtatgtaagattgtgaagaatccaacacctgaaggagtatcgggctcagatcttgataatactttgcgacacaaaggaacaaaggttagagatctgagtggaagaatccaacacctaaaggagtatcgggctcagatcatcttacgatttagatttatacttttaaaataataatattaagtgtaccaatataaatttgacacatatacaaaagtatacacataaacagtctatattgacaactaactgtaaaagatggatgacaccttaaatttgcaaatagtttagtagtttagagggttttaccgtcaaaatttgagcttagagggttaagtgcaagtagagtgatagttgaaaaggtttaaacataaaaaactttttttttttactattcttacagattttgtttattccaattttttttatttacatttctatagaattcttttacaagttttgacttgtttttttttaagaaaaaaaa

SEQ ID NO: 210575 - DNA, 930 bp, Cannabis indica
atatttatagctacattataatcacctttactaaatttatttaattttgtgggggcttttctactattttggcctataattattaaataaaaaaatttacatttaattttttaaaaagcaatatttttgttcgtgggaactatagcccccacatcaatcttaatgggtccgtccctggtagtaccctataataaataccactaacaagaacaataagtaaaagaaaatgagtaatatgagataaaagaagaagaagaagaagaagaagatatatttacttgaatgtgtaatatggtatccctactgtaaatgacatcaaatgaattatgaggataagtttttttggttgcaatcagcaacttcaaattcaacagaacacttaagcccagtggctctttcaagagcaagagatatcatattaacagaaagatcaatgcccacaacttcaacatcaaaattctcagccatatagaagtcacctcctccaattccacacccaacatctaaaactctctgaccaggtttaagctcaagctttttcacaaattccttagttgtttctacacaacaaaacaatcaaatataacaattgttaatgttctttaactcaataaattaagagcccatggtttttataaataaaacacccccaaaatttctttctttcagacatttcatcgaacacatattaagtaaaaaatttgtgttctctaaattattactaatattaaatatttcccatcaactttgaatgtgaaatatgacattttccttaaataattaacaatgttactcttgaatgatgacagctgtcatagtttgcttctcgaatttttactactattaaattgtgatctttgtttttaacaaaattttgaggagcatgataaaagcttggtagtcgtacttcagggaataaaattgctaatt

SEQ ID NO: 210576 - DNA, 693 bp, Cannabis indica
ttatgactaagttttatgcctcctgcttatttcctctgatggttcttgcaacaactccggtttggacccctctgccggaggactggatcaaaattaactgcgatgtcaaagttggtggagactccatgcgcatggcggccctagcgagagatcacactgggacggtggttcgggccgttatttccagactcaacttcagagacccgttgattggtgaggcggcggcgtgtcatcttgctcttgattcagctcgcattagaaagcataactatgtcttggtggagagtgactcagaaactgttatcaaagcgctgaaaaggtctcgctattttttgaatattgataattatgtctccatctgtaatcaactctctaagtgttttttatcttgtaatttttcttttatttctagaggttgtaatttcgctgcccataatgtggctaaatgggccttgtcccaaaatatttcaggtttcgtagaggtatcctcgataccaaagactatcatttgtaatgatcgtgaggtctaattttccgatctatctaacgctttatttttcaaaaaaaaaaagttttatataaattataatttacaaagaaattttacaatttataattatttttataattttatataattttatttactgtaattttatatattaatatataaattttattaaaattataatt

SEQ ID NO: 210577 - DNA, 1281 bp, Cannabis indica
tatgtgcaaacctttaaatttgcaaagtttcttcctttaaatgactctctatgactcgaagcagtcgctacagtctcaattaaagcacaagtatgactgaaactgctacaatacatgctcgaagagaaacctgataacagacccatcgaaagaattagcaatcgctaataatggtgtcaacatttaaaaggacagagcattatataacatgaacacttgaatttctgacccaaatgaatacagaaacaattagcctgacattttcattctctacctaccattgcaaaaattgggaattttctctaccatcaattaaacaagctgaaaagctgtaatgaaagattaagttttgccaaactcaaagtctcactctcatagcacattcattcatagataatggcttaaaacttaaaactcggatatttttttataaaaaaaataattggaaggtttaatgagttagtgagtaattagtggtagtggagtaccttatagcagctggctgatggcagtgaattcaagagagagagagagagagagagagagagagatgggatgccgtggacggagaatggagtcgagtgatgagatttagagaagaggagaggcgaaccacagaggttggtggtctgaataggtggaggcaggaacatttggttatggcgactgcaactgcaactgcaagcgagagagagagtgagagaagcagtaggtgtcactcttcactccgatagttgtttttacctttttttttgttagttttttttttttttaaatttaagcgttctagatagaaatgaagattatgattcgcagtaattacaaataatatttttggggatgtataactccaacataacatatacattgtgagcaagggtctacttagtcatattaatggacaataaaattataaaatctaataatatgagagaaattacaattccaaaataagggagatattcttttacaaatgtaggaagattaggactgatgatgcagaatcaaaacaattaaagaattaacaatgacaagatttataaacattaaacatagatcgaggaaaaatagggaaaaacagagtaaacaaaactagaaaacagtaacttgtagaaaataaagaaatcaacaccaagatatatactagttcaaatttgatatatcgatgtgatctatgacactgctccagttctggaacaccactgcaatccttctttattgattgagcaagaatagatacaatataatcaagatgagattctctattgagttctcacaaag

SEQ ID NO: 210578 - DNA, 998 bp, Cannabis indica
agtacgaccgaactcatttctcagagccaatttccttaagatattatgcaatcgcaacattcattgcccgaatcttctcaaattctctatgaaactctatttttgaatacgtctagggaacatgtataaatatgattcgtgaagatatgagtcttgaacttgtggttgacgttcatagtaatgtggtggtagtctgcatcgtagtgtgcatcagagaacacgatctccaaagcatgaataatgttttgatgcatatccaacacaaaggctaaattctcaacatcaccaatcgcttctttcaattttctcataaaataggtccaagagttgtggttttcgctatcaactacagcaaaagctatcgggaaaatatggttgcttgcatccagtgccaccgcacacaatatttacctaccataccaagttttcaaaaaagactcatcaacacatacaacaggccagcaaaatctaaacccacacctacaaggacctagcaagaagaaataatatttgaagcgaccatcctctatcacaaaattcgtgatggtacttggatttctcaactttagcatgtgcaagtaaataggtaattttgaatatgaatcttcaagtgtacctcgaactaggtgtagtgccttctctctgcacctctaagccttttcataactcatttggatcctgaaatccttgtgcatatctttccttatattagaggtcaaatgatccaaggcgtcagttataaatttatgcttaattaggtgggcaactatcaaatgtgatgtttgacggttatcttttcctagaagactaagggaacatgtatgtacattttgaaatgtaatcacctcaaacatgttagaaaatacgttcttcttcgttcttaatctctacccacaatctgtatccttacatgtaacgtaccaaacaacattaccatacttcctaacgaagtaatcgaaccatttcttcattgcacaacaaatgttctttgactctaa

SEQ ID NO: 210579 - DNA, 798 bp, Cannabis indica
ttatagcaaatttaaagacttatatttttttaaaaaaatgaagctcggtttggtcggtttaaaccgaccaaaccgtggattaaaatggccgatttttttacatttatataatgttctgtcagttttcgaattataaccataaaaactgaaaaccgaattttcgattttttgtgtgtaaaaaacagacagaaccgaccgttgctcacccctaatccagcctcagatcttaataatactctgtgacagaaaagaacaagggttggagatctgagtggaaggagtcgtattattctgctgcactcaatgtaaggttttctaaactcttatatatttaatttcattattttagagattcatatttaagatgttaattcaacaaacttgttactaaatctagatcgcatatacaaaaatagggaaatttcatatgttgtgcatcgtgtgctaactgtaccatgatgaaaaataatggtgcagagaataaaaaaggaaaagggagaattctactagctctagcatgggaattcctaaagatgaaaactaaagacaacctggggaaaattcccccaaattgcagatatagtgccaacttcgcattcatgcaagcatatcaccaaatgaagttacaaaaataaaacaaggaaaagtcgaagttcttgtggctagtagacttacaaatagaagaaaatcgagcagttacagctgtggtgtgaagcgcctgtaaatcaagcttgacaatgtcgaagaaagagtaaaagaaaatctgggctacctagaattttgacttgattgaggatt

SEQ ID NO: 210580 - DNA, 580 bp, Cannabis indica
gcttttttgacatccaagtaaattatgtctttctcatgaagaacacaaatccagtagtactctttttattgtccaagtctccactccaatcgctatcactatatccaactatctcataattgttagaagatgaataaaatagcccataattggtcgtacatttgatgtatcgaagtattctctttgcagttttcaaacgagttgttgttgaagctttcataaagcgactaacaattccaatggcatagagaatatctgctcttatacaagttaggtagcacaaactttcaacaaggcttttgaaaagagttggatctacttttcctccttcgtcatgctttgacaactttattccacattctaatggtgtgctaactagattagaattatccatcttgaacttcttaagtacttccttagcatagcctttttgagtgatgaaaataccttcgtcttcttgcttcatctcaatactgaggtaataaaacatgagcccaatatctgtcatctcgaactcttttgctatatctttctttaactcctcaaacatatacttgagttgcttctagtgaagatcaag

SEQ ID NO: 210581 - DNA, 760 bp, Cannabis indica
acccaaaatttgactatcaactgacacatgtactttaagaggaatatgaattaattcaatgattataatattaaattgcattattaaatgcaacttgaatatctcgtttcaataaattacagtttatataaagattcaaactcgttgtcatataaacacatgcgagataagaataataactattaataggtaaaactaataagataatatgtccatctcaagatagacagagtatataatagaatttttcaagatgagataacaaagagcttgcaactcattgacccacatatttgtacatatagagaataactacattcatccatctcgccctcaatacgacaaaataactacctcgctaatatcatcataatacgagaacattatgatgagaagtatatctatacttagcattttttcctatgaagacggtgaagaaggacaacttgtatttagcgagaaacattatgcatggtcagcataaccgtttaaagataaagataaaagactggttgggtagttattgaatttgagagaaaaaaactatctattagattgaaagagaaaatttgtactctgtatccagattaatcattcatagtaagatagactcgtggagtatgtagattttaactacaaaactacgtaaaattatttggtattcatttattgttattataaactctgtagtatatttattacataaaaggttcatatatttggtcaacataaatctacgttaatagagataatcatctca

SEQ ID NO: 210582 - DNA, 1132 bp, Cannabis indica
aaagttaccttatcgataataaacatggcaatgctctaaatatcgtaaaaattggaaaaactagggttcctaaaactaccctaactggtagacagattccctaaccgaaattttggttcagtgaggtttcttggggaccaaccgaaatttcagttcctacaagtcccactgaaccagtcgaccggttcagtgcaggaaagttttaaaatttcataactcactcaattcaaccccaaattctagcaaaccttccaaacctgttatttataccctaaagaacatattcaaggcaataaatgaccacaacatggacagaaacaaaatccaccatgtgagagcaaagtttgagctcttaatctcaaaccttgaacaaatctcataaacaaccatcaaaacactacaatctaacttagataacctcaaattcatttcaaaagacaaacccaagcatcaagaactaaaaacagcaccctaacacacaattcatgcaaaaacccattacttaaaactcaagaaatcaaaaggaggagtgctaagaacttaccttgagcttgaatacacctaaagcttgctggaaatcactagatttgatgaagaaacatcataactctagctggttctattgggttcgaagaagagagagagcttggagagagagagtgtgtgttttcttttatttgatttttaaatgaaatgaaggaataaaggttaattttatctaactaaaatcaatttaatatcagcataatactcccaatcaaagtccactacaggacaagaaatcccttaggcaaaaaatgaccatttttccctccacttagccaaaaagtcataaaattacttgggggtaatttggtcaacactaaaatctcaactaatcccgataattccaatgtctaactatattgcaccgccatactaaatgtaaagaccgcttagtttaatttggaaattagcagttaatcacgtttaattatgaaaattatttatagctatttaaataattatttatactgttattattgaattctgagatgcattttatgtcatttagtagttttcataattttgcatttccggtgcccggtacatggaactcggtgtttggctcagtaaaatcacaacttagtat

SEQ ID NO: 210583 - DNA, 716 bp, Cannabis indica
cttctaaaattgtcattggacctacttgatgaaaaatgtgttgagtcccaaatcaccaacgcagcatatcaacaccgagttacaagatatttcaacaaaagaatcaagaaaagactattcaatgttggagacttggcgctaaggcgagtatttgaaaatacgagagatgcatatgcaggagttttcaacccgaactgggagggtccatatgtcatcaaggcagtagttggaattggagtttacaaattggctcgacttaatagctcgctaataaagaactactggaacatggaacatttgtgaccctactaccaataataaatgatgtaactcacattactgatgtacaattttaacttcaatcacgaataaagagaatccttcttatcatttaagtaattacaaagtttctcttttaaaattacttaaggggcatttatgtatgattaaccagaattcatctggaaatacatggtataatacaaacccaccatttcaaaaataaaaaaaaattaaatataaatataaaggttctcaactaaacctcttttacgaaagaggggtcaaactattaaaacttcctgaccaaacatttttgacgagagaggggtcgaactgttatagcatcctgatcaaacctttttgacgaagaagggatcaaacaactataatttctgattaaaaacctatccaatgggaaaggaaaatcaaaagtt

SEQ ID NO: 210584 - DNA, 635 bp, Cannabis indica
tctttaaaactttagttttttttaataatggggattcaagaataaagatactttatctgaagcgatgtaaaaaataaagaacaataccgacccagaaattttactttgtggggtttatttatcatttaaaaatatttatacctatattataattattcttactagatttatttaattttatggagcctttttttacgattttgatctataattatcaaatttaaaaaattacatttaattttttaaaaggcaatatttttactaatacacttgggtccgtccctgacaatacctatttattaataatggaataaacattaaattaatttttttttgactattttcaatttagcccctcattaaattagaaattatctaattggtatccacatattaaaattatgacaatcatattcttaagttataaactttattccaaaatagatcacataaatttaatttttttatttaatgacccaatacacatttttatatatacaattgtgaccctaataatttttaacacttattgctaaaaaatttatgttatattattattggtaataattaagtattgaattttatataatttaaaaaatatcattaaacaaattatagagtatcacttataaaaa

SEQ ID NO: 210585 - DNA, 676 bp, Cannabis indica
ggagatataattttcactctcatctgcatccatgtcaacagttgcttcttcatctgaatttgatgttccttcttcagcttgtcccaattctatacccaattcgttatgagttgatgtacttctggttgaaaaaaaagtcggctcaatatggttaatctctgttgatgtacttcttgttggaaaaacagtcgactcaatatggttattctccattgtaaggcacaacgggtactttgtaaaatctgaatcttttttcttcaactccttgtagaagtaaaactggaggtcatcttctatgtggaatggagggtagttgtcttttccttggtactctatttttagagttgttgatccaagatctatcttcagctcattacatatcattccaaccaaggtgttgtagttgcaattattgggaatgaccattccgcgaacttgaaagttgatgtaattttgattttcatcccaatgaccactatgttggattacaatgaaaattttatccatatcctgcatccagaaaagatagtatgttaatattacaataaaaaattgatgtacttttttgctcataaaaaaaatcagaaatataatgagaaattatgcagtcaacattttatttgtttaatatttgaattttttagcaaatggaagaaatcaatattagtatgtacca

SEQ ID NO: 210586 - DNA, 575 bp, Cannabis indica
aggccttaacttccttgttgctatgattaggcaattcgtaagtttttctatcaatgggaatctccttcagctgagtcttttgctgatataatagagttgatggtggactttgttctcttctctaatcagcacgacactcataacaaattttgtaacaactatgtatactcctaactcttctccgtccacggattttgagagtatgaaaggttttgcaagttgtctttttattcctctgtccattcaaatttcttgttacctcgaaggatgttgaagaaaggagcacacttgtatgttgactttgaaacaaatctattgtgtacggctatccgaccagttaagctttggacttttttagtttttgttggcaatttaatatccagaagggcttgtattttctctggattggcttcgatgccttgatcattaataataaaaccaagaaacttacccaagttgactccaaaggagcactttaagaaataaagtttcatgttgtactttttgaggattttgaagcattcgtctaggtcctctatatgcccccacccatcttggattttacgagcatgtca

SEQ ID NO: 210587 - DNA, 525 bp, Cannabis indica
ttaaaataaaaattttaaaaaatcgaatattacacgaaatggtaaagatgtatgaaagtcatatcataggaggctacggttgttaacccccttttagctacccctaaaatggcaacagttaggagtgttcattggatcacatctaatatttttatgcctatccacatccgatccaattatatattggatgttaaattttaccatctgatctgatctaattgatttcagtcatccaatcgatccaacatccattggatgttggattggatcggttctatccgttggatgtatttcatgtatatatttattgatttaattttggtttattcaatattttagacctagtatttttggatcgatcggatccatccaatattttaagtccaatatgtattggattagactggatctatccaattcaagaaaaaaatagtaaaattttaatgttaatttttatgtatacatatatattttatgtataatattataaaatttaaatacccatccaaactaaatgaaatacta

SEQ ID NO: 210588 - DNA, 775 bp, Cannabis indica
tgggttttcatgttgagaaacaaaagtcaagctttggaaacattcagcaattggagaaagctcatggaaaaccaaacaggtagaaaactgaaggtgttaaggacagacaatggattagaatattgttcagattaattcaaggattattgtgccaagactggaatcaagagacacaaatctgtgatcaagacacctcaacagaatggcttggctgagagaatgaacagaaccattctagaaagagttagatgtatgctgaagggtgcaggattgcagaaacacttttggggtgaagctgtgaagacaacatgctatttaatcaacaggtgtccctctgttgcattaaatttcaaaacacctcaagagatatggagtggaaacaagcctaactatgatcatctaaaggtttttggttgtcttgcctatgctcatgttagacaagacaaactagaacctagggctttgaaatgcttgttccttggctatccagatggtgtgaaaggctataagctttggtgcttggaggatggttataaaaagtgcatcatcggtagagatgtagtgttcaaggaaaatgaaatggcaatgaaacctggacagaattcaactttgaatgaaagggtacaagttcaagtggatccaaatgaagcaagtcaagacattgacacaccagaagcatctctaccagaaactggagaaggacaaattgaatctgatgatgacaatcatgccaatcaagaatatctgaagagctaccaacttgcaagggacagag

SEQ ID NO: 210589 - DNA, 694 bp, Cannabis indica
acctaaattttgatttcaggtgttccgatcaacctcagtggaaataaatgctggtaatcgaaggccctaagtcatattttctaaaaaaccaataagtgttgccctaacactttcgaggacataaattaacaactaaatttttttctattgatagatatcatggcagtaacctaggtattgacaaaacactcaatcagaatcctaggaaaaatcttaagatggacccccaaattttgcctaaattggatggcctaaaactccactatcccattttaaaacttccataactcctaaaattctaagccaaaccttacaaaattttgcagggtatctaaaagcatcacaatgaacatttttcatgaagaaatcccaaaaaaattctaaaaaaaaatcaaaataaatggccgtcctaaaactacctaaatcagatggcccaaaacctccctgtccgagattggaaatcccataactcatccaatcctgatccaaactttaccaaactttgtagagaacctaaaaacatcataataaatatatttcttgcggaaacattaacccagttcccaacaaaattcaagttatcacaaccaagttaagtttgagttctttgaactcaaacgtgtataacttttgctacaaccacctaaaacaattcaaaccacttcaaaaccgtcctaaataaccttaataatca

SEQ ID NO: 210590 - DNA, 785 bp, Cannabis indica
ataaagcataaaaatactaaaacacaaacaaaatagactctaaaaatacataaagataaacttaacaaatttcctcaaacttaacctttacttgccctagggctgagcataaaatccaaaaaaccgaaaaaactgttcaaatcaacctaccgaacaccgccaaaactgaaaccgccgaaatcgaaaacttgaaaaaccgccaacagtttaaaccgccagtagatggtcggttttttttttttttgtaacaaaccaaccaaataaaccgaaatcgaccattatttttttttatatatatatttattttatacattatataatataaatatatatacgagtatggaggttagatttaaatcaaggaagatcaatagatcatacttccagttccaatggggtctagcgtttgtgagatatggagactagttctattttatttgtcttttttttttcttttcagcttgattctttttgctataatgtttcacccatgagttagcttgaactattttattatgaatgtggtagttatatcatatgcaatgattgcaataacattttatcttataaatataaactcttgacattacttttttttttgagataagacattactcattttatgtctaaatatgctcacattcattgtttttattttctcagttctataattttatttttggtgatcaacatttgttattactgtactcatcataacgtattacaagttcatgcatgtaacatgtacaaagtacctcaaataattttttagttattataaccac

SEQ ID NO: 210591 - DNA, 624 bp, Cannabis indica
aaaaaatatgagtttaaataccacataacgatgatgtaaattggtatgatacaatataaagagtaatttgtggcataaataccttaatttatcttcttattatctcgattttcgaccacctaatgtcgcatgcttacgtggacaatatcaacgctaagtagcagtacaactcaccaacaatgaggtcaagtcagcaccctagccaatgggggtctcgacactcaaacaggacgacaagtgacagattagtcacctcaaaggcgctggccagccacccttggccgaccctatggccagccagcctctagacaacacaaggctggactggccagcctactatctgtaggtgcttagttggctaggattggacttgccaggattctggtgcatagccttacataaggactacaaaccggactgcaaattgggcattaataacccaataaagtagatgaaaaatgtctatgtttgaagggcattttagtcttttgtatttaatcaatttaatatgtaaatatctacttattttatttgtaaattagggtttaagatctccgatataaaaagcattaactcaaccttaattctaagtctaataactcactccattctctctctctctct

SEQ ID NO: 210592 - DNA, 510 bp, Cannabis indica
atttatgggttacggtttttatttgaaatgtatataatctttttttgcaaaacgtaacctttgagtggaaatatagttgattaaagttatgattaatttgatttcttgaaatttgatcatatccaacgaaaccaattttttaaaaaatagcatgaactgtaatggccatgagttttgaatgtgatgatcatgataatcaatatttggatcaagatccacgagttttcctttttttttctcagagttatataattttgctgttatttatttttgtttattttttgggaattttgttggaatgtttctttttatttgagaatggaaatgggttaaatctgtgttggtgtattcactttataagtttgattttcccattttgaaatgtttggactattttgtttttgtgttttagttttggtagaatgtgtatatgttttagtttattatgaatagtcagaaaagtgctttttattgttatttctgttatagtttagtttacagtatctttat

SEQ ID NO: 210593 - DNA, 645 bp, Cannabis indica
aaaaagagaaattggataattgcattaggaagtaaaataaaggatagttggagattataataattcttgtttttattattgttatttcattaaattttaatctttgtcttgtcttatttactttctgtccaacaacttttattaatcaaatagaactaaagaattaattgattggtaattgataatcaatcctcatgggaacaatactttatttattattatattacttatttcaattgtgtatacttgcatatgatacggcgcttcgaacccaaaccttgaacccgaacccagacctaaacctaaacccaaacccagacccaaacctggacctggattttagaccttggccctaaactcagatctcggaccccgacctggccctagaccccgacagatcagacccggaccttgaacttggacctcagctccagacctagaccgagaccccaaaccttgaaactgttcccgactcttgactctagccccaaacccaaatccctacttggatcttagaactcgaccttgtccctgacccggaccccaaaccctcacactaaccccaacccccaaaaccgaacccagccccggccctgggcacgaccctagacctcatccctagaccctaactaaataaaatcaaca

SEQ ID NO: 210594 - DNA, 812 bp, Cannabis indica
atcatcatttcacttctatatttggacaaaagctatagattttgtatctatgattagcgctcccactcaattgaactaccttgtccttaatctatacgtcacaagaagatccattggtcgactttaacaaacagatttaagaacaaaaatagtgcaactgaactagaacctaaccatctcaggattaagatcatttgatctaagatcaattaggtgatattgaattgaataaatattacggtaagtttattatatcttacccaagttcaatatcggtcccttccgatgtaactccatacatccaacccaagcttactttaaccaatgctctggaaaagacataacacttatctaaggtgcaagtaaactacattgagattatcctatcagttaaaccttgtgtactgataaatcatatgaatacatttaatcacccaatcttgattactttccgatgtgttgacaacacaataaacaagaatatcaatgtgataaggatttggatgaatttataaatcaaataaataactaaatgatcacattaaccgaataacacattaaataagtaatgaaaataaatctgtttctttattgataaatgaatgtaaaagattacattgaaataaattttatttagggctcaaagcccaacacccaggatcctgaaacctcattttgatgtccgaaaccctaacgggagaccactaccactagttggagctgaaaagtggcagtgttcgatcatggcttatgggatgccatggatggtgtttcttgattattttagtcatgtggatcttagaaaactactt

SEQ ID NO: 210595 - DNA, 673 bp, Cannabis indica
ccttatgtaattattcctaatatttttaggctttgtgacccatttgtctatgtatatcggtacgtagttttcttatttaattaattatttgtaatagttgttatattttcaatttaatttaaatatgcttacacttttatatgcagtttttggtgaaagttgtgtgatttactattttaattatagtctcggcgaaaggattttaaatggttgggtattaatttttaatttatttattccttaaaataatattaatgttaggtggccaactaaatttttatgcttttaattatcttatttagttttgtttaaattttatttatacaaatataagacttttgaattttatatgttttcctaattattcttgataatattaatttatttatatataattatatatgaactttatttgtttcttttactagttattcaaatagttttattatatgtttaaattatatatgagaccacactgatttttgcattacttttgatagttttgataccttttacggcttttgtgccatttattatggtttgttcctacttgtttaagatagttttgtggtatggtcaatgagcaaggaaattgatccattttgtgctcacgatttctacttcaacgactgtttcacttttaatagataagtatttcaagtcttttaagtcc

SEQ ID NO: 210596 - DNA, 483 bp, Cannabis indica
aaaatataaaataaaaaaaaaaaattgaaatgaggacatttacttacatagtcttatgatttagggccacttgctatatttttttgaaatgaggacataaactaacatactcctatgatttggggccatttactataatttcccgaaaaaaaagccaaatgcaactagaaatgggaagtgaaaaaaaattactacattctcctaaaaatgtgactgaagatgacatggttggtagaatatacaatatattggttagtctcacattgctaaaaataaattgttatatatatattatatataagacaaataatttaagaagattttcgaaaatatttttttatcttttatttataattttacagtctaaaattattattataaaaataggcttgtaattttaaaattacaaaaatatatttttctcaataaataataagaaagcaaaaagaaatcaatatgatgacaattataaatcaactataa

SEQ ID NO: 210597 - DNA, 776 bp, Cannabis indica
gtgccaagtaaatatataaaaatagaacaccaaaaattagaagaaaaagaaatataataaaaactttaaaactataaatggacacaaaacttaggtatgtcacactatatatataagagttatgtaaagaatacaaataattttttttaatggaagaataaaaattgttttaatagttaataattgtaagagttacacaaagaatacaaatagttttttggttataaatttttgctaaaaattattcattataatgaataaatgtgtacatatttttattgttattaatacatattatgttttgcttaaaaaaagttaatatttttttattattattactaacaattgtaaaagatcaattaaatgagagaaaaagagaatagagagattaggaaaaactacccatacatatagccatgtgaaatgaaagaggtcaagaaatatatttttcaatgagagttttttttttttttttgtaaaacaaattattttcaagaatgaaaagtcactaaatttctttaattaaataatattaaaaattagcaaaaatttaaaaatgtaaaaaaaaaattgagagagtagataagtggaaggaaagcttatagaaaatgtcatgtcatctattataacaacacaattatataactatataaactattatgtaggtggtaagtaatggttttagaatactatctaggtctttagtttaatttttttaatgatatcttttaatttagtatacatgttaactaatttagaatactataagactttga

SEQ ID NO: 210598 - DNA, 592 bp, Cannabis indica
aagtaaggcgagtttgatggcttcaagttctgctgcaatcgtactatcctgcttccctgatgtagttctgatgaaccaatgattagtaactctatcaattgccaccaggactaggattgcagtgaaaggtagatatagtcttctcacagtaggcctgtttgatttcgctcatctcaataaagcgtttcttgacatctaagagcagagtgtcgagcaagacctgcacatgagatccatgatgaattctgttccgccacagccacacagtttccaaaatagaggcaaaccagacaaggaaagtatgcctagaagacacgtccaaattaacaacagcagaacaagtgaattcaaatagagtattacccgagattagctcagttttgattggtaatgggccaccaaaccataaggctctgaccatcgaacatctcacaaaaagatgtaaaggattttcagattcggaccaacaaaacgagcagtcattagaattacaacccccaaatttatcggacgttggtaatgcccctgctatcgttctccagagcatcatgctctgtctgggatgaattttactatcccataaccacttcca

SEQ ID NO: 210599 - DNA, 505 bp, Cannabis indica
atctatttggtgacataaagatggttatacttttagagaaaagaagaatatgataggtatatggctgctagggctttgaaaaaaaaaatgtatcgtatatcaggtatatacgcatatataccaaccgtataataggtttaaattttaaattaaaaatctgactaattatatattcaaattattattgttattattatttttagaatattaaaatgataattttaaataaatatgtactctaacaaatttaaccctcaattcattatttgaacttaatttatttttttttttacttaaagtttatgttatttttctaaactttatacattataattttttatataataataattatacgtatatatattatataatcctattatatatataacaatcttattatctattcataccaatattcactaataatttattttctaatacaattaaaattactaacatttaatctaactatcaaaatactctaaaaataaaaaaataaatt

SEQ ID NO: 210600 - DNA, 500 bp, Cannabis indica
aaacgtgcaataaactatttaaactctgctttcggcgtgttaaattttttaaaatttgacagaatgttttaaatataaatgtacacgatcattaaaaaaaattaaataaaaaaaatctctcaaataccgaaatatcgatgcacttctttttttttaaaaatgcattgtataattttccaacagttataatagctaaaaaaaattataaaatacttaacaaattgaagaaaaaagaaaaagtaaaaatatatatattttagattttgaaaaataaaatgaaaaagaaaaaagaaaaagtgtcatatatatacctgcactaaaagacaattcattatatatatgtaagaaactaacttatacactaacaaaacgcacagttttggttgacgttttgaatgaatagtgtatatatagactctttttatatatgtaagatgaatgtgtatgtgtatgtattattactattattattgtgggacttttaatattctcatatttca

SEQ ID NO: 210601 - DNA, 569 bp, Cannabis indica
aaatttgtaccaaaaaatcttaactttcttcatcacatgattataataattaattaaaagtgaaaaacgatacatactcttccatctcgaacagatacaaagcaacttgatcactcgaacctaagttcagaagaaccacattgctttccaattagtacaaagctttgtttggttggcgagaaacaggaggatagcaggaaaagaaaactgatgagatctgcggaaatttgagaacaagaaatgaaaatggtgattgtgattgtgttttggctgagaatcccgggaaccaaacagaaaagaaaaagaattgggagtcaaatgtgaagccacaagagtcaaaagacagataagaaattgaaatgaagaatgagattggatccaatccaaaccaaatactcttctttcttttttttttagttatttagagatttttataccacataataaattgttaatttttttacttctttttttttttttagtaatttttgtcaaaaatattttttactatgttagcaatagcttttacggttatttcacagttacttttttagttgtttcactgttat

SEQ ID NO: 210602 - DNA, 1483 bp, Cannabis indica
cttgatctattcaattcagtttagtttttttacgtaccaacttcaactcttttcgttacatcttaagatcgtgcttttagaggacttagacttagtgtgtgattataatacctaaaataatttttcagtataatagatcatctacatccacattaacaaccatattcatttgtaaccagttttagttgatggttttggtcttgtacttgaaatgcatttcatatatttagcacatgaataagttccatattttaattcatgccatcatccaattttctagttttccttatcacaccaaaacctttaaaagtaatgaacaatagcaaaatagaataatcttgaaaaaattctcaaattaatttatgtaaaataaattatttaaaatattaaataatcaaaattattattaatatatatctcccttccgttagattatgctcattttttcttttaaaataatttatattatgtatagttgttgtatgaggttctaatctattcaacaattatagaacctaaaatttaatttatttatattaaacatgcaaaattagttttaagaatacatacattctcataattattcattagtgctatttagtatttatacaattatttttgtcaggactcttaaattttaacaaattaatgtcatgttagtgatacatcaacaaattattttgaaaaataagtacaatctaacaaaaaagggaatatttatagcaatttttttagttgagtcagggggaatatttgcaaaaaaaaaaaaaaaaaaaaataggtacggaacaaaattctaccatgatcatatttcgtgaagaacaaattctatacaagttcattaataaattaaaaacaattttcatcttcttttataggagtttttaaatgcataacttattatggataaaaacagtttttggtaaacctaatgatggaactactaactcatactgttgcctttgggtattttaatctttctaagctcatcagctcatcattgctcttcaagaattcccgtaagctcttgctttgcttcaggctcttattcacttctttttgataagagaaaattgcaagtgacaataactttgcaatgaaagttactgatgaactcaatgtatcaaaacatagaagatagaaatgaaagacaatttacaattacaaatctttttaatttaatgtcatcatcaagagattaaaaaatgatagtgtatttgcaaaatagtctcaaaagagacaagaaaactgatatactcacccagccacgcagtgagcacaaagcgaactattctttcgccttttgctaaagaataccgtgtgctcgccgcatatagtggcatacgccaatttttgaaggattttcttcggaaagtccaaaagaaaaaactgatatactcgggagataataaaagagaaaaaacagggatgatattattggatcagacaagaaacaagtgttacaggttttcaacagacagac

SEQ ID NO: 210603 - DNA, 945 bp, Cannabis indica
agacaatagcaaaaatcattgtatcgtaagaaaacattaagtgtgacatctccatgggacccctaacaattttaataccatgtatgccaccatttatttgagcctgatggagtctggatagaatatcattgcacaaaagaaacaaaaaaaggcaagttttggtcaccttagcaaatttccctcttaggagagacttttttcaggggtttcccgtttcaaagaatggaaaaggaagaagttgaaacacgttccatcaccaaggagataaactgaacactaaaactatgggctctaagaattatttccattcaactcgtttgaaagccatatgcatatcaacttttaatcgctataagactacctttgccctttttcctcttaattgtattgatcacttcctgagctaggagggatgcatctaggagtgcgcataaatcaattcaatctaatgataaccgacagccaaatattggatgttcaattgtgatcagattggattggaagttatttttgaatatccaattggatcggatcggatgttggatggggtgtccaaaaatccaatacatctaacatcaaatcgaactaattaatcttttcatttaacttggatgagtaatttgattttatgttgttatacgtaaaaaagatatatgtatatgaaaattaacattaaaattttactttttttttggattagatggatccaatccaatccaatccaataaatactagatctaaaatattggataaatcgatccaatccgatttaaaaaaaaaactactagatctaaaatattggatagatccaaatcaatccaataggtatacataaaatacatccagtgaatagaactggtccaatccaactttcaatggatattgtgtcgattgggtgactaaaataaaatatatcgaatcgtatggtaaaatttaatatccaat

SEQ ID NO: 210604 - DNA, 523 bp, Cannabis indica
acatttagactaaaatatttaatattaaaaatcatcatagtcataaaactaattgacagatttagtacaccaaaataaattagaagacgagaaaaactttctaaaataatcttaaaaattaattataagattattaatactgagaattaaaataaataaatttgattcttgaaaaaagctaaacacaaaccagagttaccaaacattaaaatagaaaaaagattttctaaacgtagattactaaaaggtaaaattataataaataaaattagtctgatgacaaataaaatagaattaagtctttaaatatatataataattattgattaataacaaaataaagaatttaagataaaagtcaatcaaattcagtgtgacattaatataaataaaaagttaataaaattaattaaccaaaattagctcaatattaaatacaataaaacctaagatttggaataccataaagtataacttatttaagacaaaatgaaatgtcaaaaactgccataaaaataataaa

SEQ ID NO: 210605 - DNA, 697 bp, Cannabis indica
aaatataagaatgcgtcgctctaaagttaatcaaaacagtcaacatagtaccagcaatagaaagctcaccagtaacagtggaagggcgagcatcagcctcggcctgagtcagggcaaacacccgagcaggaacaggtgtatcatccttcttttgttccggtcgctgcaactgtgggcaattcctcttcaagtgacccactaccccacattaaaaatagcccctggcctgatactcgccccggtggtgcctcttgcaccttggacattcatgaaaagcctgccagttgtcgttcccaccacgacgaaaaccttggttaccttagaatctgttgttgggcctggagctgatggttcattagaccttttcttgcgatcaccaaggtcattacccctactagaactagcaccagatgtctgcttccatgaatctcttctcgcaatattttcctttcgtatatgatcttctgcaccctaagcagctagggccaactcaactatctgtgcataagtccgaacaaacccaagttgtttggccgcaactatcacatcccatgtaatatgttcgtccaatccctgaataaaattttcttttctagcagcttcagtgaccacttcatttgaagcaaaaatttgccaatcgatcgaacttagtggcatattctgtcaccgtcatgctggcctgagtcaatcgtataaa

SEQ ID NO: 210606 - DNA, 312 bp, Cannabis indica
tgtttataatatgtatgtacgtatataggatatgaaattaatacgcacgacgtagaagatgatgagtacgtacgtaggagtagttatgttggtttcgaattgaataatgaagtaatttggtagtacaatatgagatgggtatttataggagaagatgcaaatgggattcaacaaagtcgatcgatcgatttttgacttggaaaggatactactatttactttgaataggtgggtgtggctatttttctagtctttcatttgaacattgataataataaaggtgctttggtctggccgtgtttcatttttttt

SEQ ID NO: 210607 - DNA, 635 bp, Cannabis indica
atccttgttctgaggacgctcatattttggaaccgctcaagcatcaaaatatctcgactgttaatttctttcgaaaaccctacaacgaagacgacaatatcagaaagagatgcaagaaatatcaaaacggattgtggcaggccttgccatctacaaagtcaaacgtcagaacaaaagaacttaccgcaagagccccaagcggcgattacaaatcatctcaaaggttataacaccgagaaattgcataggccaaaggacaacgcggtttatacagaggccatatgtagaaccatcagcgaagacattaaaaaaaaatcattgaagatgaaggattttatggcaaaaccgacagcaataaaaagtctcacagattttgctggtcttgcgacctataaaatcaaactaagaggtggttcttattcttgcaaggagaagcaagcaacatcagagagtccagaagaaaaaattcttaccgagaaaattcttaaatattgatctcaaagctagaagagcctcgagctaagaacaaagtatgaattgcaaaacccagggatgaaggaaaggccgagtaaggtccctgcagcaacgataataataaactttctaaatcagatttctaccttgtgcaaagaaag

SEQ ID NO: 210608 - DNA, 1542 bp, Cannabis indica
aaaaaaaaaaaaacaaaaatttaacatgacttaatttttaaagaatctattaatatatcgatatatatatacatatatgagggtcggccttaggcataggcgggctagatctgcgcctagggcccactcattttaggggcccaaataaagaaaatacattttaaaaaatatacatatcttttttaataatttttaaaaataccattatggttgactaactgtaatatcccaataagcctaatagttaataattagggtttataattatattatgagttaataaggtaataagtgggattatgattctactaatttagttcaacataaattttaaatctgtcataaatagataaataagcataatttattaattacggaaattttattggaatatgtgagtatgttgtatgctatattggaaataaaatactttgaggtccgacaacagtgaaaactcgataaattagctaaaagtatcactctcatatttggaattagtgctacccgtgtgattatttagcgggactaatcaaaatagtaaattttatggaaattatttatttggggtcttgactagtggaatcgctattttatcttatgaattaattataatttatgtagtgatttaggggtgttttagtcagctgggtaacattaagttacataagtgttattaataaagatttatattgattaaattagtatagatatgttttattatttctttctttaagttgttgacacataggcacatgacttttattttagtttttacttcacttgaatataaaactaaattaaaaaccaaaaagatcattatcattatattcactctttttttttttctagccttgtcgagccatcaccatatcatcatcaacatctttcttttctcccaattccaccactagtggtttcttgatagttttggtagctaaaggtttataagaaggttttctcttaaagcttgattcaggaatttaaggtaaataattatgttctttcttgtagttttaaatagaaagaatcatggagtgtttattaattatggattctcttaagtttttggtcaagctaagtttggagtgagtttccaaactgtttcaaaaatttaattgtgtagaaaaaaaggataaatataaaattcaagttttggaaactctagtgtaaaatggttgctcatttggaatagtttgggaaggccaaattttgtttgttggacaaaacttttcccctgagtgtctgttttagacattttatgtatggtgtatgttttagagccaaaatataagttttattttagtgtatttatactgtgggtaaaaaactctagattgtcttacgcgagtgttaagtagtattttgggataaacacttattggtttatcattgttatgagatagggcctgggattatcgattgttctccaagcacgtcggccaacatacctgaattggatcttgaggtaagaaaagtataatgtaccacatggcatgactggttctgaaattatcgattctttgattaggcaatgataatgta

SEQ ID NO: 210609 - DNA, 752 bp, Cannabis indica
gttaaattttaaataaataaataaaaatactaaaaaaagaattcagatttagatgtgttttttagtcaattggaattgactttcatagactcaaaataataataataaaataaaatagtaagacaaatggtaatagtggaattgtattgtcattttttcaaccaatacattgcttaatatgaaaacactaattaatatgattttgattttaacatatgaatatgagtatagagttgaaaataatctcaataaaaagaataaattaaaaaaaaaaaagtgtaaattactgttaatacttaaatttaacttttgattacaaataaatatttaagtttaactttttagagtaataatacttaagttatatttatagaacttctatacgtaagtaaatgtcaagttattattcacgtgtcattttcttattagtgtatttgaattaatttttacataaaaaataaaaatttaatgacttagattaattaaaaattgtcatagtcattgacttaacacttaatgttaagtatatatagatgttttagaaatataacttaagtatttttacctttaaaatttatacttaaatatttatctgtaatcaagaataaaacttaaatacttataccgtaaaaaactcgttaaaaaatatataaaatttaagaacgggtttgtgtgaaaagagaaatctcaaacattattcatgagatttaatgtgataagatataaataccattattaatggaagttttatg

SEQ ID NO: 210610 - DNA, 569 bp, Cannabis indica
aaaaaaaaatatatataacaatttttaatgggtatttctaatatgatagttatactaaataaatttaaatataaatattaattttaaaatactaaacaattagatttaaatctaatggtgagaaataataaatgagaatttttaatttttctacttaattaaaacaaatatgagaaaatatctctttttacactatattaaaaatatatatacgaaatatttatgtcaaaatcaatttttctttttgaaaaacttgttttcttattttttttttttctgtcaatgaaacaatctcaccccatataatgtaaaaatgagatattattctaattaaaaagaaaagttaaacataaaaattcaaatttttctaatactatccattcataagtaatatccattaaaagtgtgcatatataataatcaatcaaacatatatgagtaatttacggtataaatacttaaatttaactctcagttacaaagaaatacctaatttttggcggcaataattttaagaaaaacaaaattaaaaatttttgagggtacagtactgctacctcacactatat

SEQ ID NO: 210611 - DNA, 518 bp, Cannabis indica
ctagttgaaatttcattcaaattataattctttattgcagtgttccatatgtcattatgctaagcaaagaaaacttcctttcatatcgaaccataacaattcaaaacattcttttgatttgatatatgtggatatatgtgggcctaacaatactataacacctaggtttcaaatatttcatcactattatagataattgttctaggtacatatggatccatcccattagacataaatttgaaacataaattattattccacagtttataaagttagtgcaaaactagtttaatcaaaccatcaaaggctttacgtttaataatgctaaggaattacaatttgatatgttgtttaaagaccttggcatcatgcattatcactcttgtgttcaaagacctcgaaaaaactctatagtggaaaggaggcatcaacatcttctcaatcttgctagagctcttctcttccaatcttgcattcctttatgttaatggggagagtgtatagccacggctgaatac

SEQ ID NO: 210612 - DNA, 603 bp, Cannabis indica
ttgagtggtgagagatagaagacaacgaactaagaaaatggtattaccagagttggggggagtggaagcaggggttttgagctgtgtttcttggatttgcaccaggaccggagggattggaagactccgtaggaggagactgataacatgtagaagcttaacaatcttcaatgaaggtaaataccagatggtatgaccatgaaagacaaacagagagaacaaagagaaaatagagtgaagacaggaaaagcttcacgtctttcagtgagcttaaggttttatttatatgtgtaattatacaataatcagttacaatcaagaatcaagagtcagttaaaacagttacaactgttaaaacaaaaactaacaggtaaaactaattcatttgtcattatcacttgctcaaacaatcatatattgtctctacagccaacatgaaaagattatacatgattgttggtggtcccgtcacattttttaccctcaacacttaccaaaaatcatatttttttagtaccaccaaaatttgactacatgccaaaaaattattgcaagacgtaataattactttgtgttttaagtagcaagtcggagcttcacccc

SEQ ID NO: 210613 - DNA, 837 bp, Cannabis indica
atagattgtttcttctcaatttttgtggaaatctacatcgtaaattcataagtaattctaatcactacgtcaaaaaaatatatataaaaaacttctgttaaatatttcaaaaatttattacctaaactaggatcactgcatatttatcctttaaatttttttcactgctaaattatactcttttattatacagaaataatttttgttgcatttcaacagatgaaattatttactaacttattcgaaaataatcttcttataaaataaaaataattagtttacttttagaaaagttattggtggtttttattttattaaataacaatttatatcttctattttggaaaatcaaatataataatacactgaatttgtttctttgtcaaatatttttaacctaaaccctaaaaattccactttctaaacctctttagcgattgtggccaaattttttatctaatcctaacaataaaaaagtttgaccaatatcggagatatcattatgatttattttgtaatacattgggtctaaatcattatttaatggtcataaatcataacttattgatacttcatttctccttatgaagaggatgacttcaatatcattacgcctcacacaaaatatttatatgcatattaaaatatcgttaacctcactctctttttttattttaatattagggatttttttatagaaatattatttttatattttattgataattttaccctcaaaactttttacttatagtgtacaaatttaatttttcaaaaataagatttaaaagttttaaaatttcaaaaaacgactttttcaataaaaaaaaaatagta

SEQ ID NO: 210614 - DNA, 1920 bp, Cannabis indica
ttgaaaaccacatctatactaattaaatacttcttaaatccaagctctaaacatcacacgttatcccttaaccccttcagggtagcctaaaaacatgcatttcaatgctctagttgcaatcttgtctaacatgtacaaatgcattacatccaaacactttcaagtgatctaagtttgggggtttccctgtccataactcttgtggggtcatgaagttatttgacacagatgatgatctattaattaggtagcaggttgttttaagagcttctccccaaaaggttatgtccaaactagctcctagtaacatgcacctaaccctctcaatcaatgttctattcatcctctcagcaacactattttgctgagggtttttttatcacagttctatatctcttgattctcattatggcacaacaatcccttgaacttatttgagcattactttagaccattgtcagttcttagtatctcgattttgttcccagtctgattttctagtaacctcttccatgtatcaaaggttcatagagcctcattttgcttttcaacaaataaaactagactttcctactgtaatcatcaattgtactcataaagtaatatgcttcacctttggttagaatcctagatggcccccaaaagtcagaatggacataagttaacttttttgttgtggtgtgttctgccttgctgaacttcaatatgcaagccttccccaaaacacattcatcatagacttctctttgaatagtccttgcctgttcattttcttaagtcctctctaacttacatgccccaatccgaggttccatagccttgcttggctatgtttagttgagtccataacaggtgctactcaacctgctattgtctttccatccaagaaatacaatccattactcaaccttcctctcaacataatttatgtaccttgtgcaattttcattacacattcctcaactttgacaacataccccaatttatcaaacataccaatagagataagatttcttttgagatctgcaaggtcttcatgacttcatcatcattctttaacaagattgttcccacacctttgatcttacacgctttgttgttcccaagaagaactgttcccccatgactctttgaaagagtcctaaatagttctttgtttggtgtcatatgcaatgaacacctttaatctagaatccaatctccacctgaatttgatctagacatcacaagtgcatcagacgacccatatccatcagtaacattaacaatctcatgcttcctagacttgtgatgattttccctcttcagcttagtcttcaaagccaaataatcatctctaaagtggtcatccttcttgtaataataacattgctttcatgtagctccattagagcttggccctcctgtggagtttctagaattggatcttgaatgattacctttgtagccatttgagttcttatttcccttgtattccctcttgggaaattttcccttaacaatgagtaatccatccccactggtctcattttccttcttctgaatttctttagaattcaatgcagcctaaacctctgtcatagtcagagtttctttactatacaagattgtatcaataaagtgctcatacatcttgggaagtgaactcaacaggattatagcttggtcttcatcattaattttcaccctaagattattcatcaagaatgattctgttataattatctagatgctttctcaattcctttaacttacccattcgaagtgtgtacaacttcttcttgagatacaacttgtttgcaagcgatttcctcatgtagattgatgccaacttgttccaaacacccaaggccttgtcttcatctagaacttctcttaaaacctcatcaccaagaccgaggaggatgacactatgtgctt

SEQ ID NO: 210615 - DNA, 602 bp, Cannabis indica
gataattacaatttttgtttataatttttttaatttatagagatgatattataactctaagggtgtgtttggaagtaactgtgtaattactaggtagggtaattacgaggatggtaattacataatttagtacttacactatattttaaaatgtaagatgatggtaattacatgatttagtaattacactatattttaaaatgtaaggtgtgtttggatatgaggtgataattacatatgaattcctaatatcttgtttggtaaaatagttagtaattacatgaaaaaataatattttttagtagttaatgtttaatatggaaagtttttaataattacacagtgtaattacattcaattatcatgggaggccatgagaattggaaagtgtaattgaaaccccacaacacagttacagtgtaattatatggtcaaacaaacatgacaaattatgtaattacctcaaattacacacaagtcttgaattaattttccaaacgcaacctaagttttgtttgaaaactatttcaatttgagagcaaaatttgagtacgacattgtaatttaatttattttcaatctcaaaccctaacaaagtaaca

SEQ ID NO: 210616 - DNA, 833 bp, Cannabis indica
agggtatttagaaaatttctcacaataaaagagtcctatatatatgagctcattttcataaaagcgaactttaattgtggcatataaagtaattcaaatttaacacatgttaaaaattgtttcaaatttgacataaaatatatataatatgagtcaaattttacaccataataaatattattttttttatttaccttttctgtgacttattaatgtaattaataatttttaacattttatttgtatatttaataaaaaaaattatatattttcaataaaaattgaatgtttttgttgattgtttatatttctatgaaataaaatcatttactcttgatatattggaatattgctgtaaaatttgagctaaatataatattaatttatttttttgagtctaatctagcacaaatcatataccacccattgaagaaacataaaatttttttttcttttttttttaaaaaaaaagaaagactattatattaatttgaataaattacataacagtccttagtggagatggaaattccttcaaccaaaacaatcagtatccaccgtagaaaaacttagctatagagggagcataagtattagcaataaaaatattattgaaaggcaatgaagaaagatcaatccaaattaattaaggatgttgagcaatatcatcaatgttaggtctattaatatatagagtattgttattggatactagtagtgcttagtacctctctacagatgtcattttgtgattgattattgatatctttaaaagtattatataaaactatataggacttgatacttaattagactaatagtaatattgacac

SEQ ID NO: 210617 - DNA, 768 bp, Cannabis indica
ttttttttttttttattggaagagaagattatgggacaagctaatgtttttgatcacaaagtgggtttataaatctaaatgtttcaaaggcttttctatcatagatttatttatctgttttctcttgtttactgtaagattccttttattttatttttggttgctttcaagctcgtggtccttattttgaagaccatcttggtcttagtttctttgcattctattcttttgaaatagtgcaaaagttttgcctctattaaaaaaaataaaaaatagacaagttaacgacaaaactaaacagaagtagtgagaatgtaacaaaattcaagcttttcaatcttacccaaaaagaaaaaaaatacctttctggcccttcgatcaacatgggaatctgagtttctctgtgtggatgcttccaactcctcttctggtagaagttccattgtctcgcaaaatgtaatgaattcctagaacaattcaactctaaacatgtcattattacagcacacaaaacacgtctaacaaacagtaagtatgaaaacataaatagcaacaggatatctttcagaaaagtgaaaaaatccaccttcaactttgcttgggaagtcttaagaatctgtatcctatcatcttcctcgactttttcagtcaattctccaagataaaatggcacctagaattgaaaattaagtagtagctgcctataactaaataattatgtccttaaacaccccaattcatcagaatcaagcacacatcgtaaaagcc

SEQ ID NO: 210618 - DNA, 1515 bp, Cannabis indica
gtgtttttagatacgtgtagctacgtcctttgactagtacgtaaagggtttaaataaaaatgtgaacgattaaaacttaattaaataactttgctttgatatttaaacataataatttacatgattcaggataccccttttaaaaagttacaaaaatttataaactgtttatatttcaaaagtcgttgtcaagcgacctacaaaagagagtcaacaccactccaaagactttgaacactccaggtctaaccgtcgtgatatgtacaatcttcatcgttagctttagactcttcattggttcgattctagctcatacttgcacgtacacatagtaactatgagtcgacagactcagtaagaaaagcataatcataacataagtgtaaataggataaagattaggcgcccacacccctaaccgtaacccttcaccgtgtccaacacggtactgagttatgaacgttcaaacgacagtactagtgaccataatattagcctatactcggtacgctagtcgtactctagtcgtaccgacgtgatatagtcaagtagcacagtactatcgattatactatcagcctatactcggtatgctagtcgtactctagtcgtaccgatgtgatactgtcgagtagtacaaatgccaacatacatttatcaatatccaatataatattaaatatactgataccactattgtaatgtaatctaacaagcataactaacatgtatactaaacatgtaaacacatatgcatatcattatactaatcttaccttagtttcgaatgaaagtatgtcggtaaccctgagtggacgttgttgcacgacggtcacaacatacgtagagctgataagtgtgtactctagaacacttttctaatgtctgaaaagaacctaagttttttctactaaactatgtagtggagacaccctaaaataaaatagataattttgctctaatttatataccatatcgtagagctcttcataagctttaaaatggtatatagaacgtctaaaacggacacccgagtgaaaagttatggccaaaatactaaaatctgcctacccgatacagtccaaccagaattccgattggtacagccctgaaccaaccggaattccggttgtctgggtagaaaaacacaaaaaattccaatcttccaacccccataacttggtccaatcaatcccaaatgctaccaaactttccaaaatacctaaacacaccataataaacatattctaggcaataaactcaataaataacctctgaaatgaaaatcaccatggaagagccaagtttgagctcttaagctcaaaccttgaccaaacctcacaacaagcctctaattcaacttaatctaacacatatatccttaaaatcatctcaaaaaacagaaacaacagcaacataaacctacaacaacctaaacctaaaaatcatgcttgaaacctaacttgaaacttcaagaaatcaacaagagaagagcttgggagcttacctaggatt

SEQ ID NO: 210619 - DNA, 705 bp, Cannabis indica
ttttggaccgagtggttgacgaagatcgggcttcttcaagttcagatgctcttgcaggtcactcttgtcgtgactgcggtcggaccttgctcttcatcttaaggtttaattcactttgttgtccctataagggtttgggcgagtttctttctgacgaacctgaagagaggattggcaatttcagtccgatgttccacatatcctaggctgtgtccccaaattttccccaatttccttaggttgtatcccttgagagttttgagtatatctctaggttgtctcctgccccttggtttgcaagttgcgaggtttgcctcgtgaatctcttctcccaaggtcaggttgattttgggtactattctcctacgttgtccttactgcggctatttcacgctctaattcatcatttctctagtttgcttcctccaatcaacgcgtaagacgacgattttctaattccattattattagtacctggttggatcataggcgccatcatcatgaacctgcttaggaagtgattggttgttgtttacccatggtccatcaatctagggaccccaatactaggtttcctcggggcttgttgtctattcatgcgatgactcaatagatccttgaggactcaatggctcttttccagggaaatgactaattccttcatgaggattattatcttcaccgtcatccattatttttatgcca

SEQ ID NO: 210620 - DNA, 522 bp, Cannabis indica
ttacaactttattcttttaacttattttctccttttctttttgagttagtgatagttcaaaataacaatgaattgaaaaataacataagaataaagaaaaaaaataaatgcacatgtttacaacaaaatattgtatggaataaacagtaaatataaccgataaaaatgtacataaattaaacaataactgtacaaaaaaaaatgtataaaaacaatacaaaaataatatataaaataactatagaacacctaaacaataacataaaaacaactataaaataaggcaactataaatcaaaagaaaaatattaagacatcaatcttgttaaaatatgtaaatcatttgtaaatttactctaaataaactacaaaacatcaaaaaaaaaatatattatttttattaatcatgtaaaatctgaaaaaaaaaaaatgtaggagtgctcttatttatttttatttttttgtaagagagaaaaagagtagttaaaaaaacaagatataaaaatgaaactaaaaaaaaaa

SEQ ID NO: 210621 - DNA, 547 bp, Cannabis indica
caccgatatatctttatctgtttcggcacccagagaaatattttagtctatttttttcattatcgtatatattgtagttatttgacattttgcaaaattttaataaatccaaaaaaattaaacgccaaaaatagaattcaaatagtctattgcttacgtgattcttttattatatacacatgtgaaatagattatttgaatattattttttatattataaattattttaaatttattaaaatttggccggatgtcttaaataaactatagcgtacacgactgtgaaaaaaaaatttctgaataccgaaacaaataagaattgcatcagtgttgttatttttatgagagtgcattgtaaaatcacaaaaataaaaccttaaaacaaaattgagggagtaaaaaatatatttccctttctttttttttctcttttttgaataaacatatttttattttcatttttttaactggaaattttcatttaactagaccaattcggtctaaacaatgacaaaaacatcagttgagatattagatctcaaaaaaa

SEQ ID NO: 210622 - DNA, 1688 bp, Cannabis indica
gatcaaacacactgtttatggcatgtatcaagaccaaatacataatcgaacacgtttttggcaagttttcttttctggtagtagtgttccaaacccttttatcatatttatcacgtggcctacccaatttatcaattattctggccgccacatacgaataagtggccccagagtcaaacaaaacaaagaaataagagttattgaccaagagctgacttgtaacaactgaggggctaggttctgcatcagcctgagtaagagcaaacacccaactagagtaggctttgcttccgtcttctattcttctttctttagttgtgggcagtctcttttgtatgtcaagtcataccacaatggaaacatcccggccctttacactcacctagatgatgtttcttacagttgggacattttggataagtgtattgagttttagaaccaccctgacagttacataaaccttggttccctcagaacctcttgttctaactcgagctaccggatgcagatggtgtctttctcttatgatcagtggttgaatcactaccacccttaccataactagaggtaggaggaacagtggctccactaacaatctgtgtcccctgggactcttgaatgcactcaactgcgcccttaactcgtagtgctttctccaccatgtcagcataggtggtattatcatctactgtaatcatcaggttgtgcttaatcttgggattcaacccatccaaatacttttctttcttgctaaaattagttggcacaattctcaagatcaacctagccaacctatcgaattgagttgtatattctgtaactgacatattctctttctgagtcagctgagtaaactccttcctctttgcactacaaaatgctttattgcagtattttgcattaaatagctcttggaattattctcaggtaatagtggtgatgtccgggtaagtgccaccatatcccacaaaaccaagacatcctcttagaattggaatgttgcataagccactctatcattgccgatgactcccataaaattcaaaatttgagtgataacagttagccactgttcggctttcataacatatggacctcccaaaaagactggaggtgcctacttacagaacctttcatatagtggttccatccagttcataacagtaatcgaccctgcctgcacaacaggggcaggagccacttgcaccataggagcaggcattgcaggagcaccatgttgcctcaagcaccggatcttctcatcttgctcattaattctggcttgcattggtgcaaacctgttctcccaatcctggccagcctgcgatgggttaacatctccccaaccacgcatcctacctcttgggcctctacctcagccacaaatatttgggggaaactaaacttcctgaccgccattggattcgaccgaattatcctagcttctcgtgttctgcctggcgtccattctaatagaacaacctgcgaaactaagaactagcctggtcaaatcacgatcaagaataaattaataattaccacttacttaagaaattaaaacatgtgtctattcaattaccaggctagtaatatgcttcctatcatgcttttcttataacatactaataaaacaataagctactaaagtaatacatgcttactgaaccgtgagtcgagcttatcataat

SEQ ID NO: 210623 - DNA, 1029 bp, Cannabis indica
gtagctagactcaactatgtgtactttgaactttgaataatctaatagtctaaaagtgactaagttaacaaattacccatcatcccatgcatatatactcaaaagacaattaaggtctctcttaatgttaaatttggtattagagcacacaaattcttcacttacgcaatcccatatatatttagtctcaagtagcctaagtgtcaaattttgactttttgggttgttattttagttgactttttgtttgatttcaaaagtgtaataacattataaaacgaatgtgattgtgacaaacaattagagtagaccatttttatacagtcttagtgtaatcgcaagttgtctttattaacttaaccacatgtgcccttaaatattaaacgtaaacattattttatgttatcattttagctaattactatccaaaatttcgaaaggttcagttcacaataataatgatttaaataataacttttattattatacacaaactaaaacaaagttagcacttgccttaaatttcgtttttgggttcataagaataataagaaatattaaaagaaacaaagtaataaaatagactaaaattctaaaattatttttaaggaagatttcaactcgaaatctttgtaaggagaactaagcaccataaattaatgtcttatgcccacttttaaactattttattgattgcctatatgagatttttttttttttaagaaatggaatgtatatatttcaataattgatattttcattaaataactatatataaataaagtatttacaaaatatatttattcattaattttgagagtgagtgacgatcctatacatgatactattaaatcgtgtaatttttaaatagataataaaattacaattttaatatttaaatttgttctcatcgttaaatattaataaaaaaaattaaaagttatctaagtgtctaatttttttacttaaatatgttatatttttattaatataatttattaatatcaagttgtagtgatgctactaata

SEQ ID NO: 210624 - DNA, 771 bp, Cannabis indica
tcaaaatataatatgaaattaccaacattggaaattttgctcaaattttccataataaaagaagaaaaagaaaggaagacataaagtgtctgaatcgaccccttgagttgtgattagggttagcttttgattgtatactaaagttaatatataataaattgcatttcaatattgtgactggcaagcaataacacaaacttactaagtcatcctacagcttcaataattagcattgttctgggaccttcacagatcacaatatatttgataaatgacatataaactgtaagtcgaatgtttatgtcaattcagaacttttcattttctacatattcttttttcttttgacaatacataatattttagtagcattatcaaaaggccgtttacatgtaaaatgttcggtagttttttcttatggattattttacaaatataaaaacaataaagaattacaaaaataaggtttcacggaattttaaatatttttacaattttttgattttatttatagaaaatatagtatttttaggttgtactcttgttaatttgttattgatttattgttatctgtatattattttttgttgttattttgatgttacttttatgttgttttattattgttttcatattattttcatgaaaaaccgtaaaaatctaaaaaaaaatattcttcaaatattaaaaaataattttttaacgaaaaaatagtgtcttatgtaattatctatttttcttattatccgggtggagttagagttagacatg

SEQ ID NO: 210625 - DNA, 531 bp, Cannabis indica
aattatataagtagaatattttttaaaaaatatatacgtgaaatataattttaaaaatagatttagccacgcattgggagggtggctattatctttagagtctgacagtatggtactctaaaatctatagtgacgtttaatgagaatctctaataagttttagtgacccacgccaaagggttactaaatattactttttcagtcacccacattgaaagatcactaagcatctttagagtctctcgtcatgtggatcactaaagcttatttttgtagtagtgacaaacttctagctttgctcaacaataagacttggactgtagtgccccttcctcaaaagaagagagaaattggatatcgttgggtctataaagtcaagtataacagtgagaagtgagagaactgtcaagagttaaaaagctcccctcattgtacaaggctacactgaccaacaagaagaattagatttctttgatactttctcatgagtagaaaagatggttaccttcaagctactactttccatatcaa

SEQ ID NO: 210626 - DNA, 912 bp, Cannabis indica
catcactgcttagcaaagttttgaaaggacgatacttccctcgtacatccttcttggaagcctcacatggtcactccccctctttgacatggcaggggattctacatgggcgagcacttctcaaagccggtcttagatggaaagttggagatggtagacacattcattgtagttcggacccatggattccgggatgtcataacttcaagccaacatatttctcgggggtttcgacatctgtggttgctgattttataacggaagagcgtgaatgggatgtcactcttttaaaaagttgcttctcaatggttgatgttgagagaattctcacaatacctataagcttttttcagagtaccgatgctctgatttggcatcacaccaacacaggtatctatagtgttcagtcgggttatcatcttgccaatgcacttgaggacttagctcagcctactgctacaacttccacttcaggtcaatggaattttttctggtctctcaatcttccacaaaagattaagatctttgtttggcgaattctccaagatgctctacctgtggccacctctctagtgcgaaggaaaattatcacagatgccacttgctctctctgtcatcaggcttgggagtcgattggccatgctttcttcggttgcaaatacgctcgtgcggtctggcgttctgctaatttcaatctggactggacagccacttccacaatgatcaaaggagattatctcatgcatctatcaaacatctataccaaacttgaaatggagcatgtgatctgtattttgtggtgtctctggacagagagaaatcgctggttcatggtcaaattgccaaaccagcaacttcagtagcttcatttgctgctggttatttgcaacaataccgcacggctcaacaaaa

SEQ ID NO: 210627 - DNA, 1077 bp, Cannabis indica
ggaaggcccttacacttcttaacaatttgtcttccaatttcttgcaactccaaaaatacaacagcatcagtgtctacatgatcaaaggcatgctctgcaaaaatcttccaacattcatcatcagtcatgttcttaagcttgtaataagtttgaacatctctcgtcttcatcttcagtgcgacatcttcgttacgtgtggtgacaataatcttgcttccttctacaccagattgaaaagagcttttcaaaagatcccacaactcgtaattctcattccacacattatcgtgaacgaaaagaaatttcttcccggccaaagcatccttcaagtctttctgaatttgatgtagctcgttcatttcacatttttttccaacgatcctctccaaaataacttttgttattttaagaacatcaaaatcatcagatatagttacccatactttcaagtcaaagtgtttttgaacattggcatcgtaatacacattctgagcaagagtacttttaccgattccacccatccctactatgggaataaccgaaatcctttcgatgacatcatcatgatcacacaacaatagcttaagaatagcctgtttatcatcctctcttccataaacttgataatcatctaacaaaggggcatgtggtctatgtaaagttgttttgtggtcaacttttttcaaaccaagatgttctgactgttttaaaagatcttctagagttttaaggatatcttctatgttagatttcacttgattgtggaagaggttactcagtgtgcgtttgaggtcatctttctccaccctgaatctcagagtttcagtattgatcttgtccatcacatgatctgcttcatacattacttctttaagtgcatcaagccaattccttacgttgttgtctcgaagttgtttctcctcagcatcgttgagcagcacattagccgatagcaacatagtcttcaactctttgagtagcttttgactgagttcatttcctcgaaagaagttaataacctctttggtagcaagcctatcaaataggacattggtgaaactagagagaagagctcct

SEQ ID NO: 210628 - DNA, 567 bp, Cannabis indica
gacacaattgaaagattacgtcttagttcctgtattttcgaaaatagtacaaataggatcctgaactaattttttgtcaaaataattcttaataataactcgatgtagaggccttataaaaaaaacgggttactagatctgtttgtactagaaattgtcttcaagttggttatattaaaaaattgttgaaaattgagcttatggtcctatttgtaccaatttagaaaattcagggttattttttcttttaataaaataaagggtccaatcggtaacttttgtaaaatatagggtcaaaaatgatatttaccctatatatccctatatatattactatcatataaaatagtaaattacataatatacaccatcatgctcacccatgaataggtatatctcttactcttctattctcaaaatcttgatttatctcatcttctattgaaaaagaattacaactctattgtaatataatattagagctaaaatattgattaaataaatgttacaacatatatatatatacattacatatcgtatattgtatatatagaagaaaaatagaag

SEQ ID NO: 210629 - DNA, 550 bp, Cannabis indica
tccagtacgcttctgctaatctttgttctattgtttagttttttatgaataaattagggtttagatctagattacaatattctacatagaaaaattgatgtatcatataatgtaaaaacttgatgtaaataaagaaaatagaattttagtgatataattgaaagaatggagaaaaaatgttgatgtgattggccttagttttgagatttaggctaaatataataatcttccggggaaattgatagaggtgagcaaaaatatcctctatctattatttataattattttttttttcgttaattaggatttttatctcttaaactttaacatgtactaaattatgcatcctgaacttttctggtcgttaaaaattcccctgaactattgagattgttagatttaagaatttttgtttaattttatttaattttactatttcagtgattgtttatgtactaaactatgctccccaaataaattatgcccctcgatatatatactaaatcatgtcccccgaattttcaacctattagacttttttactaaagtt

SEQ ID NO: 210630 - DNA, 826 bp, Cannabis indica
atcacctatatatagagtctagagatactcttaattaattaagattttcccataaatatataaattaaaacattatctcatacaccaccaccatagcgtatgtcactaaacttgttcttaatccacttgaagctatttctcacacttgatttaaccttaccttctgtggtgtacacattatatgaggcaattctcttctttctttggagctctggatctgtagaagttacaaatccacttcccttttggcaaggtccattgaaattataggaattagaccgatctccaaacccgaattcgccacccgaataagccgaggagtactccggaaatgacctactcttttccataataataaaaaaaagctttaatttaatttttagtttagggaaatggggggtgtgtgtgtgtgttaagttacttcctttgtatatggcttttaatttcaattatgtatatataatgatcaagggagagagagaaggggggaatggaaagtatagtagtattaggtgtgaaatcattatgatgagaggcagctcatatgtgatgtttgggaaaggatttgcttttggttcgtgacaatggagagaatcatttgggccattggtggtgtggtgtggtggccccaaccaagttatggggctccaagtggtctctcttttttaattttctttctttctatgcttttacatgcatgcagtagtgtgtgtggccctaaccctaaacctaatcctacttatacacatattgataagtgtcattttataatttaatatcagaactcacatattataattcagtatagagaaatttgcggtaaaac

SEQ ID NO: 210631 - DNA, 778 bp, Cannabis indica
ttttatttacaaaaatatgttctcccgtaaaaacaataaactgttcgatattttttgttgttgttttataactgatttatagttattatgatgttgattttcaattattttttacttattttctcatactatttttttttaatgaaaaagtcgttttttgaaattttaaaacttttaaatcttatttttgaaaaattaaatttgtaacactataagtaaaaagttttgagggtaaaattatcaataaaatataaaaataatatttctataaaaaaatccctaatattaaaataaaaaaagagagtgaggttaacgatattttaatatgcatataaatattttgtgtgaggcgtaatgatattgaagtcatcctcttcataaggagaaatgaagtatcaataagttatgatttatgaccattaaataatgatttagacccaatgtattacaaaataaaacataatgatatttccgatattggtcaaacttttttatggttaggattagataaaaaatttggccacaatcgctaaagagatttagaaagtggaatttttagggtttaggttaaaaatatttgacaaagaaacaaattcagtgtattattatatttgattttccaaaatagaagacataaattgttatttaataaataaaaaaaccaccaataaacttttctaaaagtaaactaattatttttattttattaagagattattttcgaataagttagtaaataatttcatctgttgaaatgcaacaaaaattatttctgtat

SEQ ID NO: 210632 - DNA, 558 bp, Cannabis indica
ggcgtgcaaaggtttcctcaggccagatggagattggccctcaagagcaaaggcagaagggagcttgacaacaagaccgacctgtcgagcaaggatgaaagtcggccttagtcaatacacttaacgggaaggagtctcattaggcgcttgagaactatgcctcttttttgtaatagaatctctctcttgtttgttagttgtattttctctagttttagtaaatcttataattttgtaactcataatgtaataaagtgggcatttacccactagcagtatggttgtttaccgacttcttctatttctcttaaactttttttttatttatgcacgttacttttttttttttttaaaaaaaaaacaacttattatttttattacctatttttttttcttctgccatgggatccgagacacgtccatttacacattttaattttaatttttttttttttgatgaaattaaagataaaattgttgtttaaattttagaaaatactacttttgtgtttcccttaaatttacatgaaaaacttaacatttgcgtggaaaagtacg

SEQ ID NO: 210633 - DNA, 874 bp, Cannabis indica
tggtactcggaagaccaagatatgtactattgtcatcagcctgagccattccagtaattctaataatttgatctctcttgttgtcatctgtattagtcttgaagaaaattgatgatttggcaacattcaccttctgccctgaagctaactcaaatttcctcaacaggtccataatgtaagaagcttccacctctgaggcttgacaatacaagtagctatcatccgcgaaaaacatatgagatatagttggagcaccacgcgcaatcttacacccatggatccatcaattagcttcatatcgttgaataagggtcgagaaaccttcagcacaaagaatgaacaagtaaggagacaaatgatctcctcgacgaataccccgagaagctagaatcgggcctaaccgttgaccatcatggacaatgtgatactgaactgatcgaacacaagccgaaataagattgatccaccgctgatggaagcccattgtaacaagaatcgcttctaaaaaaggccactcaaccctatcgtaagccttgctcatgtccaatttgagagccatatatcctttcttcccttgacttttccttttgagatagtgtaaaacttcaaaggaaacaagaatattatcagatatcaaacgactggggataaaagcgctttggtatggagatataatttgatcaagaagcccttcaatctattggcaaggacctttgaaacaattttgtgcaagacattacaaagcgcaatcggacggaggtcccccatcacaatcgaattctcttcttaggaatgaggacagattcgtatcattgaaaccaggtacaactcaccgaagcaaaaaaattctgcacggcagccacaacatccgccc

SEQ ID NO: 210634 - DNA, 651 bp, Cannabis indica
tataaaatcaaatttcccattgattataggaggagtagactattcctcttatatattctattatctttccacatattagcaatgttagactctttaacatcccctcaagatagtagctattttatatgattttcatcttagacaactcgatcataagcggttctctttttggtgcactatccctgatcacaagtggctcttttgctctacttttttagatcggtatttttggatttttggtggctctcttttttttcgctcactatctccgaatcacaagttttattttttttttactttttgactcttggatcaatttttttttagatttttggtggctcttttatttttttttatttttttgctttgataccatgttagaatttgggataaggtgaatggagtttcatcttaaaattaattggctatgggaatagtagttcattcctcttatatattcgattatcttttcacattaacaatgtgagactctctaatatattaaattagaatttgctctaaaaaagtgtatatttccaaaacaagatgtgttgtgttgattgatgcattttaacttctcaattaggtcccacaataagacatgacccattaaccacataggctatgaatttctctatgtctgtctgcgta

SEQ ID NO: 210635 - DNA, 1369 bp, Cannabis indica
aaggtgattgagttatacatcatttacacgaaataacaaataaaaaatgaccaatagaaatacacaacaaatggtaaattgattaaggagaagagagtggttaatcggtacctgatggagggtgaatcgattggtgtttggaatcctccattgttaatgtttggaagtgatcgatgggagaagtttgaaattggaattgcagtttggtaggactctgaagactcagacaagttgtaaattaagaattgcaaaggcaaagaaaaagcgaatatgacagattggacaattgcaacgtttggccccactttagtagtttattagcggcggcgggtatcccatctatatccacgggaaacataggttgttttatgccacgtgtcatgcagttaaaggttagctcttttagtttgacaatataaaattccattaaccattggatttattttaataattaattataaatatttaaaatattttgtgtgcagtctttaaaaatatacatatatattgtttccttctcatcatggttccaatccaatgtaactgaatgaaaaaattgaattgggttggattttaaaagtttgattataaataaagagaattgttaaaaaatattattaatgcgtaatactcatgtcaatgtcatataattattgacataattaattattagttaaccaattatgatacattacctatagaaaatattggacatcattgatactcaataaaagtgctcataaataaattatatcggctaattaataatttttcctccccgaactttgacatatactaaatcgtgccacctgaaacttttttggccgttaaaaattcctcccgaactattgagattgttaaatttaaggacttttttctaatttcattcaattttactgtttcagtgattgtttatgtactaaaccatgctccccagactttgatatctaccaaatcatgccccctcaaactttgatatgtactaaatcatgccccttgaactttcatccatgttagtaattttttactaaaattagacaaaagtccttaaatttaacaatctcaatagttcgaggggaatttttaacggaccaaaaaagttcaggggacacgatttagtacatgtcaaagttcggggagaaaaattactaattagccaattatatctgattacaaaaatcgatctaatttaaattacaaaaatttgtgtaaaatctcaaaaattcaattaaaaatcgttctaatttaattatatttatatatattagaaaattatttatatatagaaaaatatgaaaaaattaatacttagtttgggcaaaaataggggcaacaagtaatatggccaaaactaattacgaaccgacat

SEQ ID NO: 210636 - DNA, 746 bp, Cannabis indica
ttaattttttgtttttgtttggtatctatataagatcctttctatgtattgataaaagtagcacttttactagaccatctcgtatttaataatttgtgttaattttggccaaaatataaactaatattgtttatatatttagctctttttttaaaataaaaaataaaaaatttaccccattgtacaagacaaaaaataagttaaaatagaattaacaagttgttatagaattggcccaaatattttaaaataaaaaaaacgaacaaaattcgtgcgcattaccaaacgtttttagaatacgttttaaaccttttttttttttttctaaattatatattttaaatttgtgtgcattataattttattaccaacctttttttaaaatccattttaagctttccgttataaataaaataaacttttttatttatatatgtataataaaaaaaaaaattgacttattctttttttttaaaaaaaaaaaattagacttattcttttttttaaaaaaaaaaaataagtacttgtgtaatagcttaaactgtccaatacttggccggcttatcgtaatgtggcattatcatagggataattacggtaaatactaaatttttaattttttacttttattactgtgggcgaattttttaaaaataactgtgtaagtttatactgtaattgtgttaaattttctactgttgttctacagttattttttcagtttattctattgttgtttttagttg

SEQ ID NO: 210637 - DNA, 739 bp, Cannabis indica
agataacaaaaatattaaacggagtccatcgaggcggggagtgtcgtccccgttcccacccagtttaatattcggggacaaaaaatgatcctcgtcctcgtcctgtttcccatttaaacagggtccctgcgaggcccatccccatggaaaaaatgtgcatccctaatttgaaccctactttattaattattaattacttttaactacattattaaccactttttttatttattgataattgttacgtaataaaaaaaaatctactaattaaagagtatccatggtgcctcaaacccccttggaatgctaaagggcacccatggctcatgggaagtacaattcaatatcgagtcccacttattttattttaataaagataatagtttatcactaaccaattataaggcgtcatccaatataaattcaggaaattgatcatggtttgtatcagttcagttagcttccaagttcttctaaatggaggtcccactaaattatttaaccctagtcgtggtttgagatagggagattagttgtcctgtcatctcttcattatgtgctcagaggttttgttgagactcttattaaggaaagaggagcgtggtttaattcatgggattaaggttaggtggattatttggggtttcgctgccccatttttcgccagcaacttttgtcggtatatttggccaaatacgtcgacaaaagtagtgggataatggctgttgttgtgtattgt

SEQ ID NO: 210638 - DNA, 1304 bp, Cannabis indica
tcaacgtacatatacaattcagcatctatacgagaaaaattattacaagattatacataaccaacaacctcagtgttttataaaacactctaatcatacagtatcataaacacttactttcaatacttcataaagcattttggttcacacattggcatattcacacaacttcaatgcttcataaagcattcgaattatgcatcattataaacacatatacttacatccctaggtcactgagactacaagaaaagtgactaatttcataagcaatataatccatttaatcatactataactaaaatgtattcaattacaactcatcacataataacacacttgatccatttcacaacatcaaaatcacacaatctcgatacttcataaagtacccttaccactcgttaaccatgagctacgtatatcactatcatttcccgatacagcgaacgataagtaagaaacctatccgcaatttcaggagtaattactcataatggtaataatcgtatcttttactcgatcataatcgagtcacaacgatgataatcatttcctatcatttttctcgatcataatcgagtcacaacgataataatcatttcctattatttccctcgatcataatcaagtcacaacaataataattgtttcctattatttccctcgatcataatcgagtcacaacaataataatcatttcctattatttccctcgatcataatcgagtcacaacaataataatcgtgtcctattatttccctcgatcattatcgagtcaaaacaataataatcgtttcctattatttccctcgatcataatcgaggttgtaacaatcataacattaccatatacggtacttaatacttttcttacctcaattccaaagtcaagtatgtgggccgacttgagtggaacaatgctcgaccatttcgggtcctatgtcatgacaaaggtaaatcaataagggtctattccaaaacactgtctaaaacccacataaaataacttagggtttttaaccgaaacttatggtgcaaacaccctaaattaaaatacatattttgtctctaaactatgtctcataatgtagagctcttcataaccttcaaaacggtatatagaatgtctaaaacggacacctgagtgaaaatttatggctaaaatacaaaaaacagtgattcgtgaaaattgaccatctggaattccggttgctgcagccctgtaccatccggaattccggttcactacagcaaaaattcgaaaatttcagatctttaatgtcccaaaacttgctccaaa

SEQ ID NO: 210639 - DNA, 548 bp, Cannabis indica
attacttgactaaaaaaaaaaatccacaaataatataaaaaaaaatccccaaaaataatttatattaaaaaatatcacaaataattcgatatcaatcatactcttggagagtccaagaaattaatataattgataataatagaatcaaattaaatggtttgtgatatctttttattataattgatataattaaaatttttcgtcattcttattttagaaaagatacaaaatatagttataaaatgatgtaagattttattttttttttatataaaaaatttgatattacatgatttttttaattttttttaaaaaatattagatacatacatgagtttttgttatccgtatttctggcaagagacacgtggacacaatacagataattaaagcctattatttggccttaaatgacaaggattgggccaaacccaatatcagcaggccttctgggagggcaatcgcattactcgcctaggtgagcttccaccaagcataatccgtatccggaggacttctagctccgcatagtcggaagggtatactag

SEQ ID NO: 210640 - DNA, 553 bp, Cannabis indica
cgagtcattctcggtcttgtctggaattttaccaagttgtgtgttgctaacactttctgttcttgtctagctacttttctctaacattaaaggtaccctttttttgtggagttataactctgtatcgccattttttgttgcgggggctgggatttgaagcaggggtagcaagaattcgggaacttttccaattttttggtttaaagtaatgatttttattttttctcatacaggtaaaagatggagacatctgtgaaatgtcttataaacagcatttctcgattcattcatcttgtttcgtgccaaaatgtgaagccggtgctcatacagaacgactacagaaacatagctggtgttctgaaacttttgaagccatttcttgatgaagttcttgattcgggaatgtactctgatgagattctatgtaaagaattcgaggaattggatacagctgtaaatatggctagagagttcatggaagattggtctcctaagatgagcaagatttgcagtgtaagtaactaactttgtttatacccgattcgttttaaat

SEQ ID NO: 210641 - DNA, 846 bp, Cannabis indica
tatccttttcactcccaacattaatcagaatgatctaaaatgtcttttttctattacttaaacttggatataaaccttttgttgataagtacctcggggtccctctatgttttggtagatctaagcaatcctctttccactatctcctccaacacgcttctactaagctaaaatgtctagaacaataagctttttctctaagactggcaaagaggtcctgatcaaggcagttattcaggctataccttcttatgcgatgtctagttttttgtcttcctgttttgacttgcaaacgctttgataaattagtagctaaatttttgtagggttctcagggtaattgtaataaaattcattggaagaattggatgcatctcagtcattccaagttttttgggggtttgggttttaggtgtaacaccctaactaccttaggcgtattacgtgatttttaaacgtactgtgcagctcgttgctaatcaacgaggtttatggaaaaacgtgattaattaaaattttgctttttgattaaacttgtaaaacatattataaaagactcgggatcccgattataaaaatatttacaaaaagtttcactgtttaactattacatcaaaataaaagtcgtctaacgacagttacaaaaatctcagccttgctgtcccgaggatcgtacgctccaggcctaaccgccccgacatgtacaatctcataagctcgctcacggtccatcagctacagccttgcctttacctacacatgaacataaactgtgagtcgacagactcagtaagaaaagcataataatatcatacataactaactgccgtgtccaacacgatactg

SEQ ID NO: 210642 - DNA, 930 bp, Cannabis indica
aaatgagacgttggtcatctttatgttttacaccttttccacacgatatgagacacttccccacatgtatgctaacttctcttgttctgtctctcagatttgctaacagaccatctctcccacattttctatgatataaaaatgcctttattattattattattatagtaccactagtgtgaacttttccattttatagggattggtataatacctgacaaaataacctaatctaatatgattcaatacttcccttatcatgcccaagggttgcgaaaacttctaaagttcgagagattgatgctatatattcttattcaaaatttagagttgattctctaacccattattaagcaggttctcaagcaagaaattcactttctcactctctatttgggctccaaaacaatacaaggttctcctcaaacattgcaagaaataagtcttaaaaacatgaatgactaaactttaatataaatatgtcttcggttcttgaatcaaatgaggttgaagtgcggattacgttatcctttgatacaaatttgggattgttgctccaaataattgagtttgcttccacaaattcatctatgacattggtcttacattaaagaatgtactaaaaaaaatctatagtacattctttaatggggtaacaacactcttaaaatatcaatccccaataaaaaaatttacattaaaaactatcaaatattttttttttatttgataattatagtataaaaaaataaaaagaaaaaaagtcttcacaaaattaaataaattaaataaagtagacctagagattttttataacaattacggctccacataatgaaaattctaggtatgtcattgggtgtttcgatagacttcttaattcgacatttaaggaaatattttagtcttttttatgatatagttatttag

SEQ ID NO: 210643 - DNA, 739 bp, Cannabis indica
ctgagattacaacacacgcatgaagactgtgtgattacactaatataaacaaatctcacactgaggaatacttgatcaaacacacaagtgtccgtattttacaactctcaatcactttaatttcttagacataattattgtaagtagagatgcatctcgactaagtttagatttcatctagttgcagtcttaatctaagtcttggtgtgtggaattctttttatataggcaataagttgttagttaggttaagtagtgtaagaaccaactaacataactagccacttagccaattaggattaaaggtattgatgtggcacctattgaaggaggcaaatcctaataagttgttttaatgataaaagtaagagtctttcacaaatacaataatattgttttcaagtgaatttgtactaagggtgtttgaggtacggctggtgtggattttaaaccaaactatatatgtaatttttgtaatttctcaaactgtaactgcaccacaagaccttaaaactgtaaaaaccacactgcaaaaatgttgtgcggtgcgatttaggcgatttacactattatcattatcaaacattaaaataaaaattaaaaaaattaagtctaataaattttcaacaattaaacaagaaaaaaattatcttatcaaacttttagcgtcataaaatatatgctaatagaagttattgtatcgtttctaaaaaaattatataatatacatatattacat

SEQ ID NO: 210644 - DNA, 522 bp, Cannabis indica
agacatgcacaacaagaaaaaaaaaaggaaaaaaacacctcggggtggtactgctctgtccatttggtgtgccatcagtgcatgctagggcttaacatcgggcgggttgattggatttcaagttaacgggtatcgagatcacgagtttagagcaaaaaaaaaatatttgtacccacttgtgtaatgactaagttggtcgagttcacaagttcgtagatttgcgggttgggtgggtttactaatcgaaattatttatttatttattttaagttttcacatcataaattcaaaaaattaagacataataataataataataataataataataataataataataataataataaataaataaataaataaataaatgtctttctaccgtgacctgtgaaggaaggaggaaagggatggtcagagtccaatccagtattagtggctactggcgtgcaaggctgttatgggacctttaggtcataaggagggggtgaaatggtagggggagagagagagagagag

SEQ ID NO: 210645 - DNA, 700 bp, Cannabis indica
taaagtcactagttttccaagctaaaactctatctcgggatttcactagctctggatcttgcaattgtgcttctatgattcgctctaaaagagtagattgtagggtattattagccaactgccccacaactagctcaattttagctcgagtcatttcatttactagctgcagggagatttgtttcatagtacttatctgactctgcccttttctactcaaggcatcggcaacaacgttggccttaccagggtgatcaaggatctcacaatcataatccttcaccaactccagccagcatctctgtctcatgttcaagtctctctgggtaaagaagtatttcaaacttttatgatcaatgtatatctcacatttctcgccatataagtaatgtcgccaagtctttagcgcaactactactagcgcgagttctaagtcgtgagtagggtacctctgctcgtactgctttaactgtcgagaagcataggctattaccttttcagcttgcataagaacacagtcgagaccttctcttgaggcatcacaataaacaacaaacttttcctgatctgaaggaagagttagtactggagcggtaataaggcgttgctttaactccaaaaaacttttctcacaccgatcagtctagaaaaacttcaagttcttttgggtcaactctattaagggtacagtaatctttga

SEQ ID NO: 210646 - DNA, 817 bp, Cannabis indica
tggagtccttctacgtttggtcctagtactctcgtggaggagtctctagttgtagaaggttctctcagaactaagaatcccacatcgaactttatttccttgactcttgaattaaagtacctagccaccttttgttgatatgcttttaatctaatcccttattgttttcatttgtcttcgaatcgagggattttaccaacaaatggtggttagtctcttgatcgtattagagtcttctatgagatggggtaatatccaaggattagtaactctaattaaaatgaatattaattataattgagtaattatattattagataattaattatatgaaatttttgagaattgttgcattaagttaggggcaattttgtaattttgactcgagaagggtagaaattataattagactatattattatatagtatgttcatattgtcttactgcaagtgaattctgacaagatggcactgtatagtcacaatcggatattttggctcgaacccaattcgaaatctagctaaaattattttattgtgtgattattttataacataatatatatgagagtatccaaatatatatgtgtgacaattgaaaggacagaaatgcccttattttctattatatgatttttatgccataagaaaaaatggtcttttgaccaattattactaaaatgagttaaatcttttttttttctttttggctaagtgcaaaataagaaaacaaatctatctttttttttttgaccaattattatcatctattcttttctttaattaattatcttcttagattaagttgaagaaaaat

SEQ ID NO: 210647 - DNA, 1075 bp, Cannabis indica
ggatttttagattttaatgaatttcaccactaaaattgtgtatataagcaaattagatttaatatagacttgtgcttcaaactatactagattctttttatccatctgggttctaaatttaccaattgttataattttttggttccatacattgccaggatagacagagatcctattatctgaaaagaataaataatgaaccacttaaccatcatttcaaattttcaattcttgtccaagcttggtaatagttatatggaagatcttaattttctcatggtaaaataatcaattataagaagtttaatatattcttagaacttgcattagttttgtttaatatttctgaatcgtgccttttcttcttggattcttatttagtttgaacaaaatgagatttttctatgtataacattttcccaatttttgcacatgaatttgcttctttttttttttccaattttagctgtttcttttttttttttattgctgacctttttgtcttaattacttatcctaattctttttaataacatgtaacagccatttgattggttgaagaagacattttttgagaaaactgcaactgaaggccagtgatttagatccaactatagagactattacagtcatgataaggttcattctgttgacagtggagatttttgtctacttcaataaacatgttatgcatttcatttcaatcccttattggacattaagtagttcaagtaagaataatatgttcattgaacaaacacttagacatgtttgttgtgtcacatacattaatatcattcaaatcaattgaggttattgttcgttttcaatattcatgtcatattgcaattttctagcatggttagatctattcttcaaagcacactactaaaatcataatttaattttattttatatgtaccttttctatttgtcttgggttttcttttttctttctttatattatatatactattttatttttatttatttctaaatataagctaatgagaaaagaagaagaaaaagaagataatgtgagattagaaagaggtatcaaaatgtagaaaataag

SEQ ID NO: 210648 - DNA, 891 bp, Cannabis indica
gatcttttcatagtctcgttcatcatcttcaacatatctttatatattaaaagtggctatctaactgtttttcttagtttaacggtgtttttaattttctccgttaactcctcattacaaaaaaaaaatctccgttaaagttaacagagttgttactttaattcattataattattttattacttactttaatcttttcaaataaataagattaataatatcaggtattttttttttgttttaacgattttatcgaaagtcaagtagataggtacaagtttattgccaggctcaacgatttgtattttggggttttgtgatgaaacaattcttcaaagaaattcgatacaaatcgaatatgatcaaataaatcctaaaactttctcgaagcggctctttatagtttccctctttcaagacacagaagcaactagtagcatagtcaaaagatgaattaattttgattgggttctgctatagagaggaaataaagccatggctgtgtccattgctcccagttacgtgctattaaatacttttgaatttttcaatctgaatgatttttgatacggatacaccaatatacttttcctgttttttatttgttttggatacctctatgatcgaggagaagattccaaagtagcaggttttagagcaattgtgttttgcaattatcagtaggagattcgtcagtgctacctcccttattcaaatatttgtttcaaaccatgtaattttattgttcattagtctttccgttgttcatacaattgatgttctttttaatttgctatcatgtctgtaccgactacctttttgatcactcttgaaattacacacatataagcatgttacatatctcctgaacagggccggcccaagcatttt

SEQ ID NO: 210649 - DNA, 835 bp, Cannabis indica
tgaaccaaatgacacacaaagtgatgaaatacttatgtttctttatcgatatttaaaagataaagattacattgaaatggagttttatttagggcataaaacccaataaagtcccacttgctctaatataaaacaatacttacattttaattaatcctaaattctgacggtgcttttcaaatgcagttcatgccaagactttggtgaatggatcttctaggttgtcctctgtgtccactttctccaccagtacatcccctcttgccacatattctctgatgatgtgatacttcctttctatattcttgcttctcttgtggcttcgaggctctttactattggctatggctccagtgttatcacaaagcaagaccagtggtttttccattccagggacgacaccaagtccatgaaatcgacagaagttggtcatgtctctcttattgacatctttttgcatgggtgcaagctttttgtactgggccagtgactgagtggccatgtaaacactttctatgtcctctgtcaggatggtaaatgcggtatacttagtaggattctcctggggagcttgttcggttttgccagtgaactttcacttttttccattcccctgcctattattgttgttggacagtttactgtttgaatttgaattgctcgagtaatggcggagctggacagatgtcccagtagaagaagattttgacttgccaggtttttgttcgccttctgctcgttgaatggcctcttcgagtttgataaaaccttctgcacggtcaagaaaattgctcatcgagtctattggaccgttttttcttatgtccttccaaag

SEQ ID NO: 210650 - DNA, 1003 bp, Cannabis indica
acagctcccaggattgtacttgctggttatggggttgatcatgaggagctagtatccattgctgaaccacttttgtctgatctacctagtgtccctcgtcctgaagagccaaagtctttgtatacaggaggtgactatcgctgtcatgttgattctggggtatgtctatccatcaagtaatctttgttctcagtacattttcaaaaatttaaaatgtaattatcttacttcaccagagaacccattttgctcttgcgtttgagtttcctggtggctggcacaaggagaaggaagctatgcaattgactgttatacaggttttgctactgaattctttaattacttgatgtgtctaatattctttggttcccttcttttaatgtactactgtttgttctctaaattccttaagcatgtctacatgttttttttgggtgatatttgcgggaaataataataatcttccgtcattgtagatgctattgggaggaggtggatctttctcagcaggtggacctggaaaagggatgcactctcggctttgtaagttgtccaagatacattacttgctgcaactgaatgtataaaattctgtttttattcctccaagcaataaaaatctattatctgggtggatttgttagtttttttttttttttttttttatattttttattcgtggttctgttttgattcttggactattcatcatgctctctctccataagtaataaaatgaatagccttgacatctgaatgcacgtgctgatatgatgatcagatgtacgtgtcttgaatgagcaaccacaatttcagtctatttcagcattcaataacatctacaacaatactggcatttttggtatccaagctaccactgtaagcagcccttttctccaaatttaaattttttatcagaaaagaaaatgatagtgggcatactaatattgttatacgtacacatactatttggtatccaatctaccaatgtaagcaggctttt

SEQ ID NO: 210651 - DNA, 560 bp, Cannabis indica
ggaagtggtcggccatgaagaagaaccgtgagatttttgccaataatgcattctcaccaatgaaaccaagtgaaagaagctaccaagtagtattgaaaccacttagggagtgtttaaaagtgttttttggggttgattatgagttgtataagctgtatttattctagttttgttgttattattgagaaagatcaatgtttgagcttttaagttcaaatctaggtccttaatggtcgattttgtttatgtgggtttttgctactattattgcttggaatatgtttatggatgttaaccgacacacttgaattcaaaatcaaagtaagattagtataataatatcatatgtgattacatgtttagcgtgcatatttatgtatgtctgttagataacatatcagtaatggcagtatgttcatagagttgcactgaatatcgacggatatatgtttggcatagtatagattgatgctatcacattggtacgactagagtaccgagtataggttgatattattataaatagtaccgtcgtaagaatattctagacttagtacgtg

SEQ ID NO: 210652 - DNA, 831 bp, Cannabis indica
cttggactgtgttggtgacataattgtcataacaaaatgttagttaattctgttatgacatgttcgagctagtaagttgatttgatccaagagtgagggtaattcaaatgtgtagccaaacataacaaatcatccatctttggctctacattttgagttgcaaacaccctcttgagaaagagctgttctggtcttggaaaaacttagcagtcaagtatgtttagtctgaactttgctaagggaacatacttggttagcatgccttttgggttttctttggttctaatcttcatcacttggacttcaccttttgcagtcacatctctgatgaagtgtagcttaatgtctatgtacttagatctttcatgaaacataggattcttcattaaatgtagtgcactttggttgtcacagtgtactacaatgtcttttgcatttaagcctaattttgatgcgaaaccccttaaccaaattgcctctttgattgcttctgtggcagaaatgtactcaacttctgttgaggatagtgctaccaccttttgaagattggatttccaacccacgcatccacctaagactgtgaatgcataccctgttatagaccttctagtatcaatgcttccagcataatcagagtctacaaatccttcaacttcaatagttcggttgttactgttgtaaacaagtcccaaatgcattgtgcattttagataccttagaatccatttgacagcagaccaatattcatttttaggatctgaaatgaacctactcaacatgcttagactgtaggcaagatctagttttgtacacaccatacaatacatcaaa

SEQ ID NO: 210653 - DNA, 1000 bp, Cannabis indica
aaattaacctatattattagtagttattttcaagatacgtagtatttgctttgtccttcgataagggttaaataataatcaagtattttatacaaaataatgtattgcttatgccttctgctattgtgatcactttcactgaaaattacactattaatatggtttcctcggtgaattcaggaatttgttcagcaaaattagaaggaaagtaaatataaaattaattttttaaaaagcataatatagaaaaaagaaatatacaaataaagagagtataaataaaaaaatatttataaaattatagtgtaaatgtaaaaaaaaaaaaacttagaaaatagacaaaattgtaaatttttttttttttaatattaaagttccagggtgagcatatgccatccgtagtcctatgttggattcactgattgaagcataaaatttgccatgtttaatatttttaattcataacgggaaggacctaattacattgataatttatactttaaattatacacaatgatcaactgaataattaatgaactgttaagtgtttttgagtcactatttaaaggggtaattacaaaagtaataaactttggtaagtttttatactgtcacacggaaatttttacaaaaatattgttctcattatttttttttcttttatattatacacactccaaaatacatacgaagcctccatttttaacatctacggaccgaactactagagtaacaccagagtagctgaaaaacaactattaactctgacaatagatggagcaaaatcattaaaatcaacgttaaaaacttcatcaataacatatagatcaacgaattaaaaaggttagaagtttacacccactcaaattcttttaaatcaaaaattacaaatgatgctcaaacatagatttcgaaattcttttaacctgttgtttgagcactttaaattctcaaacataatactggagctgtcatggtttttaatattatttttgagttt

SEQ ID NO: 210654 - DNA, 633 bp, Cannabis indica
gtagctatcttatatgaaacccacttctaccgagtttagatccttaaaattgagcagtttcaagtttgacattgattacaattcttacagagtttgcctgttcacctttttgtggttgagagtgatataactgtcaaacttaatggtttttccgaaaaagtggatggtttgaagcttaagattgatttgctgcatacttcccagtagaagatttcatctgatttggttgagttgaaagagtttgtttatgcacaatttatttcttttgctgcccaaatggctacaatgcagacacaatttttatctgtgtttgttgattccattgttaaggtatgatagtttttttatggttgttttcaaattttatttagtttcttacatatgctttgttttacaatttttttacaggacaaagccagtgacttttccaataatgacggtggtagtgataatgaagaagatattgattcagagggcaattaagaagcaaatgataatgaagaggaagatgctgaagatgaagatttggatgaaggtagtggtgatgaagaggagggtagtgacgaagagcaaaaagatgaggatgataatgaagattctgagttcaaacgaaaagatgataagggcagtgat

SEQ ID NO: 210655 - DNA, 610 bp, Cannabis indica
cgcgtttcggattttaatgttttccaaaatatgatggcttttctatggcaaccgggaatgggaatgtatgtcaaggaactcaatcctaatctatttcttttccaattctaccatgaagttgatatacaaagagtcatcgatggaagcccgtggacttatgataggaaaccttttatttttacaagattaaaggaaggcgaaaatcctcggcttgtggagattaatcatgtcgatatgtgggtgcaattccataatttaaaagccgggaatatgacactcagtgtagttacggcactaggaaactttattggatcgttcgtggaatcggatccgaataactttgtgggtgtttggagggactatttacgtgttcgggttcgattagatgttagaaaaccaatcaagcgtcgtatgaagatcatcaacgaggattcttcgtggtattgggcgaactttaagtacgagaggctgcctacattctgcttcatatgcggcatcataggccattcggagaagttctgcccgaggttgtttctgaagccattacacctccatgagaagccttacagcttggatttgaaggcaacaacccaacgacggcaatctcttt

SEQ ID NO: 210656 - DNA, 689 bp, Cannabis indica
ttttttttttaaatttcttatacaaatatattatagggataatattaaaaaaaaaatacaaaatcttttatgtacacttgaaaatttagtttatacacaattttagttaaatttattttcattaaattatcaaaatatccatagtttaattacatgatagatctaatacattggaaagcattttataatattaatgtaaccctctaccaatttaggcgcgctataatattttttttaattactgtacactcatttactaatcaaataatttatttagaagtaagtttaattaaaactttcttaaatacacttaaacttaaataaatatatacaaatatatattttaggcatggccaactataggctaaggtaggttaggttcgacgcctagggctcactcattgtaggagctcaaattaaaaacaaaaagtaccttttaaaaaatatacgtatatttttttaataaattttaaaaataccatatatctttatattaaaggcccaattttttttttacctatgacccatttcaactcaaggtctgccctaattttaggatctcgtttaaaagttcatgactatttataaaacaggttactgtaaaagttgtcgtccaacgactcaaaaaatgtgagcctaaactatcgcgaagacccgaacgctccaggtctaatcgtcttgatatgtac

SEQ ID NO: 210657 - DNA, 717 bp, Cannabis indica
tgattttgcttttataactctgacatggacaataaaaactaataccgagcgcctaagttgacatattgtcaacttggactgtttccaatcaagttcttgtaaaagtgtcctgggccattttcctctcataagaaatcaagaagattaaaggaaactcggggagaaagccacaatcccaaaaccttagaaataggacccagcgcccaagttgacagtcaacctggtgtgctagttttaatcactcaaatgccaaatctgatttgaccatagaatctggcatggtctaaaacagggtaggagacctctttctcaagtttaagaaccttagaagtatcaaaaagacattccggaagctccaaaatgagcacccaaggctcaggttgttaaatggcatggtgcgctggattctacttattcgatgctgattttgtttcgaccgtccgcctaggtttttacaataattaagatccatgaagtcagagaaggcaaattcacaacttcacatttctcatttttgacatgggaaactcactcaaaaataaagagttttaagtctctcattttcgcaaaacaacaacatccctgaaaattggggaccaacttctccagaacacaaaaatggagtaagtgatgtcaaaatatcacttaggcatcataaagtatatcacttagacgtttttcacttacccggcgtccaggttcatgtcatatgtcaac

SEQ ID NO: 210658 - DNA, 724 bp, Cannabis indica
tctcaagatcttttgcgttctggcattcagagaactattggctctggtacaaatgttaacatacttcaacatccgtggctccctaatttgaagaatccgtatgtatctgtgcatcatcctgggttagtgaataaatatgttgactcgctcttcataacagattctagagtatgggatactgatgttgttagggacatgttctgtgcctcggatgctgctgcaatcctaggaattcctctcagtctaaatgctacatgtgactcctggtcttggatgtatgagaatactgaagaattctctgtgaaaagtgcttacggtctcctccaaagcagaaacaaactcagcttactaaaaccgaacatagcttctgggataaactttgggggttgtgtataccccccaaagtcaaaaacttcttgtggcgagctgcaacaaacaaccttcccacttgcgtcaacctggtttttagacatgtggaagtgcctactgcttgtcccgtgtgcaaagctcagcccgaaaccacatcccatgctttgattttctgcaacattgctcttgcctgctggaggaaggttggagttacctttgtttttgatcctggaggccaattccgcagctggttagagttgatatttacctcagccactgcagaacaaatagcaactgttgctatggtttgctggtccctttggaaagccaggaacaacactgtttggaaagcgaa

SEQ ID NO: 210659 - DNA, 742 bp, Cannabis indica
attacattgaaaacacaggtctatatacatgaccgagttacaaagtcaatccatgatagaattggaaaaaaaaaaaaataaactaacaatgcatggattaaccaccaactaactaagcttaaagacaaatatacttaactatctattctaacattgttaaactaaagttaattaatttgtattgtgaatgagatttctaggaagcatcaacgagattgctcttaaggtcatattgtttgtattttccaatctcaagtaaaaaaaaaagtgaacatcacataacacgcatttattggcagaggttagagagtcacacattgctaatgtgtagaaaaataatagaatatataagatgaatgagctactcttcccattgtcatatgccaattagtttttggatggaaccccatgcacattgttaaattctagcacacggtatcagagcaaaaaagaaaaaaaaaaccctttaaatgactatccgatctaaaaaaaataataaaaaaaaagtcgattgaagtagagcaaaaaaaaaaaaaaccaaaaaaaataaaaaaaaaaaaaaaataactagagaccaaaagtaaaaaaagcaacttgtgattcgaagatagtgagccaaaaaaaaatagagccaccaaaatccagaaatactaatctaaaaagtagaacaaaagagtcacttgtgattatggatagtgagttaaaaagagtcgttatgatcgagttgtccaagatagtgaac

SEQ ID NO: 210660 - DNA, 528 bp, Cannabis indica
catttttagaatctggtttttgggtatgttttatttgatgattttagtaattttgggttttagagtcaatgtgctgtaataatttttggctttcttgtgtaatctgaaaagctatgtatttactgatgaaaagctatgtagggcttttattttgcatgaagaaattgttgttgtgtttgagtagttataaattttgtttaatttataaaaactggtttttgctgtgtgtttatttgttgttttttagggttttcgtgtgttcattgttgtttattgttggacatttcattttgtgttttttttttacaagaactttgttattaaagtttcatatgtactgtttattttgagttttcctttttagcacacagttcgtgtttttatttttttgttgttttttatattggttttaatggttgtcatggttgagtttttgttgtttacggtggtgttatcaatgatgatgacttggttgtttgggcattacgggcttttttgggtgtgggagtggatttgaggtttgaggtt

SEQ ID NO: 210661 - DNA, 535 bp, Cannabis indica
ttcctcttcgccatgggagggaatcaggaggatcacacgctgagtaagctaacttttaagtcttgtaaatattgatattgttaggtgtgattttccaattaattgtgcttgtttgttgttgaaaaaggaagcaaggaagaagtggaacataagctgaaattgaggcagattgctgaagcaatgctgaagcgaattcaacattctggcagtgacgtggaaacacgagtttcacttatccacctcagcaaattcggcccagtcactcaaaatacaccagctggctgttgtggaaggagagggactaaacctagtgggccaaagtggaaaaagattgggcttctactttggggtatgaattttgtaccctaaaaacccaacacctaaaagaagagaaaagaggaagtacacctccatcattctctaacatgtaaggagctgccatttttttgaagaggagtaattgcagcaagtacacagcagaagaaagaagagagggggaccaatcttttgcgtttgaattttcttttaccttctc

SEQ ID NO: 210662 - DNA, 516 bp, Cannabis indica
gaccaagacccggactcaaactcggacatagagccatactcgtaccagaaatcaaacttgaacccaggactcggactcaaacctaggaatcggacccagaccgagatcaagactaggacccagaccgagactaggatcgagccctaaacctggattgggactagaaccagaattgggactgggacccgggacttgggacccaagactcggacctgggacttgagaaccgaaccgtgacctagatgggggacttgggccctgaacccgaacttagacccagacctaaaccaaggatctcgacctagatgggggacttggacccaaacctaggccccagaaccgggaccgagacccgaaacttgaccctagactcatgatagagaacctgcccttggacccagaacctaggacctaactactgggacccaaccccaaacccgaacccaatcccaaacttaagactcagcccgggacccgggacctaaactgaaataagatagggatccaagaccgaga

SEQ ID NO: 210663 - DNA, 819 bp, Cannabis indica
ttggccaaatctaaggtaaacagtttggtgctctcatcgagagcgaattaatatcatatatgatcaaataccatagtgaacaagaggagaactctggctacattctctaattcatcgggtctccttcaagatcctttcattgtagatccagatgtccatgttacagccacgactggaatttccatgaacactgcagatgtggtcaattatgccatctcaagagacaccacaaatttggccactacagctggccagggtgatacaaacatccccatggatctgaacaatcggcccttgcccctaagaaaggaccctccagtggcacctgccgttgaaggaaggacccatggggaatagccgccaagtacaacacatagacctagtccctaattctatgctggagaaacgggaccaggaattggcgagccccatgtagacttgggagaagatctcgagttagccagacttagggaggctgtctgccaaggcggccaaactgaagaaccacgtgatgctaattgtagtgtattttctcagtagagaagtgaattcttgagatggtgtgatgactaaaagtacatccttcaatttcactaggcgaagcttgatcgccacaactgagaagccaacaacctaataaggcagttcaatgaaagaactgttggaagaggcacagatctcattagagatccactccaaggaagactagtcgaccgattggggagggtctatcaacaaactatctagccaggttcttcacgaaccaggatagattttcccacacccaaatgaggaaaagccttgccacaaaggtctaat

SEQ ID NO: 210664 - DNA, 539 bp, Cannabis indica
tgaggacaatgtacgataagatattgttcttagttttatggtactaaattaggtacgcaactgaagatttataaatttgattaccattgtaccatagccccaatggatctccatatgtataaacattaaatcaaaatataaattacatgaaaggaatatatacctcttaatgactatcagggtatccatgaaaattctcataaattgaatccttttaggttgattagtaactcacaccatattcttccaaattgatccaccacacacaaggaatagtggtagctattaggtaaagtgattaatttgttcttgataaattctcaacacatgagcaagaactaattgagagagaaaaatagtttttccttttcgcctttgaattttgaaaatacaatgtcaaaagtttcatctaatttctcaaatcaagcttctatttatagtagttgatttcccattaaataaatcatatttaattaattaaataaatatctataaccgaattaatttactgatatgtcagatgagggaatctctcaact

SEQ ID NO: 210665 - DNA, 585 bp, Cannabis indica
tattgtcttgactaattttgtcttaaaacttttatcttttcccatttataatttgaacaaattatttatttattacaaaaataaataattactattttgccaattcaaaatagatttttctgaacaacaacatactactcattattcctatccttgacagtgtttcaagttggcgattcgggaaccatggacctataattctaagctccaataaactagattatttattgagtctcatcaaccaaataatctttgtttattaatttaatgattactccactataaatattgaattgaactcttattaattgtagaattatatttactgagttttactacagtgtccattgatataatcaatttcagtgattagccctccatatgttagtttgtaattagttttggctaaattactattttacccttctaattaatttttatcctagtaccaataactcaatagtagaattataatttagatcccctctaaatttgtgcgcaacattccagttttagaattaacacttaaagggaaccaagagtcgatccgttaggaaagttagaatttcataattgtagatcatg

SEQ ID NO: 210666 - DNA, 571 bp, Cannabis indica
aatttagtccatttaaacattttttcctaataaaataaagaagataaatcacaactattctattttaaaaaaaaaattaataaacaataaaaaaatattattttttatttaatctattatatttttctattaatttatatttatcgacattaatagttccctacaaaaatgtcacttttacataaatacaatttcattttcttattataaaagctctcgatttcttataaccagacgacgctctctctctctctcggtttcttatcctgacggcgacgacaggtcctccttctccttctccagtgacggcaggttccttttccaacgtcgttcaggtcatccctctccggcccggtccgtgcatcgtccatatactttcggtaattcattattcctcattcaaattattacttattaataaattttgaaagaaagttgtttcggatcaaaatttatgaggctactatacattttgtgtttgaaatttggtcaaactatattccgtgtattagtatatatgttattgccttcttcttcaattggataatggagctttcatacagtactgcaa

SEQ ID NO: 210667 - DNA, 776 bp, Cannabis indica
tagaaactatccatgcatttgactttgaccccaacatataacatatcggccaccccaagacgaaccctaacagatatctataatgaacacaaaaatataattcactaattagttacagagtagtattataggcagctttactaagttacccaacattactataaataaaaagtgtcactttttttttttggctgttgcatcgaggaatgcaagagagtgtttttcagaattaatcaatgtttatatatttatgttttgttaaaccttctgcgtattgctctatcgccttatccgagcttcatgattatatactaaacgtagttattcggttaataattcccttccgagtaatattattgatgtaattacgcaagaatcgttataaataaagttcagtttttattaaaaaaaatatgtcacttttttagttgttaaattaaaatatgtaaagtttagatgttaaaatatactaatcacaatataatatttttttttatggtgttgaatatcttaaaatatttttaagatcttttagcattgtcctaaattatagaattaataacgtgtttttcttttcttgtgcagcatgacaatatctgggtgggtgtttatgattgcagtgggtttcaatgcggctgctaggtaatctgtatatcagtattgtataaaaaaacaacaatgatgaaaagtgctacatatttctcaacttttcttatttaaaaatttttagtaaaattatacaaggataagataattagaaaaaattaggattatct

SEQ ID NO: 210668 - DNA, 570 bp, Cannabis indica
gttatcatcttctactaccatcccttgctcgacataaaattccttgtggcgaactaagtcacggtatttttttttagcaacttctgaaacaaatttttcagcttctcgagcatctttctgtggaggcttatgagcacaatgcttgatttttggcattatgtcctttgatttagtaaaattcagccacacaaaatcttttccaacagtcccaatccacacaagtgtactcacaacataaaaaaatttcaatactaatccaccacaacaagattcaaatagcacaaacaagattctgattacctaatattcactttagcacaatccgttatacatttttcagaatccaaaaattttacctcgattttctgctgtgttgaaactatcctgtgtgattgcttcgggtctaatagtgaggtcgtgtaaaatggaggggtcgagctattgattgtgattgatgcttcgtgtgggactggtggtggtgctcgacagtgtcttgctgctgaattagttacagttctccttgagtggcttcgagtagcaatggaaatggagctcgtgaaggtggtgttc

SEQ ID NO: 210669 - DNA, 615 bp, Cannabis indica
ggttgcatcattggaacttagtacatcgagggagcctagaagggcgtgatgctagtgtgaatcagttggatggttgagtggacaaggcatgcatataaaaatcaacaggggtgctatatgtgatagttgactcgagagtcacaacctgcgggatgcacttttagatggcgtggtgtgcatgaaaagttaggcagtcagacatttgcgtgtgggcttgttgtcgaggatgcccacagatgaaggtggggagagaccctcacagttcactcagcagactagatattcaatacaagcatcgagatgagtatcatggagatggtttgttgttccagaatgtaaagccaagaagactcaggacacaggaaatgctagttatctagggtgaaagtcagcaggactcaagtactaagataacaacatgacaatgttggcctaaggtgaaagtcaacaactatggtactaaggcaacatagaaatatcaaggggcgaagagtcagaatgactgaggcattagttcaacatcttcatcaaagtgacatttagaatggaaggatcacatgtgagtatgcggttagcttatgagctatacctcgagaggtattcctctaagagaga

SEQ ID NO: 210670 - DNA, 1058 bp, Cannabis indica
tattcatatttaggatgttaatcaacatacttattggtaaatctagatccttgtaaaatattcccaacacagcatgagtgcaaatacacagcctatggctccgcacatggaatacaatattgggcgtacgaggccattttagagggttggaagaggtatggcacgaatcatgggattcggtgttcgaggatgcttagctagacgagcaagggtgagatagggaagaaggagcgcagtgcattattttctagatgggtatgaatttctttttatttagagtaattattcaagataaatacatgtattaaatgctaaatcaattctcttatattttttgaatcttaaacaataacttgaagtgatgaaggggctacttccacgcacagaagaggaggaatatgtgacgatcatctcttatgatggtgtggagatcctagttgaggttggtgtggatgcgacacaggctgaggaggaaacccaagacccagctagtttcagaagacaagcagaaaaagcaacggaatatgtcaaaaatgctgctttgcccgagggagagactcaggtaccatttttttaattttttttatgattattgtttgtcgttagttgtgtattacttggtttgttgtaatttacataggttgtcagtcattattttatagtttattgtgggttttccacatattatcgatatgacatcgataggttctcgatattttttttatctttttgcttttggagatattgttgattgtatgtcgtcatgttgttgactatttatcgacattgtatttttttgctctatggtatgtcgacttcttgtcgagtgcttgtcgacatttatttagttttttggtttttaagttattttcgatagtattttgatgtgttgttgatttgttgtcgatatttcattaattttttgttttttaagttattttcgatggtatttcgacatgttgtcgacagttatttgattttttattttttaagatattatcgatggtatttcgacatgttgtcaattagttgtcaacagttatttggttttttgtttt

SEQ ID NO: 210671 - DNA, 522 bp, Cannabis indica
tttgaatgttctttactcaatacagtgtcggacacggggataggttaatggttgggtgtatgggcacccgattataatctgggttatagttatgttttttattatgcttttcttactgagtctgtcaactcacaaatatattttgcatgtgtaggtatggacaaggctaaggttaagcagtcatgagagcgagcgaatgaagattttacatgtcgagacggttaggcttggagcgtacagtctttggggcagctggttgtatattgtctagtcgctaggcgataacttttgtattatgcactataaaacatttgtaaatttttttgtaaatgggatctctgttatatatatgtcattattttagtatataagtaattaaataaagttttaattcttaacaattttcaataaactctttgattagcaatgggctacacaattaagttaaaatcataataacacacataaactagtagggttttacaatttagtatcacaaccgccaggttgtcttccgaaagt

SEQ ID NO: 210672 - DNA, 551 bp, Cannabis indica
gttaatcatgatattggtacgaacatttgaatctcagtctatactcattgaatgcggttagtagacttacggtaatttgatgtataagcactcaattacaagttagatatgattttttatgttatgcttttcttattgagtttattgactcacatatatgtttctatgtgtaggtaaaggtaaagtcaaggctaaaccgaattgagggcagagcttggcgaaaattgtacatatcaagtcgcataagtctagagggttgcgatctttgatacatccttgacacctttttgtttatgtcattggatgaaattttttatactgtatatgttatgtatgttttagaactagatttcgagatccaatagcccaaagctagttagcacgagggcataaaaattaagtgtgcttattcaactttgagtctcataaaaagtcacttttctttaaaaatcctttaattaacaaagattaacacattaattaaaaaaaactaatataagactatattactaatttaacacaatataacattcaaaagtttgcaattatcg

SEQ ID NO: 210673 - DNA, 842 bp, Cannabis indica
tgcctagttagaaatttagaatgctacaactgactttttggtagcgtttagttggaggaatgaaaacatataaataggaatgaaataaaatttaaaatgtatataaaatattaataaaaaattattaaattttttatcatgttacgttagaatgatttttccttccatttcaaaatggaatagtcattccacgaaaatagtacaaatgacattttattagaattacatttcaatattttaaaatgcaaccaaacaaataaataaaataaaaattgtttcctttcgatttcattacttacgaccaccaaacgccacctttgttcctatgcttaataacttattttgagtaattttttcagtcatttgcctataatttttcaaagtttgcctataaatatctagtcttttaataactttcttccattagatttaggacacccttttggatttttccatcttcattttggtatccatacattttaataaaagattttaatacatttcattatggcataatggcagttaggtgtcaacatgaaatttaatttcatcaaagaaaattcaaagtccaccgattaccaattgttataggtcgagccgagtcattgaagtcaaagtagttggtctctttttttttgttagcttgtagttaccacaatcttcatcgtcatcatccgtgacagtctgagacacgaacaattccattgatacgccccctgtaacaaggtacgttttctcgtttttagacctctacttggattttactagctgtagttgagttttttctcgttggcgcatttcgtcaaacatgatgtggtagagtgttcaattaacactgtagt

SEQ ID NO: 210674 - DNA, 642 bp, Cannabis indica
ccattaattaagactatattggtcaccattatttttactgccacaataatagaagagttattttccttttaaaccaggaacataataaaataataaaaaaaattgtcaaaaaagagcataataacatgaaaaaaatgatggcaataatttaaaaggaaacgattttttttttttttggaaaaagaaaaggaaatgattttaaaaatgttatatttaggtatatgtacgttctggtataaaataaaaataaaacaaaggataattgaatataagcgattaaaatgaccattatgcaactgggttttcaaaaagagttttaaaatttgtcacgcctaacaactttttaaattgaacaatctcaataatttaaataaaaattttaactgttagaacaaaaattctaattaactaatttttatattaaatcgttgatatctatcttaaggagagattgaatgaactcttctcgtactagatctaatgacgtgcgactgatcaaggagtaactccatcataatcatatatgaatcccatttcacttatcagctaatgattaatgaacatttgtttcatcaaaatatatttaatctatttggagtttgtggccacatttttctactagtcaatgaaagaaaagaaccg

SEQ ID NO: 210675 - DNA, 939 bp, Cannabis indica
acatgtttcctactacagttggaaccacctcctcctccactacaactttttttcccttagtcaccctctgaaaaccatcaccatctgtttctttcacagctttattctgttgttgctttggcacccagatctgcttccccttttcctctactttctcctttttcctgcagttatcagtctcatgaccaataccagcacaattatagcaaacaagggggatccattcatacttaacatccagatcaatatcatggttaactcatcagtaaaagaaatcgagttaggaaagtcctgtgaaaggctaacctgaactagaatcctgggatactgtaacctttctctgtgtttcgtgatgttatccttttgtaacggttccccaatttggcttacaatcttgaagagagcagtctccccctagtatttgatatccaatcccttcaattgaatccatgtaggaacattagtaacttcttccttcgtaaaatcatcaatgggattcaacggcttcatcaccattggtttcctatcaaagaacacatatccttgctgcatcaccttgtcactttgctccatgttctgaaatcttattatgaaaatccccttagcaaggagaccaactgtaacaccctaactattttaggcgtattacgtgatttttaaacgtactgtgcagctcgttgctaatcaacgaggtttatggaaaacgtgattaattaaaattttgctttttacattaaacttataaaccattttgcaaaaaatctcgggatcccgatttataaaaatatttacaacgtttttactgttcaacttttacatcaaaataaagtcgtctaacgacagttacaaaatctcagccctgctgtcccgaggatcgtacgctccaggacctaaccgccccgacatgtacaatctcatatgctcggtcacggtccatca

SEQ ID NO: 210676 - DNA, 571 bp, Cannabis indica
tatgtatatgatttttttaagtgttatatagtgtatattgtagtgattaaattttttcttctacaattgtgtacgtagtagttattttagtgtaatttttatttaaaaagtttttattttcgtagtttatttgctacgtaaatatgatatgatttagaaactttttttaatattttttgtgtggtgtagggtgaaactatgactaactttttaataatttattttctagctagttgtagtaaatgtaatttgttgattaaaatttatttttgtgtataatttattagaattgagaagtttgagtttggatatgcacattagttgttagaatggaaacttagtttaaaaagtttagactgtatattgcctcaataaaatgttaatatatttgatattgtaggttgttgatttaattagcaaggaacaactttacaaagtgaaatgaaattttcttgatgattcattattagagatatgtagaatcacttatttctttgttcaatgatataatactaattttagagatttaaatgtgtgttgtggtgataacgaaaggttaaaacttatttgt

SEQ ID NO: 210677 - DNA, 932 bp, Cannabis indica
atactacaaaatatacacgctgatgttgatgttgacaaattttttgaacatttggagaaagtagttagcatttcctagtgtgttacaagaaacttcatctagttattgtattgaaattttgttttactttgattattatcattagaataaattgtttatttgtataaattgttggtatcacaatcaatgacgcctttgttaaagacgatagagtaagtcaataactataaaaataataaagattaattgatcattaatttaatgagaattattaaaataatatatgtcagaagatcccaaaaggtacttacgtttagtttatagatcaaaccccaaatctcaatcaaagattgtataagatatctattattttattctatttgagtgtaataatatattttattaattttttgttttttaattagaaaagtagaattattttttaaaaaatattttataaaactgttttttattttttaatttatttaattgacaattaaacttttaaaaatttacaaatacaaaaaaaaaaaaagtaactgttaaaaattttttaaataatttttttactttaatcaaggactccgactctcaacttggaccttgggacccgaccgaccccacttttcagactcgaatcaaggtttcatcttagacttagatctaaacttgacttaaataaaatcaaaaaattaaaattaaaataaaagttatagaatatactcttattttctagttttttttttttaaaaaaataattaccaaaaataattttaatttttaaaagtatagattttaaaaataaaaaataaaaataataccaaacacaaagagatcttaaccattttgttttttttttctttcaatatggaacaaataagatgcacgtatcataatctcaggcttccagtctattatttggattaattaat

SEQ ID NO: 210678 - DNA, 952 bp, Cannabis indica
atatttatttagtggattaaatatttaaagttatgtttacattacttttgtcattaccagttcattaaattttattaaaatagattaagttgatacgtgtcaatatattaatagtctattcatatatttttaataaaaaaattattatataattttaaattttattatacggtaaataaaacataatcaaatgtattttttttttgttaggtatttttcaataaaaaatttattaaataattataaatttaaaaataattaaataatattatttaattcataaaaatatataaaaaaaatactatttataaatatatctctttccttattttttcttctcggaatttttttttttttaattttattattatttagttatttttttaatttaataattaattttattaaaaatatgagtaaacaactaaatgttgatacgtgtcatcttaacacattttaataagatttaagtaatgataaaataatgaaaaatgtaattttatatatttaatctaaacagaagaaaaaacatgatgtggtatataagtatataaaatttataatattaaatatttatgccgtaaaatattttaagtttgataagatttaatagaaaaataatacctgaagtaacgaaaaatgtaacttaaataattaatttgaagaaaaaaaaatatataataattaagtatataaaaccaaaaacttatactttatgtcacaaatattcttatatataaatagtgatttctatatcaattataacatgatttttaggagatggtttgaaggcgtagtagatactagataagatggtggtcagtggccacttggcaaggaaaaataaaagaggaaattacacttagtatgggattttaaaagttgttatgataaatatggtatatttaagtttggccaatttatatggtatttttttatttttaggtttttt

SEQ ID NO: 210679 - DNA, 523 bp, Cannabis indica
attctaatcacaacactaaaaatggcactaaaaggtatatttattattattattgtattattttattaatataataaaaatattttaatattaaatatttatcaatatataattattttttttcttaaaagtattatttaactattaattaaaaataaaaaaaaaaagatgcagtgttctacagtgtcccattattattagtcactcccatcaaaataagatgggttatagggttagattggagtattttataggaaaaattatactatatataggtttttaatgtgctattgaagatgaccttagtgaacaatatcaaaacataggggaatgagaatcacttctaccaaagctttatgttttcatcttatatgtataagatcattgtccactccgcatctctttactttacatatttttcttgatattttgtttctgtaacaattaataatttaacactctccctcaaactcatgatgctgctgcatgaagcactgagagtttgcctaaaagaaaacaaaaa

SEQ ID NO: 210680 - DNA, 720 bp, Cannabis indica
ataatttcttttaataataagaataattattctaatattttttttacttagaaaaataaattaaaattatagaaaaaatattatacaatttcttatcttaaaataaaagtaaaaaaagagatattttcaaaggtcataattaaaaaataaataaaattgaagaatcttcatataaaatggaggtctaaaaaaataattaataaatctatagaaaactcatcatattatttcaaaatcattatcatcgtgtctattttttgtggccattatattcaaggttgttgtcatcactatatctcacttgtagttgtcagtatgacattgaaaactgatattatcaacgcatctcacttgtagttgtcatatcattgtcaatagctaggttttccctcaccataaaataaatcaaataatgagttaactactatagaagaaaagcattatgttttcgtcttatatttcggtcattatgagttaactaatatgcaataagttaaaggaaaaaataaataaagatatttaaagtaattttaaaggaaaaaattaattaccaatattattatatatattttttaaaactcaaaaaaattaaagtcgatatgtaatattaattatttctaaatatatatttatattaacatcattaataagtttatcgactctgtataatatcattaatcataatcgacattgttccaattttgcgctttgatgtccaca

SEQ ID NO: 210681 - DNA, 699 bp, Cannabis indica
cttcacttactattatatacattaattaccattaaattctctatctgtacgaactaaggaaaaaaaaacttgaacgtcattatttcagtaataaatgccagcctaattgctttacataaatgcacaacaattttttttaagaaaaaaaaacataaaagtgaccacatcctacaattttttttgtttgaaagaaccacatcatatacatggtaagtttttttttttttttttttttttaatttttttttttttttgtaaaaagcatggtaaaactttttgagtaacatatacaatctacaaatacaatcttaatttacacactcaaatctgcaggatgtattattataatttaagttcgactcttataagttattttgacttatgctaattataatttaggttagatttgtattgtagtataacaatagtttgaacaaattagttgttagaaaattaataatatacccaagatctatttgtatataacatagaacacaatagtaatatataataattaggtatgtgtacctgattgatccatagcaattatctctgtttgatccacagcagttactccaatttgatagtgcaatactatcaactaagtcttcctccctagatctctaaatcagaagcagtttatttatctgattatcaaaaggtaatacaattgtgatgagacaatatgtatttatagag

SEQ ID NO: 210682 - DNA, 296 bp, Cannabis indica
atatatatatttgacacgtctcctctacaagttagtaaaggagacaaaacattgaactttttagagatcatgtagtctggggcggtaaattatatccccagacgagtggtactgatttcaaataagtatttgggtttatatcttttaacttgtatgatgatcagggcaatgcccgaatgattggcattcccatcccaaattggatattctgagatcactgatagagttggactgaccaatcaaattcaaatgggtaggttgtacgaatattacgttgatcccgggacgattgctat

SEQ ID NO: 210683 - DNA, 1399 bp, Cannabis indica
agtccaaaagcacgtgctttaatggccatgcacatctgtcccggtgtaatgaacactttagaaatttgctcgaatttcataggaagcgaccccactcccacattcactaagtgagtcttcaggagtactcatgtagctcggtactccactccacatagagtataaatatgattaagagtttctattatctcaatcttatatcgctttaggcattcatgcttcacatttcttttaacaatagcatgatctcattcttatcacaactcataactttttattacccattaaacctatttcttgggatctccagtctataggtcgggttaccattatgagcgactcatcattctaagggcaatagtcccatacattttttaggttttaagagctgttgggataaaactcacttaacctgtcaagtcagtagctctatctattttctcatcacatgaatcttaagaaagttgttataacatattagctttaataccaacttaaaggggactccaccaacaactgtaaataggtgttcctctattctcaaagagaaattctgagctttgatctctaatctcttaggctcatacttcagttttagattcaagtttagagagagagagagagagagagtccaagatcatagtgagtgtgtgtatggagggatgtaattggagtatcactcttgtagtgattttcctcaatgtgagatttatctttgtaattattcactgtgttaagatttattcttcgacatattaaattttgtactactgactattcaagctattaagattcatgattcattcattctcgagttaagtttttattgtctaatttcaattaagttatagttttgatttcgtgattagttttagttttgtttgtacattcttgaacattgttattgctgtaacaacctattttgagggtgagcattcaccacaaattgtatcagagctcacggttttgagttcaagaatcacatacaaccaaacaagactcatcttcaacatttcaagaatcaaactcgaactttcaagaattagattcaaccaatcaagaactggtttgaatggctacaacaaggtttgaggtggacaagttcaatggtttgaatgattttagcctatggagaatcaaaatgaaggcctttctagttcaccaggggatctatgaggtacttgatgatgaagccatgaaattaattaaagacagcaagaagaaacttgagattgaagcaaaaacacatagtgtcttcctcctcagtcttagttgatttgtgtttgttaaattgagttttttagttttattttaaattaatttgtttaactaaaattgataataattattttatttaattactttttacttcaaaaataatttttactattttttaaaa

SEQ ID NO: 210684 - DNA, 554 bp, Cannabis indica
aaaataaagatatgatatgctatatctatcttatataaataaatagagtatttggtgagatgataagatgctttactttttactaaaaataaaataaaataaaataaaataaaaataaaaataaaaagtacacatgggtgagtcttgcaaatcttaataatacgacattgtagtgtgtatacagatatagaccaagattttgtttttgtctctgaaaacaaaatagtgtctgcaccttacacatgtcctcttctttgtctctccaacataacattcattatttttaaccatatttttaactttattattatttattttatatttcaaattaaaatagttgtaataaggaattgattactttctgttttaattatggtaaactgattcacacaccataaagtttgggaataaattttttttatatcaaattcacaaatatatagacacactcaaatttaattatgtgagtttttgttaaaaatatagtaaattacaatatatgcattattatatatgttacttaaaaatttgaaaaatatgtgtatatataatcg

SEQ ID NO: 210685 - DNA, 777 bp, Cannabis indica
attgttaccgttacatcgaaagtggatagaacgattaccgacggtgatttacgaaggcttggacaattgatgctgaaatgtattagaatttttctaccctagcttattttcttaggttaacttataattttcatatgtttaattagatattaacttgttaacatttggactaattttataatatttgtgatataattgtaattgttttaattgcttccataaaattaatttaagtatattggttagtcatgaaaataatttaaacaatatttaatttaaatgaagattaaatatttaatttagctttcaaaaaataaatatttaatttcatttaaataatatttaatttaaatcaataaatatataatttaaataaattaattttttgaatttataatagattttcaactaaaaaaataaattaatttttaatactatatgacatcgattttaaccttttcctgtcaattctcaaagtatatggcgttggttatatattaacgaccaatgtcatagtgtacatatcacattggttattattaaataactaacgccatagtgtacactatggcgtcagttatgtttgatcttatagtgttgcttgattcagcgtcggtagtaaatttttccaaaaccgatattgaaaaaccttaaaaactgcctttaaaatttaaatttgtagtagtgtatttagaaaatattatattacattaaaagcaaaaccagatttattacttaattattcactaagaagcagagtagtgaacaaaagaagaa

SEQ ID NO: 210686 - DNA, 577 bp, Cannabis indica
gtgttttggcttgaattttcgagcaggaaaatggaggttttctgggtttggaactcaggggccgcgacccgcttttgggcgtcatggcccgcccctattttgtggcctgggattcgagcccaagtgtcgcggcacacccttcgtttttgggtagattcaaacgcgttattcgaatcctcataactttatgatccgaactccattttgggagttctatatatcattggaaagctcgttccgagctctatgtgaatatatgtgatttaaatgccaaatgttatattatgtgaaagtggagttagggattgactctatatttgaaaatcccagatattgtgactaggactaccgacacttggtcaagagcacccgaggatttggaatctacacgtttgcgggacatcaagtaagactgtagattgcacatagagttaagcgcggtggcgctcatgttttatattgtggttgtgattaattaagaacttggattagggttattaccctaaaatgagcagttatatggtccagggttattactctagtatttaaaagacgttgaatgttatgccatgttaaa

SEQ ID NO: 210687 - DNA, 581 bp, Cannabis indica
tgttttcaatacttcttctcgaattcttcttcttgactttttttaagatttatttttttttttgaatacatatatttattcccaaacgctaactatgatcatggtagagttttgtggtaagaatttttctcaaactaaaaatattagaggaattatttaatattttttttaaaaaaaaatttacagttttgagttattcttgtgctatatgaatttccgtaaaagtatgtaaaaaaaatcagtaaacaaatctctacttctcttctttcacctcacctcactcatatatgcatttttatctacttatatgtatacttgttcttttaaagtagatctttattttgaatttccctttaaaacccaaactcaaaccgaaatttgatacaacccaatatcagggtcggtcttaggttaaggcgggctgggtccgtgcttagggcccacttctattaagggtccaaataaaaagaattaataaatattcatatatttttaatcatttttaaaaatattattgttataaaaatagctcaaaaaattattttctctcgcacccaattaattgaatgtgtttgatatac

SEQ ID NO: 210688 - DNA, 1015 bp, Cannabis indica
  modified_base (92)..(92): a, c, t, g, unknown or other
taatattcatatttcaaccatttttttccactaactgaagttactgacataaactaccatttaccaaaatcaccgtgcatttcacattttanaccttacccatacgagtataacatgtgttattcttaccttcttttttattatttactagttttttttttttatgattactaaaagttggcaaaaaaaattgggtgggcccgccactccaaaaacacttattctctgcatcacactaccatggcaaggcaacgtgaaaaaggttgagatgaaaaataaaataagaagtaattacgaatattaaaacacaaatactataaatttgtacttgtgttttatgaaataaaatcgaaattacgagtgaaatgaaaagatgtgatatgtaaataaagggaatagataggagttttaggaggagggctttgtctgtcggttgttaatctatgaaaagtctttgtcaaaatcgaaactccccaagaaaatgcttttggataagattaacatctacaattcttaagcgactaataataaaaatatcattaacgaaaagaaattagtgggaattatctatatattataggaaaattctcgctcccttaaaatagatacattgatggactctgatctatttaaacacccgaaataattttttagttaaattttttctcatggttatatacgttataattatttaagacatcctgcaaaattttaaaacatttagaaaagtttaacacgccgaaaaatacattcaaataatgtattgcatgcgtgactattttattttatacatgtgtaaaacagactgtttgaacattattttctatattgtaaattatttgaatttctcaaaattttgtaggttatcttaaatagctataacgtacatggatatgaaaaaaaaaattagactaaaaaattcttctggatgccaaaacaaatcaagggtgcatcagtacgtcccttctaaaggagtgcattgtaaaataacaaactttaatataattgtgttgta

SEQ ID NO: 210689 - DNA, 504 bp, Cannabis indica
tcataaagttcttgcaagagtcaaaagagaacaaaaaactggccactaccttgggatcgaagccatctgctggaaaaggtcccaaggcaccattgtgtgccaactagggtccctgacccatgcaagaaccagccagggttctaggttaaaccctagaatcggccagcctccctagaatggcaccatgtgtcggcaaggtcagaatgacccatgcaagaactggccagggttctaagttaaaacctagaactggccttcctccctagaatggcaccatgtgtcagccaggtcataaacaagacctataggacgattagggtgtcctatggattgaaaaatatatttttttgttcaaagactcaaacgtgttcttcatgactcaaggagtcaagaatcaaaacaaagttcaaaatcaaatatctttttatcaagaaatcatacattatgtatcttaaagctatcatgcggatcataatgcaaaacagattacaatctaacgtgaga

SEQ ID NO: 210690 - DNA, 1164 bp, Cannabis indica
ggatcaaagttctgaatcaaattcagatctagaaacagaaacagaaacagaaacagaaacatcacaaactgagatttctaaaactctatctgattttcaattttattaatatgagtaacataaaggttgatattgataaatttgatggtacaagtgattacagaacctggagaaagaaaatcaggtctctcctagctcaacaaaaattgctaagggtgctagatgaacctattgaaggccagagggaacctcaaagatccagcaagaagaatacctagaaactgctacaggaatcttaatattcaatctatcagatgcaataattaaattggtagacaaggaagagacttcatcaaagatttggaaaaaggtagaagagcagtttcaacagaaatctttgacaaacaagatttatctcaaggaaaggatttttggtttcaagatgaaccaatccaaaaccttagatcaaaatcttgatgaattcttgagaatgcatattgaacttgcaaactcagaggagaatgaggcactcagtgatgagaaccaaaccatcatcatactttattaactgtcagaaacttacagagaagtaaaaatagcaaatggaaggacctctatcactcttgatgaggttatctctaccttgaaatcaaaggacttagagatgaagacaaaaagaaatggtggttctaatggagaactaaatctgagtagaggaagacctactcaaaggaagccttggcataggaaaggaaggagtcaaagtcacagcaggggtccaaacaaaggacagaacaaaggaagacctaactctaaagggccacaagacacagaaatgttagagtgggtgcaacaatacaatgctaaatgtggggttctttatatgaggaccagtaatgttagagtggtgggtttcaacaaaatagcagaagctctccaatcagcctcacacaattaccaaaacatgaccacaattttagaaaataatctcaaaaaagacatcattccttactgtggagacttcctattcttaatcgacaaacatagtagattcaccatctacagccgttatggtaactcaaccgttactctctttgttccgttagacgaagctgttcgttttgagcctggataaatctcgaaaatcagattgtcaccacaaaa

SEQ ID NO: 210691 - DNA, 683 bp, Cannabis indica
ataaccaaaatgacaataaagcatataatattgctttaatattaatatggttcattaacaaggaaatgccaatttggtttgaagtatgagcactttcaagttgatcccaaatttgaattgtttatttaatttaatccgtactattttattcccaccaaatgtaaatttcatattttgaatccaatttaatctacacaagaggttaaatttaattcaatgtgcatattaaatgagttattttgtattaattactttattaattttaaattatttaatatttattaaaatataaattatttttacttacccaacaacataatatgataagttattattgttttatattttcaataacaaattaaaataaaaaattttaaaaagagaaaaaaaattgtatgtaaaaagtaaaatttaatttactgtatatctattccattttatataaattgtagttatataacataattctttatttaaaattttttttaacgtttttttttaataaaaaactaacgaagagttaacgattgaaaattttcaatcctatttttaaatctaaaaataaataaaaatcatttttttttctacgattgtgaacttttttttttgtcctgattgagaacttttttttttcctactattgtataagttcaattattgcaattttttaattcctattctta

SEQ ID NO: 210692 - DNA, 2180 bp, Cannabis indica
cgagagagagagaactccaagacataaaataaattaggttagaaaataaacaataatctcagtaggaaatctcaatataagatagcatcaacactagataattaaaaccaaacaaaaaattctcactccactagtaattcaaaaaaaaagttaagaaattaatacatgagtaaaatattctaccaagcattaaaatttgcaacataatattcatggggggaatttcatagcaaacaaaacttcaaatcaaattgtttccccctaatctctttattctatgctagccatattctctatgagcaaaaaaattatagcacagagacaaacatataaaccatttagttaccttaccagtattttcgattacttgcttcaccatcggacgatgttcatcgccaccaacagatttctcactacgtccttccttagtttttctttccctgtccttctccttctctctatctctctccgtcccaccatccttaccctccttccgactagaatctctatccctatgccttccctcacccttcccaccactactacccttcttcaactcctcaatctcttcatacattcccatattttcatcttttctcttactcttcgtatcccctgatgctttcgacgacttcttggagccctcaccactgcctctgtgatcatcatcaccaccattccacctatcagttgctctttcatcagccctatccttgcgcctctttgacgaactgtactcatccgaatagtccccgtttcctgaagcactatacaagtcctttccatccttcgattcaagcttccgtttttcactcgatattaaatctttcgaaaccctaactccaccactctcttctttccccttccgatccttgaagctcaaatccttctccgaatccgaatactccttcaactccttcgaactatgcttacttgacttatgcttcgaactcctcggcatcactaaggaagaagaaaaactcaaaagacgctaatatcgagccccaaacagtaacgagtatccccaaaactcaaatacaaataaaaatactcactttattcaaaacctaatttgaaatctttttcaaacaagaagtaaagccgccatatccaatacaacaaaccctaatttcaacacccgggcgatacttagccagacgaatctagataacggcaaaaccctaattcaaacgcaatggtagtactcaccgcaatacttgtttaaaccataaccgaagagcaggaagaactaaccggagggagacagtcgccggcggccggaacaggagaaatggatcgaaaatggtgatgcagaaatgagatttgggggtatggtagggacaaaaatggaataacaaaaaatgttgagagagagagagcgtgagagtgtgtgtgggagcagagaaagaacactttttagactatgatatttagatttgggacatttggtgagataagtaattgaaatttagtttgacgaaattgcccctccctaagcagttttaaggcaaattaagaaagaaaactaaattcacgtcgccaagagcaataactatgtgacacttcagcctaaagcgtcaaaacgacggtggattgggattgaagaggagctgccttgattcggaccaaacccatcagattcgtcccacctttgtggtggggtccacctggagtaagcgcacgttttaaatatctatctattgggcttgcctctaacttgaattgggccacggccctagcccgatcccttcatcgtggcccaatcgttcgaactatatttccataagtagaatttacgtggagtatgggttttttaaaccttttatgataaatatggcataattaactatggacactttatatggcttttttcaactttggcaacagtttatgggattttaaagcccatacggctggaactattttgccaaaagcccatattgtgtgttttgtagtttctttaggttattttagtcattttaagtgtttaaattttttggtacagtttttttttaagaaaaccgtttattgtagaggggtttttgcatgtaatgatggtgatttgatggttgcttccccattttaacttcctttttcagttttcaagtaagatctataaacccataaacagcctattatatcactttatccctctcatttttcactctctcacctgttcg

SEQ ID NO: 210693 - DNA, 1130 bp, Cannabis indica
tagtgtctcttccatccgctaccctcttgcaagccccttttcggaggattgcactggctttgacaacattcttccaaaaccaggaatcagaatccttgaacttacaatcaagaaaatcttttcccttaaggtatttcgcttccaggatcttacaacataacgactgactcccggtcaataaattccacccccacttagccaagaaggcaaggttcatttccttgttttccgaaaacccaggcctcccatagacttgggaaggcaaagcttatcccaggctttaaggtaaagtccatggttccctttctcaaagccccaccagaagtctcggatcataccatcaatcttattcacaaggcggttagagagtttggtagtctgcatggcatagatgggcaaggacagacccacagacttgataagagtagccctgcccgcttttgataaagttttagccttccatccctgaagtttagaagtgagattttcaagaatgaaattaaaatcggcatctttttgtcttgatctaaagagaggcaatcccaaatacttaacaaccccctcaggagtgtctatacccagagcttctttaattcctctcctcattcctgctgaggtattcttgctaaagaatattgaagttttaagtttattgaccttttgcccagaccacgagcagaacttctcaaggcaactccaaaatgatttagcttcattaacattagcccgaccaaccaatatgaggtcatccgcaaagaaaatatgggagatcacctaaataatttatgcatctaagctcataaaaataaataatttaattgttattcacctaaatagcatatcaatatatgtaagttttgcactccccttcttccagttttggagcgtttgaggtgagttctcttacaccttgtggctcctttgtcctttggtgagattattgtgcgtttgttgatgctttttactatcatggctattgtcttgctctctatttcgagttcttgtgtattttgtctgtatttgggccattgaggcatctttgcttttgttttaaactgagttctatgagctagttcggtagtttctattctattcttagcttttagtttttgttgtgtttcaggtgctca

SEQ ID NO: 210694 - DNA, 703 bp, Cannabis indica
atgtggaggaggcgtctagtattttacagttgctacatgtgtatgagttggcttcgggacaacaggtgaatttctctaagtcttcaatttttttcagcaagaatacttccgctgatactcgtgctcagttatgtaatatgctacaaatgaccgaagcttctgataatagcttctatcttgggttaccttgcataatgggtcgaaagaagaatgcgattcttggctttcttaaagaaaagatgaaaaagaaaatattcaattgggagagccggtttctatcaaaggccggaaaagaagttttgattcgctcagttgcacaagcccttcctagctatgctatgagtgttttcttacttaccaaggaaatttgtgccgagttggagggtttaatggctaaattttggtggaagtcgcagtctaattccacctctaaaggagtgagttggatgagttggaaaagattgactaagcacaagcatgctggtggtcttggcttcagggatcttagagattataatttatcttttcttgctaaacaaggatggcgtttgttaactaatgagtcatctttggttagtaggatgtatagagctcgatattatcctaatggtagtttcttaacagctacattaggacaaaatccaagctttatatggagaagcattttcgaagcaaaagatgtggttaagtatggagctagaag

SEQ ID NO: 210695 - DNA, 796 bp, Cannabis indica
tgtggacgcgttggttgcgttggagcaacgtcactcatcactgtctccacatgggcacattgttcaggtgtcaatacttgtgtcatcgcctgaatatgtctttgcagatgaaatatgatttggcttaagccatgttgttaagtagttgcagcaaattgtgagcgtcattttcctgattgtcctttcaatttgcgacccactcctcgctcgtggccacgcctctctccaagagtctcatgaagtatctcaatctcaacatcttgttcacactcagaatgagtagattgactgtcatatcttgtcttcatccgtacctattttaagaataagttagaaactaaacaaacttacaattatttaaatatattcaaaagtaattagtttacataatcttacatatttttctttggcatgcttgttaacaaactcatctgtacccttctttgtgtgacaagctttccaattctcaattcttaatgcttttagttttggatctgttttcgtccctcaacaaaacaagaatgactttatttaaataatgttttttttaagagtgtgactattgactttattaaaaaaaaatccttcacaccctcttaaatgtttatattttcaatcacaaaaaaaaaaaaaaacaacacataaaattacaatcaaagtacacatccaacatcttgctcatacttcatgatatattttctaatacatcaaactacacaaacatatattagaatagaagcccttctcttggctcaactaccggcccactcaaccttacttttactgtgtatatata

SEQ ID NO: 210696 - DNA, 1760 bp, Cannabis indica
aattacagttatcatcccttaaagcattggatctgattacatattacaaaatgtaaatgcgttgcacgatttagaaagtcatactgctgtgattttcccgcttttactggatcagaaatatcgtgtattaaacatgtctttaattgttgattctggagatgtctcgacagaaacttgattgtagtgatcccaatggtgagctggaaccatttttctatccgagattgacaacgtacgacgatcgtggatataaggaaatctattgacttgccagggttttgagtctcgcttccgttagttagatgaaactataggaagttttctcgtagcgagagatcgtctcgtattattgtacttcgagctggttcgtcttttatacttagtgtgcgtatttgtgagctgaggtatgtgttattcttctatggtgcctcgctattatttttcagccacatacagtttcttgttattactctaagtaccagttcgtacattgattcctcgcctaagactttacagttagtgggttgcaaatatactctagtacttacacaattaatgagttattctataaaaagatacgacaccgattcacattctctttatcttgacacgtgtcctccagcaagataattttttcccaacatactttatgatagtctagacatataccaatatcaatatgcgtttaccataaacatattcttatcatggtcattactatgctactttttctaacataaaatactacaaaacaagcctttagatgcagttttttcaacataataataaataatcgacgtcatatgattggaaattttaagaaggaaaatttatgccacttatggtgtcggttatttccaaataattgacgccaaaagggcttataaccctagcccagtccttcatcttcctcattcgatcagccaaccaagaaacccccaaaccaaagaaacccccaaaccaaagaaacccaaaaccctctccaccaaccaccacagaaaagcacccccgtttcaccattttttcaccattttaactcatttttattcctaaatcttctattttttcataccaaaaactatatacctaaaaacatcacatttttctttattttttagggtaaactgaaggtagagatagtggttgtggtggttatacctccgccaccgtttttagtggagaaacattgtatctcaacgtctattaaggtataaatctaatttctactaattttagtaatgtatattgttttattttttattttctaattttgtttagggttttctatattattaaatatgtattttgtgtatatgtatagtgaatgagaaatgtgatataatagagtactttatatattgtataagcatatattgagtattttaaactaatagttttgttaaatattatgaatgagaatgagataggagagtattaaaataaaaaattaaaaattaatttctaaaaaattagtttagaaacaaaagtttagaaattaactctattttgtaacaattttttttttctattttcaattttattcatttgtttttatttttttagtagctagtaaatagttagttacaactacttaacaggttattaattttcattcatattcatgtatttttattactaactagttactcattagtaactagttagtaataaattaactagttagtaactatagttactcataaattatataactagtaagtagctaaaaagaaattggtaattttatagtatttctttat

SEQ ID NO: 210697 - DNA, 904 bp, Cannabis indica
ttttaataatttttttaaaaaatgaacattaatttactaactttatttctaaagttagaactattttacatatcagttgttcatttaatctaaaataactgtataggtgccacttcaacaaaattaaacttgtgagtaacgaataataatcttaactaataaaaaagaattgaactaaattaaaaataaaatcaccaatatactataatcaaatccagttctacactgagtggcctaaagttccacattcctgaatgttactgcataatgttttctccttttttttcaagattataactattatatatttacctcttatgtcggctaatactacatttgggcatgtgacaaattgtatgttgaggaaaaaagaaacacacacatcatattttagtgctaataattgaattgatgttgacttggtcaaattcatacatataaaataataaatttgacattagtatatgaacataatttataatgaggaagagatcggtctcatgtctaatgggataaatcttcattattaatattatttatgctaaggaaaccctttgattgtctcttcaaagtaatgcttacgacccacaatttgactaaactaaaaacaatattatataggcttttgatgtattaataagtcatgaaaaatgtgtgcattttgcagcctcttgataattattatatcgtagagaccaatcattgagctttcttttagaggttttcttttttgtttttacatgaaataccaaaatttagccaagcattgcatttataatgtcattttaattttttttatataatttatactttctccattttacttgtatactatgttatgataaaaaattacaaaatattgtaatacacaattttgcacccccccctccctctctctctctct

SEQ ID NO: 210698 - DNA, 556 bp, Cannabis indica
ttcatgtctgtctcatcgtcccatggcttcacatccaacagaactgatgactttccagctgatttaacacaaaaagtatatcttccaatgagaaacgattgaaagggcacatttgaattcgaatttcaacgcatttaaatgtaaccaaaacaaacaaactcacactctttcttttttgtcgatgccttcatggaggctgcacgctcttcagaagccttcttctcctcttcggtttcttctccgaacaaatcaatatcatcatcgtcgtcctcagcagcagatgcctggaagtttcataatgttaatagtcactaaatacaagattctgaacactcatctaccgaattttcaaccaaatgaaggttgttgtacttaccttcgagtcacctgctggtggggtagccactgcctcctcagtgatgggagcaaatccctccacaacgacaccggcaccatcaccagccacaccactgaagagcaatacaaaacagaataagaaaaattgtaatcataaaagaacaatccaaacttaaaaagaacagatctaaaagttgaa

SEQ ID NO: 210699 - DNA, 526 bp, Cannabis indica
tagtaaatcaacaaagcctaaaatgatttctcttccttacccaagacgagtagcttaaagtctgagtttcgagttattcctcagtatttgcatagcaggtgctataatttttgttcttgagggttatgctaggagtctaatcttgaaaaaaaaaattaaagatttatccttctttcaagtttaactactacaataccattgtagtgaatatgatctccacgagatgtacataatgcttcagctagtacacaaatgtgtatactgtgatttttctgttgattagttactgcatgcatttggtgaaggatgacaagtagacattttttcaacaaatatgagccaggccagtgtctgcaaattaaattgctttactggttatagagctaacctcattttcaacagaaatatgtcagcaatatttcatttcatgtgtttgtaacgaaaaatttacactatttgttattgatcgccttttacttcagtgagcactttcaatttacattagatgaatgtttactttattgct

SEQ ID NO: 210700 - DNA, 665 bp, Cannabis indica
tttttaagaaaacaaaacccaactctgtggccgagatgggactactctcaagctcagctgcccttaacagggattatctaaaaacgacatggtcaaactcaatatgctgagaagtaaagatattatcaaaaaatggcattttttaaaatcttctaaaatcaggtgtaagatcttaactcagtatttttttgtttcctgaaaaaactaaattgaagaaaaaagagacaaactagaagaaaatataatgttattaaaaaaaaaatagagtatgaaggataaaataatattacctaaaggatggcggcggtggtggttcggtgaacgtcgggcagcggtggaaagcagtctacaccgtagtggtccggcaatggtgaatacaatgtagtattcggccaaaaatttaagaagaaaaaaaataaaaagatgagaaggagttgatgaagagaaggagatgaagatgagaagaaggggacgaagcagcaagaaaaaaaaaaaaaaaaaaaaagaaagatgggtttattggaaatggggaaagtgatttcagggggcagataagtgtggtgtaccaacgacaaccactaacgaaattgtcgttgggggttgcataaggagggaaaattggcacctcttttagcggatattttttcaaaaaattcccaacgaca

SEQ ID NO: 210701 - DNA, 628 bp, Cannabis indica
gtcagaaaccaacctatagacttcggccagggttttgaatatctgataagtttaatgatcagaagaagaattgtcattaaacttgaatcaatgtgtatcatatattttttcagaactcgagtctttttttactttttttgaaaaggagacagctgaaatgtctaggactgacctcctcctaactttattgagaatcgacacacatggtggagtggaggaaaaccatggtaacataaaatccagggagaacctgctattaacgaaacaaaacctctactgactcagaaacgaaaaaaaaagaaaaaaaagcatagtctcctaattacacacaaccagaaaaaacatatggaaactagtaaccgtcagtcttcctaccatccttctaaacttctgtttccttcaaggtaatgaggatttatagtttatgcactaaaaggatcgagattcacatttatatcgagaaagacactctcactactgatattgatgttatttgttcttgttactgatatttcagcatccatctcaataaacccgtcttgaccatgctcataattattacattaaattgtagagaacacaattcatattattacaatcccatgcctttacctgtgaattaagctat

SEQ ID NO: 210702 - DNA, 881 bp, Cannabis indica
cctctctctctctctctagcttctgctcattcaagttcgttgtttttatcttctccaccctagaaataaaagctctacttttgacctggaatactctttcagtttcgatttttattaataggaagatgtcagagaagttctcgccgactctacggattggcgatttgagtgatttcatagctccgtctcaggcttgtattgtctctctcaaggggttcaaatcttccgccgcaaataagtcttctgatatatctgaggtatttaaaggtttttctctttatcaaattcttttagtaataatatctccacttactacatctacatgggttgtaatggcttttgggaattaagattgatgtgctatttttgtttactttattttgttgtaattatacacatttattggaatgaaggtttcgacttccaaaacccaattgaaaacagacccggtaaaaatttcgttgaaggattgcttagcatgcaggtgattaatctcattctcagttttctctttcaaaagtcttgctttaagtttaattttttgagttatgaatagctaaatgaaagattatggatggttaattagttatatgacagttttggtttttttttttttttttaagttttttaagaaaaagtgaattatcactattttgttatttttgtacttaggttattaaggaattttgtacgttgctgatacaagtcccatgatcgagcttcagtaaattgtttgaaaatttgtacctatagtttccctgtactgatggtttcaagtttcttggttttttgatttgctatgcagtggttgtgtcacatcagcagagacaattatgttagagaaacaaagtttggatgagtttctttctaatattgataaa

SEQ ID NO: 210703 - DNA, 607 bp, Cannabis indica
ttttttaatcttacaagctaaaaaagctaatccaaactagaccaaaatgaaataaaagtttttcttaattatttttaaattaaaaaattagggtttctcgtttgtaaatttatagctacaggaaaatgtattttttctctggctaggcccgccaaccttccttgggcataggttgggcttggtcgggattatgttttgccattgcgattcgatttttgctactgtgattagtcttgtctctgtgacatagttttgagtattttagtcttgtctctatgaaataattttgagtgtttagccttatctgtgtgacattgttttgttttattttatttcgttgttggttcttctttgttctttgatgactcgccatcaaatcgtcgtagtggttgggaataataattcctttgcgactgaagatgttgttagtagtggagttacgaggttggatgaaccttctgcaatagtttctattgttgtatcttctgagcaatagatgaaactgtataggtattcttaaggttaaatctgatgttgcattctttttcttctgattttattattatttttttgttaaacaatatgagaattaggtgactgatttttt

SEQ ID NO: 210704 - DNA, 695 bp, Cannabis indica
tgtaatttgtatacttttttttttgagtcaatttgtatactttttttaattttatgtgtttcataattttttatatttattgcaaagaatttttaattttttttatatgttcatttagttgctttttaacggtgttgctgtgttatttataaattttaattgtgttaaaacaatatgttaatgtttaataatttttttttaagtttggttgttgtcaagtcatttttgtgttgctatttagttgtttttgcataactattgtattgagaaaaagcagtccaacacactcaagctcacttcgtcaaaactgccacgtggcagcgacagaatcactgtcgcatttctgacgctatagttatgcgtgcgtcagccaatgactttgccccccacttgcgtcccacttgcgtgtgagtctcactcgcatatattgtccatatgtgtattttactctctccttttgcacatgagattcacatctctacagtatttttgtaataaaaaactttataaatagtatttttaaaattagtagaaagtataaatgtttattttttattgtaatagtataaatatttattttaagctaatgtaatgtaatttttttttgacctaaaatcacaccaaatttatccggccacaagcaaagattcaaaattattagttaactgatttttactttttcttttgggaaaaaa

SEQ ID NO: 210705 - DNA, 709 bp, Cannabis indica
caaatggtcttatttgtgcatttttctaagagaaatactagaagacattagtggtattaggcactatataaatgtgttatattattattagtataattaagtattgtgtgccaaataatttaatggagtttagtaatatttttgtttttgaatttacaaaaataagtaaaaaaaaaaaattaaataataaaaatatgttctataactattttttgcttttttaatttcaaaaaataaaagcaaaagtatattctgcaactacttttgtttttatttaagtgaaaaataagaaattgagattaaaaaagtggatcgaaattcggcactagggtccaggtccaggaccgggacaaagtacatgtttagggtcaaagactggggctaggtcgagtctagaatcagagtcgaagtcgggttcgagtttgaatttagggtcagagtcaaattctaaaatattaatgaaaaaatataaataaaatataattaaaaaatgtgattttattttgtttttaatatttattttttaattttaaaattaaaaaagacaaatagtttcacaaaacatgttttttgaaacttttttagttaaaagaaataaaaaaattgattaaaaaagtgttacagcatgcaccttttatttaataatttttataaaatattactaattatttataagaggttatatttggtaatactaagtagctacact

SEQ ID NO: 210706 - DNA, 1145 bp, Cannabis indica
tagtaacaacaaaaaaaaaccctaagctagaggtttttttttttcaaaagataagcagagttaagtttctttaaattcattctggctatttctatcctaattcttatataaaggcacaaatagagaaagtaatggaagacacaaaggccaacaagagcattcgaaaaaaataacctttcagagggactggtatcaatctcaacactaacttttagtgtggatgcaaccttctctgctatcctttgtttctccgcagaaactggcgcaaacagaaaaataaaggtcttcacaaccaaaacactatgcacaaaagtctcactaaacaaatacagattaaattcaggaagaccttacctgctttcttggcctccttggctatttcctcatctaaaccagaagaaaattgtttatgatgtacaagtcgaccatacatgctttgttctacctcctcattgccaataatctttatcttcgaaactctttcgttgccaagcttttcagtaatagatctaaaattaccaaacatatgaaagaaaattttagataccagtgaaagattctgaaatcaaagtccatcaaacaagaggaaatatgaactaattagagcaaaatcaatatttgtatgcctaggctaagccactcctaaacataacttctaattcagagggtgatagttcaaagtgaaaatatatgatttacccaacccaaaaaatactaacttttaaaaagtaaaataaataataatgaaactcccaacaaaatcatcctcgaaagaatctcaagggttatctattcctctccaacagaaccaatcaaatccactggaagatcaacaacggagtacctattaaccatagatgattagatctttaacaaggaaggcctatgatctattttctcttcatcgctctcgtataatacacagcaagcactatataagagcttaaacattgctatttctcattaatttattcattctctttgacaaaattcagtttgacactaaaattattgcatattaatgggagactgatataccaattaccacagtaagaataacactgaaataaaagaaaagagagtgattattattgataattctaggaaattcgagagctctataggttgtttggcttcataactta

SEQ ID NO: 210707 - DNA, 582 bp, Cannabis indica
gaatttgcttcctttacatcattctattgtttatttttaatacatatcgtaggaaggtacaatttttggacttgagtttggatgagctttgcacaagtgacaggataaagagtcctcttcgaaacataacaaatctccaattacagtatcttgcaaattcattcaatagctaaatcaaaacttattacaaaagagtatttatattgttgcaaaactgaagaaaataaaaagaattacatcctaacaaatttttaatgactcaacaacttgtttctcaacgtttctcgagcatcacgaaatcctccaaccactttgatttggctcgagccctcttcttgtgcgttgggatttcctattcaacttcaaccttgttcttttccattttatcttcgttaatctcaactggagtcaatgtttcctcatcaccattttagactgagttgtttagccactctcttaccttttggcccacttttacagggtccaaaggtattgggctttgctaacaataggcctaacctgcttcggtctaggaccgtgcatagcaatgtgagtattgtgtgtgttgttagatttggctca

SEQ ID NO: 210708 - DNA, 1120 bp, Cannabis indica
tagctacaaaacaaaccacctaattcaaagaaagtctccctattaagaaaaccaaacatgtcataaaattgaatcagtgatgttatcatagtgatgttaattgtccaataagtgtattccacatgttattatcataaataaatgtgtgtgaacttataaataaatagaattagactaaaaaaaaattaaaatacaaaaaaatattaatataacaacaataattataaacaatatttaatattatatcattaaaaaattatttttaaataaatataatatgagtttttttataattaaacctctcaactatcactctacttgcacttaattctctaagctcaaattttaatgataaaactttccaaactactagactggtagtaagttaactgtgaaaaatagataacacatcaaatttgctatcagttcagtaatttagagaattttattaccaaaatttgaacttaaaaaattaaatacaagtaaaacgacagttagtaaaaatacactatcttataattttattaccgtcgtactttttttggtcattaagtgtcaatacaaaaacacgtgacgatatattattacactgtgttacatgtttttgaattgacacttaatgggcttaattgacatttaacaactaaataagggtaatattgcaataaaatcgataaagtacttttgctactatttttttattaaagttatatgtgtaacaattataaatattaataaagtgtcgtgtaaatatcccaagaatatataacaatttacctaatgcaatgtaactattgagaataattaaggagcaaataaaaaactatgaatctgggtttaaatataggaggacatttcttcccataaattattagtatatatagtcaaggatagaaggctctttatcctgcattgcatctctcaaaaatatatgagaaatgagaattatgtgttaccccattgcacttttaaagaaaagtgaatacaagtaagcctacaatgtttcttgtataatttcaaaaatataaatcattcaaattgaaaacatatgtgttagcatgaatcgtaaattgtatgtaatcaaccttgaatttaaggtccttctcaaaaaaaaaaaaaa

SEQ ID NO: 210709 - DNA, 816 bp, Cannabis indica
ttaaacttaaatagaaggtgatagttagtttttacggattttttttcttcatatttttaagttaatattgaaatttaggtgtataattggatatccaattaaaaaactgatcaaatctaattagtaattagattggattttgaggtctaattggattggatcggatcggatgatgattttctaaatccaattactaattggattagatcggatgagggaaaaaaggttggattggatcgcatgcccacccctagagccaagcttaagttctaaaactcaaaacttgctcaaaccttataacaaccaccaaaataagttcaattcaacataaataaccataaacttacttcaaaatacatcaacaaacaacaacagcaactacagtacctaactcacaatttcaagcaaaattcctaactttaaacttatgaaaccatgaaaagatggactagaaaacttacctaagcttgaaaccccaacaaagatgctgcctactcctagaattgttgaagaaaacccaaagttcttgctggtttctagggttcacgagagagagaagagagagagagagagagagagtcctcttcttctcttcactgacttagactgtgatatatcaaagcgtaaaaaaaggtctttttatcaatacaaaagccaaagtactctctgaattatcgtcatcaatgcaataggacacagccaagcccaaccccacctgcacctctcatcaactctttacctccttctctttcatactcaccaatttctctctctcctcttttttctcccatgtctaaaggataagaacagaaaaac

SEQ ID NO: 210710 - DNA, 514 bp, Cannabis indica
taaactaataacgacttttttcttcaatggtaccattctcacccactagcatcaaacttagttcttagaatagaaaaaaatagcgggtgagcttataaagtccagtaggaaaacaagtaatatcaaaggatctttcgtttaataaaaattcttgcatggttagttttttaaaaataaatcatctcatcgccattgtcaaaatgtattaacaaaatagagagaccacaaataatcacaaaattaagcttcgaatgcatatcacactatctactagacccctagctctcaataccaatcataaaaaatgacattcaaaaatcgggtagtcgccttataaccaccataataccagggctcaaattcaattcactccctgtatggagtctaggtctttcacctataggtgagtgcacatctgatctacctatgatgacacagagactagggtgtgaaacaacaatatgcacaaattatgattaacatggctctcattgtgagtggcagtaagcatttc

SEQ ID NO: 210711 - DNA, 525 bp, Cannabis indica
atactatgttttagtcacaataactttttattatgagtgaaaatcacatttagtcacaaaaaatttaggttataactaatgagttattactaaagtagttgtttccctggattacaccaagttttcgtatatacacttattccgtcctatgtttattttgtatttgtcaagtcctttcttcagttaggaaataaaccataactatgcaaccctattcctaataaattaaccccaaaataacatacctaaattataagaaaacctattgaggctacaattgcggaatttacactttcaaaatttttatttgttctagtatgtaaataaattgcaaatacggtccaagtaataaatgcctaagtctcctttggattccaattccaataggatccccatgcttcattagcctatactgcgcctgaaaagaatacctatgattaaaaagataaactctagactaataatacgataactccaaagatccaattgttgaactaattgtattataattgagaattatttttc

SEQ ID NO: 210712 - DNA, 859 bp, Cannabis indica
aaatttaaaatcaaatattacaatgaacttactgaaattgtacgaaatgaaaattttataataatatgataaacattgtcgttttttttttaataaaatatgataaacattgtcatacattaataataataaaaaataatatttaaattataccaatttaaggactgttatatttttttttttgagaaaaacttgtgcttcattagataaaaccataaagtacaaagccaacaagttaaagggatagccaagaaccattccaaactaactcattatctaatcctaatcctagttttgcagcccaatgagctaattgattagaatccctatacacatgttcaattctaagattaggactgaaagataacaagttcttaatccccattaaaatatcatccagaggactagcattccaattacaagaatttagtttatccgctatagttttacaatcagtcttcaaaacatccactggaagatgaagcagttgaacccactgaatagcatgataaattgtctttgcttcagctatgattgcagggatacctaaggactgttatatttgatttagaaaaatatttgagtattttgcggtatataaatatctaagtttaattctcgattataaataaatacttaatttaaattttggcttaagttatatttctagaactctgtaagtatgttaagtcattatctaaatgtcatttttggtatatttaaactaatttttttttttaaaaaaataaaatttaatgatcttcatcaattaagaattaccacgtactaatttacttaatacttaatatctagacacttacagaagttctaaaatggaaatttttatttttaatgctta

SEQ ID NO: 210713 - DNA, 876 bp, Cannabis indica
gataaatgcataatgtccaatcatccaagtctacataaccagtttgtcaactctcttttcaaaattaatgagcgtgaatgggatgaagaggttgtgaaagatctatttccaactcaggaggcaaacattatccttggcattccattgagccgatcggcaggggccgatttctggtcatggacagcagaccacaaaggctattacacggtgcgaagtgcctacaccttgctgcagaaggaaaaaccagcagccccagcccttgataactcggggttttggaggaaattatggcatctgaaaatcccaccaaaggtattaaattttctgtggcgtgtcatctccgattcccttcccacttgtgtaaatcttgtcaccaaacatgtgcccatttcaagtcaatgtcctgtttgcaatatgcatcctgaaactgctattcactcgcttcttacatgcgactttgccaaagcttgttggtcccttttcggttggccaatcaatgttgctgccccttcaagttttggcaattggcttgataatttgatgcaagtttgtgatttcgattttgtttgtcgtgcctctatgcttgcttgggccttatggaaatcccggaaccaggttgtttggaagaaacgtaaatgcaccattaatgatgttctagcttcagcctccaccacacttgatcattggagaaaagctcaagatacttttgccttatcatcactatctctctataatggtgatgatggggctgagctttggtctaaacccgctataaatcacatcaaggttaacgtggatgctgctctttttcatcatgagaattactatgggttcggtatagttgcaagaaatgatatgggcaaccttttggaagca

SEQ ID NO: 210714 - DNA, 715 bp, Cannabis indica
ctacaaaaaatattatttaattactttctcaaatcttatatattataaataataatttctattaattatatacaaatacaattaaatataacaataatatttttaattaagtaaacaatattttgtattaatcattttgccaaaatcagagtttattacaatgatacaaacataaaaaaaaatgtacacaaataatctgtatactcgactacaactaaggcccccactgatcctgcaaacaagaacaatttttcatgaacagaaaaattaaaacttgagtatctccacaaataatttctggctgtaacaattttaagcatgtaaaaacctaaaaaatatacaaaaaaaaaaagaagaaaaaatagatctggttgttggtgtagctcggatctccatgaatggccactcgtctagtgatctatgacagagcgagatggagattggaggaagaagagcacaacttgggtctggtctagtgatccacggaggtgagaggaagctaaacagaacccatctcgcgcgattgagaacctttgatcctcgcacgaacaatagtgggggttcttgcaaggaaccgagaaggagagaacgggaaaagtcaccaaggaacgagaaagaggtcgtccgcttcgttcacctagccgagagagagctgtttgccaccgtgcatttggacaagagagagagagagagagagagagagagagagagagag

SEQ ID NO: 210715 - DNA, 565 bp, Cannabis indica
aacatcttcaaagaatgcttgagatgtctaaggtaagtttttttcttatttatttatttcatgtaattggtgaatagctgtgcgtgaaatgaagatgcgatggacatggacaatgatgatgtcattgttatcattgtaaacatagattgagaagctatattagaaaaaaaaaataattattttaaaaatgttataaaaaattgtatatattaggtattaaataaaataacaatatttttgaaatttaattgcttttaatgttgtaaaatgtaaattttcttaaattatatctataaataaaataaaataaaataaaataatggtatctgtaagttagatttgtaaataattatttagtctaaattataattgtaaataaaataaaatgttgatctctatgagttatatctattatctataaataaataaaaaaaaaatatcactacaaaaaactactatttttagtgataattttttattcacaacataatttagtcacaacaaactgtaatttttgtgagtaatatttttagccacggaccgtcacaacataggaatcatgatt

SEQ ID NO: 210716 - DNA, 598 bp, Cannabis indica
tgttttccccaaaacggaagaccattttctgcaagaacgtaatttttgagtttcgcactctctgaaataccatcgaaacctatccaaataattctaaacttcatatggcacatatatatcatccatacaacagtcccaacgtaacagaaattcaaaactcgcccttaaacaaaaaacgtcattaaagcttgagctttgagctttaagaattcaaacttaatttcaaactcaaagccacgtcaaattcagcaagtaaatatcaaaactaatcccatagcaacccaaaaacagattcatggatcacaattcccacaactcaacatataataccaaactttttcaacttaaaatgaaaccaacccttaccttaagctctcccttcaatgatttactatccatgccagctactacttgggcttgaattattatgtttctgctaaaaattaaagaaaattggatagtgatggtgagtgttttattgcaccgaaggaggagggtttttgttctgttctttattaagttttaaaatgttatatatattaaattaataagttttaaacttatcatataataataactttattaataaaagttattt

SEQ ID NO: 210717 - DNA, 809 bp, Cannabis indica
cataatgacacccccttaaaagagatgtactgatcactcttgacttgttcggcatccagaagatttttagtctatttttttcttcatatttaatgtaacgttataactatttaagataaacctacaaaaattttgagaaattccgaataatttacaatatagaaaataatattcgaacagtctattttacacgcgtataaaataaaatggtcacgcgtgcaacacactgtttgaacgtagttttctgcgttgttaaattttttctaaatttcttaaattttgcaggatgtcttaaataactataacgtacatgaccatgagaaaaaatttgactaaaaaattatttcgggtgctaaaacagataagggtgcatcaatgtatccattttaagggggtgcattgtagaatttcctattactttttattattttattattatcattattatttatgacaaaataataaaaaaagtatttgtctagtttacaagttcctaaaaaatgaaaattcaagccttgctaattgaatccatttattattttctttctatttagcttactaaggctgacccaatgcagaagcaatcagtcatgtttgaagtgatttaatgttgaagatgactactgagtcaaatgtggggataagagcattcactaccacatgcattcctttccatatattgcctaagatttttcctcaaccaagaaaaggcaagtgtggtagtttttttttttttatatcaaatgagacattttcttaacttaaaatgtctaacatcacaagtaggtgtcatatctaaattattttag

SEQ ID NO: 210718 - DNA, 508 bp, Cannabis indica
tttttattaaattctagatatataaagttggatacattatttgaatatttattttaacaatacattaattttgtatttgaatatctccatttaataaataatgatatatatcaataaatgttatttattaatttagttatcataccaccacaaaaaaaaaatgtatatcatataattcaatataagattttacaatatttattaattcaataccttataacaattattaattctaacatatatatatatcttttttacaacaaaataattaaaccatgcattaatttcgtacattttttggcttaaaaagtttggaatatatataacttctcttcacaattttttcttggcacaatttataattaaatatgaagtactgattaattattttgcaaaaagaacaataagacactttttacatgcaaattactttttttaataaaaaaaatatgactcaaaatgttctttcaatgttgtcttctctctgttttatttagttttttttttt

SEQ ID NO: 210719 - DNA, 705 bp, Cannabis indica
tctctagtttctctctctagaaagtggagcatcaagacttagctatttttctgtaatccatctcttgagaaataaaactcgaagtagacgtagctccattactgttgcgtagagggagtgaactattataaatccttgcgtctctcttatctatacttaacttatacttcattttagccaatttagcgagcgggtgtggcctagagatttgtatcaaaatttctccctcaacacataaataattatacaaaaatatttttggtactcagtgccctagaatagtcaagaagaatatgcagactatgttttcaatttttcaaacattttataaatcataaaaattagaatatgtataatgtcattcaatacataaataacaagtccagtaatcaagttctgtctctacatccttaggatcatcaaactttctccaaagagacattcctaacaaactctacatccttaggatcatcaaactttcttcaaagagacattcctaagcccttaatgcttaagttccaaatagcttactcactccaaaatttactttgtcctacattatctaattaaataaataattataataattgcattgtactcttcaaataaagtctaatgatatataacacgatatcattcaaagatatcattaaaaaaactagcttagccacagatactagcagtattcggtagccaaaaatggtg

SEQ ID NO: 210720 - DNA, 720 bp, Cannabis indica
aagtacaaggagcgacaaggcttcaataaatttgacaatggagataggaaggacttctggtaccatcaccacgggaaagactctactacaatcacggaatatagtgatgactgctccatggacggagaattattctctatcttagagtctttaatgaacaaggagtggattctcaactccggatgcacttatcacatgtgttcgaatcgagagtcattttttgattataagtcagttgatggaggtaaagttctcatgggaaatgatcattcttgcagggccattggaactgaaaaggtggccatcaaataatataatggtaaaatcaaggtgttgacaaacgtaaggcacatcccggaccttagatgaaacctcatatcatgggtgctcttgtggatgaaggatacggatacaagtccattcatggaagcttgaggatcaccaaatattctttggtagtgatgaaaagtgaaaagataaatggtttgtatgttctccaaggagaaagtgtcctagctaggtaggcaagtatggtgaaaggactagaatcagatatgaagttgtggcatcacagacttggacatatcagtgaacaaggcctcaaagaattgcataaacaaggtataattgaaaatttaaatcttatgccttacaattttgtgaagcttgtgttttagggaaacaacataagatgaagttcacttcggcaaggcacacaac

SEQ ID NO: 210721 - DNA, 753 bp, Cannabis indica
aaaaaaaatattttttttactacataactagacaacaaaataaaacaaactatagttatttatatacctccaacaacacattaaataaataaaataacaaataacaaattcaaaggaagttaaaaaattgtatatataaaaaaaatatttaatttattttaaattgtatgtagaaaaaaaaatataagaatagaatatacattttatctattaagttttgcaatataattgtattatatgtattagacttttaaattactattttctttacattaaaatgttatttgtatatataattttttaattttgttataaatatgtgtggattggattggatcggttacttttacatgtcaatcaacatccaatccgcacaagtgcggattttgaattttccaatccaatctgcacgagtgcggatatccgcactttgcggattgaagattggattggatcatgcggattggattagatcggctattttatgaacacccctagacgaagggattcttcttaactaataataaactatttggctctccctagctaattagctagtgtgtatcttaagtataccatttttctttttttatctaaaatcattttattgaaaaaaacttttatctttttgactttcattagtcaattatataatttttttatattatgaaagaaaaattaactaaaatagtaaactagatgaaataaagttagcaaaaacttaatttagcaactaaattaactaaaacatta

SEQ ID NO: 210722 - DNA, 518 bp, Cannabis indica
aacttgtcggtcggcatcgccgatcaatgtcggccactttcagcaagtcttgtcttttgtgacatggtgtgattgtctctggtttgtgtttgtttcttgtttttctgggttgtgtgtgcttcggtttgagagtctaggtttggttctatctttattttcttccagggtccgattgtctttctggggtctgttaattttctgaggagtgactggtttgccttgttttctgatgttggctttcctgtggtgtggctggtgtgcgattggtgtttggggtgcgttaatcttcagggttgcgattggggtgcgactggtgtttgattgatgtttcctgggtggtttccaggggtgcgattaggctagagattattcctgggtcccgttgtctttggggtgtcttcgggttgtcttcggggtgtctttgtgttggtgtgcgatcaacccaggaagacaacatacatatattttaccatatacgtgtctatttgtcctcgttggtggtgtgggatttgtccagg

SEQ ID NO: 210723 - DNA, 722 bp, Cannabis indica
aatctaatctaactattaattctaattaatttttttttcgaaatggactaattttaataattttaataacctaaatttacatataaactaattaaaattacatttcttttgcaaaaatggtataaataagcatatatattctttttatcatataaatatatgtatgattaaaaaataatgaaatacatacctattattgctccggtcgacgatgatggtgggattccggctacatcggaggtgttgcggtgtggggtggtcggcgattggaggtgcaccgtgcggtgtggttggtgatcggaggtgcaccgtgcgtggggaagaagatgaggattccagctagaaatatagtttagttttatttttaatccccatttctttttctggatgaaaagaagaagaaaatggtttttttgatgaaaaatgaaaggttttttttagagaagaagaaggagaaatggctggggaagaggaagtgtgcgtcttttaatgtgcacgcaattcgaggcgacacttggggcgacactgtcgctcctaatgtgttgaccgtgtcaggtggcagggcaggggcgacatatgtcgcccctaataatgtgagcgggaaaattcccgcctaattgcaacgggtggatttcaacttattaggggcgacatgtgtcgcccctaataagttacttttccttacaaaagttttagggtgacatatgtcgcctctaaaggtc

SEQ ID NO: 210724 - DNA, 791 bp, Cannabis indica
taaaataaagtgggtatacaataaaaaattttctattataataaagagattatatcacaaacaacacaaaaattacaaaatacggttgtaaggaattttaaataattttttataattttatttacaaaaaatacgatcttttttatgttgcacggttgttaatttgttgttgattttttgttatctgtatgttattttttgtggttatttttatgttgttcagatgttattttcctattatttttatgtagtttttcttattgttttcatattgtttctatacaaaattgtaaaaatataaaaaaaaaaaaatcttcaaacgtaaaagtataaatattttacaaaaaatagtactttatgtaattatccctaatgtaaatatctttctaaatctcatatttaatgttttaaaactttctttttttttttttttggttttgaagcataacctagagaagtgaaatgtatcgtattccaaaaattagtttttcattaagaaatcaagtaaattttttatgatattccttattatctatgatgatttcataaagaaattagtttcttcattaatagaccaattttttcattaagaaactagttttttcatcaagaaactatttctttattagggaattagttttaattatatagaaataaattttatatataaattcttgagttttttatagtattctttttttatctacgatgatttatcccatatttttaaattttttaaaaatgtcacgttatgggcaattaagtttccatgttatatatatcaaaacttt

SEQ ID NO: 210725 - DNA, 910 bp, Cannabis indica
caatatccaatcccattcaattgaatcgaaccaatccagtttaatccaatttaattacaaaaatgagattggattggatgttaaaagttggattctaattggattagatcgattattggatgccattctcaaaattcaattaaaaattgattcaatccaattacatttatatgtattaaaaaatatttttatttatttatgtataataaaaaaattatattctaattatatttttagtagatttttttatgttgaatttgtaatatttggttgttttatatatttgttttcatgatgttttgttatattttattactttgtaatgttgttgttttagttatttcaaacttttagttgcattacacttgtaaaaataatatttttatagagtattacttaaataaagagtgatatttagtttttacgtatttttaagttaatattaaaaattagatgtgtaattagatatccaattaaaaaactaattgaattgaattttgaggtctaattgtattgaatcggatgataattttctaaatttaattactaattagattagatcagatgaagaaaaatgtgtagaattggatcaaatatccaccttcacaaacagacttcaatctattcaaacaaattcattaaatttcgaaataatttaaacccaatttctttaaataaataaagaaattaaatacacaatttattttttagacaaaaaaatagatcaaataattcaaactaaataaataaaacttttaataaatataaatattaagatattatttataaaaaaattaattatttatagaatattcatatttataaattattttcacaaacacttaattttgtcaattttattaaatatgcaataacttttattacagaatattaatttttattttttatt

SEQ ID NO: 210726 - DNA, 906 bp, Cannabis indica
cttgaaagatcaagagatagcaattgtgacaactttgaaatatcttctgcaactaaaccactgatatgattgttggacaaattcaagaccctaaacccaacaaatttgtcaaagttgaaggaagttctccactcaaatcattggccgaaaggtctaagctgacaacaagagaaagtgtcttggtgtacttttgatcttggttttttaaattcacaaccaagctatcttcaaaataaatgcccctataaaagccaaagaacaaataatggtttatcctttggttttcaatcatggctttgaaatatccaaagctagcaggaatgctaccattgaatccattatcagccaaatccaacacttgcaatgagcttaaatttgatagtaaggatggaagttcaccgaaaaatgcattggatctcaacttaagaattcttaaattctccaaacctttcccaagccaatgtggtatgtttcctgctaatctgttgttaccaagatcaagtgtctccaaactcaacaagttctgaaaagatgatgggatgtttcctgaaaacttgttgtcactcaagtgcaatgtttgaagcaaacttagtttacccaaagagttgggaattgtaccagacaaattattcttacttaggtccaatgcttttaggtaagagaagtttccaaagctaaggggtatttttcctactaggttattacttgagagatcaatgacttgaagagattgcatgatgccaatagaatttgggattattccatctatttggttagtagaaagagatagaaatatcaagtttggtagggaatcacctatgttttctggtataggaccagaaaagttattttggatagatcaagtaattcaatctcaacatttggaagaggaataggcccttcaaa

SEQ ID NO: 210727 - DNA, 1242 bp, Cannabis indica
ccaaagtctaggggaggaatggggttctgtaaaactttagaaattaaccaggcactcctagcgaagtgggggtgggatctcctgaatgataagcaatcgctttcctggggggtgttgaaagccaaataccttaaaggaagacctttcttagagggttcgtataacggatctgactcttggttctggaagaatgtggtgaaatccaaagacttattgcggaaaggagcttgcaaaattatcactaacgggaaagacaccaatgtctggtcagatccttgggtgctgcatagcaaggatttcttcactaaacctaatggtttgacctgtgggagtgtgacgaaagtcgctgagctgctaaaggaagatggggattgggatattcctaaacttcaaactctctttgactctggaactgtgcgtgacataatcaaaggaggtaaacctggtggagtaggagatgacagatgggtgtggacaaaagagcctaatgggcgtttctcaactaaatcgacttacttggtccatgctttggcgagagccccagatcttgtcgtggcgccaagtctgtggaacaaactttggagttccaaagtcctggagcgacataaggtcatgtggtggtgcatcctgtcgaatgctctccccagttaggggactcctggcgaagagaatcaacgttgacgaaacttcttgccccctgtgtggggctgatgaggagtccatggaacacttgttccttcattgcgatgttgcgtaccatttgtggagagcttccccttagggaatcttcccggtccaggactctggaggcaggatctgggattgggtaacatttatttggaacctgaaatcgaaaggggtggacacggacaagctatttctttacgcctcgatcgtggtggatactatatggagaataagaaatgataaagtgcataactattatccgtgtaacattaatactgctattgactctatctctcattgttttacagattatgctgcctatttgcttcccctggtagtagatgtgtctcctcttggctggtcgacccctcctgaagactggatcaagattaattgtgatgttaaggttggctgtgactccatgtgtattgcggccttggctagatatcattcgggaaccgttttatggggtgtggccaacttactcaatttcacagatcctttgatcggcgaggtggcggcatgccatctggctttggaaactgctgcttccag

SEQ ID NO: 210728 - DNA, 921 bp, Cannabis indica
aaaaaaaaaagaaagaaaaaaaagaagaactaaacaaaaaataaaataaaaagtttatatgttaatgaaaaaaagatagagagaacttaaggaaaaagagtgaaaaaaatggttatttgttaaagaggagtgtgtatatatatataggacacttctatagtaaggatgtctcttttgtctatatatagagacactttattacacattgattaatccaatggtgagaagaatataaggagtatgatagtgaatatggactttactacatggttacataatctcttaaaattttaataatattttaatacttattattttctttaatttttttttactttaggcaattttttctcctaatttagttttttttctttttctttttaattaaaaaatattttatatagttagttgagacttaaaattagttatttaatttatatgttatatttgatataaaatttgatgatacttattatatgagttattaaaaactaaaaaataaaataaaaatatgtagatactacatttttttttcaaataattatcttttacaatatttatgttttaaaaaaattatgtatatcaccgttttttgctttttttttttttgttagttttttttttactaagtaaaaaaatacataattatgtaaaaaaaagacataattaggaaaaataatttatttaaataattaaccaaatgattctttttggaaattttcttttttaagtaaaaaattttacattttagttactaacaaattaattatgaaaagaaaaattggagaaaaaaaatacatattccattggaagaatatgttatggatgtaaaaaagtactcttatgtaataataaataaattaaattatttcaaaataaatactaaaaacataagtaatgactttttagtgtaaattttca

SEQ ID NO: 210729 - DNA, 502 bp, Cannabis indica
gcaacgggacccaccataacttcgtccaaagtggccagacgctttcctcccttcttggaagattttggaaccggatgcagacattttggttctgaaaaagagttaaaattccagcaattaggccccataccaaaccctaaatcaaaaaagggaatgggggtcccctaaccgctggaaagaggccccctccggacggttgtcaacaagaaagccttagaaggatttcctggacaaaagtcgggtgcaagaatctcacagatagtgacattgcgcataaaaggaaaaggaagaggaggggcagaaaatcgagaaagacaaagtcttctctatacccttgaaggcaatcacgcaaagagtaaatgggcctttacaaaaaataataataatgtgtaacaagagtgaccctaacaccagagaagagaaatctaaacgtactacgtaaaaactcaaggtgaaacattcccagaaacttcaaacactagacccagaaaaacaaatgaac

SEQ ID NO: 210730 - DNA, 383 bp, Cannabis indica
ttttcaagctcagccttgagatctctcttttgctcttgggcttctggtcaattggatgttctccttttgggcatcagtccattgcttcgcataaccttgcgttgttcaatggatttacgaagctcgaattccaactgtttaattttttgaaggcctctttggtgtgccaagtgagacaacagagatgcatacagtaaaggtaagataattaaggaagagcatataaataggaaatgaagaaagggactaaccgcgagactgagattcaagctcctctcagacaactcttcaaagttgccattattgaaaaaatcccaaccaccctgttggaaggatttgtaatgacgctaacaaaaggtagcatactgcgagcaagcctgcga

SEQ ID NO: 210731 - DNA, 753 bp, Cannabis indica
ctttagcaaccctcaagctatttttgtatgcatttcttagagagtctgcagcagtagggttgccactataaataggtccagcagtgaaaatgacataagatgcaggcagcttaaaccctggggtaatcctactgctgcagactctctaagaaatgcatacaaaaataatatattttttttaaaataaataattcataaaaagaaattatttattttttaatttaaagtaattggtaattaaatgaataaatttttttaaaagtttattagaattaaattgttaatattattatcttacttaaaagttgaaatacatgtgtgtaatctaaaaaacgttcatataactataaattattaaacttttaatattacatttgtggtttatattgtagatagggaaaatagataagtttatcaacttttaataaattgtttaaaaaaataattatttaaatctagaactaaatttattactttttttttatataattaataataacataaaattaaaatgttgtaaagagtaattgttcatttttttaatttaagttgtaattataatttaatgaataaattttatttaaatgtgtgtaattcataaatattcataaatttttattaatgttgaaaagaatatctcaatgctttggtatacttataaatatataccatagctttgttatatttcataacactttacaatcattcaaatttgtaacactttatttgtcgtcctaaattgtagatggcgac

SEQ ID NO: 210732 - DNA, 834 bp, Cannabis indica
cggtcatgattagtgtagtatttcttttgttttaatgttaatgttattatttttttaattggtagaaactggttttttaatatgggttttattgttgttttatggagtttcacattttagggtattttatgtgttctatgtttgttagtttgggtcctttgggagcaaatgttaaaaatgaaagagtttagtgttgcattattgaatttgttattatgtatgtatgattcaagtgtcatttttagacattattattctatctcctattgttagaaaccctgtttggccctaatttattgatgtccttattttccctcttagtctcttatcccattttttatcagagtttatatcttttcttttttgttaatggattttgtattttttttattagtctggttgtgtctttaatattatattgttggttttcttttgaattgtatgatattttgttctccatttcctcatcgttaccatttttgttgtctataacagataatgctcatttgtctttggttgttaatcaacattgctgtgtgtttttgctttaatttttttttttgtttgttgatttttatttctttgtaattttgatagaaactggtttttagtgtgttttctctttgtaactattgaatattctatatagtggtttttgatatttttttgttattttgtaaattattttttatgtttgtttttatgattgataagtttttttggtctaattttttatttttcactcattcttttgtaagatggaaagggcatcagattctaaagttctatctcttactaacaaggttaacccttgtaaaaaggctaaagtacgat

SEQ ID NO: 210733 - DNA, 911 bp, Cannabis indica
agagtctaggaacaagaacaaagaaagaagaaatagataaaaaatctcacctttctcttattctcttcctcccctttcttcttcttctttcttcttcttcttcttctttaagaccaagatttagaactcagacactcaaccccaccacccccaaaaaaagaaacctatctttctctctctatttgtccttccattacctcaaggaaaagtaaaaaaaaaaaaaaaaaaaaaggacactaaggacccaacccttgtgatccaatccagatcagacaaaccacaagaacatgcatgtgggtatttgaaaaccaaatctcttaaatattaaaaaagaaaactttattcataaaaaaaagagaagagaaacggtatttcaaaagagaatcaagaaacgaataaaaaccccacaaaaaaaaaatcccaaatccaatattgagaaaaagaatccaaaaagtgggaatcaaaatgaaaaaaaaatatatattttttttatatttagtatcaaattagagataaccccaattcaaagataacaccttttttcataaagactgaaactttaagtggtgtatgagagattaatagagagacagaccattaagaagagaagaagaattttcaatctttattaaatgttattttatttttattttttttactttgatgaactgaatagaagagaaagataagaaaaattatgaagattggacatgaaaagtcagagaaaggcagagggtccaaaatgggaagggttagcatgtgagccagaaaaagagggaacctactttcctctttcccccttcttataattattattatttaattaattaatgactactttaggtcttaaatatttaaatttaatttttgtaaataaatatttaaatttaatttttgaatgttttaatatt

SEQ ID NO: 210734 - DNA, 719 bp, Cannabis indica
aatttattttgttgtgttatgttggtgttggtgtaaactatcaacgcaaagattcttctccttgccttcgcgctgtctgttcttgtttttcttgaggtttagtcttgaaaggcgaaagttattggtggaatggtaaagtgcctatatatcatttattagtagcaagttgaattttcttcttcccctcaaattagttgtatttgaatattaactgtactacatacattattgttggagttaatctttgcgcctatcccactttaacgaaagataacagaggattagtttttaagggtcgaaaatggatttatacaattttaggttgatctctaccatgaatctaatgttttgaactactgcacaagggattcgaatcggcctacactatttctactcgcataagacaaagatatatatttgaaatttttaataaaattatgagttatttgtggcataaagtgtaatttttgatagtaattataattaaaacttatatttttgaaatttacaagtacttggctactaagagcatttttaatggttggtagtattttttaaatatgttaaaagtatttttactagatataatatatatatattttttactgttacttttaaaatattttaatagtattacaatatttaaaaatgttacaattatgatatcatatattatatatataatttattgttattaaatttttatatatatatattac

SEQ ID NO: 210735 - DNA, 1518 bp, Cannabis indica
tttgaactactgcacaagggattcgaatcggcctacactatttctactcgcataagacaaagatatatatttgaaatttttaataaaattatgagttatttgtggcataaagtgtaatttttgatagtaattataattaaaacttatatttttgaaatttacaagtacttggctactaagagcatttttaatggttggtagtattttttaaatatgttaaaagtatttttactagatataatatatatatattttttactgttacttttaaaatattttaatagtattacaatatttaaaaatgttacaattatgatatcatatattatatatataatttattgttattaaatttttatatatatatattacaccttaaattttttattttttaagaaaacatatcatcaatgttattgtgtggcatgaaagtaatttttaagaataactttcttttattttcaatggtatgatatgttttttatttaattatatattacaatcatggtataatatgtttttattcttaagttttttacctcaagtattttctaaaatgttactattgaagatgtttaagtgtaaaagttatggtagttttggttgtttgaagtctattaaattttataatttatttaagtaattaatttatatttattaataagtaaaataataatgatttgacacttaagttaaatatttaatgaaagttttagaaattaatacttaattattattatcgttaatattaaatttagtgtttatttataattaggagttgaagtatttacatgtaaattattttaaaattaataaatgaagttttctttgtcattttttttaaacagatctatttgtcatattgaaatagtgtaattactcaatattaattaccaccacaggttgcttctaaacaaattcctagggattctaaaagataaatgggactttttttaataatacaattatttaatgtttatttatatatatttttttttttataatttcacaatttaaattttaaaaagataatttgaaagttctaaaattattaatttacatttttttttttgtgaaaaaaatagtatgaaaagataacagaaaaagtaatacgacagtaaatgctatgcaatatgcaaatcaatgagaaattaactttataattttacaaagcaacctaaaaatcacatggtattaattttgcagcaatatgtaaattaatcagaataaattgcaaaacatccaacatgatcagttcgtggggtacaatcctgttgttagcattgattcgggtttggttgactctttcatgcattagcctaatgcagaggcgggctctaggtatagtcaggttaggcccgcgcttagagtctactcattttaggggccaaaataaaagggaaaatttacatggtatactaatttttattattttttttacaaaaatactgtctagacagtattttttctttttctattgtgtttttttattaagtttctatactgcagtatactgtg

SEQ ID NO: 210736 - DNA, 654 bp, Cannabis indica
tcctttagtgaactttatttgggattattatgctcatatttagattgattttaatttaataaaaccaattttatttactcatttattttacaaaaaaaatcaaattaaagaaaaacactctctctccaaaattctctatctctttcgaacaccataaaaccagctagggtgctggtttttcttcttcaaatttagtattttcaagcaagttcttactgatttcaagttcaaggtgagttcctagtacttcccttttttgatttcttgggttttaagttaagaaattatgcatgatttgtaagttaaggtgttgtagttgttgttgttatttgaagttgttttctggagttagattatgatttgatatgttgttttgagctggtttcggtggttgtggtgctgattgagcaagatttgagttttagaactcaagcttggctctttaatggtgatttttgattttgagcatgctatgttgttctattgcttgggatatgtctattggggtataatatgcaggtctggagggtttggtaaggtttggagtcgaattggttaggtttttgaatgttttgggttttttggtgcaaactgattaaccggttttgcaggccctgtaaattcggttaatcggatcagctgctgggttcccca

SEQ ID NO: 210737 - DNA, 683 bp, Cannabis indica
agtatataaggtaattcccaaaaataaatgatattaatttaagacaaagaataataaaagatatataatctataaatttaaccttcacaataatttctaaactatatgacatatttttaaggaattaatgctcatatatcaccaaaagtataaaaaggaacaaatatctttgaggattcatatttttataataaaaaataatatattaataaattataattttttaattatttttatgtaaaaaataattttaaatatatttaattaaaattatatgaaaaagaaggcaaattgtagaaaattatttatttatatcttacaccataattaacaaataaataattttttatgcttttcctttttttcaatataatttttttggaatttttttattatttcattataaatttaatcattcattttattctagagatttatgaagctgtaatagtacaaaaacataatcaagttatcaaattttgtaagaataaactttgtaatacaaaacaagcttattattattattgttattattattattattattattattattattattattattattattattattttgttattttattagtaattctattttctatgtttcttagtatgttttgtatcgtagttgttgtgttagctagttgtttttaattttttttctttttacttgt

SEQ ID NO: 210738 - DNA, 912 bp, Cannabis indica
caatgattgaaattcacgttaatatattataattaattaaataaataaataaagaaaaaattcaattttgtatttcataataaataaaataaataaaaattgaattaacagatataaattatatattaccgacatgaagaggcatcttttgatgattcaaaactcaaacaaaaaactaaatcaagctatattcatatatataattcttttaatatattttgattagattaatttatgattaagtttaattttcgattgcagatcataaatatttaaatttaattttttacattaataatacttaaattatatatatttttgacgttacataactgttaagtgtcaagtcattagacatgtgacaattttttattaatccaaaccattaaattattattttttttatttgaaaattaatttaaatatactaataagaaaacaacacttaataattaggtacttacaaaaattttaaaatatagtttaaatattattaccgtaaaaaattaaagttaagtatttaattatctacaatcgagaattaaacttttttatgctacaaattactcttttaattaattatttttaaagaaaattaataaaagtaaataaatatatatataaaaaaaagaggtaggttaagagtgaaaaatggtgggcggtggggagtggtttttttttaattgatatatagttattaaattaattattagttaatcatcatcaatattattatatatgatgttcaacttgggttctgtaataaggttattaattaattatgatgcagtaataattaaattaattataataagcatgctggcaaaaaaaaatataactatattatattggttcaatgttgaatttttttacattgcatgtatatgtataaataatactaattaattatta

SEQ ID NO: 210739 - DNA, 603 bp, Cannabis indica
cccctataattcaaaatcacatgccaaaactaactaaaacttaaggaattcataaattaagagtttttagggcttaccttcaataattaaatccttgaattctaattaaaattccagaaaaggaggtgaatttaggttgctcttgctggttgtgtggtggtcgagtacgagagagagagagagagagaaagggtgatgtgttcttgatttcttttattttaagtatatttttcctagtattaaactagagattaataattaagccttctctacacttaattatttatttcttgaatttaatacatttaattaaattgaaaaattaaatatctaagttgattttcatcatgatacttaaatatttctttttcatgacacttaattaaatagaaaattatttttagttgaaatttattttttcaacttaaatttaaataattttcaaaatatatttttctttaatcaatttcgaaattgcattttaattatgcaagatgattttgaatttatcttgaaaaatagattaagttgtaaattaattatttattttaattaattcttggaccaacttaaatcaatgattttttcatttattgattaatt

SEQ ID NO: 210740 - DNA, 1153 bp, Cannabis indica
tccacctccgggacctaccaccgttttccctgggacgaggagacgcccaaccacaactacaggggcttcgaagcttagagccagacacacctcatggccgaggccatgctccctcttcaagactattttattaactttcttgtatttgtcggtcttgcgccataccaactcattcctcaagcttaccgcctactttcaggcttgttcattttttattctgctcggagctggggctcgcccagtccggcagaaattttatatttttatgaactcgtttccatccctaaaaagggagataaacttaaagatggttttacggtcttcgggcccatcctttgaatgaggcccggtcccttttaattatcagaagcacatgaaggaataccgtcaccgcttcttcttctcctccggtttccaggccatggatcatctagagcttctcacggagtgggttaggatccccccttacatgcgcaccaaacccactcaaatttttcttcaacgggccaagaccttcgccacatatgacaagaaggcccttgatgtcggggagctggtcacgacagagcactgtcggaaggccaagctgatcctagggcaccagtcggtggatgactataatctctccaaagtcatctgcccgaacgtgagggctccagccgcggagaaggtgctccggggtgaaattatcgccatggcagaggacaagtaccggaagtacctcttcagagggaacaggagcaggcttacattaaggcccaggcgattgccggaagggcccttcgtattggggctccgttggagcgaaggaccctcagaccaaagcctgtggtcccagtaccgaatacgggggctcccgatgccagcacttcgggttccggtaagtcccctttaacgatacattatgttccttccgtccatgagtatactagccttaggcctatagggttcgatgaacgtctccataggtttaggatgccttccactcggtggggaaatcatcccaaggagtattatttttcccacttaggcaattatttaggtcggtcccggatgggttctggacctccggggcctattcccttggaccgttcggcccatttgtcctctagttggttccttctctcgggcagctttctcggggatgatgaag

SEQ ID NO: 210741 - DNA, 720 bp, Cannabis indica
tatttatgaattttcactaataaagggtgttttcccatggcatgtccacgtaagctaaagacaaagtacaggtggagtacagccctgtgagtagcggaacagggcctccatgcaagttatagcaaaaccatcaagcaacaaccaaatggagtgaagcgagccctcaaggagttgtacaaacatccttggctgcccaagagaagcctataggccggctagggtgagcctacagggcggccaggatctgtgcacaagctggcaggccaagaagtgactttcatacgaaggaggcttccgttgaacgaagggaacctggtctctacaaagaaatggtgtacaaagctatcctcaacttgcaaaaggttggcctcctcttgttggagctacactgacctgccacgtcctgcaggccttgtcctgctagatcctgcaggccttgtcctaccaggtcctgggaggaccatggccgaccaagattgacctggcagaaccatggacggccaaacttctctgtaggtctatgggtgggtaggattggcctgacaggactctatgtataacccaaaacgtggacacaggacatgggctgcgaatcgggccgtaaaagcccagcagaatggctaaataatatctaaattcaagggcactgtagtgtttttgtaattatctaacaaactatgtaaatatctacgatgtaaaattgtaatctagggtttaggc

SEQ ID NO: 210742 - DNA, 337 bp, Cannabis indica
atattgctggtctggacgtgacaactcttgaagaactacagaacttccatgtggaggctataacaaagatttgccacgcaaaggtagtttctcttatggtttatttttcgattctctttatacaagcttattgttactgcttctgcaccatttgtgaatctatgctcaattgcctttactgattccatgacgactactaaccgtttatcttcgtttctccagtgcctaaatagtgtattgtagcattctgaggttgaccaccgtacaaaacttactccactgacagttctaacattgcaaggttagctctttttttttttttatgaaagttgcaagg

SEQ ID NO: 210743 - DNA, 553 bp, Cannabis indica
caaagaaaaatgatgtcatttttatcaaagatttccgaaatttgtactcttgtgaatttccctcaaaaatcacctttctctgtgttgttaatacaatgttttcaaacgatgatcgaagtttgaaattgggctcatgcaaatccaaatccaaaccgaggcccaagcattttgcttctttcagtaaatgggcctccaattttgtacagccaccaaagatcgccaagaatctgggcccactaaactacatgcatcatttccaaattttcgatctgcaaacaaatcgttgagttgatttgagaaaaagtagaagcacaggcacagaagaatatcctcatgttagaaccatgtgcaaataatatgaaatactcatttcttaaaaataaaattaaaaaaaaaaaagaagcctactgtaccatgtgaactaataaatatcttaaacaaaaaatacgcacatgcataaaaccaactcattgctgttttgatttgtatcattcctgaaatgacaagttataacaatttggagtttggaccctccaaaaataataataataat

SEQ ID NO: 210744 - DNA, 939 bp, Cannabis indica
acactgctattgttggttatcagagaaaacatcaaacttcattaaaaagcatcaaatattattgaagttaggtccaatattattattattattattgaaggtattgaccaaagtgctttatttctttttctgatattaattcattcttccattgttttttaattgtaatgtttcaaaatgagatgtaattaaataaatatatatacctacgtcgaagaagagtttcttgattgcttgatcttatgttcaaattcaaggttcactttcattaaaatattttagtactaagatataaaatcttaattaattggaacagatattcctcttaatttcttcacgaaaagagcctataaaatcttgggttctctactcaagattggtagcccaaaagatgtttcaggggtgtggttcattctaggccgtatttagtacttcaaagtggtcaattttaatcttgggtttactcttgattttataataaatcagttgtagtatacaaatgttttggagtttatatgtttaattaagtcatagcttgcagtttcatagtagcaagtttgatttttgttgagtgatcttaatctatgatgagtcacagaagattcaacagcttcaatcttctgatacactagcattggaaaataaagatgctgacaatgatgattctttgctgtttaacatgaacacaagcgttttgtaaggtacttgtttaaagctatttctatgcactagtttatttggttaattgtatgcatttcttcatatatgaatgatgaatcactgacctatagtggttcattcatatgtaaaacactaagaaaacacaagaacagccacccaatcctgatcttccctgatactttatattttctctgtttgatttacaaaacatgatggattattgttggtttgttttgtcgttgcatccattaaacatca

SEQ ID NO: 210745 - DNA, 547 bp, Cannabis indica
aacccaaagtctactttatttctggagcaaacataattacagatatgcttatagtattgtcatttagttcagcatatactcttgcactgaaaaatataattgtaaataaatataatatcttcaatttgttagttgggtaattttttaaaaaatatatatttagttagatacctactggggtatagctattgattcatatccatataaacatctaaatctttcgttttagtttttttgagctcctttgttacatccagcacatgacaaatagtagaatgattgtgataaatttttcaaaataatcttgccttgtatccagaattttgcagtcttaattagattatgtataatagtcataattttgcaaaattttataaattttggctaaaaataggaaggatcttgaatatatttatttccattagaatgagtcttttatggaaggcaccaaaaaataaatttgtgatggcttaggcctaaagcggacaatatcataccaatgaaaaaataaatagtgtctgacgatccttacaaatataatttaatt

SEQ ID NO: 210746 - DNA, 688 bp, Cannabis indica
ctacaaggaatgtatttcgcgccaaggaattctaaatacttgatcgaccattttaagctaccgaagctaacttagtcgtgagaaaacttcattcctctcttttcttttttatgcccccatgtcgccacactggagggacatggggacgtaaaaaaggaaatcctatcaacttgttccgatcgagtacatcttcattatcaaacacataaaaatctactttattgatattacatgatactcttttagttatagagctacactaagggtaaaaagttaaatttgaaagttatccttaaaagcttcagcttcattaaaggtcaactaattaaatagtttagtcatagcatgtgatagtattgtgagaattataacaatagagaaaaatgtttgggtacatttagcaaacgatattgtttagtaaagatatacaactttgcaaaaatgcattctcaatcccacatagtgtgatcattaccattctatagattttgagacatatatatatatactagcaaaaacctacgtgcgagcgagacacgtatattaagttttattgttaggttttttctatgttatttgaaagtgatacgatttaaaaattaaaaaaatatatattattagttataggtagattatattatgtgtatctaaatattatagtttataatgttgtcaaatcttactctta

SEQ ID NO: 210747 - DNA, 503 bp, Cannabis indica
taaaatgcactattcgagtcagtaccaaactacaattgaaccaaagttctatttcactccatatctcatatctcataatagctacacaattacatatttatagtgattcacactctttacaaattactaataagcccctacactatttcatagtgtaacactttcccacccttcaaaatcaccttgttctcaaggtggtaaaattaaaagaaaactaaaaacatgcacaaagaaaaataaaaaaaaacaattacagcccaattatgattattttagcctagtagacttttaagcaaagcccaagcccacagtaccaatggcaatcggtcttcttcctttccacaatcctagccatcagtttttttttttttagttggaagcagtgagttcgtgacctccttaatgtgaagcttcatcttcaacacaattactaatttgaaccatatatgtatataacatttacagaaaatatccaataaggacatgtatatatatatatatat

SEQ ID NO: 210748 - DNA, 866 bp, Cannabis indica
aatccgtacttagtgcggatcgggtgtactatgaataaaataatgcggattggataggatgaacacccctagccatacgtttgtagttataattttgtaattttttttttttatagaaaatttattttttggccccctcaattttttttttaatagtttgcccccctcataaacattttctgtctccatctctacccgtatgtaaatactgtacgtagttgtttggatgagaaatgtgagtagtttattcagtatggaggagactaattatatgtttggtagagaagaaaagtgagaaaaagagataaaattgagttgtttggtaagaaggaaaaattgagagaagagaaaagtgggaagaaaattatggtgtgagacccacccaatttttctcttccgatcccagaaaaaaagtggagagaaaagtctctaacaaataagaaaaagtaaaatgactaaaatagttttataaaaaaaaaattagtgttcatacttttaagaataatgcagtaattttactaaatattaattttctttccttcttgtatatcaaataacaaagagagaaatatgctttcatttctttctttctaattttttatccctcttaaattttctttccatcttattttctttccttgctgccaaacataaaattaaaagttgggatgaagatttgttttgtgatgttttttaaaataaaaaaaaatagaaagatgctaatattattttgggtaatccctttgagtactaatgaggttgatgattcttggttttggactaaagaagttgatggaataaagattttgtaaaagtgtaaaataattatttgactctaaaaatgctaaaagtttgtcaaaaatagt

SEQ ID NO: 210749 - DNA, 1054 bp, Cannabis indica
tatgttatatcatttatttaagatgatatttagtttctattttattatatataatgattatatataaattttttgtatgtatatatattttaatggtatacataattttgttagcatgatatatatattttttgagtattaatttagtatttgttaacgcagattttcgttaactaaaactaatgagcctttacgtaataaatattttacagaaaataataataaataatttatctctagatatttttacgtggctttgtagttaaaatctacatactccacaagcctttttattaatggtatttttttgagtatagaatacaatatcagaataatcgtatttttctctcaatttttccatccttttttctgtaagatctgcccctatttataggaataatggttggcatttatttttttgggataaatttaaatgtaactgttcatgaaacgtggacacttacaggtttcattttatctcacgtgggataatatttgataactgcttaactgccttttatgtttatcctttagatggttaatgctgatttggacagttgtatcttgcttcatcatgagttgtcctccttgtccatcttaatgaggaaacaatactaagtgttggcaggtgattcgcctcgtcatatctctttatttgatttaagattgcaagatgaccatctcgctatatgtaatctgaggttgttgtatgtgattatatttattctactcgaacggatgaatatcttcttctttttgaccatgtactttgaggcagacgtatgtctcgtcaatattggttcaatagtttttatccttatctagcttaagactatataggcagtgagttttgaatactttctatttaacctttataacgagttattttattttgcatttaatgatataaactttattatgttaggtgattcatattcccgctgtaggacacgtgtcaatttctgaagtgcagctgaattttgggtataacaatggccccttaaaaagttctttttcaattaaaaagatcttttttaaatgattataagggtat

SEQ ID NO: 210750 - DNA, 674 bp, Cannabis indica
aaatcctaattagcctatgatctgttcatgaacattaggcctcgtttggaacgttgtattaggtcgtactgtattgtattatattaaattggattatatatcatattttttttatataatactatgttaaactttactttatatattaaaatataattatatatatttatgtgtccatcaaagttaataccacgtagttttacataaaaatattgcataaaatacaatttaatataatattatacaatacaatacggtctaatacggcgtagcaaacgaaccctaaaaataaaaatatataaatatttacatatattctactattatatgttgatcacgtgtcttaactttttcaatatcattatatagtattttcctctttcatattgttttattttgtgtaataatattagctctcataccaattgctatatgtttaatttctttcattatttcaataaataattcattggagaaaagttaaagctaataattaattctaatacacaattagcatgattatggcatatgtacggaaaacatgggatgagtatgtgaaaacaactaggaaatatcttaggttaaccactttataatggaccccatttatagaaacctttgacaaaataaaactataattttatgtttgtcaaaagaaaaaaaaaaacatgata

SEQ ID NO: 210751 - DNA, 649 bp, Cannabis indica
gagccagtacaagaatccttaccgaacaacaacaaagacagacctacctagaaattgcacgtagacgggtcagcgacagataaactgtctagtgcgggaattgcccttgtcacacctgtggggcaacatctacacgggacagtcaaatttgaattcaaagcttcaaataatgaagcagagtatgaagccctcattactggcttaaaacttgctcaggaactatatgttgaatacattgaggtctgtagtgactcgcaattggtagtaaattatgttttaggagagtacgaggcccggggagagacaatgatagcttatctaagaaaaatacaggatttgcttgcacaattcaagggttacaccctgaggaaaattctaagaggagaaaacacaactgctcatgcactagcccgacttgcgagaagcaccataacagataaggaaaatctagtccctattcaattcttagaagaacccaacatcaattatgcggaagaaatcgaaatgatagacacagctccaaactggatgacactaatagaaacctacctcaatactagagaacttccaaatgatagaaacaaagctcgaaagatgatgaggaaagttgtacaatacatcatcgcggaaggtgtaatgtatagaagag

SEQ ID NO: 210752 - DNA, 624 bp, Cannabis indica
tggtcggggagtttccttcgatcgtggtggtcgacagcgattagggctaaggcttaggcttcaactttaaatatttgagattagaagaaaaattgagataaagggaaaatagagaaagagagagtcttactgctcgcggttagggcaacggcaaaggcagagacttaagatctttggggtttgaatgtcttgccgagagaggagagtttgtgttgatctgtattggtactggttttaaatgatattcttaggcttctaaactatgcatatatactagttgttgttgttcttgtcgttttcctttctcctactttcataaatgttacttatatttatgtttacccaaattttgacgacgatgacatgtcaagaatagcaccgcgtggcacaaaaataccgggactaaattaatgaagaaggtctaaagtcatgactgttgagatgccccccccttcccccaacttgggtttcgagggggacccgatcccccccaacttgggtttaaggggacggacccccccccccttccctccaacttgggtttagtcgggacccccccccccccccaacttttgttgaaaaggggggacccccccccccccccaaacttgagtttagggggtt

SEQ ID NO: 210753 - DNA, 753 bp, Cannabis indica
caatcttcatgactgtcacatcacctctctttagtatatcccttaatatatggcacttcctctcaatatgctgcctctcttgtggcttcttagttccttggagttggccaccactccactgttatcacagtagagtactagtagtttttctatttctagaactacttccaaatcagtgtagatttcttcaatcaaatcccttccttagctacttcacaagttgctatatattcagattccatggttgaattttcaatactggtttgtttaattcttctccagactacaactccaccaccaagagtgaatactaacccatatgtcgatttttgactatctttgtctaactgaaaatcagaattagtatatccagtaggatttaactctctaccggaatatacaagcatgagatctctcgttcttcgaagatacttgagaatgtgtttcaaagctatctagtgttccaaacatgaagtagattggtaacgactaacgatccctacaacttagcatatgttaggccttggatacaacattacatacattaagctcccaactgctaatagataagggtactttctcatgtcctccatctcctgaggattctttggatatttatccttacatagaataattccatgttcggacggtaattgtcctttcctgaaattctctattgagtaatctttcgagcaccttatcgatataagttgcttgaaagagtgctaatgtctctgctttctatctctaatg

SEQ ID NO: 210754 - DNA, 559 bp, Cannabis indica
ggtacgtaaggagggggtagcacgaccggtggcttggggacgtagggtggtggttttactgcaggtggtttaggggtgtagggtggaggttttacgatgggtggcttggggacgtagggtgggggtttgatgtgtggaggtttgtaaggtggtttgacgtgtggtggttttggtgtgtatggtggtttgacgtgaggagggttgggagggtgcaccactggtggttttggtacatatggtggtttgacgtgaggagggtgttttggtggtttagggtggaatggtggcttcacctttggtgggtgtttgggtggaatttttggagggtattccggtggtggacagtaggagttagcaaaggcagtgagtaaggtacccaagttcagcaagaggaggaaggtggttgctacagcatacttccccatttttggctataatccactgtaccctctctggagagagagagagagagagaaaaggtagtgaaatgtttgagaaactctgtactaaaatgacctttttataggaaagcttgatagagatttttcggtaggtatgg

SEQ ID NO: 210755 - DNA, 146 bp, Cannabis indica
  modified_base (133)..(133): a, c, t, g, unknown or other
aaacagggtgttgctgaaaaaaagtaaaatgttattattattattagggtaaatagcggcataagtacccaaagttttaagtttgtaagtggcataaacccaatgtttatttttagcggcataagtacccaangtttgtaaaactg

SEQ ID NO: 210756 - DNA, 529 bp, Cannabis indica
aaccaaagtgagactcatctatggagacaacaaagtcaactttaatgttattggttttgtagactcagattatgctggagacttgaattcaagaaaatcacaaagaaattatgtttttcaattaaatgggtgcactatatcaactagaaagctaactgacttgcaatcaatagttgccctctctacgacagaagttgaataaatgacttgtaaagaggttgtcaaagaggtattatggctcaaaggcatcacaagagaaattggcctaaaccattcaaaggtaacaatcttttgtgattgtcaatgcaccctacatctcataagcaccaagtctttcataaaagaactaaacacattgatgtgaagcttcatttcattagagacttcatctcagaaagaaaaattcagttgaagaaagtgtcaacggaatacaatccttctgatatgcttactaggacactactaacttcaaaatttgaacatttgtttgaatctcttaatgtcttttctaattgttttaggatttata

SEQ ID NO: 210757 - DNA, 684 bp, Cannabis indica
actaacttcaaaatttgaacattgtttgaatctcttaatgttctaattgttttaggatttatatatagctttcaaggtagagaactgttagtcctattagtgacagttaatatagttaaataagtgtttagtttggctgtgttagttaagtggctattgtctataaatagtcaatctcattcattttcttgtaataactcataattcagaggaattagggaagctaagattgaatgtgtgtttggttgatcgagtcaagtggcagacatatattaacatttctttccttagatcttccttaattctttctaaaatttctcaatctttattaattacttgatttaccataagtttacacaatatatatatacaagtctatacgtaaataagctatagctaggctacagaaagaaactctatatagtatatatatatagccaactccctttagactttgaattatataattatatatattctcctgaaaattcttgtaagcaataagaatacgaaaacccacctccgcctgcattgtcatttgtcaaacacatataatatatacatatatatatatatatatatatatatatataaagaattgaagacgactgagaaaattttttccctttcaaacacattaactataatctaataataaactcttaattttggttgacccaacat

SEQ ID NO: 210758 - DNA, 867 bp, Cannabis indica
aattacaatcttggatatttttttcctgtcacataaccctcattaagatttaacattaaaaaaacatacaaaaatcattcaaaatttaccgttatctgaactagggcatttgtaatgttgagtaatcaatgttataaaaaatctcaatattatagataacaagagtacgtgaacaattatagttaactgaaccacaactaccatcagatgaattggaatccattagataaagttttattttagcttcacccaaaatagcagctcaattaaaggaaagcaaaagaaaataccaatgttatagataacaataatacgacaattactcaaagcaactacaaaccagtacaacaaaacagtcaaaaacaaaaaaaaatagcacctaaactagccccatgatcctttgtttaacatcttttttaatagtaatactaatacaagctgctgaactaacaaaaaaaattaaaaaaaaaaatgcaatgattcctatccaacaaaaggtgtacaatgtggctgtcaaaacaaagtttcaaaaaaaatacgacaattacacattacacaagcagacaaagaatattgcaatacaattataagtatcacattaattagagaataataatgaatatgtcgttccaacttgatcagtttccattagaaaaaagaagttgagtttaaatttttctaaagaggtacagctagaaacaaagaagcaaatgtcaaaattacaatacaaaaataatgcttaatgaatgttaaaatcttcaataattcatcaattcatatgtataagcacaagaaaatacggagaagatataaatactgatgagctcaaattaaagtaagagagaggctacgacgtcaaaaaatacc

SEQ ID NO: 210759 - DNA, 625 bp, Cannabis indica
tttgtctccttgaaaggcaaaggtcatactcgggttgggttctgcagcaatattggtgttaactttcttgttttcttcttgggaaacaagatgaaacaccctgttaacttcatgcagagggtccatcagcagaatactgctatgaacttgggaaaaagagtctgaaagaaccatgaggaaagacatgatgtactccatatggtggtgttcttgaaatttcttggcaccaccacaggtgcagccattacaaacgcaagtaggtctgtaattcgaaagttgttcccatatggttttaagcttggtaaaatacatgcagacagtttgattatcctgtcttaggttcatcaaacctttcctcacgttgtatatatgaggaccatttctttgttgaaaacgaattttcagatcaatccatatggcagcagcggattcatcatacaatatgctagaagaaatctctttagaaatagagtttaaaatccaagaaattactatgttgttattcctaagccatgcattatacataacagcatcattaggcatgggttaggaatgctaccttccaggaatcctagtttgttattaacagaaatggctaattacatagccctactccaagacatgt

SEQ ID NO: 210760 - DNA, 949 bp, Cannabis indica
aaatttaaatgatctcatctttgaaagtaattccaattggaagggtttaataaactaaagccacttgtacacacaaactccatgcgcaaacatagaataagatttattgcattcccaagaacttttctttatacactaaattggtaaatttctatgtataaaaatataaatgcatttaaataaatacaaaattatggccaaactgtaatggggggtttggcttctaggggatgggaatgtaaaaccaaacttatgtttggtatggttttagtagagggtttatatttgtgtggatcccatcccatctttaagattatttatggggtaatcccaaactcaaacacttcactttgagttttttttaatgtcaactcctctcaactaaaacccacttagtaaaactcttaaaccaaacaccccataatagttttcttggcgcactacctcctaaacttgtcaagataatgttagaagaagctccttcccactaacagcctttatgtaagaaaaaaaaaataaagtaaaaataactcttgttccattcatccatttgtacatgtgacaaaaaattcaatcctaagacaacacattaggcctaattcctaattgttagtccctatacccactttactaaaatttctgaagaagagttcctgtatgtaaaaggaaataagaaaaaataatgaaagcaatgactgtggtatttcattttattgctctgatcctgctagtaatgctgtttggctcgtaatgctgtggtattttgaattattgttaaaaacataaattcttaaaaagaaaataaatatataaaaatacatatgacagcaacaatagcacgcaatattatacccattttaaaacgtgaaagaaacactactgcaaaattacaagacatccttccaagtcacttaaaaacaaaatgttaggcatgttatacccatttaag

SEQ ID NO: 210761 - DNA, 512 bp, Cannabis indica
tcatttgaggacatagtccttctggaactctcactgtcaactctacttactatcctgcaaactaaaacaaccccaaccctagctcctctaatcctgatgcctttaaacaatggtggaaatctgtttggtctttaaatatctctcataaaataaaacattttatttggagagcttttaaccaccttcttccatctaaacttaacattttctcaagaaagatccttgacgaccctcatttcccctgttgtttaaactgtattgattctaactcccattcccttttagagtgttctagggcatgtaaatattggaagtacactagtttctcaaatttttttccataataagaagaattgtgatattaaagaaattctattaagaggttttgatgcttttcggaaagacaatttggctgtgttttttagtattttatgggctatatggaaccaccgtaacaagtttctgtttgcagataagaagcatgtttatatggatatagaaccttttattgt

SEQ ID NO: 210762 - DNA, 762 bp, Cannabis indica
tcactggctaattggaggagacaacaatgcttaagacaatgcgaacggtggttggtttgacaaccggactaaaggtatcctcataatcaattcccagagtttgaagataccctttagcaaccaaccgtgacttgtatttgtccaaagacccatcaacattcaactttattctatgcacccacttgttatcaatgacatgcattgatggatggtagggaactaatgtccaagttccttgtctcttgagagcctgaaattcagttgtcatagcagcaagccatttggggtttttaagggcttctttgatgtttcttggttcagttggtaagagtgattcgggtagggggtgtcttgtggcaagataggctttgggtttgtgaataccactctttgatcttgtttgcattgggtggatattggtggatgaaggtatatgagaagcaggctgttgtgtggttactgaggtacgggtaggagataggctgctggatggttgattttctgggtttgggggggggggaatggtgcagcttgcatattattatgagtaccaggaatgacaactgaagaggctccagtagctacaaccggtggggcatcagcagctgttggagaatttaaactggtagcagtgacaacaggtgcaccagcagctggtgttgcatcagttgcagcagcatttgttgcaccagcagcaagggcaggtgtacaccagcagcacccataagtggtacagcagcatcctcagcattggaaaacacc

SEQ ID NO: 210763 - DNA, 815 bp, Cannabis indica
catacttccaagtggtttgcccatgtctcccagctggttattaacttcatctagagtcaggttgtaccatgaattctgccttgtcaataaggatggttgaaaatgagactgctgaccactaccttgagatgccattgtctgaatccccattcactaagcattcactaccccacaacaaaccttcttatgctgctatgcaaaaatcaatgactacaacccatcagtttatttatttataactttatgaaaatcattaataagtgctttcaagagccaaaacagcacaaataaaatactatgttcatcctaattatttctaaacttgtcataaagtctagtaccctttttccttaaaaattcccaggcagggcaaagaaaaacccaattgtcttctttttccacttttcttctttttaataaataggaaagacactattatagtatttgtgttaatttttctaaccagaaattcacacgcagtaactgacgaaataaaggctaattcaaacgcttccatttcgatttgtcgtcaccaccacctccaaaagaaaaagaaactttcttttcctttcttttctttttcttttgtttttatttgttcactttcagttcctcaaccaaaaaacacagcaccattaaactaaacccaaaagaaagaatacccatctgaagaaagaaactgataaaaacaatttatacagcttaattacaaatcacaatttgtacaaatccataagaatcgtctcaaagcataaagagcatcaacagtgaagaattcaataaagaaaagctgaagaaatatacttaatgttaca

SEQ ID NO: 210764 - DNA, 1283 bp, Cannabis indica
cagccaatttacttttcagtatcaacatattccaactacaatgtttggttgtcaacaagttccctaataaaatgataccttttatcaatgtgttttgtatgagaatgtagaacaagatttttttgaaatatttatagcactttgtattttcacatgcagaatgacaagtaagactagatgtgagagtataacaattatcacagatcttaacccttataaaatgcattgtttatcactgttaagaacaaaacaatgatcattgtcaaaattgacggtaagcccttgatcacaaatgtgactaatgctaagtaaattagcttttagtctctcaataagcataacatttttgaaccttggtaacccttaaaaattgagagtttccatacgaatgacatttcctgttaaaccattgccaaacataaccttaccacatagcattggtctgatattcacaaaaaaaatccttgtcacgtgtcatatgtctagaacaaccactatcgaaatactacatttgacaagcagcacctttatcagaaaaaccagctagacatttttctttttcaatcaattttttttttaaagtactatttttcttttaaaaaaaattccaattaccaaaataatttgttttgtacaaattttgcatggtgaaacatttaggtcaattatgccccttaataccacaaaaatgacagattggaacaaaccttcttacctgagatcttatcctttttgaacttactggagactttgcttttgcagacgacatttttgtagcagtagatcttaaatttgcagcagcaggtaacttcgctggaacactagattttacaaattttatttttctagaactttcaataccatttgatccaagaccagcaaagcctctttgacctgcattctaaacttcctcaaaaatggaagatccaaggttaagcatttgaagatttttcttgaaattttcaagttccttctttaatagaataacttcctcatcttttgaacaaaaatcagtctcatattctttaattttcaattcaagagatccagtttgatgagataattgcttatttatttttgacaatgatctattttcagaagtaacctgtatctcatacataaccatgtaagactcaatcagtgactcctcacagattttagattcatcagaatcagaattttctttttcaatggtattattcaaacacaccaatctttctttcatctgtgaatcaaaaacaaagaaactgaggttagtgcaactattttaagaaatatcttca

SEQ ID NO: 210765 - DNA, 661 bp, Cannabis indica
attttgtttctaagttcgaaattcgtttttacacttacattttgtttttagattattattgtgcattgtgtattttttttttgattatatttgtgagtattttttttcatttggttaactgatgaaactaatttatattattttcattgtatatcatttatattttgtgttcacaatttttactattgttgtgtgacgaaattaatttttgtttagtttcataatgttcgttgtggttgtatgatgaaactaattttatttattttttatagatggaatctaattcctccagtaaaaatgcaatggaagatgttgctaaaaatttcaagtgctgactctgagaagaaacttcctccatatcaagaagaaaaaaaataaattgattaaaattttaaggatttatctttagtacattgttgttttttttttaagtatgttaaattttattttgatttatcttctcataagtgtcttctattacttcaatttcttagttgtttatttatagtttttgaaacttgtttttttaataggaagctggttttctttatgtgtcttatttatgttcaatttcattgctagttgtactaaataattggttttcgtgtttaagtattagtttttttaaatgtaattaagattaagtttttttagttatttt

SEQ ID NO: 210766 - DNA, 997 bp, Cannabis indica
ccatacacctaaccataaccctagctgaatcaagatcgatttgacaaagtatgactaactgtgaatcttgcctatactcagtactctaatcgcactgatgtggtagcagttatccatactatctggtagcctagcatatatgtctgatggcatctcggtgcaactctatgtacacctcactgttgccctgatatgctaatctgatggctatataaaatttgcctaacatatatctaatatgttaatctgatggcaactaacatgtacgctaaacatgtttaagtatatgcataacgttatactatcttacctcaatttcgaattcaggtgtgccagtaaacctgagtggaacaatctgctcatcgaattacaggctcctaaagcacattaatcacaatactgataagcgatacgctaaatcacttcccgaggacttaaacttgaaactaaaagtttccctatcgatgaataacatggaaataccctaaataacacaaaaatgtgaaaaactagggttcccaaaactaccccaaccggtagaccggttccccaaccggaattccagttatgggaaaaattcttggaagccaaccaaaattcgggtacctacaggccctattgaaccggaattccggttcagttcaggaaagactaaaacatttatatctcaaccaaaacaacccaaatccacatgcaaccttccagatctgttctaaacatcctaaagatcaatttcaaagcagcaaaacacaacttcatggacagaatcaaaacttaccattgatgagtcaagcttgagttcaaaaactgaaagcttgctaatcctacaaaacagcccctataaccatttcaaatcaactcaaatatacacaaaataacttcagaaacaaccctcaaacaataacagcaataacaacaactaaaactcatttcaagcaaaacttttccttaaaattcaagaacacaaaataaaggtttaaagaactataccttggct

SEQ ID NO: 210767 - DNA, 695 bp, Cannabis indica
aatttcttcaacctcagttgcccttgatttacgccctgttccaaattttaaatagtcgaaggcacctcaactttaagttctgattgtcattgtgaatcgtgaaaatcttcatcagactcattttttctacattactttggtttgaagggagttcgaagggagctatgtaaggaatttttgcatcaatatgtgttattcacgactactttcattcatggtttgatatatcacacacaccccattctaaagctatttgtcagttcatattggaagttgatcacgatgagctaccctatgactttatcactgctataataactccaaagtcccttccatttttcatggaatctgacggttcaagcaggaaaaaatagttacctacctattagaaattggaaaaaaacgtatgcccttttttctcaatttcctaatatctttcttcaagctggcactattggctccattgagaggtattcgtcttagcaacttaacaaaggtattcattttgaatctggctaggtatcttgatatcattgacgaccaattttttttatatataaataatgaaaaaaaaataaagaaagaaagtaagcaccatgggattgaaaaatataaacaatgttagaatattttatgtggactgacataattaagtgccgctcactcagtgttagtattagcatataatgataact

SEQ ID NO: 210768 - DNA, 728 bp, Cannabis indica
attataaagacactataacagtgctctaagatagatcgatcttatatataatgtaatgggacactaatttgatgtgacatatcaacttttttttgttgataagaaaaaaatttatatactgacctaaggtcaacactatgggcatgtaaaaactttattacagtgtgatattacaccaaaaccaagtctaaccgcacgacatttgtataattatttttgggtttatctacagtgtctcaccatatttgggtgggcactatagacaacactaatttttttttaaataattatataatatttaaaaactaaataattataaataaatattaatcaaaacttttataaatgtatttgtttgtattttaatatttttaagtgtgctaaaaaataatttaggggtgttcacggtgcgggtagcacaattttgaccattttttaaaccaatccacacatgtagtttttctaattccccaaaccacacccgcattgtgaaactaaaaaactgcgaaaaccgcaccgcaaataatggtgcgatgcggtgcaatttttgcggtttggctgtcaccaataatttaactatcacaaatacaacaaagcttgagcaacacttgtcaaaaatgtcataaggcttgaaaataaatataaaaaaaattaaatttcaataatacaatattagtgggctttgagttggacattcacatattggacctaactaaataaaaaaaaaa

SEQ ID NO: 210769 - DNA, 618 bp, Cannabis indica
aaaatgatatacaatttagataaatgcatagagaacacacccagacaactcgattagaatgataatcatcatcgaaaattacttccaaagtctatcgcgatgttcataaaatccaaacatggataaataagaaaaataagaaggtaacaacgcataaaataactttactgctaccaatacagcacgatatctacacatatcattgtattataaacatgaagcaatgtatctttaagaaagaatatagcaaggagccaatgcttttctttcttaacacagatggtaaaaatcacaaaatctactttatcctaaagaatattacaattaatgcattgcaaatccctttatgatctcaacaaaaacacagttgcaacttagcacagcacaatcacaactcgttttacaaaaaatatcacaaacttcaatccttgtctaaaagttaatattggatgtaatgaattttacaatcgttgagtcacaatactcactttgttttataaatagtaaaaaaacacattaacataccacataaaaaaaattaacctttgttaatattatatcaactaaataaactaacatttacaaagtaaaataacaataataacaataacaataata

SEQ ID NO: 210770 - DNA, 539 bp, Cannabis indica
tagtgtattgagagaatgtaagaatagtgtaactattcatcgaacccttgcacactttgtctttctttgatgtgaacattaaagaaatgggaagagcacaagtgaacgtaagaattcatggccattactacaaggtaagagtgcattttattatatatctttgatgccttaaataagacaattttgtattattttagattgagcataattgttaatgtcaatcttttcttttgttttgatgctcattatttattaacgattggtatcatgagcttggtcatctaattttaaggctcaaattaatattattattttgtttaatatcatttcttcccatttttttctacacccacgatttctataaactcataattttttttagggttattttgcggcataaccttcttaagtagttaggtttttacaactacccccaattcaaaaaatttagcggtaaaccctaaactcgtgttctgttagcattttaacatttccatccatttgtagctgttaactgccatggtggaatgtctatgtgg

SEQ ID NO: 210771 - DNA, 569 bp, Cannabis indica
taaaattattaataaaccaatatttatatttgattttattctattttaatttaattttatattattaataaattgataatatattatttttttatataattctaattttatataataaattaataatatattattttttagttagcaattaacagaatatttgaactcctaaataaaattataaaatacgcacattatactttatatcaaaatgtacattaactatatgacattaattttaaccaaaaaaaaaaacaaataaatcacagccaatacaaataaaaaacaaatcagaacatagaacaaaaaaaacctaaaaaactaaaaataaatcaaccataaatctggaaccacaactatcggccactaacccaaaccaccatcctcgcgaaaaacctcgaattcccttagtccacctacacagcaaaagagagagagaaacagagagacaaacaaaaaatcaaataaacagagaaacagagagagcatcgccatctagcctgagtaggagctccacgggaaagaaaaataaagaggggaagagaagtgtggtgctgcgctgagaagag

SEQ ID NO: 210772 - DNA, 745 bp, Cannabis indica
tgcatgttaaatcatcgtagaaggagtcatatatagaaggggattctctatgccattactaagatgtgttacgcaagaagaggatacacggcttctgtctgaggtacaccatggattcagtggcaatcacgcggccgggcaaagtctgtcaaagaaaatactaaggcaaggatatttttggccgactatgattgaagattcaaaggcctacgttaagaaatgtgacaaataccaaagattttcaaagataccacatgcacacccaacgaactaactcagatgcaaagtcattggcctttttctatttggggaattgatctaatcggccaattgcctaaagataaagggggagtacaatacgcagtggttgcagtggactattttactaaatggacggaaaccaaaccattggcaacaatcacatccaaaaaagtacttgactttgtggtgaaaaatataatatgtcaattcgaactaccgtacaaaatagtctcagacaatggcacacagtttgatagtcaattgttcactgatttttatgcaaaccatggaatcataaagagtttctccgcagtagcacatccccaagaaaacggtcaggtcgaagcagtccacaagataattaaagacactttaaagaaacaacatgaagatgctaaagggaacgggccagaagaactcccagaagtattatggtcttgtagcacaactgagaaaatagcgaccggacagactctgtttgcta

SEQ ID NO: 210773 - DNA, 696 bp, Cannabis indica
cctctccaagagtcaactaccttcatgctgcataaagaagtctgcagtatgtgaaaagcagcctaggacaaggattgctctatcctacaaaattagaaatcaggttcgaggcctacattgatgctgactgggcagcatgtgtagccactaggaggtcgacaactggcttttgtgcatttcttggcaagtctcttgtatcctggaagagcaagaaacaacacacggtgtctagatcctctgttgaagcatagtacagagccatgtcaaatacaacatgtgaagttatttggctaatttttctgctgaaagaattgaatattgagcaccatggaccagctatactacactgtgacaacaaggcaacttaacaaattgcagctaatcctgtgttttacaagaaaacaaagcatattgagatagactgccaccttattagacaaaaggttcaagagggtgtcataaaaatagctcacacatcaacaaagatcaaattgcaaacatgtgtactaaggccttacttcctgctcagtttaatgttttgaaataaaaaatggggctttgtaacatatacattccaccttaaggggggtattaaagatgttaaggtgttgtgtacttaagcttggcagttagttagttaagtgagttgtattgagttgtcatttttcggttaggagttagttatgtaactaactc

SEQ ID NO: 210774 - DNA, 749 bp, Cannabis indica
ggtttagagcctcgaggttgtccctatggtcttcttactgcaggattaggttgattttgaggaattgttccctgtgccgccctggccgttgcagcctctctctccaacttagcatttcgtaggttagattcggctaaatgttgtcgaagttgcctattctccaactccaccaatggtacatatctagttgggtcgtaagcatcctcactcctaggtacgtatctagcaatattattggcatcttcattccttctttcagaaatttgatcaccaccactatcgttcctcctcaaacgtgaagtttcagtggtatagattctttgagatcccatgggctcttttccaaggcgacgagttgtttcttcaggacgatttccatcgttttgattgtcattcgccattgaatgtgattagatcaagtttatacggaaggatttttttgagttatatcactaaaactctcaatgaaagcactaaactgttaacgcaaattttcgttaaccaaaaataaatagccttttcgtaataaattctctacagaaattaataagtaataaatgataagaaaacatcagatatttttacgtggttttgtagtttaaatctacatactccacaagtccttattattagggatatttattaagtacatactacaatctcagaatttgaataataataattctctttcaaatttgtcgtcctttttcccctggaatctactcttatttatagaaatataggttggc

SEQ ID NO: 210775 - DNA, 583 bp, Cannabis indica
tcagtaattatattagtttataggaatattctttacaagtagctaatattttaaggataaaatagtaattttctccctactcgatgtaaatcatccatagaggatcattgattatttagattgaaacaatagataatttataacgtatctatacttggtatagagcgttctatgtaattaagagtgtaattatgaatctatagtggagtccggaggaattaataagatagaaaatttactcggtgaattctaaaactacttattgggagcttggttacataggcctatcgtccccacgctaactgggataatattattttgtatttcgaccataaggtttaactaaagctaattttatctttttttattccatttaaattctaaacctaactctaaagttgccatataaatagaatatgatagctcttattttcatagcactattgactcactttgttaaacaaatagaaaatcaaatagagctctcattttttttttttaaaaaaaaatctcttcttcttgttgttgttaatttcaaaccttgagtgattgagtgatttctcacacatttcaatgcaatagt

SEQ ID NO: 210776 - DNA, 637 bp, Cannabis indica
aaaaaaattgttaaaatatattatcaatgtcgaatatcatctttagtatcatatcattattgatgtaattaagtatcaaatcttatataattttaaaaaataaaatataaaaaaaatattgctaactaatcatagagtatcacctacaaaatatattatgcactactaatatctattagtaatattatttacaaaagtatatttatagtgccattttaatttgacaaaagttgtagtggtgactcagtttgtttattttttttaaaaaaaaaaaatagttgtgctataactatatttactaaattgcaaaaaattaatttttaaaaaaatttataaagaaactacacttaaaaacttgaaaactaaagctgataaaacttaaattttaaaaagggttgttatggttatggactttgattaaaaaattctaaaaaaaaattatttgtactaaaatatatttacttatttaaaaataaaagtatttaaaataaattatattataataagtcaataacatttaaatctttgatttttttattttatttaaaaaatatttatatttattggatatataatttcttatgttatcaaaccacataaattagataaattagatgttttctattttttttataac

SEQ ID NO: 210777 - DNA, 510 bp, Cannabis indica
acatatatttttatttaattattacatctggttctttactttccgtagttcaaggcggcaaaaaaattatattatttcgtacgttgtactgtagatgtatatatgcggtggatggcacgtgttagctcatggttttgccgtccaacgaaaagaattaaaatttagaattgaacctaattaattgattaatcttaaacctctcattgtttttggatgagacgacagtagcggggtcctcacggttgacacgtattaaaatagttttttgttttaaatgaagaaaagaacgcgtgaatgccgtcgctgccgctttcggtgggtcccttgtttgtgtcggctgaatctgtggagagtatttcgctttcgcctcacacgccgtcctctcctcaaatccattctcaaatcctaacttcctctctttctaaccctacacgtatatacccatatactactataactactatgtctatcattataatgaaatggtaaaaaagaaaaaaactcacatac

SEQ ID NO: 210778 - DNA, 1228 bp, Cannabis indica
agaaatataagaaaatttctgtttggattctaaaattaaagtcaaagacttaaattcaaccaaatataatgagtaattctttcttggaccaccactactatttaaactctaagtcagatttgcccatacaagtaggagatttctaagattgaggatttatatcaattgggaatagaatttcgggattataatcatatgcgtcatttaatttcttaagagaaaatataatgacatgaaatgatttatagaccattcatccaatgatatgttttgaagctaattcgaaatgaataagctaagaggaattaggataatttcgtttataaataagaatccaacgatgcttcgattagcgaaagtcaaagtaatcttatttatataatcttcttgtttcatattgtaaaaatactagtctaaggtcgtctatactaagttagtagtacgaaacgacgtcgtaagtagttcggtccgactaattaactaaactaaaattttaattttactttaccgactacggaaggtacttaacctaaacctaactttaatttagttaggtagttcgttaacttaaggtaggtagtacgaaactaacctttccgtttaggaagtttagtttccccgaccccttaaaaaccttaaaaaacccaaaacgaacgtaaccgttaaaggttaaccgaaacccaaaactaagtaaggaaagttacgttaaacgttaaaaaactttaaaacctaaactttaaaattttaaaactaaacgaaaaagtaaaaaactaaactaggtttcggttaactaaattaaaatttaaacttactaactaaccaaacttaacttacgaaagtaaattaatcaaacatatagcaaataagaaagacatgtgaaaatactaaaacatacaatcctaaataatttctaaggtttccaacaaactgatacagtgtcccggtaggcgagagtcaaagtatcattcattgaatagagttgtcagctcatctaaaatagaaaccattctagcaaccttttattcgatcaaaataagaatccaacgttgtcccggtaggcgagagtcaaggttattctcattttatgagcttccaccattgtttcatgttttataagtttatctctaagtagtcaccgtaggggagagtctaatagagacgaaaacttacaaaacacttatcaaatgagatcttacggtgttaaatgcgttcaacgaataaccatcca

SEQ ID NO: 210779 - DNA, 510 bp, Cannabis indica
tatgttctactgtggtgttttttttagatgttttacagttgagttcgtctgctttgtgtatttttaaaagtttttcgtgttgtagtacttttgtaaaaattaacttaaacttcagtatttttataaattttcctaataaaatgagcaaaagagaaacacttttatattttactttatatatgtctttattttttgtaatggtaaaaattttttaaattttaatttttatacatctaatttttttattttttattttttttacaaaatccgtttaaatttattttttcttataaatttaaagtttcagttagatattgccattaaatactaacttgattaatattgtatcgacttcgaagttttattattacatatacacaagtgtaaactaatagaatgtttcaccaaaagattttgactctctataattttactatttcaaaacttatttcaaaatgaaagtatcctctcacaaagaggagctttatgtaaaacttgaataagataggc

SEQ ID NO: 210780 - DNA, 655 bp, Cannabis indica
ttttagtttttacggcaatttcctaatacaggcttttcaggaggattctcttcttttcttaattgtgctactgtgaccagagcatagaggtttcttggattgctgtttttttttctcccttccctttcgtatgcacataagatttgcgataactgcttgatgtggaagacggattagaataattcaaacataatttttttttactagtaaatgaactaaacgtggattgagaatttttttggtctcaatatgagatttttgtctattgtgctctgtagtcacttcagcactttctttttttacacaccaaaatgttagtacgtaggtatgattattcttattcttttaacaactaaaccaaaagtcaatcggatggtggaaagcactcctcactcgaacatataaaacaattaaattcaagagcaaagttattctaatatcggtaaacatcaatgtgacgtttggttgggagaaatgaaaacataagaataagaatgagaatggaaatagaaataggaatgaaatggaataaaatttaaaatacataaaaaaaattgataaaaaaattattaaatattttctcatgttacattggtcattctaccaaaatggtgaaactggcattctattggatagtggaaagcactcctcactc

SEQ ID NO: 210781 - DNA, 536 bp, Cannabis indica
attttaatatgcacttaatctattttttacatttagagcatttttactcatactctctaaatttagttattttaactaaaagttatttttgagaatgatcatatttttctatctatttacacttactttagctaacattcactattttaatattttatttaaaattttaaattttgaatatagatggtatctcattaaaattataatataataaataatatcttactaaaataatataatttttttttcggaaataaatagagtttgctacatctaacgagttccctattcttttagctaatatagtgagacaatattagtatcgtttgaacttgaaatttacaattttgttttaattggctagctattataaatttataactaaggagctcagatttatttaagatgagtatgttattaataacataatatctaagctaaaaaaaaagtcatttatgattcatatttaagaataatgagtcaaaataaatacttgtgatcaagctgtctaaacttgatgtaaagaccgcttagtt

SEQ ID NO: 210782 - DNA, 582 bp, Cannabis indica
tttgtaagtttccctaaatttttggcactttattttgtttaaatgaaataatgtgtctttttcttattttaccacctatctcatgtaattattaaatattaattttattttaataattataaatgattattaaataaaatataatttaaatatatttattaattagacccacaaagtgtactaattaacaaataaacccctatttctcttttcttttcaaaattgcccaaccatagtaaaaattctcaaataagatttatttttgaattctaattgacttataaaattaattagttgagtctacaagatgatattattcccaaacaatgtgaggaccatgagcctatgtaaccaagctcctaataagtaattcaaaatttatcgagtaaatttcttatcttattaattcctcatgacttcactatagattcataattgcactcttaattacatagaacattctatgtaccaaatatagatacttaatggattattcattgtttcaatcacaacaatcattgatcctttatagacgattgacatcgagtaggaacaaaaatactattttacccttcaatgtat

SEQ ID NO: 210783 - DNA, 774 bp, Cannabis indica
ctctctctctctctctaactaagcaagtactttatttttcgatattttataagcttaagttaatttttttagacactattcatctaaccaataataagtgtgacaaatataaaattatatatacaataatatataataaacccataagcaaccatgtataataaaatttgttgataattttattatatatttataatttgtatcctcaaaattattaataattatttttgctataacttatttaaatttactatggttttgaactaaatttttaaacacattctaagtaaacaaataaagttacatagtttgatagataaaattgaacaaattctctatcttatttttttataaaaaaattatctcaatagtacccaattaaatacaaatttttgttctaatatgtattttcaaaagcataataataaaaaaaagtaattgtcgacgtcaaaagtctttttatgttttacgtgttatttacttaaccttttaatttatttatttttgtgacaatactcctttaattttactgctagtttcaaatttaagacgcctgttaaaatttcaccattaaaagttagttggatttccagtgaggacacttttgtatgcgaaatatgttttcattaacttttagattttagcgccacgtgtatacatgtgtacacagtgacaattccaattaacatttaaatatcgaatttaaccggttcttcaaattggtaagtaaaaatgaaattaagagagggttgctacaaaaaaaaaataaaataa

SEQ ID NO: 210784 - DNA, 598 bp, Cannabis indica
ggtgttcctccaaaagttcttcattttctttggagaacgattacagggtgtctcccaactaataatctattttggaacaataaatcgtgctctgcttcaagtgtgattcgatcggctagctagagttgttcttgatatagggggtgatgcgttgttgttggttgattacaacaatggtttcgagccgtggcagaaaccaatggtacatacgatcgagattaatgtggatggaattatatttgatagtgagagacaatatgggtttggctttgtcgtccgtgaccatgacggctgcctattagaagccgtggctgacaatagactcgtgataaatgtttaagtatccaaattccatgagcttgagacttgaactttgtaatcgtaactgatcatcaacatcatagaattcagcatcacgtaatcgtaatctctcaagagaagggcaacccaacaaaaacttaaataccccatcattctttgtagtatccgaaatttgaacatagtccaaaactagagtttttagagatggaaaactacctgaataagaagtatccaactctatcttgtgcaactttaaaatagtcaaatatcttgcatt

SEQ ID NO: 210785 - DNA, 718 bp, Cannabis indica
ttactttaataagatatgttgttcatcttattttaaggtagtgatttaccttttactgataaatttgtttttgtgtaccttattcgaggcacgatgtttacttaaataagacgtgtcgtttaccataattaaggtaaaaagtttgtgtaataaagggagtcatgtaccttattttaaggtagtattcttcatatttaatgattattttggtttacttttttaagacgcgtaatttacttaaataaaacatgttgtttatcttattttaaggtaatagtttgtctttttaaagataaattatgttttagtttatcgtatttgaggcacagtgtttaactaaacaagacatgtgtgttaccttattttaaagtaatagtttacttttttaatgataaattatatttttgtttattttatttgagacaaggtatttatacaataaggtggacgtttaccttatttaaggcaaggagtttactcatatagggcatgttatttattttattttaaagtagaaatttactttttaaatgataaattatgttttattttaccttatttgagacacggtacttactaaaataaggcaagtcatttaccttatttaagacagaaagtttaacttatttaagtgaatccactaaaataaataaataattatgaaaaaaagttaagacgatgattagattaaattgtttaaatttttttttatattttt

SEQ ID NO: 210786 - DNA, 1475 bp, Cannabis indica
tatttcccagtatttttggaaaagtctgaggtcataccatcgagactaggagatttatcaggatgcatactaaacagagctcttctaacttcttcctccaaaactggcctaagtaaagccaaattctgatccacggtaattgaagaagtaatctcctctaccacagttgagtaatcggccacatttgaagtaaataaggtattgaaataatcaaccataacattcggtaactcatcctcccaagtaacccattgacccacatcattcataaggcgagttatagtattgtgtttctttctagaagtagctttagcatgaaaatacttactgttactatcaccttcttgaaaccacaactgtttagagggttggcgccagaacacttctcgttggttcataacttcactaagattcagctcaaccttgcagaacttctgaatggatacagcatcacgccccttcttccaatacaggatctcccgcttccaatggctaatgcattgcttaaagttccctgtataatctcacccccatgattgaagagattccccacaataagaaattttcttcataacatgctgaccttcacaaaggtcccaactatcttttacaacctgcggcacaacggttcacgaagccaggcattttcaaaacagaactgacgaaatggcaccgtcacggaacgcaccgtcggttcaagaagtagcgggcaatgatctaaagtcgatacttctagattatgtagctgggccatacgaaacctctggaaccagttagaacaaacgagggctcagtcaagacaaatttcaacccatgaatcagtgcctctcccacgctcccaagtgtaaggatacttgatttactccatatcaacaagatcacagtcagccaaagcttgattaaaaccatccaccagcacttgcggatatctatttcctcctcttttatctgcatgactagtagtattgtttaaatcactaatgatacaccaaggaaggaaagatttcgactttatggaaaacctaatagagctgttaggtataaataataatttatattaattatatacaaatacaattaaatataacaataataattttaattaactaaatataaaatttataaattataccattataataattcacatcaacaaaactaataaatattacatattagttcattataccaataaatccataactgtaaaattatataataactattactctattaaaacaaaaaaacaactaacgcccggtaagtttgaataaacgataacatctcacttgcccattggtctattaaacaaaaaataactaacgtctataagtttgaataaccgataacatctcacttgcctaatgctctttcacgtcatcaatttcttcttctgtatactttgcatcacttaagtacaaaatttaaagataaataatatgttaattaaaattatcatcatatgcattcttaat

SEQ ID NO: 210787 - DNA, 1193 bp, Cannabis indica
ccaaaaactgcaagtgcggttcagagttttcttgatctagctaggtattataggagattcgttgaggagctctcgaaaatagccacactgttaacgaatatgactcgaaagcaacaaaagtttgcatggacagataaatgtgaggaaagcttttagacattgaaagataaactcataacatcacccatcctgtgtgttccaactaacaaagacaaatttgtagtatattacgacgcatcaaagcaagggctcggtcgcgtgttgaagcataatgagaaggtggtagcctatgcctctagacagctaaaggagtatgagacaagatatccaactcatgacttagaattggcagcagtggcctttgcattgaaaatctagagacactacctatatggaaagaagtgtgaaatatacattgatcacaaaagccaaaagtacatctttacgtagaaaaagctcaacatgaggcagaggcggtagttggaactggtaaaagattacgattgtgagatactgtaccatcctcgaaaggctaatgtagtggcagatgcacttagcagacgcaactatgcaagctagtcgatgttaaaggcattaaaagtgtcgttgcaacaggaaatcaagagatcctaagatagagttagtaacaggaaagctagctaacctcacaatcgaatcaaatttattagagaagatcaaagaagaacaagcccaagatgagtttttaattaagaagcgggtcgaactacaaaatgagaaagttggggacttctcagttgatgaagagggcattctacaatacaaggcaagggtgtgtgtacctagtaaatttgagttgcaatcaaaaatcttacaagaggcgcacactacaccctattctttacacactgggtcaaccaaaatgtacaatgatctgaaaagtaggtattggtggtcgggtataaaaaatgatataacagaatttgtagcaaaatgtcttacctgccagtaagttaaagccgaacaccaaagacctgcaaggctattgcaatctcttgatgttgagaagacattgctatggattttgtgacagggttaccaaagaatattaaacaacaagattctgtctgggtgattattgacagactcattaaatcaacacattttctgccagtgtgcactaactacaacgcagaacaatacgctgaactgta

SEQ ID NO: 210788 - DNA, 1056 bp, Cannabis indica
tggtaatgcatatattgtaatttttaattaggtaataacgtatttggtaatgcatatattgtaatttacttattataagggtgtttaaataaatagttagggtattaattttgataaaaatgttttttatttccaaactttacgaaaaatatggtgtgtgaatttaatttaaaatgtaaaataaataataataaagttaaaaatatggttaaaaattttataatattttaaatttaaatttttttatataaaatatttacatagtttttcattttattttaatttaaagtaaaaccaataaatctaaaaataagattaaaaatatcaataatattttaagtattttaaattaaaataaaaatttatttatatatatataataatatcatatatataatttttatttatgtatataatttttatttttaaatatatataataatattataaaattaataaagaatattctgttaagtagtaggatattctgttaaagttaacgtatctttacaccaaaaattctgttacataaccacactttatatagaatagataatccttaaaattttccaatcgttttttcagagaaaaagtctcaaagaaactccactttctcagagaaaaattctaagcaagggcagaggacacaaaccaaaatttgtatcatgtaaaataaaagtacaaaaaaaataacttataacttttttataaaataatatagatttcacttaatatgattacacttattatagattgcatgtgattatcgcaaacatctcactagttttaaattttttttaaataatttatagtataaaaaatagagttcaaaatacaataataaataaatactcgtgcaactaacagtttgaactctaatcttaataaagttaacttttttaatatttactatatataatatatattatcatatataaaataattgagttattatttatgtagaagaaaaaatcaaaaaaaaaaaaaattatgtagaccaggtacataaaattcctctactaaataattttcttataaaataacatatatatttat

SEQ ID NO: 210789 - DNA, 547 bp, Cannabis indica
cacctgactgctctggcagtgttgatgttttcatgaataatctctcctcttgcacggatgctttacaacaatggcacactaggaaatttgggaagatgaagaatgatatctctcagctgcagcaatcggttactgcactaaataatgcagcagacagatccaatgatatggtttctcagctcaaaaatactgaagcaatcttggacgatttgttggcacaagaagaagaatattggcatcaacgatcgcgtgtggattggctacaatgtggcgatcaaaatactaaatttttccacgctcatgcaacttcacggaagaccaaaaacactattaaatcgctcattaatgatcaaggcattactgttaacagcaaggatgatttgacacaagtgatctgttcgttttattcttcattatttgcaactgatggtgtccaacctgattcactccagcttgttctaaatgccattcctgagacaattacttccgaaatgaacctatcactcactgcacctttcacaccagaagaagttgttgctgccctcaa

SEQ ID NO: 210790 - DNA, 658 bp, Cannabis indica
atacaatggaaagccaaatgagaaaaaaactcgatgcaaggaagaatctagctgcgggttgagctccttgtacgaggaactccccatggttatgctcgcgcactcccagcattggccttcccgcacaccagcttgctcgcacactcctcgtgccaagcgcgctccccacactagcctatctggataccaacagctgcccgtgcatcaaccttcccgcattagcttgcacacgtgccagcctgcccgtgtgcatgaactagtcatttgttagctagtcatgtgtcaactgactgtgcatcaataggtcatttgtcagctgaccacccatcaactagccattcatcacctggccatttgtaagctagccgtccgtcaattttccatgcctcagttggccatccctttgtcagctattcgtatgtcaggtgtcaatttgttagatggccatgcctcagttggtcgttcgttagctggtcgtttgtcagctggtcattcgtcagctggccgtttgtcaatcatcatgcctcagttggacgttcatcagctggtcatccctcagatgaatatctggcagttggtcgtgcctcagctggccattcgtcaactggccatcctacgactggccatttgttagataactatcccttaagtggtcgtc

SEQ ID NO: 210791 - DNA, 1077 bp, Cannabis indica
tactagtattaagataggttaactgcaattgtgaatagatttagggagttttagtctcatccctttagaagtcttttcaactaaatctctagttagtggcttcgttaacggatctgctaagttttcacttgatctcacataggatattgagatgactcctttttgaatcaactcacttacatatccatgtcttagaataatatgtctagacttcacattgtatactccactatatgctctagccaatgttgcttggctatcacaatatatcgatattgtagatacagccccctctaataattagaatctcaatcaagagatctcttgaccattcgacctctttcctagtggcgcagctagagctataaactctgcttccattgtgaaataagaaatgcaagtttgtttcttagacccccatgaaaccgcccctccacctagggtaaatacccaagtcgttgttgaaaaattatccccaaggttggctatccaacttgcatcagtatatccttcaaaaattgaaggaaatttggagtagtgaaggcatatatttttggttttctttagataacccgaaactctccctatttccttccaatgatccatacttggattactagtaaacctactaagtttactcactgcaaatgattcgagccttgtacattgggcagcatacataaagctccttatagcacttgcatactctaactgagccaccgctctaccattatttttaactcgtgatttaatatgatcgaatggtgtgttggcctctttagcctgtagatggctaaatttattcaacactttctcaatatagtatgcttgccctaaagcaaaacccccactatgccttgtaacattgatacccaaaatagtatccacttctccaaggtctttcattttaaaggttgaagaaagaaacatcttaatttcttctattcctttcatgttatcactaaggattaacatgtcatccacatataggcaaacaattattacataacttttacaagtttttgaacacagacacttgtctccattattatacaagccatttgaaagaatagcatt

SEQ ID NO: 210792 - DNA, 528 bp, Cannabis indica
cacatattttgaaattcaaataagctacaaccaagggtggttaccatttcttaatgagatgtaaatgggattaaatgggtgatttggaggttatgagagttgttaaaagtcatccttatagcaaaaaatgttcaacaattaaagctaagttactatttttcagtttttgcaaacaaccctccaaaccattccaaaccattctcactttattttatatcacttatacactttataaatgagaaaattcaatccccaacaactatatttgaattatagttttaaatttcaaaaaattaagttgtgtaaccactctttacacatttaattagtgatcatgtagaagttacaaaatatgagtaactccacctcttatgttacaatttatgtgagtattagatgtatgtaactctcaatcacattatatacattaatctcatattaatatataatatgtcttgattcaaaaaaatatataatatgtctcattttaatattttaagctatcttattttataacattaattcccc

SEQ ID NO: 210793 - DNA, 661 bp, Cannabis indica
taattatttagtgatactccaaatcgcaaaaatcatataaaccacaccgcaccattttttgcggtgcggtttttgcagtttttaagtttcgcggtgcgggtgcagttcgaaaaattaaaaaatcgtatgtgcgagttggtttgaaaaaatagtcaaaaactgcactacctgcaccgcaaacaccctatagggtactgaaagcttacaaattaaatatgaacttctaaattaagttttttaaaagtatgacaaaataaatatcataaaaaatatcataaaaaataataaaaaagatagaaatgccataaaatatgcacaaacaaagttataccatatttatgaaaacaattatttaaaatctcatagtgtaatttctacttaaataaattataaatttatggtaaatgttatttttgtatagtttgtgtttttaatctattttgtaaccctttttttttttttttttccataaatacttatcaacgatcctttattttttagtgtccaaacaaaaaaaaacccataatttttaatattctcaattaaactaaaattttattattttttaaaatttagtgtaacttaaatttcatgtttatctatattaataggcaattttacaaaaatactgtttttggaccaaaactttacaaatatactg

SEQ ID NO: 210794 - DNA, 1473 bp, Cannabis indica
atcaagagatcaagaactcaacaccctatccaaaagaagattttaagagctaaaagtcaaaagtcaaactgaaagtcaaagtcaacttttaataaaagtcaactttggatctaaagatgcaaatggagctaggaagttcatttacatcaatattacacacattcaaataatataggtttagtttagtcttgttaaagtgatttgtatagcatattagggtttaaaagtttaaaatttgaatcactaacttatgcgacatgttatttcataaaaattatatataatttttctaacttgatttttaagatcacatataatttaagagagcacaattgaaatttttgaaattggttaaaagagcaaagagttatgcacattttaagtcaaaaaattaagacttttgccactgccccttatctggctttcagatggcaatcagacgaccagttgggacagatttgaatttttggatttcgaatgggagtaaattttcttaggtttttgtacccaacagataaaagcggctagttttataaactctatttcctctcaaaaattaaggttggttgagttagtattgatcatattacatctctaaaagtgttctaaacttacttggcatcattctttcataaacactccaactacacacacttgagccagccttgttcatgtcttctctagtgtctttgcaattctctttaggatttcacattgtatttcatcttgttagagagagtttgctatgtattgagaggtgagattgacaacggtagaaaaaaaattcgattgtaggtgaggttgacaccgattttgtaaacaacctgaatagagtgagattgacactttaacaatccaaagatgttgatagtcttttggaaaactattggttgaggtgaatttgacaccaatggaaaaacaactcggttagtgagattggcagttcaataatccgatgaggttgatagtccttgaaagaaaactattgtgagaggtttggaaaaaaccttggtgaaaaattctcagttgtaagggttagtcaagttcgtcaacttggctcgatagttgaactcaaagctagttccatagcttcaaagaccaaagacgtaggtgacttagttctattgaaccttacaaaagtcgagagtttgcgatttctatctctaaattctttacatttcaagtttgttatttgtttatacttgtgtttatctatgtgattgcattaaatttgaatatttgcatgaattgtctttggagtttttaaattttgaaattagtttaaattttcaattcacccccttcttgcaaacatatcttgggctaacaaagcctactccagaacaagcatgggatgttctggagagttctggagattgcacttctcttggaaaccttccaaaattcggtgattctagaattttttttttgatatgatccatctcccagtgagatggattgctttcctagaga

SEQ ID NO: 210795 - DNA, 666 bp, Cannabis indica
agcgccaaaaccagacttgtttttcattgtgtccattgccgcatcagtgttcattttcagacgacctgaagggggattcagccaatcaatctcccttggcacgactgtgttttgttctgctgctggtgcaaaagaggtagcaggttgcttaccgtgtgcatcatgatactcagtaatgtaagagagagcaaaatacaacaggacatcatgtggtttggatttggaaccatgcctttctttattcctttcagtccaaatgctctagagaattgtagcaaattgttctaatcttaaagacgaccattcagaggagacttggagaaacaattccttcaattctctctcttcttctactctttaaaattctttcaacccaactcttgtagtgtgggcttaagagtgttaccattgtgacttaccttttaaattagtcatgagaagtaattttttttttattgttgaagaagatcagaattaaagataatgctgttagttttttttttttttttctttttctatttggttaactaaaaataaccaaaatttagtttaaaaataaatatcatataccaaccaacttcatgagttactgaaaggtattttatcattttatacttaaaagttgttagattgtatcacaaataaatttattttataaataactag

SEQ ID NO: 210796 - DNA, 1018 bp, Cannabis indica
aaaatagtttgagaaatttgaggagaatgctcgtcaccttgaagtgacatgtactaaaattttatcaattgattgtgttacaagatgaaattcaacatacttaatgataaagatagctttatattacaaaatggtgttagagtgatcaagcaaagcttcatgatcgaaaatataaatattttacatcaaaagatgattggattagagctcaaaagttatgtgaaaggctagaagtttttcatgaggtgacaaaattattttctggaaccaagtaccctacagccaatctatttttcccagagatgtgtaaaattaagagaaaaattgaagaaggaatgacatcaaatgagttatgtattaaggatatggtaactcaaatgatgtttaagtttcaaaagtattaggaagagattcatggaattatgactattacagtggttttggatcttagatacaagtttttattgctccaattttaaatccccaactctatggagatgataaatgggagcttgaaattaggaaggtgcatagactttgtgatgatctattcaatgagtacaaatctaaatgtcctactttgagtgaaagcaatttataagtggatgcgtcatcattttcatcaacacaagatcatctatctaactatgacttatatgttagagtttcagttggtgaaatatatggaaagtcaaagttggatctctatttagatgaccaagtgttaccgaggactgataaattctttaatatatccaactattggaagataacaggatccaaatatcatgtgttgaacattactgccattacatatttgatgtgccagttagcactgttggttcagagtcatcattcagtattggtggtagacacgtgagtccacatcgagcgagacttcatcctactactttgaaagcattggtctgtactcaaagttggttggtaattgacaaaaaaggtataattatttatttcttattatataagtctatacattaattattaatattttatt

SEQ ID NO: 210797 - DNA, 738 bp, Cannabis indica
acttactaaaacttatatagtttaggaacttgcagtagaatcaaaccatatatattataatgaatacttaaaaataaaaataaaaaatattaatataattatttttataaagtattaaaattaaaaataaaattatttgaaatttaataaaaaaaaatatattaaaatatataaaataaacaaaaatcaataaaaaccaataaaaatgttaatatctaagagtgaggacttaatatattgctaaaagaaataaaaatttagggactaatttactaaaaaaaataaaattttaggactaatttgttaaaatttatataatttatggactaatttactaaaaaaaaaaatgaaatttagagaccaacttactaaaacttatataatataaagacttgcaggtcaaataattaaacgtataaattatttagatatttcagtaaaagtaaaccgaatatttattataagtataattatatcatgcatatatagaatgagttataattttctccatataccaatatctctatattgtaagtaaaaataacagtgaccctacctacatattttcacatattcatatatttataaatattttaataccaattagtgactgttggtttcaatatagaatctgtaaataattgggaaataaatgctgaggctgcaaatctaatggggactgctcatacagtagaatatatatatcaccttttatttgtttcttttgcaattgcagca

SEQ ID NO: 210798 - DNA, 1468 bp, Cannabis indica
agtctgcgcgggaccttcctggttgcatgggacttcactcagcctagggtcttatccggatgggtgactcgtgtcgtcaatgtcagatgatgaaccgatgtgactctaactaggagtctcttcaatatctgtccatttaatgttaattaacggttgtacctcaaatcacggtttgatacttgcgcatgcttgacggttacactccctacaatgagtgcgtaacgtatacttttggggggaagtttgaaaaatttgaattttgaaatgattaattctctttccaaattgtttataaataggattaaggatctctagtaatccttttagccattttaactcttaaataccaaagcaaaagacttttagccaaatttcctcccaaatcctttgaggaattcacatgtcaacttctgatgattccatctgagcagagcaagaaagcttcaaatcagtgagtaagttcttcatttctttcctttacacatttgcactgaaatgcatgtatgatttctggattttgttgctatgaatcttgcctattcttgaactattctaggttaaccatagaaaacataggtctaggacttgaaaatttcatttatgtttaaccataacatctgattatctgactgcgcttcaaatttaaccttacaaccttcatttccactcgtccatagagttttagtgaaaatcaaattttaattcgaagtttcaaacttctgggattgaaaattttatttctaggtgaaacctttgcttttgatttcttagtcgaacctggttggtatatacaacctggttttcattcgttactccgaccaactctcactttcttgtcttctaccttttgtagatgaaccctggtgagttttggggaggcaagcatcatatcgaccaggatttgcttcaacttttatacgaggatcacactcatcttcgtgctagcccatttttgtctagtgacgatctttcaacatcatttttatcccgaccaaattcgaggtgaaggatacggttgtttcatctagaaactcaagaaaggttggaggtgttaccttcttgctaactggacttatagagttcatccgaacgtgggcggcactttgcctgagggccgcccaaatcctgttgctgtgggaaaactcgttgccaattttgttatgaccattgccaagcacacttctaataaaattccacccaagcgtaggatgatggcgcgaactaaatagactgttaggaaatcttcattgaacgacccgcacgttgcccatctagccacttgggctaggacagagcagacccgtcctgccactgacgaggaggatattgtcgtggacattgaagtctaagtggaggaccagggcgaggtctgtcaactaatttctaaaataacttataagaaactaaattttgaaaattgacatcttctctgttgtataggatgcgttgatgttacttatttaaagta

SEQ ID NO: 210799 - DNA, 1508 bp, Cannabis indica
aagaaacgtcaaaagaatagggtagaatcaccagtgacaacttctacaaactactgaacactataatgaatcatgaaaatagatgtaatgaaaatctttaagggcttgtttggtacgcagggtcgtattatattaaataataaataacaatatgtttggataaaacaatgtattatattaattattacgactaaaatttttaatacaatatatgttgtattatttaatacgtaacaaatgatttgtattagcttgtattataacatttacaaagaatttgaggtcaacactaatctctaattcggacctgggacccaaacccggacccgaacttcgacccggacctcggaccgggactcgggacccgaacacggactcgtactcggacttcggaaccaaacccgaactcggaccccgacttggatcccagacccggatcccgacccggacttggacccgaactcggacccagacctagaatccgacccggacccaaacctggatcgggacccagacccaggactcggacccggattaaataatactaatacaatataatatattaatacaagtcaataccaaacatagtattgtatttaataatactaatataatataatataatccaacacaatacaccaaacgagcccttaagggattcattaatcaaactaacgaaagagcacaacaaacaacactacacaaccggcagcctcaccccaccccaaagttacatcttacaaacaaaatcaaaactagctttgtcaagatattcatcctatcaagctttaagagaatgttaattttcttatctaaataagaaatcataaacactttctgttcattccaccaaatacaataatactatcctttaaaaagaaaaatacaatataccacagctgccatggtcgctacagtaatgtaatgatatttttggttttcattttatttgtgggtaattgcggtgaattttttttatattttaatttctatgcactattttttcttgtgacagtattttaacttcacattctttgcaaatttaaagtattagttaaattttattattaaacgctaattgagattacacagatacctcaaatttaacaataaaatttaacatatttcaaatttgcaaagaaaattgaaggtaaagggtattgccaaacaaaaaaacaactaaaaaaaaaatcaataattaagtgtacaaaattaaaaattaaaatggctttaccgccagttaccttttatttaaatattatattttatataaaaatgtttattagtgttccctgtattagtataattttttgtttttaacttttaacataatattgttattatttgacgtaatattatcacttataatgattttacttttaaaattaatattttttttaaaataattaattttgattaatattcattttatttattatatatattttttattttgtattacaaatatgtagtgacatactagatattaaaggaaaattttatttttt

SEQ ID NO: 210800 - DNA, 976 bp, Cannabis indica
ttattaggattaatttaaaaagcatgacaattactgcctggtcctccatttcatgacatggctgggcaccaaaaagtggtttttgtagtcataataatgaaaaagatacaatttgaagtctagcgtttatctccttcctgtcccactcttgtccgtactctaccccactcattgcaaaaaataaataaataaacattttaaacatttttatgagtttcatttcaataaaaaaaaaaaatgtaatatggttagttgaatattgagaaatcagaaatgatgggaatgcatttttttcttttaaatttgttcaataattattttattttatttttttaaaatagaaaaatttgttcaattattgaaaagtaaaagaaaaaaagagagagtacgtatgagaaatttttattttttagatttaaattaattataacttaaaataaattaaattttaattaaaatatttaataaaaccatttttagagattacaatttataatttttttattgtttattgtaagaaaataaataaaatcagactagtatcagtttaataatttattaattatttttagtacatatttaatataatcattcaaacttcttatatatataataatattttttttgtttaatttattaataatgtttgtgaagaaaaaaataataagttgataattatttggagtaaaatagacaagtagttagaagaggaagaaggaagaaggacccatgtttagctgctgccacaaaaggggaagtgtcctccaagcttcttcaatagctggagtggtgttgtcgtttactacacttcgcacacattttttatttttttttttcatttttcattgctttctatcctaattttatatgttgttagatgatacctcacttttagaaaaatggaaaacaaaaaagaacaagtaaatggataggagaaataattattatgatttaactataattgtgtatattgatg

SEQ ID NO: 210801 - DNA, 922 bp, Cannabis indica
aatgtaaaagattgtctatttacatttaaaaatcctgaaaagctagtttgtggtactcttatggtggtttgtccaaataattcttaacctatctttagttcaatgtttattcaaatgtttttcctaaattgatctattcttttcgagtgctcactgttcagtttccaactccatgagtgaaatccttagccatgaataaatattttcaaaaacctgtgaggctaatggagttgagacttctacttggtatattttttcgaaagcatttatgtgctatggcttgcggtaagaaggtttaagtttggtgcacacactcacaactctagatttattcaaggtaattttgtgtaattcttattggtttattactaatattttgcttaaatatttgtgtcatttttaatttcttgacctgaaaatatcatgttgacattattattttttttgcttgaattgttagagactagtaataagctagttgagggttgtgattaaggctcaaatttatacatttaagcctttaattatgcatataaaattaatataaattaaatatttcataactttaatagtaaatttatttttattagaaatatttaatttactttaattttacgttatttttcaggaaaagtgagaaaagaaaatacaaaaatccaatttcaaaaggcctataaagacaatgtaatctcatcatcttttaatcatcaacatcaccagattggcctaaggcccataacatgcttcacgtggcccaagtctccaaagtccaaacatatatatatatatatgttagtattaggaaaacttacaaaaatattggaatttcggtaaacttttacaaattattgtcacacggaaaagttttcaaaaatactgtgtttttatataacagtagcaaaacacaaaacagaacaactca

SEQ ID NO: 210802 - DNA, 863 bp, Cannabis indica
tcttattatctaacattatgttatggaactgatggatgagaaaattaagtttcacagtttttgcaactgattgtgctatggactttggatggtcagatttagggagtttgttgtacagaaagcttatatttcaacaaactaattctcgatgacgcagattgattgcactgacataaaggtgggttttgtttagactctgtgagtctgtaatgatacttccaagccacttttagattgcacttaataggaaacttgtgttctatatagatagtcggcatcaataagcctcatataatccaatagtcttcataataaaatgtattgtgataaatttataagtatatatatatgatcatatattttatttataagtcctctaattaaaacatcaacttattaataagaatgtttttaattatttttttatcatttattccttcaagaaaaagaaaaataagagtatattaatgttgaaatagtaagaaaatagttatcattcattcgttctatttatatgatttgtttaattgtttttagctaatacatatattcacatttttttaaccaatatttacattgattgtgtaactgtaaatttgcactcaatttattttattaaatttgtatatttttatatttttttaatcttatattactcacgaaaaataacttcatttaattttattttttttgaaaaaatttaaattatattttacatagcatatctcaatttcattaatattgttagagcataaactaaactaatataaaacttgaataataacgtttaaagattactttaaactaaaatattattgtgtagtgaactgtttacatggagatttttttaaatataataaaat

SEQ ID NO: 210803 - DNA, 797 bp, Cannabis indica
agttgttagttaacaaacaagatgagaaattacaactgtaccccttaacatatttcagtgatttagtcatagatattaaacaacatttatccaatctccctcaagtttgtgttcgtcatgtcagacgaactgctaatcaagcggctcataaattagcaaaacaggctttagtgctggataatgtttgtatctggcatgattaaatttcctctgctattctctctgttgttgtaaatgattcattctaatttataataacagccttttctacaaaaaaaaaaaaaaaactaaatgcacaataatacacaactaaatcatatcttaacaatatattttaaagtttaatctatgtatttttattttcaaaaaagtcatctaatatatattttttataaattgtattactcagagtttactttttttttttttcttaattacttttagagtttttgtttaaaataaataatataaatacatatacatacatatatttttatgatttgatttttaaaataaatttttgaatattttaaattaaataaacattagattagagttttgtttaaattaaataatataataactttcacggttttattttttaaaaaataattttaaatttaataaatatgtttttttaaaaaattatttaattatatgtgtgtggcactaaattgacactgccacctaagctccaaaaatgccatataagaaaaataatttgagagatttcttaccaattaaaaatgtttagggggcaagattcgaatgtggtcatatatttattttattttatt

SEQ ID NO: 210804 - DNA, 767 bp, Cannabis indica
gtcaatggtgtaataatagcaaatagtgaaccctctaaaagagcaacactatatgtaagttatggtttgcaacaccctatattgttattatttatatttaagttattttaaggaaaatgatgtcaactcattatttaattatattaataataattatataaaacatgtattggtgcatttttattattttattattgaaaataattttttagttaattttttttttatagttatgtatattatgttgcacgtgtgattattttattttttctctgcggcgatggatttaggtttcagatttgtgattgtagagagtgactcgagactagtggtcaatgctcttaatgggaaggagttctattgggctattgagaactatgtctccttttgtattaagtcatctccttcttttatatgttgtaattttatgaatgttagtagaacttgtaactatgttgtccataatgtcgctaagtgggcgtttacccaccagatgtacggaagctattaggtctcctcctttctggggaacctgttttgtaatgaccaggaggtctaactattatcttttatttaatgcatgattatgctgtttttattataaattattttaaatttcttaaaattctgtaggatatcacgaatataaaaaaaaaaaaaacaaaaaattcttctaaatatcaaaacaagtaaaaaaatgtatcaagtttattaatatatcccttttaaggagattcaatataaaaacaccatatattagagcatta

SEQ ID NO: 210805 - DNA, 937 bp, Cannabis indica
tgcttgaaatatgggtataacataagctaataaaaatatttcattgcaagtatttaattgtaacccgctgaattaaaaattacaaaaagtttaacccacccaataattttatcgttttggttaggttaacccatccaaattgatcttcacctttttttatatataattattattgttattagtgtttagtatttaaattattagatttaaaatttaaaaatgtattatatatattctaagctaaaaaaatactatagtctaaactaattttaaagactttaacataagataaataagtaaacataaaataattaaacaaataataataataataacaataataataataataagtaataatatggcgtagattttaaatttcaacttcagtattcaaatataataaaaattattaactataaaatttaaatttcaaattaaacaatataaagtccaaactttaaatacaacttttaactaataaatgtaaaatatataaactagtttatttcgatttattcaggttgattgaacggtttagaataatttgtaaaccactcaatatatttattagacggttcaaattttcattgtattatttcaggctataattttcattgatttatttagtttggtttgaacggttaattcagattggacaatttgtaatttttttgaacacccttagtcttatgggatcatttgccctccttttcaacttcttataaattaatttttgtatgtatatattttaaaatattttagttttcaccctcataaaattaacaatttcttattatacctatatacatttttattttattccctataaaatttaaaattttaaattttatcctacataattaatttttatccctaataagttcacagtttttttttgtttgttgttttttttttttttttttttattttttaa

SEQ ID NO: 210806 - DNA, 555 bp, Cannabis indica
tttcaaaaaaaaaaaaaagttagctacactggaatttttaagagtaacctaaatgttgctaaaaaaatgaactacattttatatatgtaaatatataaaaattatataaattttactaataaattaggtaactagcttattttttaatttaatctatctttcatatatttactattgatatatatatatatataaaagagtatccaaaaagttgatatacaataattattgacatcataaatttttaaaagtaacccaagtattgctaaaaaaaataacttaaaaatattctaaacacacaaaaaaaatccaaaaacaaaattttataatgtatgtttaagatataatttagctactattagagattttatttcattggaagataaatcaagatatatacaactcaattgtaaatataatacaaagactaaaataagaaattgattaaatatatgttacaacacacatatatacactatatatattgcatatatatataaaaggtaaaagaaaaaaattataacacatataatataatgcatatatatggcaaga

SEQ ID NO: 210807 - DNA, 703 bp, Cannabis indica
gtctctcaaagtctcttgtcaaccaaattaaagtaatgatgaataaattttggtggcgttctggtatataaattggaaagcgtggtcatctcttcgccaatccaaggttgaaggtggtatggtttttaagagttttgttcatttcaataaggttttattagccaaaaaggcatgtcgtattttctcaaatcctacatcgctcctaagtcaacttcttaagcctaggtacttcaaacattcatccttgttagacgctggtcatggttcttacatgtcactaacatggcaagggatcatttggggtaaagaattgctatctaaagggttatgttggaaagtcgaagatggacaaaatattttgtgtggcacagatccttggctgcccgaattcttaaatgttcaaccattagtttttacgggatttgatcgaaatttaagagtctctagcttaattaccgattcgcataaatgggattttcctctcttaaagacgttgttcctagattcggatgtagaaaagatccaaagtattctcttgactatatcttcttcgcaagaccaactcatatggcatcatgaagctaatggcttttacattgttcaatcaggctattttttggctacccatttggaggaacaacaacccagtgtaagtggactgcgaacccaatattggtggaaaaaaatttggtaactatcacta

SEQ ID NO: 210808 - DNA, 622 bp, Cannabis indica
atatctcttttgcttacctctatcctgatgagccgaaaccaaagctcttattttctgttgattaatagtacgagtaagtcttgaatgagcccctcgaaagcttgatgcaaataaacgaatttttgttctacgtcttcgagctatatatcctcgtttaattctagtcattgactaaatgaaactttgatgaataactaattgatttcttttctttcagttattgtccttcccttttctagtctattacgccttgaaccactcggctatctctcttacataatgattatggtttataaatcgagtaaatagtgattcattcttattattgagtaggtgtatacactccatttttactataaaaagagataaactttgccaaaactttagtcgaggttgggtgtaaggtctcattttacaatttcacgttataacaacatgatacaaaaaataatttacaaaatttaaataactaaaaaatctccagtaaaagtatatgtgtcactcacaaatttgttctaatttatattacaaaattccttttaattttaaaccaacctatactacaaatctatatatgtgtctaaaattgtatgctatcctgtttctattatgtgactttact

SEQ ID NO: 210809 - DNA, 711 bp, Cannabis indica
caataaactataccaattggcatttctattcgagatgctttaagagcactcatatttaggggtgtttattggatcacatccaatattttatgcctatccagatccgatgcaactatacattggatgttaaattttaccatccgatctgatggccaatttatttctgtcatccaatcaatccaacatccattggttgttagattggatcgcttctatatccgttggatgtatttcatatatatttattggtttgatttagatttattcaatattttagacctagtatattttggatcagattagatctatctaatattttaagtccagtatgtattggattggattggatccatccaatcaaaaaaagagtaaaattttaatgttaatttttgtataaacatatatattttacgtataacaatataaaatctaactattcatccaaactaaatgaaaatactaattagttcaattgaatgttggatgtattgaatttttggacacctcatccaatatctgatctgatccagttggatattaaaaaataatatccaatccgatccgatcacaattatatattcaatgtttgacggtcggtgctaattggatcggccagttgttattagattggatgatttatgcacacccctatcacatctccttctttactcaattctttaaaatatattacgtcaaaattctatattcttt

SEQ ID NO: 210810 - DNA, 527 bp, Cannabis indica
tgaaggctaatctcacctaacctttatgatacctactctgtaggtaatgcatgccctatcttgtatcttttgggaacttgtgcttatccataggtggctctcaaagacaagttaccccttttcgactattcccaccaatctctataaatacccctgagaaaatgaggaagcggatcggaaaaaaagtagagagaaaatcataaaaagaacattctctataaggaaatactctcattaataaaaaagaatcgtggactacgactcattaatgcccgaaccacgtaaaagttatctgcattaattatctcaaagccttcatcattatatcatttaattagttgccgaaaacctcggtcaatattttggtgcttacattgagagctgtgggaagcattgtttgaaaaacgacaatcaagaatcaaaactataatggtggaaactcgaaacaacacacgccaacctcatcccccataggatcctcagaacccagagggtgaagaggcggcttcacgagtaaatgtgggctc

SEQ ID NO: 210811 - DNA, 646 bp, Cannabis indica
caaaatgcaactgtatataacgtagatgtattattcatgaggtttttttttaaatttttcacatcatacattgttttggatttagtgggagctccagatctgtttgttacagatctacatttcatgaatatagatttcgatattagggggagttattttgatcgaataaaatagaaaacaaatgtgtaatttcagtttcttcacagtttttctgatttttttttcgtcattttcagtttagatcattgcaggtattcttttccagttgattttgccagaattaatagttgtatttttctcgttttggtttcattttggttgttttgcggttttgaaacgagcgcgtattttcatcttcatggttcgctctgtacagctgaaggcttagtgcatgtggtatttttgtaaatatttgtatgtggactgtataaatgtttaatgggccggcccaaagtatttttgtaattttttttccttttttgtatttttttgtttttttcccaatttatattttttctatttataattctcattaatgatatttattgtattatgtgtgaaaaatttatgttgtttttttcattttataacccgtatttataatatctatatattattacgtgtacatccttaatatatatatata

SEQ ID NO: 210812 - DNA, 541 bp, Cannabis indica
atcggttatttcataataaccgaaccgacgtcatagggcccctatgccgtcggttattatacaataatcaacgccataagattattataaaataattggcgctataggatcattctatggttttttttttcagctttatattttgtgttttagcataatttatatatattattttattattaatataatgaaattatgtataaactatatataataagcataaataaaaattaaaataaaaagttaaataaatacacattaacattgaatatagataaaagatggtgcagattttacttcgagtatgtgatagggtacagaaagtgaggtgagtgaagagcacttagtagcttttgaacaacataactttttcatttttaactatataatttagcaatgtgatcacttgtttttatataatttttcaagaccaataaaataaaacaataatttaaggaccaaaaaaaaaatggaaaaaatcagagaaagggctaaactttgcaagaaaatttttgaagactttgaacattaataacttttg

SEQ ID NO: 210813 - DNA, 888 bp, Cannabis indica
aaaaatttcactaacataaaaccatagcaatgaacaggatgatatcgctaaaaaattatttcggagataccctgttataaaagttttacaaatagggctatatacaacaataagtcaatatacacattaggtacaacccaaaacaaatcctaacaacttgactatacaagcctgataagtcgatatgtacatttttcggaaaagattgtcgtctcatggctgccctagtttccccttgcccttacttgcaccacaaagcacccgtgagtaacaaagaatcagcaagaaaagtaaacaatgaaagtaaatagcgattagatatctaaatcaaaataataacattattaaacagtaatacccaagtacatgtataataagacaagtcatatttgttacttcataaagtaaacatttctgttgttgcctaataagacaaccctgatgccctaacccgacatccacatatttcattacctaataaggcaatgccgatgccctactccggcatctatatatctcattgcctaataaggcaaagttgataccctaacccgacatccatatatctcatcacctataaggcaaagtggataccctaacccagagtctatatatcaccttgcctaataaggcaaagccgataccctaacctgacatccacatatctctgtcattgtctaataagataattaacaaataggaaacataacaatagtttcacttgatgtcatgaccttaatccacttaccgttctattacctcaatcataatcaagtcataacgataataattgtatcttaacatgctatgtgatatgtatgtacttttcttacctcaagttttgatttaggcatgtcggtcgacctaaatggagacgatcaacgatct

SEQ ID NO: 210814 - DNA, 537 bp, Cannabis indica
tgcagacgaagcttgtaagtcatagtgttctttactgcatacacttcaatctgattcctatatgtttatgttgtaattaatcaatctaatcttgaacaactcgaaaacttgaatcatgaaattttgataagttgttctttcatttggtatcagagcttgaaattttctgaaaattttgtgttagatcataggcttgtctgattcttgattctgaaaaagtcagttgatatgtgttcgagatttgatcagttgatcttgttgccactccctctctaagttctttctcagagaactatagtataagagtctattttttctcttctgtgaagaatggaaatgtttaggtaaggtggatcaacctcgagacctctgatgttaaagggggctaactacccgtatggaagaccaagatgcgtgcattcttgagagttgttgatgaaatagtctggatggccatagaagaaggatggtttagacctacaatgatggagaatgaagtggttattcctaaattcatgagccgatggaccactgacg

SEQ ID NO: 210815 - DNA, 516 bp, Cannabis indica
ggccattaagtataagtcaatgtcaatgatcacgtgacaatttttaattggttcagttcattaaatttttattttttatttaaaaattaatttaaatataccaataaaaaaaataacacatgaattaaacttaagtatttatgctacacattactctttttctactaaattaggtcctttattgacattttttttttctctaaaaaagactaataaaaataaaaactacttacacataaagaatgtaggacaaatacaccatttttttcttaaaaaataaataaatccatgtgggaatggaataaacattaactaagagcaactgtaattaaatattaaacttaagtgttaaatcaacacaaaaataataaaattatgatactaaatcatattctttattattatattattttattaaattattgttattcgtgtttcgagaagggtgacacgtgaggttcccgactttacaaattagcccagtatggtctaactaatagcctctccgtgaggata

SEQ ID NO: 210816 - DNA, 948 bp, Cannabis indica
tattttcaagctcatcctcttcgagtgtacactaaccagccaatacgccaaatatttcaaaagtcggacgcctttggacggctactcaagtgggcagtggagctgggtcaatacgaaattaccttccaaccccgaacagcgatcaaaggccaggccttactagactttgtggtagaatgcacaggcaaaaaggaaagcatatcagaaagcaaccccgagccggtacaaacacctcagccaagcaacagtgaagataagccgacttagaaactacacgtagacgggtcggctacagatcagctatctggtgcaggaattgcccttgtcacgcctgggggcaacacctgcatgctgcagtcaagtttggatttaaagcatctaataacaaagtcgagtacgaagctttaatcgctggcctaaaattagcctgggaattgatagccgaagacattaaaatcttcagtgattcacagttggtggtaaatcatgtatttggagaatacgaggctcggggagaaaaaatgatagcgtatctgagtagaatacatgacttgctcacacaattaaaaagctacggtctcagacaaatcccaagggaagaacacacaactacagacgcgttagcttgattggcaagtagtaatgtaagtgataaggcaaacttggttcctatccagttcctcgaagagcctagcatcaccagcacggaagagtcaaaatgattgacacttccccaaactggatgacaccgatagccgcctacctcaacactggggaactcccggataatcgattacttaggatctgtttgcgaatttgtggcaccgtagtagaatcattaccaatggcacgctcatcggtgtttgcccttataacttacttttataaccctccctgaagcaagctgttgaagttaagatcaataggatagaattcgcaaggaattct

SEQ ID NO: 210817 - DNA, 959 bp, Cannabis indica
tatcaagctgacaccatagtttgcgtttgccatgatacatcaacttgtactacccaaggtataaccaatcataatatcaacatatactcagcactctagtcatactgatgtggtagcattggttcatactttcttaaatttccaaacacatataatcatgatatgcatgcttgtgtgtataaactattgctacaactgatatgtcatcaatctggcaatataaacatagtacatatgtatgtgtgatatactagtcttacctcaattaccaactttaaatgtaacattgaaccttagtggaaagaggtgttgatgatcggaggccctaagtcacatttaaaaaaaagctgataagtatttgctccagaacactttttggattctttaaaaagaatcttagagttttctatcgaactacatggtgaaaataccctaaaataaaacttatattttggctctaaaatatatatatatcatattatagagctcattgcaagcttcataacagtatatagaacatctaaaacacacaatcaagtgaaatttatgggaaaaatacgaatttcaatcctcctaaattaccaaaaatggcagaccaaatttttgcccttgtaaaaatggcaagccatttttatagttggaaacaaacataattttttttccctccaattctaaccgaaatctttccaaattgtccagaacttctagacacaacataaccaacatatttcatcaagaaacccttgcaccacacttgctgcagcaaaccaaatcccttcaaaccagttctaacaagtcctaattaaccttaataagcttttcctaacctctctaaaatccccacagtaattccctatttaaaaactaagccaccccaaacttaactaaaaactcaagacaaactaataaattagttagggttcacctttggtacttgagaagctacgagttgaatacct

SEQ ID NO: 210818 - DNA, 613 bp, Cannabis indica
gaagctatttcaatgatctatctcatgtctcacactttaatcacatttcttaagctatcgacatcaaattttacccccaagaaagttacaaaaataagctttgaattacccgtagcgagtcccgctgcgctttgaaaaatgaccatcaccatcagaagctaattttcactgtgggatcatcatctatggttgaaaacatctaatttgtattttttttttcctattttttgggcccccatcacctataaaaggagagctccatgagctcatttctcacattcacaaaactacccataaggtcaaagcttctctttctagtttctctctctaaaaattggaccttctaacacttagcctatctctataataccatctcatgagaaataaaaactcgaagtaggtgtaggtccattacaatcgcgatacagggaatgaactactataaattaaattttctatgtctctcttacaattacttaacaactatttcattctagccaacctagagagtaggtgtggcttagaagtctagtctagaattttttgaattcaaaattttggttgcttttcattgagagtcacaacttaagaaagttaccagcaggatggttgc

SEQ ID NO: 210819 - DNA, 518 bp, Cannabis indica
tggcctccaatcgggtttccaggttcgccgagcctgaaaatatttttatttcacaaataactcatattatatcctcatattttaaataaatccccgtaattaacaaattacggttatttatcccttattagatcttcagggtcgtcgaacttgaaaatatatttatttcacaaataactgacattatatctacatatttcaattaaattttcgtaattaataaattacacttttttatccacttatagtaaaatttataatttatgctaaattaagttagcaggatctaatcctacttattactacttaattaacccattatatataataaatcctaattattcataattagtttttcgggatattaaaaaaagtcttctcccgaaaacccatgcttgttcaaagtttctcttcaacctattttattgataatacgacatcaaaacaagaaaactaaaacctagttgaacactctaagtttttacaaataaaacgcacttctcacaaagatagatatg

SEQ ID NO: 210820 - DNA, 541 bp, Cannabis indica
aaaaatgttgctttcccgtttctccatcctcaccaccaccattgtctttttggccatcttccctcagttccgggtatgctttatttttttgtagtttcactcccaatttcgaattctttcttccttttctttctgatgtgatcatcgtctttctttacatttttcagggagacccaaattttatactctatcacaagttcgaagcctcgtcttcgttctcaaaagctatcgaattcctccagggccaaattgggtatgtttactttcgacccattttttttaccaattcttttgttttcagtatctgtaattttctacttttatcactatctctgtttggtttctgggaaactgttggaaagtaaaatataaatattttttttttcgtaggtacaatttcaagaatgttggtctgctcaggcgggctatgacccactcgtcctattcggaagagaacaacagggcattgaacatttttggtgccagtatcattgaaacatcagcctctctgtattatttgaaaaacgacattgatatttcc

SEQ ID NO: 210821 - DNA, 1132 bp, Cannabis indica
agtggcagataagatcaaaagggaggacaaaaaaactcatatacaagaggccctaaaaaatatactcagaaatctgaataagattgactcgtggactatatagaatttaactgcaaaaccacgtaaaaatccggtgttcatatttttatttttctctagtttttattatttctgtgttgaatcataatcatgaggctcaaattttgttaacgaaaatctgcgttaacagtttggtgctttctttgagagcctttgtgaaaaatctttgaaaaaaagcctcctgacataaaagtgatggatgacaccactggtaatagtcctcaaggaggaatcaatcattgtcccagaaaagaaccattgagtcctcagggatctactgaatcatcacatgaacagaatgcaagccccaggaagacctagtattagaggcccttgctggacggaccttggaagagcaacaatcggtcactccctaatcaggttgatgaggatggcgcttacaacccaactagatacatactgatcgtggaattagaaaatctccatcttaggcgtcgattggaggaagcaaactagcataatgccaagttggagcatgaaatagccgccgtaaaggcaacgctgggagattgtacccaaaatagcctgaccttgagaaaagagatttatgaggcaaacctcgtggctcacaagtcaaggtgaaggagatgacccagggatacactctgagctctcaggagatacaacctgaggaaactcaggaaagactaggggtacagcctgggatacgtggaacatcggatgaaaatcgccaacccactattcaggctcataagaatgaaactcatgcaaacccttgtaggaagaaaaaagtgagtcaaaccttaagaggaagggaagggtccggccaaaatcatgacgagagtgatctacgagagcatccgaacctgaaaaagcctgacctccatcaacgactcaattcaagacaaaaggattcattccatttaagaatgagagagttggagaataagtccagagtacatcaaatcacaaaacccaggagacaactagggcacgatactgttggaaaatattattcggaagcctcatgatcaatgaaaaaagatgattc

SEQ ID NO: 210822 - DNA, 783 bp, Cannabis indica
cttgatcttcttcatcgatcttgtactttcctaatgttgttcacatccaagattagtttattgaaatcatcaagatggcttctaagttctttggtttctccatcttcatggtgtagagtttctttttcagatagagtttattagctagagatttcttcatataaattgatccaagtttattccataaacccactgcagtctcttcatctgcaacctctcgaagtacctcatcacctaggctcaataagattgtactgtgagctttcatttcgatttcttgggagactttctttacatcttctccttccttggtaactggttccagaatagcatttgcaatgccctgatgcacgagtagtgctttcatcttgatgcgccagagaccaaagtcattgactccagtgaacttatccacctcgaatcttgctgtcgtcattgttgtgtttcaagctttgatcttcacgattcttggttcctcaatagcaacctgtgctctaataccatttgtggtgaattaacaccatccaagaacataacaaatattaacaagatcaaataaaccagtcaaaatgaaaccagaaatcataaaccagataacaacaatatcagcaagattaaaaatagaattgcacacagagtcacaaggttcaatcacaagtgaaaaatacttggatctaatccttgggaggaactgccttgaggctttgcctttattactttagaatgaagctcagagatagaacaatggtgaacaccacataactaaatggagtcttgctcctc

SEQ ID NO: 210823 - DNA, 773 bp, Cannabis indica
atctactagaaattgaattctgtactagaagaaagggttgaaaaatttgagaagaaaggagatgcaacaaagaagtaaaactaaaaccataatgaagcaagctcgaccagcaatcataataaatcttgctgtcaatgttctgaaacaagttataagggaaaaaacatccttggaaatttggaaaagactagagcaattgtacatgaaaattttatggattcaagatgaatgctactgttccattggagcaaaacttagatgatctaaatagaattgttttgtctctaactaacatgggagaaacaattttatttttattttttatactactgtcatctttatttttatttatttattttgatgtaattttatttaatcaataacaaatttgcaaatgaacaaattacttatttttaacttgaaagagaagaaggaaaaagtggaaatacaaacccaaacttcccaaataagaatagataatacctacgaatggacgtgtgttcttgcatattgaattgaggcaacaaaacaagtaactagggttttccagttgagaagtaaacatcaaatatatttatttctttttttgaacaaaaacgtcaaatatattatacaataaaagaataaactttaaaccttacggtcaggcaaagtcaagatcgatgtataaaaatttacaaaggatttcaattggaaccgaactccaagttccacttttcaagttctcccactgttttatttaagcttggtctgattacactcattgccttccg

SEQ ID NO: 210824 - DNA, 807 bp, Cannabis indica
tgtttttattctgtttcttttgttgtttgtactatgtttggttttatatctatgtttctgttattattttttaaactttttcctgtttgttggtttgtttatagttgttttgtagttgtattatagttttgcaacttgcatatgcgcattcattatatttaatttctttgtaaaatgcaagattggataaacaaattcagtcacagtgatttctatagatccaagtgcgtatgtattagcaatttctctattattgttaatattaaaaatacattatctgggaatttgttaaaaatgttctgagacacgtagtttgggcatttcttagatatccctgaattttcttttcacccccaactagttcacaaccttcttttaagggaggtttactagcccaatcctaaagaattttgggctgaggttgctggtcgttgtatacggttcaatgccaaagagttttacttgataactggtcttgattattttggggattgcaataaactgttgttttcccgggaatcaaaccagttaattgaagtctatttccctggcataaaaatgattggtcataagtctatagaggacgctttcttcggcagttggtggggacaggatgaattcctaagattgaaactggctgtgttgtatttcatcaaatgtttccttcttagcaatactactcataatgaagtttttaggtttgatttagatgtcattgactgcggtcgatgggatgagtattattggggtagggagtcatttgagttgactattgatttttttcaaaggcagaatagagcatggtat

SEQ ID NO: 210825 - DNA, 725 bp, Cannabis indica
tcatcccatctaactcaggaagatcctctggttttcgtggccgtagtcgcggacgaggtcgtggaaatcaaaaccgtgtggtgtgtcaactatgcaacaagcctagacattctgttgtcaaatgttactatcgttttgatgtaagttttactccagctgctagttctcagaatccctctcaaaacaacaatgcaaaccaccaacacaacaacaatgctaatcagcaggcgttcttagccaactcgtctcagcatcctcatcccgatgacacaaattggtatgtggatagcggagccagaaaccacatcactgacaacgccaacaacatccaaactcctgctgaatacagtggtaagagtcgattaatcgttggtaatggacagtcgcttgctatttctcatattggtagttcagtcattaaatcctctggtatatctaaacctgttaagttgaatacaatattgtgtgtaactgaaatttctaaaaatctgttgagtgtttcacaactaacaaaagacaataaggcttatgccaagttttatgctaatgattgtgttttgaaggacatggattcgaagagggttcttcttcaagggaagcttagcaatggactctatcaacttaccacaccagcaacatgttctgctagttactcaccaatctgtttgtctactcaaaagtctagtgttaacagtcctagtgttagtcctaatttagagtctatc

SEQ ID NO: 210826 - DNA, 1053 bp, Cannabis indica
aaataaagtaattaattatgaagaattctggcacccaacccaaacagagattagttacattttattaagaaaagaaaagatacgatacgaatagtaagtttacaatctgctcaaactatagtgtatctctctaaacttccatacagagcaaaattcgaaagaaaaaagcttaaaaaatacatcatttaaaatgataaatttttttaggggcacttggtttgaggatttaaactaattaatcctactgattatattatgattctatggaaacttgtaactttattatttggttgtaaatgagaatgtttagttgaataatgtttactaatcgcattgattagaggagtattattgtctgcaaacttataactttattatttggttgtatataagaatatttaatttgattaatattaactaaattacacagtttattgaacacaagaatttagtaaataaatcttgtgaaatgttagtttaaaattatttgtaagaaattgattgtattaagattaataaagggaatatttagaattaacttttgtgaaagaatttgtataagttcacccttataacaagtatgagttactattctaatgtaagtattacactatagctaataaattaattaagcttatgaattctcaaaatcaaaaggcaattaatggctttataaaagtcagagcaagacaatgattatgtttagctaaatttttacttttggttatagctagaagtataaaataagtataagttttgacttatttttaccgtttaaataactattatatgaagatattttttgctttccaaaatgtttacatatcatcaaaaaaagattttttgtaagtaaattaagaataatgtaaattattttaatttttaaaataatttttcaaaagttttttttaggaaaagttaaaaatcttaacttcttctaaaatacctttaaattaaaaattttttttattattttttatccaaacaccattagaagattttttttaattctaaaagcttaaaaacttataaaaactaagttttttttttttt

SEQ ID NO: 210827 - DNA, 846 bp, Cannabis indica
tgctttgttctccatcccagacatcaaagcaccagggtcagatgggtttggaagcgctttctatcaggacaattgggctttggtgggatcagattttatagctgctatcctgtcttttctttcaactgggaagatgttaaaggaaattaacactacaactatcaccttgatccctaaggttgcttgtccaaagagtgtggtggatttcagaccaatctcttgctgcaatgtcctctataagactgccactaaggttatttgtaataggttaaggagtgttctaccggatcttattgctgataatcaaggagggtttattcatgggaggtatattgctcataatgtgctggtttgtcaggatctagtgagactttatgggaggaaaaattgcaagccaagctgcatgatcaagattaatttaaggaaggcatatgacactgtggaatggggatttcttgaagaaatgctcatggaattcagttttcatgatcaattcattaagcttataatgatttgcattaggacaccaaaattctcactcttactaaatggctctatgtgtggcttttttaatgcaaagaggggattaagacaaggagatctcgtgtctcctcttctctttgtattagggatggagtacttgtctcagatatttcaaaagattggtgattggcctggttttaagtttcatgaaagatgttcatctttgaaattgaatcacctctgtttgtagatgatctcttcgtgtttagtcatggagtatttggtttcaatctatgctgatgttgagtagggctaaagctattctcagctacatctagtctgatgccaaatgaacagaaaact

SEQ ID NO: 210828 - DNA, 611 bp, Cannabis indica
cggacacggtcgtgtacctagacggggaccgagacccggacccggacctagacctatgacccgatcccaggccacgactcagacctagatagggatctggatacgaactttgactcgaacccaaactcagagccagaccgggatcgaaactcgggaccaagatccagactgagaccgtgacccagatccagacctggacccgcactttggacccgaactcggacctggacccgaacccagacccaaactgggatctggacctaaatctagacacagaccaagactcggaccacgactcagaccccgacctagactcagaatcaaacccgaaccaagacaataaatcgaaatcaaaactaggactaggacccaaacctgaacatggacccagaccgagacctaggactcggaccttgacttgggccttggaaccccgacctagatcggaactcaggactaggacccatacctggagcaggactcaaaccgagatctggagccaagtcagatcagaactctgacccagacttggacaaggactttaaccccgatcgggtcttggactcagagcgggacctaggactcgaactggattggggacttggacctag

SEQ ID NO: 210829 - DNA, 536 bp, Cannabis indica
aagtctccaaatttagctctatgacaagattgcaaattggtggcacaagctgtaagattttgcagcagttgtgtagtcgggtttgctaaggaattatgccagttatttgcaataatggtagaacaatcatcttcatgaagccatagcctttcaaatctaaatctagatttgaatttttgtgcaggaatagatgaaagaggctgagcagtaaccatgagggccctatgatctgactgaaaaaagtcaagatgagacacaactggaactttaaagtcatgtatccaagaagagttaatgaatccataatccaatcgttccttcacattggaaccacaagtattgttgttgtgccaagtaaatctctcaccctcaaagatcaattcttgtaatccacttgcatcaatggtgtttcggaaatcatcgatttgagaatcattttctatggggccacctaacttatctatgtgggaaatagtctcattaaaatctcccatgacaagccaaggcaaaagaggggccgagtctttgagcttctt

SEQ ID NO: 210830 - DNA, 398 bp, Cannabis indica
aacggtggtaacccaaatcataaatggaaggctgaggctttcaaaacatcggggattaatagaaagtttcaaggaagcataggtggctgatagggccgcgagtcctcattcagatcatatccatagtgtctgaaatgtaagaaacaccatgagggtgagtgccgggccaagaattgtttttagtgtggcatggtgggccactttatcagagattgtccagaacccgggacgtctattcactatgactcaggctgacgctgatgctagtccatcagtggtgacaggtcagttatctataaatggttgttcgtatactatgttatttgattcggaagctacccactcttatatgtcgagtagagtaattgaaagtttccataaaccatgtgatgtgtatg

SEQ ID NO: 210831 - DNA, 978 bp, Cannabis indica
acttattataaaaatagaggatgttttaatagctgcatcaaatatgtaactatgatgattatatttatttttaaccattaattattgatagactgtgattaatttaaaaattaactaaaaataattaataaattacccttagcttgatactaacctaaatttattttcttttcctataaataaaaaataaatatttataattattaattactaaaaagttttatgaaatatcttaatttaaaaaattaatatattttaatatataattaattataattaatttaagtctaaacataaaacttttacctattactaacctgttacagtaagtcataaaaaaatgtaaccactcaataatcatctataatagaataactaaggtggtgtttaattggaggtaataaaatagaatggaattaaaaaagaaataatttttattccatccatttgtttggttgtattttaaagtatataatggaatgagttttcttttattttggtgggatgactattttattttgaaatagaaaaaataatgcaagatgagaaaaaataatgattttttcttatttttttacgcatatgaaattctattccattttattcatatttctattctcatttttatttttattctttccaattaaacactatagatgtatatatatctactagattaattaatattatgtgcaatgcacctatacttaattattatttggatgaataatgcttccactactacaaaaaagatttattgttttgatttttaagtgacatataaagaacttgcttcagttagtgtaactgacgctataaccgtagacgcaaatagtgatgtttttttcttcagttatcaaccgacgctaattggttatttgcttcagttataaaccaaaacaaaaaaaaaaaaaaagacacttttagcttcagttcataatcgcaagcaaaaactagtgcactgacgctaattatttt

SEQ ID NO: 210832 - DNA, 770 bp, Cannabis indica
attgtatatgtatatgtatagaatatttctgaataagtattactcactcatgattactaaagaaatttaactataaatattaattttaaaaaatattaaataattaaattttaattcaatgatgaataataatagaaattttaatttttatgctaatatagctacttaatataaaaaagaataaaaaaaaatattttttacactatattaaaaaagtatgcttataaataaaatattaaagtcaagttcaactttttttatcttctttttttttttttgcagaaaaacttattttttttaattttttttcaacaaatgcgacaatcccaacccatgtaatgtaaacatgataaatttttctaattacacagaaaaattaagcataaaagctcaaatttttataatactacttattcacgggtaatagaagcactcatttatatatgtatagtattactattagttttgtaaaacagagaaaattctttatccatatgaattgaattaagtgttacaatggtattgggaatatatagacaagggtagagtcggttgaaacagtcaaccaacaagctaccatttgaattaaccacctaacttcttataactaacataactacctaactactagagtctaataggccccctcaagatggattctagagattcttgacattcatcttgaacaaaatgttgtgaaagtgagctggaaagggtgccttggtgagaatatttgctatgttggacatgaaagtgacatggttcatttt

SEQ ID NO: 210833 - DNA, 731 bp, Cannabis indica
agcttatccacctctttttccagggcctatgtctttattggatcaaggggatgtgcttctgctgaactggcggcatgtccggattaacgttcaatacatgggtaatcacatgtggacttatgttggtcatatctccttggtaccatgcaaaaacatccatggctacccttagcgttttaacaattttatctttatccttcggttctaggctctttcccagacggaggatcttagtagggtcaaggtcgcacattggcacttcctcgacgtcttccatgggttctacaatttttttagatcctacacggggatccaactcatcttcttctgccaattctgacacgatgccttcacgaaccattatcactggtaaatgggtcgctacattataacactgcctggcctctccctgattgcccctcacggtccccactccgacctcttgggtggagaattttaggcataagtgccggatggacgtaattgcgccaaaatccaccaaggccggccggccaaggattgcattatatgcagttgggcagtctaccaccaaaaaggtgcttttttcctattgggataagcgtggttctattgaatcccgtgagctgggaatcgctcggtgataaatcccggtctgtgaggcctattgttgagggatcactcctccagagggtacagccggtgccgacgctccgggcgtacttcttagtgtcccttgaggcaatggaccc

SEQ ID NO: 210834 - DNA, 614 bp, Cannabis indica
tgatagtccaaactgcaataattacaaaaaccggaccgcaccgcaccattttctgcggtgtgatttttgtagctttttagtttcgcggtgcgggtgcagtttgtgaaattggaaaaatcgcatatgtgggttggtttaaaaaaatgagattaaaaaccgcaccacccacaccgcgaacacccctacataaagttaccataaaaattaaattatatacataatacatatatacatatatacatacatacaatacacacatataacacatacatatatattacatataatatgtatatatacaatacatataatacatacacatatatatacacacaaatatatacacacaaccataaaaaatatatatatatatatatatattatatgaacacacatacatatatacacatacccatataaatacacacagatacccatatatatccacacacataaccatatatatccacacacatatacaaacatatccacatacatatatatatatacttacatacctatttataacacatacatactcatacataatacatatacaaatacacatacatccatactcatataaataaaataaattaaagatataaatatat

SEQ ID NO: 210835 - DNA, 597 bp, Cannabis indica
agagtgtaatttcctctattatttttgaacttattccctataaattcagtaaaatccaaggggtaagttgaaaaatgcctcttttattcatcaattaatcaaatttacctctaattttatgtttatttgaaacatacctctttttatatgtattgtacccaaaatacccttacataagagaatcacatggagagtatcttgaagtgataggggtaaaattggtacaatgtttaaaaaaagaggtaaaatgatagattttaaaaaagaaggtaaaaataaaagaagacaatataaaaagggtatagagtgcaatttcctcaaaatccaattgaataagcccaaacataaagcccaattgagtaagcccaaacataaagcccaattgagaaagcccaataacatagggtttcataatattctttcttcttctatatcagagccaaagctatcgtaaaattctctttctccgtaacaatggcggaatacgacttaactccacgcatagctcccaatctcgaccgacacttggtctttccattacttgaatttcttcaggatcaaagcatttaccccgataagcagatcctcaagtccaag

SEQ ID NO: 210836 - DNA, 570 bp, Cannabis indica
agatgcttttgattatgatggtcatcgctaacaccaagtaaattatcttctttttcttattttgtcctctttgctaatgtaacattgaaatatacttatatgtttgtatcatttagggaggctaatatgaaattatgaataaaagcgttgaactcatgtttgtttctgcttttttatgctaatttggggaaaataagcatgatatcaagagatgataatttgcgtggcttatctgtcatttaatcatcacttaatgtttgaattcttataaaaaaaaaacccatttgatcattgatttgattatgatttgataatttgagctaacgtctagatgagacttggagctgagtttggagaacttgagcattgatgccagtttttttcctttttacttttttttttttaaaagttaaaatgttagtatttataaagggaaatttgagcataaatgcttaaaaatattttataaaatacgcataattcataaatatattgaaaagcgatgcttgtaaatccacaaaagtttgttatctagatttgaggagtgtttgttctagcttgtatgaaatt

SEQ ID NO: 210837 - DNA, 593 bp, Cannabis indica
tttaaaaaaaaaaaaattattatgacttatgagcatgttctttaaaataatttaaccctaaattgagttatgagcatgtgacattattaccattcaaacaaaagaaagaaaaacattcatctagtttttttttttttagtaaacacttggctatttttagattttttttaagtaaattatgcaattttatttaatagcaatctgcaatcaaatagggtatatctcttttatttgaaaacaacaaccaacttaagaattagaaaaacgaagtcaactaatcggtcacccgattcccatatcattatatacaaaaaaaaaaaactaaaataaagtgagatgaaaaaaaaattttaagcattataattaactttaagaacacttacattcagtttaatccatcgcttagaagatacaatagtagatttattgcagcaagttcattcaactccttctagactattttagttttgatatagttatttgtctttttttttaatcttttcctttatagagtattaaatgtttatttgttttccttctcttactcatatagagtattaaatagtttttttttttcttatttcttcgttaca

SEQ ID NO: 210838 - DNA, 548 bp, Cannabis indica
gtatgttctaatccctctctattccattaggttaaatctaatagcaggattagatctgttggtttgccaaatggttctagcactagagtatcttttgttggaaatgtcaaattattcaatatcatgcttactgatgtgttatgtgttcctgattttcatcaaaatctcatatctgtttgtgctttgtccaactcatctaactacccttttctatttcttccccaaaaatgcattattcaggatatcaccaagggtcaagtgattgggatgggtgaaagagttggaaatctttattatatttctgagcataaagatccctctgtttgtactgtttcctattctagaataaatgatgacaatctatggcattatagacttggtcatgcttcttgtgtaaagaaacatcctttgaataaaaaattacaatttcaatattcttactgtcatgatttccattgttctatatgtcctcttgcgaagcagagaaaattaccttgcattagcaaccataatctgtctaaacactgttttgacctcattcacattga

SEQ ID NO: 210839 - DNA, 1152 bp, Cannabis indica
aaaacaaaaatattatcaaacgataccttaattatgaaaatttatactatagcttgcaacacaagatgcagggaatgtacaaaagacaattatattttttacaatatgttgatctcttactaataaccttaatctttagacgtgactcataaactaaattctctttctcagaagctgttctttatgaaaagtgttaactacagcttgtctcatcacaatattttagtgttgtaaattcgtgcatgtcgtgctggtccagcctaaatatttttctgcttttaaaatatggattgtgtcatattgtgtcctaaaaaaatatgagttgtgccatgttgtgctactatttttaaagactaggcccagcacagcccgacacaacccgtaggcccgatatttttgtgtcgtactaacttggatttgttaaacatgccagcctattttcatatccatgctcaaattcatgttttactttttcatattttttttacaattaatgagtttattactaaattatatgtatattttatagtttcaattatatttatgtaatttcttaaaaatattttataaacagtcatagaaaaaaataattaaattatttgaatttaaatatttacttataaaatcttaaatttttatatcacactatataaataaactaatatatagctttacctttatttttataatagtttaaattataaaattataatagtaagtgttagattttattattttaaataatttataattgacatatacatatatataattactataattattaaattataggattttttattgtttcgtgtcgtgccttttaggcttgtcgcgtgtcgtgccattcggactagtctattcatgtttacatatcgtgcctttcgtgcttctggtattgtgtcgtgcttaattacatattttctgagccgtgtcatgctaatttatagcactgtatcatatcatgcgcaagtccatatatttttatacctggtcgtgctcgtgccttctgatctcgtgccgtgtcaaaatgcccgatccatatttacaaactactccgcgcctaaaatcacatgctgaaaaaaaagtatccaatacattttcataactattcattatagttataattttatctctataaatttttaaata

SEQ ID NO: 210840 - DNA, 737 bp, Cannabis indica
ttggtacatgtcaaaattcagggtaaaaaacctaattagtctattcaataatactaatataaaattaaaatagatataaaattataagtttagatataaattaaaatgcttaaaaaaaaaaaattgaagtcaaatttaatccgatctagataactgatctagcaaagcgggaaaagacagatcactacagtcataatcaaatatgaatggccgaatgcatttactagttttactcaaataatatccatgtactatataaaaacataaacaatatttccaatttttcagggtccctcattttccaaggctcgtatattttttggacaattttgctttcttgggaaaatatgtttgaagttatcttatcttcgtggggtttgtgtcctctaattatctctgccaaaataataagttctctttaaagggggctatgtatccccacccaaaagaaaaaaatgacgtccattttaacattatcggaccactctgcctaatttcttcccctctttcagtgcatcatatccatctctcccccacctaccccattaactatattttcctcttattgtgtggtctctccccataatttggtgtttatggaaccacatttaaaatttaattattcattaaaattaaataataatattaattaattcaattgaatatacatgtaatttagatatttgaacatccaacaccattgttatccaattcaaaataacatctaataatcacaa

SEQ ID NO: 210841 - DNA, 875 bp, Cannabis indica
acatcaatcgatttctgttgcagatcaaagtttttgggtttgaagcttaaagattcaatggctggaggtatttcgatccttagttatagtacatatatgttttattaattccgcactttatacttaatcatatatgtttcagtttatacatataaattgtctaacagatttaattgcgatttaagttgttctgttggttgttatggtaaaaatacataaaaaaaattattttaaagtgtaaaataataaaataaaaccctaaatgaatttggtattattaatggtttggtcaatataactgtttaaatatttttgaacttgattagaattctcgatagtagtttaaaccaaaccaaaccaccaatttattttatataattaacatatatgtttcgaattaaatattggtacttaagaaataattttaggctgaatatttgacttaatactattttagtaatgtgtttcaattttattgctaataaactttgaaaagctaaaaaaataaaaaaaaaaaaaataattacatcaaaaaatagattaattacgaaatacaaactatagtttcgaatcaaactaatttattttagggatttttacactatatattaaaatttttaactttttttggctgtagggtagaattttttttaaaaatactgtaagtttcatctattattttactattattttttagttgttttactattatttttaattgttccgtttaatattttataattgtttttatatataaaaaaaacagtatttttgtaaaaacatttgtgtggcagtaaaattataaattttgtccaataattagtatttgtaaaaaccttttattctaaatggaatggtttgagtatttaattggt

SEQ ID NO: 210842 - DNA, 582 bp, Cannabis indica
attgttccaaatagtgttgcacactttttgtatcaagttttatattctactactgtcctaggatggctaatagtgttgcacactctttggtcaaactagctttatcttttactcatgattatgtttggtggcctatagctactttttctgtatccatgatgtatttcgggaaaatatttattaatatattcatcttgagcacttttttttctcttgaaatttctccaattaaatttactcaacaggttttaatgagattttttctaaaaaaaaaattatatcaaatacattatagttatattttgtgtaaaattaatataacaatttttatgtctagtaaatactataatcatgatgatttgaccaatttttcttttttctttattctttcactttataattattgcaagcaagcagttttatatatatttttttaataggtatttttcttgtttattcaaagttataaaaacaaaaagttataaaaaagaaaaaggtaaaaaaaacaaaaaccaaaaaaaaaaaaagaaataaaaataaatctggcctagatatactataactaaactttaaaatcaaaat

SEQ ID NO: 210843 - DNA, 650 bp, Cannabis indica
caaaaacaactcatggtatatgtcaggattgcttgaacaatagccttgataagtacttcctttcctgccatcaagaacattgaagctttataacctttcagcttggcctacactttattctttatcatctcattcagctcctttttgtttctccctgcaaaggatgggagacccaagtattttccatgactgtcaacctctcgaacacccataaaaccagcaagctgacccctactttccgtgttgatatgcttgccaaaacatacttcagacttattataattaaccacttgacccgaagcatgagtgtacatttttagtagatcttgaaacctttggaacccatctaatgtagataaaaaaaaataaaactaccattgacaaagaataagtgagagacaaagagtctatttgtccaaacttaagacctcttaacgtaccttgttgctcttctttttgaatcaaattagagaaggccttcgtacaaaaaaaggaagagaaaatgagataaatggtcactttgacgtagtccgcgtgttggcagcacccgtccccgtacttcgccgttaacaaggaacaaaacacatcgcataattttttccacctagtccatgtgatatcccaactgtaacatcattgccttgagaaac

SEQ ID NO: 210844 - DNA, 518 bp, Cannabis indica
gaaataaatactgttgctcttctgaataggacaggtcagagattgagtcccttcactatgttagcaacatgtccctatggtctaaactactattatgagatccctttagattattttagaagtaataaagaagaatcaaatgaaatttccataaagatatcaaccattgtaataaaagaacttccaaacctactacgagaagccgcttaaatgacgagctaatttagctagcttggctgctaaggcatttggcacatcctttgactcaatgacaacaacctctctacttctacctggttttaaagtaacataagtattttagattagactcttgctaatgacaacaccagatcaaatttcaaacaaatcaaaagaagaaaaactcgaatatctttctataggcctctgcaatgtcttctctcacgtccgaaataggaaggaaatttcccaccgaatcagaatatcaaaagggtagaatgaaaaattgttctatgtaactctagcagcaagaacaaagg

SEQ ID NO: 210845 - DNA, 1146 bp, Cannabis indica
  modified_base (41)..(41): a, c, t, g, unknown or other
atttttaaaataaattaaattaaggactagaatgcaaaaanaaaaaaaaagtttacacaaaattggtgtagagttaaaatccaacaccattaatggtgtagaatttagtgtacaccaattggtgtgtcagtggagtaaaatagtgtaaagattccacaccaatttggtaaaataatgtaccgtggagatgctctaagaccatctccaatggttacaccaatttggtgaggaatctacaccaatttagcataaaatcttttacattttggtgttttttttttttttaaaaaaaataaacgtattcatgcattaaaacaaggaaatcgttagacctcacggtcattacaaagtagttcctccgatacagaggagatcaaaatggaaccgtacaactggtgggtgaaagcccacttagtcacattatgggcaacaaaattacaattcctgttaacattagaatgattcacaccaaaaattttacattttggtgttacaactaaaaattaaatttgagtatttataccaaaaattattctaataatcactacaaaaatttttacttttagtcacaacaaaacttgtgactaaaaatgaaaaaattgtgactaatattataaatcatgattcctatgttgtgactaaaaggtccgtgtataaaagtattagtcacaaaaattacaatttgttgtgactaaattgttgtgactaaaactaaattagtgacaacttgtaactaaatactatgttttagtcacaagtaacattttgttgtgactaaaagccacatttagtcacaaaaaaattatgttgtgactaaaaagttgtcactaaaagtaacagttttttgtagtgaattttaagaataaatatgattattttcccttgaataattatttgtgtagagttttttatttttttaaacttaattttgctttaaaaagaatcacattaaaaagctatctatcaaaacaaatttttatttttttaaataatttattaatgtagcactaattattgtagtggactgtcaccgcttaatcctcattgttaaactcaattcagtgagcaagaacacaagcaattcaaacaaacataactagaattaaaaccagtaataacaaaactaaataaaccaaaaaacttagc

SEQ ID NO: 210846 - DNA, 883 bp, Cannabis indica
tcaatattagttttgtgagattcatcaaaagaaaaaagtcttttgctgatgcaaatttgtgtcaacaaaactagacacaatgtgcaggtacactttttgtcggcgaataaccacgctaataattctagctggcaatacgtggtcaataaaaccgtgtttactggcgcaattagcaaacgtgctgacaaaataaggttataccggcaagtttcttcgtcgacaaaaatggtctcgccagtgttaagtgttggctaaaacttcaatttggcaagaaaaatggtttttggcagcgcaattatgcgccaatgaaagtttgcgcttttttttttttccaattagtgggcaatagttttatcggtgcaaatatgtattggtagaacttttacccgcacaataaaatatgacgggaaatagttatatcggcgcatatttgtgcttgtaaaactctaacccgccatattttattgtaggttgggttagttttgtcgacgcattaaagttgctttattatatagtttttttttttaaaaaaaaatattttgataatttataataagtgttgacctcagatttggccaactgacagcggagtcatatttattactgatgctaccacatgtacacgataagaagaggaaaataaaggagacacaatatttttatagaggtttggctcccttagttagcaggtaacgacttacttctcttttagttgtattaataccagagataataccacttaaatcacaaaggttgcgaattctgaagtggctctcttaatagtacaatatgagaataagtaggcaaatctcaagtgagagagataacttggggtgtgtagaagggatgaaaagagagaattagggttttagacttagagctt

SEQ ID NO: 210847 - DNA, 509 bp, Cannabis indica
aagaatggagaaagtgggctcggatgggcttgggaaagtgggccagaatttaaaggttatttctgaaagtggtatttctgaaaatggagaagaagttgtaccaaaaaacctgtttggggcgggtctgggtatccaggctcaccacgaatcatgagtactttgagttggaactgccgcgggcttgggaaccctcgggccatacagttccttaaggatattgttgtccaaaagaagcctagttttatttttctttgtgaaacattatgtggaaaagctattcttgaaagagtccgagtatctttgggctatgagggtttatttgtggtgaaggcccgggggcatagtggtggactggccatgttatggaaatataaggaagagggtgagattattgatttttctgacaaacatatcaatattctcactcatattccaaatatgcctacttggagacttattggagtttatggcgaagctaatagaagacaaagagaaaacacttggggtct

SEQ ID NO: 210848 - DNA, 508 bp, Cannabis indica
attctgaataatttataatgcttaaaataaggttaaaacaatttcttaccacacatataagataaaatagttaggtgtgcaacaaaatatattgaatattatttttgttattgtaaattattttaattttttttttaaaaaataatgacaatcctatataaatacaacatacataataataataaaaaaaaactagaaagctagtatagatgtcaaaatacttacaaggtgtactgaaacaccccgctattgtaaacttttggggaatgaacacaaatattcttgagaaaataaaaaaaaattactaaatttttaatcacaatatgatttttttgtgattaaatatgtgacttttatgaatttttagtcgcaataaaaaagtacttgagactaaaatatagtacttatttgagaattgctaaaagataccactagtgcctagtactattcttgttgtcataccgtcattggtgtaatataagtaacgggtcccatataacttaagaaa

SEQ ID NO: 210849 - DNA, 676 bp, Cannabis indica
ttttgtgctgcagttcttaatgttcttaacaatcattctgacatctcttcaattaatgaaaccattttggttctgattcccaaaaagcagaatgcttctcttcttaaggactttaggccgattagcctttgtacaactatctataaggttatagctaaggctattgctaataggctcaagttggttctgatgacttgatttctaataatcaaagtgcttttcttagtgaccggattatctttcataatgtgctcattgcaaatgaggtcattcaagtcatccttactaaattcgggtttccatctactattgtttctcttattcttaagtgtctttcctctgtttctttcaagatatctattaataatgttcttttaccttctttttctcccactagaggaattaggcgaggggatccactttccccatacctttttctcctagttgctgagggtctttctgcagctgttcgtgccaagtctagacttactagttttaaaggtatctctatctgtagatccgcaccttccatttctcaccttcttttcgctgatgatagtcttctgttcactactacttctcataataattgtagtattattaaagatattctttctctttaccataatgctacaggtcaatcggttaacttctccaaatcttccatccttttttc

SEQ ID NO: 210850 - DNA, 840 bp, Cannabis indica
agagagagagagagagagaagttggagagaaagagagcttcttttcaaatttcttatttttggaaaatggataaaatgagataaaagaatggttttattaaatcatttcagctaaataaactttaaaaatcagattactcatcaacataaagtccactaaaggacaaaaatacaaatgggcaaaaagaccattttgcccttccacactaaaagtcataaaatggcacttaggggtattttgggaaattctaaaatcctgactattcctgaaattcccaatttctaaactattgtcctgatatactaaaaatactaagatgttattctaatagccatacaccgcgttccaatgttgtcgggcacaaaatatgcaaaattgtgaaatttctatatgtgactaaaaattaattcaatattaataattaactttcataataaagccctaattatctgctaatttccaaattaaagttaagtggtctttacatgaagccaataacctcgagtatctacgagttcactagaaacacgattgaactgaagggaatgatcagattgccagtatcattgggggtagcacctgtaacagcaaagtccatggcagatttcgtggtagttgatcaataatttgcataatgttgtaacaccgtacttgcttaggcacgctacattgattttctaattactgtgtatgcctttgctaatcaaagggtttcttaaaaatcatgtcaaatttaaatttttaattaaactttaaacttttataaatacatgatagtaaataaaagttgtgatctcatcctaaaagcttacaataatattcaaaatacattttataaa

SEQ ID NO: 210851 - DNA, 648 bp, Cannabis indica
gtagtcattttattacaatattaatcctttctctgttaccaaatgagagactaaagttacatctatgatttttacagtgaaatatgaattatagaagaatttttgccgactaaaatatttacaaagaaatttaagtgtaacaagatgaactatataaaaatttttaccgccaaaaaatttatataaatatttaagtgcaataacataaactacatagaaatttttgctccaaatatatatatatttataaaatcacacaaaatttatctaattatcaaaacacatacacatggtacaaatgcacatttttttagaattatttacaccacatatggaaattttaaatttttttacttttatactgtggggcggaattttttttcaaaaatactgtgtactgtgttaagtttttactgttattttacagttattttttagttgtttttaattgttctgtttgtgttccactgttgttttttaaaaacatagtattttttagaaaaattctgtgtaacagtatttttgtaaaaattaactaaaactccagtattttgtaagtttcctttttttttattatatatataaaaataacaccaaacactcttaattgatgttatgggtaagacaaagggttaatttcacaaatgc

SEQ ID NO: 210852 - DNA, 693 bp, Cannabis indica
ggcttgaatgtaacagttttcagcacaagcatttccaagaaagaggaagctctgactcttcttggggcagacaaatttgttttatcatctgaccaagaacagatgaaggtatagataatataagaagagatgaagttggtattttagtagtctgtctacttgttatgatctttattctgattaaagtttgattgtatccagggtctggccaattcgtttgacttcattatcgatacagcatctggagatcatccatttgatccatacatggcactgttgaaaacatatggtgtctttgtcttggtggggttcccaagtgaagtcaaactaagtcctgtcaatcttaatttgggtacttgatacatcagtgtccttatgaaattcagtagttttttttgtctgtgtgtgtcccaaatacttatgtgtatgtgtttatgtgtggtcacatgagacaggtgataaaaccctttgtgggagcacagtaggtggcacaagagagatacaagaaatgttggagttttgtgctgctaaaggaatacaacccaatatagaagtgattccaattcagtatgcaaatgaagctctcgagaggctaataaaaagagatgtcaaatatcggtttgtgattgatattaaaaactctctcaaatgagactgctttatgctacaaggatctcaaaccaattcataaac

SEQ ID NO: 210853 - DNA, 967 bp, Cannabis indica
tttattttcataattttttttcatcatgtatattttttttccaataaaattttacattaattttttttttaatttttttatattatctaaaatataatttatttttgtttgataggtatattttttaagaatatgaattggaaaaaaaattaaaaataatataattaaaaatttatattttatataaaaaaaattattaaaataaggtgtatttataatctttttatgtgcaaataattaaaactccccttcatttaattcataattgcagtacaaaaaaatcacaatgatacttactagggatgcattctgtaatactttttaattaattttttaaattaaaaaagtaaaattattttcaaaaaacatgttttataaaattattttcactttttaaattttaaaggaaaataaaaactttgaaagaaaacaattagtttcaaaatttatttaaacaatttttttttcttaattataatctatttatatattctttcattaatattttagactcttacctcgaacgtcggctcctgccctcgacctgaaacccggccttatgtgtaggacccgaactccgaactatgacccacactcaaaccctagccttgacctaaatccagatccagactcagacctgaagtcaaatcctagacctcgatccactttctctcaccttagtttctcattcttcacttaaataataataataataataaaattactaaacacatttttcttttctgtttttattaaaattaaaaatagttatgagataaatttttgcttctaaaaacaagaattaaaaataaaaaattagtacttcaatttttgaaatttaaaaaattaaaaaagaaaattaattaacaaataccctaatcacttctagtcgaatatcataatgcataagataataaggctggttaagagagagtcaacaacgcgtagataaaataaaattaagggg

SEQ ID NO: 210854 - DNA, 512 bp, Cannabis indica
ctaggtagagtctacaaaaatatatgtacatatagattatttattttagattatgtgttactcccatattcaatagactaaaatttaatttaattttttttattattttttttattaattttttgatattaatatattaagaaaagtttaacgtttttttaaaaaaaaaatttaaaaaaaagaaaactacatgaaattaacaagaaaacaacatcaaaacaacataaaaagaataaataaataacaatagtgcaacatagaaatacatcaaaaaccgtatttcaagtaaaaaatattaaaaattcaatacattttttttaaaaaaatatatatttcattaatttaaaatatataatattaatgtatatttttacatttttttgatttattagtaaattgtttttttttttaaattctagagtgttggattagggtcgtgtattataaatgtggaaatcctatatatgtaattactaatttagttgttcgttaatatatgtaattactaagtt

SEQ ID NO: 210855 - DNA, 895 bp, Cannabis indica
aatgaaaattgttcttttatttttcttttcattctatttcattgccctcaaaccaaacacacccttagagataaaggttaatgcaccaccaaatactaattggcaaaattggatgtgtagcctagattttgagagttatgtatctcactaacttaaccttagtggccaaatcgctccctttgagtctttgatcatgatcatggcgagctgagaaattgttttaattaacataaatacagctttcttagtccctgcctcatcaagaaaactattattattttttttttttttttgaataattaacattttttgtccctgaactttagatacttcttgatcatgctcctaaaaatatacgatttgttaaaaattctcctttaaatataagagtaatttgtggcaaaaatacttaaattttattctaagtagcaaataaatacctaagtcgtatttttagtggtaaaaatatcttctgtcactagtgtggaacttccgtaggtacctctccgttttcatcttgtaatgtgccagatgacatgtcattaaaataaatgtcacaacactcccaccacttaaaactaactcctaccacattatacatcttaaaacttataataataccctaaaattaattaaaccctcttaaaatcaaaataaaaacacttgcaaaacaaaacaaaaataaataaataaataaataaatatgttatataacttaaacctaaaaagcttgaggcaaaacttttccaccattgttgaaagctcggaggtgacataggacagtggttatgcgattgtaaatcaccattgaaagttgcgattcgcacctctaggtcgatgaagaatttcaatagaaggttcaaatgctgtcaaatccataaggtttgtttttttt

SEQ ID NO: 210856 - DNA, 614 bp, Cannabis indica
aagcaagcatccgtgtcttaatcttgtctatatcttcattggtcctctgaactaattccggacctaagtacttcctttctccggtttcgtcccaatgaataggggaatgacattttctatcatacagcatctcatagggagccatccctattgtactctggtagctattattgtaggagaattcaattaaaggcaagtacttactccatgaaccttcaaagtccatgacacaggctcgcagtaattcttccagtatcggaattgttatcgctgattgcccatccgtctgagggtggaaagctgtcctaaacttcagctttttacccatagccctctgaagactcatccaaaattttgatgtaaattttggatctctgtctgaaacaatagatttaggagctccatggagatgaactatctcctttacataaagttcagcatactgatccactgtataggtaatttttactagcaaaaaatgagctgactttgtgaatctatccactataacccatactaaatcatacattcccatggttctaggcaaaccagtaacgaaatccattgcaatgtcctcccactgccattcaagaagagctagtggttgcaataac

SEQ ID NO: 210857 - DNA, 815 bp, Cannabis indica
tctcgttgattagcaacgagctgcacagcatgtttaaaaatcacgtaatacgcctatgttagttagggtgttacattatatgcatatataatcatgaaagaaatcatgtgaaccatgcaacattaaaatgttatttctgatctttattagtaagtaaatctgattatattgaaatgtgtttatttacggcacaaaatccaacagattaatttttttttatagggtcaagattcgtttcataaattttatatggttttcttatagggtcgaaactggattcacagattttgaaagttttttaatgggactgcttcattttattgatttttttttttttaatttttaagtttctttatattattatttttttttctaatttgaaattggttttcgcatatatgttatgtttttaaattattgttatgtgttgttttctattattattgttagtattttttttctaaattattgttcgaaactggtttacatattttgagagttctgtaatggggttgctctattttataatgttattacaaattttttattttaagttacttttttattattttatttctaggagaaacttatacttatattttattttcaaattattggtatgcattgtgtgttgttttgattatatttgtgattaatattttttttgtatttttgtatgtgttttttttttttatttgattgtccgatgaaattggtttcagtgactttattatttaacatttattattttttatgatttttatagcgtcaaaagaggtttcattgggtcggaactggtttcacaggttttaact

SEQ ID NO: 210858 - DNA, 512 bp, Cannabis indica
atatattatataattgttgattgatctttattaaattcatcaattgtgactaaataccaaataatcaattttaatttgaagtaagtcattttactttgtcaccattttttatattaaagtgtttaaatatacattacattatataatatagaactcaaacccaagactccccacacacatcctcccatacccctaatgcccctcaagtgttattttactttgtcaccgttgaaaaataaagaaatgtaattgtcacttttatttagtggtggtcaaagcatgtgaaaataatgaaaagaaattgttccgttaacctttcaaccactacactgagtccactccaccacataacatagttaattaaccaaagaaaatgagaaaggtcaaagaagagaaaaatattttaagaccaggcattcttgtgtgacacggttcttttagtttgtctccacacgcaaaccaatcactaaacaaaaaataagcaactcaataccacaaatataatattgatg

SEQ ID NO: 210859 - DNA, 895 bp, Cannabis indica
catttacatgcgttaaattagttttggaaagttgagtattaagttagctcgaaaatgagttttgaaagttaaaattggtgtgaaaaacagatccaggcaatatgtcgcctgcattactaaatgagagattttcgatgttttagtgatgtttatcgacatatgcattattaaatgaactattttctgagaaaatattggaaaacgtcagaattttataccgcaattactcaaaatgaaaaaaaatcctttttattccccacaactgttttgattgaagaggatactagctactgaacaattgtgcagcccagattagatgagatgggcctgatcttatggggcctcatttcttcgttctacagataactaatatgttaataatcacattcgatctcatttgtattaattgatagaaggcatattttcataaataccaaaaaaaaaaaaaattaacaaaaagatttttgcctctgaatttttcagcctgttaaattttgtcacacacggcgaacaaaaaaataatatgactggttaaccaattgatacatcatgtgacaaaacttgaaagaatgaccaatttacaccactgtgaatagtttatggactattttaacgagctgaaacatttaggggtataataatacataggccataaatcaaggagcaaaaatcctaatagctttttttattattattataatcttgttatttttttgttatttttaatgttgttttttattatttttatcattttctttctttgttattattaaatactgtaaattgtaattaaaaagaaatcgtaaagttattaaactttcttttttaaaaaaatataacaaaattaaaccgtaaaaatgtaaaattttatcaaaatattcctttgtgtacattt

SEQ ID NO: 210860 - DNA, 934 bp, Cannabis indica
cctttgttaacttgtaaacctttaagaacaattttcatacatacactgaaaaaaaattcaaattttggttaagtcaaacttactacgtacacttttaccaaatctttccaaaatagatgtatatggaatatgtgtatttaactttagttgtattattatatggtttttattctagattaattattgactatatatttgtttattatttagtattatagtatatatataaaagagacaaagagataatatagatgaagatagattatttcaaaaacaccatgaacaaaaattaagccacttgttcttgtttgtccttaaatacaatcctaaatccttgtaaatgcgcagccattggttccaataattaatttaattatacataattagcaaattgaaagttaagacttaatttggcctttaacacactcgcgtgaaaatcgggaggctgtcaaaagattttcagaaaagagacttatcaataattattattatcacatgtttaaatgggtcaattctcagtcaatttttgaatacacatatactagacactagagacacatatacacttgaatatatcaaacataataataaacgacacatataatccttaatgttcatgactcttgaaagttaattgaaacactcatcatcattaccattctttatgggaaactgggacaatcttttttgatcggtggtcttcttcaatgaatgaaagcaatatgagttgattcaaatcatattgttcttgatcttaattatttgaaaccagtcaaaaatacaattgagtttttatatatatacctagttaggacactcgtgctacgcgtgaaatatatttatttttttcaaaaaattatattttgaagaaatatattattaattattattaaaatatttttttagaccaaaataaaataaaaagaatcaacat

SEQ ID NO: 210861 - DNA, 627 bp, Cannabis indica
cacgtcattgtatattaaacaatgtattttttttctcttaaatttatttttgtatttaattttgattggttgttaaaattttgaatttttttttttttttctgaaaataaaattttgaatgtttggaaagagatggcatgatggaaaggagtggtctttcttcacagattttgaactaattacaatggaagtaccgcaacagaagaaccattaggagtttattatgactgtgggatttatgttattaactttatggaggagcgagagttaatcttagcttgattcttattgtggaagattgtgttatgacagtcacaacgagtgtgtgtgctatttcttgaggaattgtttgaggtctggaaaaaatggaatgaaggcgtggagagttctatttcaaatatagatgcgggttaaaggtctttctttactcactgtagatcctgtgcttttattttttcagctggacttttgtttgagctatgtgataaagctttcgttctagcaatgttttatcttttgttttttctgcttttgatttttgtagagcttgtttttttctcttagtcagtgtttgtttcctaacattgaattttcttttgccattgtgtatctttcaggttcggctat

SEQ ID NO: 210862 - DNA, 424 bp, Cannabis indica
ttttgcgactgtgctgaaggcttcataaaacttgaagaggctattcacaagcagaaggtgagcaaaagcctgacaagtcaaaagcgccttccactggaatgtctgcccaactccctcgttacccaaataatttgagctcaaatggtaaacgttccaacaataacaggcaagggaatgggaagaagggaaagttcactgacaaaaccgaggaggctctccgagagaatcaagcaaagtacactgcatttaccatcttcactgaggatatagaaagtgtttacatggccactcagtcgctagccccatataagaagcccaggcccatgaagaaggatgtcagcaagagagacatgaccaagttttgtcaattccacggaggctacggccacgacaccaatggatgcaactatctgaagcgggaaat

SEQ ID NO: 210863 - DNA, 635 bp, Cannabis indica
aacgactacagtaggtagtgtcactgatgttagtgaaagagtttttaaagtggagcaaagcagaggtttcatgggtatggcacaatggagaagaagacatggaaagagaagaagaagaagtaagaatgaagattagagaatagaggcatggaaacagacccatcatatatcaatatatatatatgtgtgtgtgtgctattggtttatccttgtttatatttatatttataggcactgagcttttctatgaatatacagagttaattaattagtttataaaataataataaattaactaaacagtgtaaatattaattccttttactgatgacccatgaatatacaataaaaaattataatggttttcttttccatactactttatttgagattggtatctaagtttactcatccaattatgtccctgcacatatttaattatgttaattttgccttcttaatttcattattgttaattgttactagctagatatatagtaaaataaaagtataaccacttcacttgaataatgatgtcaaataatctcaaaaataagacactactactccgacataataaaagcaagaaagaaacttgtttataattttgccttcaatacacactaataataaca

SEQ ID NO: 210864 - DNA, 512 bp, Cannabis indica
tataaaagtgatacttttttttatgaaaaaaattacttattagtttcttatcaatattataagtaaccaaaaggttacttacgaaacacaggaaaattaaaaaaaaaaatcgagattagtttcatttcagacatattattttagaattaaagtattttttaatgacgtggcaagacattattgtaattgagatttgttaagttatttttataattattttgtattttaagtatattttttaaaaaaacccattttaaaaactgaaaacataaccaaacaacctctaccctaacttatttgttcagccaaccaacaagagtcaaagactattttctcacaagagtaattcggcccaaacacaatagcagcccaactataaaagctatgtattttggtaaatttacatcctattttaacggctatttttttacatagtatattttgggaaactaacggtaagtttccctatattttctaaccctaaagctaatacacggcagccactatctcta

SEQ ID NO: 210865 - DNA, 570 bp, Cannabis indica
tttatatgtgtttaaactccattctttttagaatattcatatttagaatgttaaacaacatacaaggtagtaaatttagatcctggtaaaataatccccaacagagtggcccttactcagagtctacccaactgatactcagatgggtactcgaagggtctatcgcggacactaactgcccaagagtatcaaggacgtctaccttggatgcatcccagatcacccatcaacggttatgctttttttaacacagaatcagatcttgtcccctgagccagaacttggtagtgcccacacctcacatacctttttgccaaacgattattctaagcatttacttttaaaggttgaaacttttggcaaaacgtgttcactacgtacaatggtccccaatagtccagctattacacgcacgagcacaattatttctaaggggtccaatagtcacctctcatttgcatgtaatttaccccattagtaggcttttggcaaaaactctaggcgagtcatgggtatgtccatacccgcccttagcgtataaatacccttctaatttcatacgaagggggg

SEQ ID NO: 210866 - DNA, 774 bp, Cannabis indica
atatgtatggtccacacattttgggataaatcaccttatatcttttctcatatatgtgaaatggataattcatatatttatatgatcacaataaaaggtgcaatatatgatgattgaacatagatatgactttatgatgacccaccttatttattgttgttctttccccacttaggaagaaatatatactttttgaagaaattggtgtaattacatttaacttaggatcataatcaatttatgtacccaaaataaatttatatcatatccatatagaaatatagtattacgtaccaaagaagagaaatgtgtcggtgatatattgcttttaatctaaaaaaaaatgactaatctttaattatctttattatctaaaaatagaatgattaatcttcaaatgctttttatcccatgtgattattaattacctgtcccttggacctttaccactaactacaaaagggctctcaactttagtcactataatttttttttttaaaatgttggatcctcttccaaaagaaataagaataattatataaaatattaattttaatttttttttatatttttacgtttaaaattattttttttttttatatattcttacagtattttataaaaatagaagaaaattatataaaactaacaaaaaaatcaaatcaaatcaacataagaaaataatatataaattaaataataaaaaataataaacaacaaaatagcaagagtataacctaaaaagataatattttatttaaataaaatctaaaa

SEQ ID NO: 210867 - DNA, 566 bp, Cannabis indica
caagtttctattctttagtcatttgctattgaacaataggtttgaaaactgataaaaaaattgaatggatagctctttagattttctatggttgttttttcactaaattcttgtactgttgctgatttttcttgatgtcttttacgttggggttcctgcatgtagcttggagcagcttcatttgaacaagaacaatttgagctgcatctcgtacccagatcatgatatgttagatgaacaaactcacaagccatttcaaaatttgcgttgccttcttctcggtaaattttcggaactgtttatatgatactttgacttgtattttgccgtttattatcttagttattgtaatgcatatcttagctattacatgctgtaggaaacaacaatcttgaagatctggcttcaattgatgcactgaacttatttccaaaactagtggtaagaatctttaatatgaaccctcttatttttgttattagaaaaacatagtttcagggagagatgcattcaaatgctgcaattattcaatccaaattcaaccagtggctgtcactatatgaatc

SEQ ID NO: 210868 - DNA, 766 bp, Cannabis indica
caacaaagcttatgctttttccattaattattataataacaacaataataataatagaccattttttcaccaacctttagatcatcacaaaatcttttctccaaagcgtacaggtctacttctagtgccattcaatgctaataacgactcagaaccagaaggagaaggtacaggaggtcatgaagaggacatgaacgccgtcgaaacagtactccagagactttactccaccatcaagagcaaaaaagttcatgaattatccgacgtaattggccatgaatttcaaagtgtttgcaattttttctcaaacagttttcaaccctttaaaaggaaaaaggtattcctagttagatataatttacacgtttagtttaatttgtttgtttgggaaataaaagtacatattcatcatatcaatgcgcataatgttgaagttgtttatttgttagttgcagcaagtgttggattttttcttgcgtgcgataataaccttggggaaccacattgaatttgttgtaaagccaacattgcaagatggaatgaatgttggcatcaaatggaaattaggtatgaaaatgtttttttttgggtaagacaattgtatttttcaggttaattagtacttactaggatccccttcttgttttctgtagagtgtagaaatataagtgtgcctctaggaaagggggtcagcttacatatgtaccacgtttatcatggaaagatagtaataaggtgttaaattttcttcaaacttaaaatccca

SEQ ID NO: 210869 - DNA, 1498 bp, Cannabis indica
atgtgggactatctaacagtccacaactggtttccattaatctatcctcatagaccgaagtagagattggggtccttaaattccttagtttcccatacctttttgatcacatttaacgcattatgtggcagggtaccggaccagaagccagaggtgccaaaatatttgttcataatcacatccgtccaaagaccattaaagcctgaagcaatttgacaacacaacttgatcaagggacaaaaatttatatgcttaaatttccttaaatttgttgttttaaatgaggttattagtgtttgagatttatggcataaataaaatttaatttcaatgtaatcttatttaattatgaataaagttcaaaaaaatatatttggatcttatcatttgctcttatcatttgctttgttcacatgtttgctttcatgattatatgtttaatgttctattaaatcatgaacatataattattcacaattatagtaatgttatcatagtggaaaataattgtgattatatgctttaaacttatttcgtcttgagatttatcaattttaagatgattaaacatttagctaattgtattgcttgagttctttgagttgtttgttaccagcttacccgtcgatctaactcatacttacatcttgggaactcgatgttcaattaagtggaaatgttaattatagatatgaacatctataccttttatgttttgtctagaagtgaaattacggtttcctttgagcttgtttaaaggcgacaagtgataaagcgctcatttcgttaattacattagtttattaaaatatcatttacaagaaactaagtgtttaaaggatgaaatgcatagaggggtaaaataataattttgtcctctctcgatgtagaccatctatagaggatcattgattattgtgatcgtaacaatggataattcatgcgtatctatacatgtgtataaagcgttctatgtaatcaagagttcaactctgaatctacagtggaatcaagagaaattaataagttagaaaatttactcggtaaattttggattatttacaccacatactgaaatttttaatttttttatttttttactgtgggacagaattctttttaaaaatactgggtaagatttatactgtatactgtgttaagtttttactatggttgttttttagttgttcttattttgtgttctactgttgttttacaaaaatatagtatttttgaaaaaaattctgtgtgacagtatttttgtaaaagttaacccaaattttagtatttttgtaagttttcttaaattttagatcaatttattgagagattaaattcataggcccatggtcctaggtgataatatcaccttgatgtctcaattacctgatttatttaatcaattaaaattttaaaacttgactttgtcatattttagattttttataagttggactgaattgaaaagataagggatatgtatatttatttatttttt

SEQ ID NO: 210870 - DNA, 892 bp, Cannabis indica
ataataatattttatttaattttaaagaagcataattaaacaacgatattgacattgataattaaaaagtattctgattgaactaatataaaaacatggttgattttgtactaaaattagcaagtaataaaaagttttaaagttattagtaaataaaaaaaatattaaaaaatgtttgagaaaaaaaaagttaagttctaaagttaatcaaaatttgagcctaacagtgataatttcacacagaaaaaatgaatgcagtaaagtaagaggtatgaacacaaaggattttttacgtggtttttcagttaaaattctacatagtccacaagtcaatcttgttagatttctgatagtttctcaggacttgttttgtatcatttttttgcctcttttttgatcctactatttataatcacatagtagacagttaattataaagttgattgtaatctttacaatgtttttcccctgaaatcatagggtttgattacatatcacgtagtacaaatgcggttattatttgaaaatcacacagttgtaattttctcgcttttactgggtcaaaatgatcatgtattgaaacacgtctttaattgtaacgttttgggatgcctcgacaggaacttggttccagtgatcttgatagcgagctggagcctttttccctctctctgaggtcgataatgtatgcctcgttgcttctttgtttgaaagcttaacgcttcattgtgacaatcgcagatttatcaacagagagtttctcgaggctcatttgaatgttagcttctgactcgtcaagattgtaagtctcactgagaagatgtctggagttaactaggggaagttacaggaatggggccttcctataacgagatagacacctcgcttatta

SEQ ID NO: 210871 - DNA, 806 bp, Cannabis indica
tatggttattttttgaacacctgcaactattttttgaaaacgtccataaatatacatgaattgattgagcatatttctaagtctattgtccaacatttttatcccattaaacaccaattaaagtgctagtaacaaccatgtggtgaaaaccctaaattataaatcctaaaccctaaatgtacatgaattgattgagcattctctgtccaacttttttatcctattaaacaccaattaaagtgttggtaacaaccatgtggtgaaaagactttgatttttcatatgtgatcctcaaaacactataaatagaggtcttaggttcattttgtaagacaacaaatttctatcaagagagcattgttagaaacactttaggcttgataaattcagaaagttattttcattatttgctttccctaagtgcttgtggtaggaggaaataaacttttggacaaaagtgtaagaccttgttcaagcttggtgattcccttattatatacttgtggtgtatgtggtgttgagattgctctcacatcttctatatatatatactatttatatattgtgtttcatgttttacttattgctttgagttgtaattcttctcttcgtctttatattcttaattttatgtatatattttgtttagtgttatataacattatttaatttataattttttccttagtattatttatcataaagttataatcttcttagtttgatatttatattagagcacaccaatttccaacaagtaatgcatataatttatgtatatattgttaagaattaaatggttcata

SEQ ID NO: 210872 - DNA, 501 bp, Cannabis indica
aatatttgttgtgactaaaattaaattagtaacaatttatatttaaatattatgttcttaatcgcaagtaattttttattatgattaaagtcatatttaatcacaaaaaatttatgctgtaaactaaaatattatcactaaaaataattttttttaacaatttggagtgatcaccacaataccataattaaatgtatcaggtacctataatttttatatttaactaagcattaataccaaatatttatttactgaaaataacttataatcaaccatattaatatttcatataaaaaaaactaaataaaaaattagacaaacattaattattttcaaaaaaaaatgttataaaatataatgatatattaaaatagtgttaatatataataatattacaaataaatgtaatgatatattaaaaaagtgttaatatatattaatattaaaaaatatatataatcatcagccatgtcctcacctcttgtccgtttgcatttgatt

SEQ ID NO: 210873 - DNA, 783 bp, Cannabis indica
gggaaatcattatcgtaacaattataaataaactatgaaacaacaaaaactaacctcgtgaactataatataactctaaataaacaataaaataatttaaaaataatttattatttttactgataagtacttttgaaaataaaaaaaatttaaacagtaaaaataaaaaatttttccatttaattttttaataaattttttggtgtaatttttttctaaaattaaattgtaattggggacatatatcaaatagtaattaacttagggtgtatttggtaacacttcttaatcagtttttttatttttaaaattagaaaagtaaaaaaaaaatttcaaaaatatgttctataaaattgtttttacttttcaatcctgaccccaatcctagatttagaacacagctccgatccgagatctaaaccgaattcgacttaaataaaagtcaaaaaataaaaataaaaattatagaacacatttttaattttaattttttaaaataaaattttaaaaacacaaattttatttttattttggtaattaaaatattaaaaaataaaattattaccgaagcggctttagtttatcatatttccatatttaagtacgtttttcgaattaatcgcctagtaaatgactaaattaccctagccttcacctaacccaacgctaaaactaaaagtactacactgcgaaagaacgaagcattcgtgtgcggtagagcagactccatcttcatcgtcaatggcttctaccttttcacctctggtaatacgcctttactct

SEQ ID NO: 210874 - DNA, 727 bp, Cannabis indica
gcggttaatttcccttcttcagtcatccgtgcaacctttattgatgtaagctcagagaagttctcttggcctttgcttcacttcgaccaggtcttctaaatgcaacggaagttggcaagaagaagattattgtgcatggaggagaaagccttccaggagttaaaccttccgggtgtcaacttgaaataccattgctgagtggcttttgagagtgtggcagggaaaactctgcaacatacatctcgccgtactccttgtaggtccatttgcatttcaaaatacttaagatgtgataagggatcttccttcccagtatacattttccaggtcggcatcttgaacttgtgaggcaactctaggacattgatctttggggaaaaggggatccacgtgcttagtctaattctaggttattgttcttgtgaccgaccaagccttgaagcatattttttagttcatccaactgtgcctgcacggatggattaacttgtttagcctcttggccgaccagggtcacgtgaggatctctttgagtaggattttgagcatgagcctcgagctgaataactggtgcgacatattgcttgtctaaccctctccttctgtttagatcatatctaagatcatgagatgttcccaatctattaaatatagatacactaggtcgtctcattgacttgttggtttgattgatcagttggccggaaccgttaacttgggcagagtt

SEQ ID NO: 210875 - DNA, 673 bp, Cannabis indica
atatgaagattttcagaaaaatttgtgactgttgtggcggtctattggacgtggataaagagacagcagaagctagcttgctatcgcatctgagactccagttgaggggtgatgattttggtttcgtaccagagtctttggtcttggaacatgacggtgggaaggttgaattgaaactgttcaagcttaatgatttaaattataggtttcatggatattttggtacttgttggtatcaagattttgatcacaacaaggtgtttggggaaggtatagagactgctgtagaaggaaataatggagtaaaaggtgcggtggtagtcgagaaggccggagatggtagggacgaaggtgcggtggtagtcgagaaggccggagatggtagggacgaagatgaaacagtgaggatggcttcagcgttgagaagcacgacggaatcgagcttgctgttcaccacgaggttgaaaattggttcacgaatgaggatgaaatcaacagagaagatgaaacgatttcttcagaggaaacagaggagtcggagtcggggagctcagtagctccggtggctatggtgaatggtgctcagtcagggaagaactcaaaggtcagagatgattttggggttatcgagactgattttcttgcgaggtttaatgctgtggaggcgattggg

SEQ ID NO: 210876 - DNA, 1907 bp, Cannabis indica
ttctgaaaaaatttcaaattcatcccgtcagaaccgggggacttatctggatgcatttgaaagactgcctctttaacttcttgatccaatataggtcgtagtaaagcctcattatgctcatctcggacagtaggcacaacacaatccaacacctcctcccagctagtaggttcagtagtaaaaatatccttgtagtactcaaccatgacattctcaagcccattatctcattgtctcaaggtcccctcagagtctttcaacctagtaatgtgattatttcgttttcatgcagaagctttaaaatgaaagaacttactgttttgatcacccgcttgaagccataattgcttggatctttgccgccaaaaaacctccctttggtaaagaacagcaaaaacctccttttagcctcataaaataatctcttcccgtcctcatcacgtcgcttcttatattgctttaacaaccgattgcactgtttaatgcgaggagaaaagttgccaaacacatcctttccccaatgctgaagagcagtaccacattcttttatcttccgaacaatatcttgtcctgctaacgaagaccaattacgcctaaccacatcttcacagtcaggatgattggcccagaaattttcaaattcgaaagacctcgcctgagcaatagtctcctgaaagagaacatccagcagaagaggactatgatccgaaggagaaatctcaagattaaacaatttacaagaagagaaattatttaaccaagagttactcaccatagctctgtccaaccgggcttctatccattgagcaatgtctctacccttctcccacgtaaagggatggccacacagatccaaatcaaccagcccacattgctgaaccacctcctgaaagccgtcaataagccacgatggataaggcaagccaccgaacttctccccctgacaaagcacattgttgaaatctcccattaaacaccaaggagcggtagaatgcctatgtaaagtccgtaataaattccatgtattcttccttaaacttctagtaggttccccatagattccagtaaacctaaattccccctacccatcaagtgttataagactatctatatggttggttgaaaacgacttcaccttgacctcctcttgatacttccataacaatgctaaaccccaacttcttccttgggccgcaacaacaaaacacccctcaaagcccaaactcatacaaacccaatccatcttcacttgattatttaacgtttcacacaaaaaaataacactaggcctttgttgaaccacaagttcttttaggaactgaacattccgtggcggcccaagcccacggcagttccaagacagtattttcataatgattggcgagccccattgccaaggcccgccaaagatgagttttttgaactattatgctgtaccacctcagcactgtctctattaccctcacttactttccttttttgttatcaataacaaccaggctattatttgagctatacacaatatccttccccctattcttagaaacttctccttgattgacacatgggccatgagaaaaggagggagccataaccacacctccaccattaacgtgacttggcattgggtcaacacctacatgcacagcatccccaccgaccgaaggtcctcccccattgacggtgggtgattccatcccctcagatccagcaccaccaacctccgtcggggggctccaccccctggttctgagccatcgagaaccaatattcttgtgagatcgttggggaaaagccctcataaattcaccatatggcttcactatttgctcaattggctgatgaaacaacttatgacagaacctttccgagtgtcccaacttataccacaaatgaaacagaaagtt

SEQ ID NO: 210877 - DNA, 1336 bp, Cannabis indica
acacagtggctagaaaaaagcaatgagtgaggaattctatcatctcataagaaacaaaacatgaattcttatcaaacctttactaaactacaatgtagttgaaaacaagtggttatttaaagaaaaagacaatgttgatgggtcttttcagaggtttaaagcaaggcttatatctaaaggatttcatcaaagactatgtctaaattttggggagacatttaatcttgttcatcaaactttcaacaattagagttgtgttatttatagcagcttctaaagggttaatagtgagacaacttgacattaacagtgtatatggtacaaccataggattttttggacaaagagaaaagctagagaaatcactttatagactaaaacaagctctaagagcctgatttgagcaactcaagagtaacttgataagttggaatttgagaattcaaaagctgatactccatttttcatgttgaagactccataatttgttgtcatagctctcatctatgtagatgatattatagtcatgaggagcaacttggttgaacttgagaagttcatagaaaaattgaacaagatattctctctcaaagaatttggagatctcggttactttttcggaattaaggtataaatagacactattggaatgtatcttaggcaaggaaaatatattacagagttgctcgaaaagatgaatatgttgaatttgaagccttgtctgacatctataattgctgaaaagccattatctccaacggatggtcaagtcttggacgaaccaataacctatcaaagcattataggggcaatgcatcacctcacacatacaagacctgacatagcctttgcagtcagcaagctaaatcaattcctcaaatgcccctctacaatctactaaaatgctgctaagcgtgttttgagatacttgaaaagtactcttcatcatggtctacacattaaacaaagtgacaatctgattagtcttgttggatattcaaatatatactaactgggcatgtagatgattgaaaatcaatatgtggttactgtgtctactttggtgaaacacttattcatgatagtccaagaaacaaatatttgtgtctcggtcaagcaccgactcagaatatcaaactcttgcccaagtttttgttgaaattatatggctcgagtctctgttgcaagaaatgcagttcactccaacttcaatgccagtaatttggtgtgacaacaccaatgcgagctggacattcattttgatagaatcttgcaaaagaaagcaaatattcaatatgtaccctcttttgaccatgtaggattttactgttttaac

SEQ ID NO: 210878 - DNA, 556 bp, Cannabis indica
atagtacctaacacatactaataagggtgcaaatctcattaacttcataatttcttaagtcctacacgtggtagactaaacctaaaagcccatagtactttaattaaaaacataattctcataacttagaaaaataccaattttttttttctaatgagttaataacatattttatgcaatcactattttcacatcgagttatctagactataaaataataaccaagtattttggttattacaatctacctaccttaaaggaatttcgtcctcaaaatttacttacttgagaataactcggggtactgatactgcatgtccttttccaactcccatgttgcttctctatcagaactatcactccacaggattttgactaagggtatagtcttatttcgtaagacctctatttcttttttatcacgcgcatagggcgtgccatataactcatatcccgctgcaagttcaagttctcgtatttaaacacatttgtcggatcaggcacatacttccgtaacatagaaatatggaaagcattatgcgtttctgctaatatt

SEQ ID NO: 210879 - DNA, 535 bp, Cannabis indica
tccgatccgaggtattcatgccgtactaaacttttttattataatataaacaaaattcaattttcaactttcaacccttcccttatttttctccttcttcttttttatataattttactattttgtctgcatcatcctacaagtttctcgctcatttgtgacaaaggacacacctagtcgggtcctggtggctcagaaaattgtatttgcttgtgttttcttttggtggaattttttatatttaaaagacatgatagtgcttcttttcctttttccttcaatagtggtggatttgctcttaaagataacaaaaagaaacttcttgtcatgttatgcgtcacatgggattcacactttatgttgttgggtcccaatttctaaaccaggtttagacatcattagctgtattattataatttttttcattagcacaccacaccttgtggtgcttaatttagaccaagagggtctcatcccaatgcccaacccttctcaccactaaactaaacttagtagcttattagttcttacatga

SEQ ID NO: 210880 - DNA, 663 bp, Cannabis indica
caattgtagatgtttgtgccagttttgacgatagaaggtccaccacattggtttggtgctgaacttaatatgaagtccaaggttgcttcatttctggactcgctacacactgcaatggatgagaagtattgtgttgacgctacgaaagaaatggtaaagttacaaagtgtcattatttgatgtgaattcattgttcattgaatctaactaattgtatatgtttgcagctgtcgacgttgaaccttttgttcgatgagaataaatcaaagaatgtgagttttgtggattttggaattgatactaaagattgtgggcttcctcaacaagacaatgaccgagattgcggtgtatatgtgatgaagtacatggaggctgtggctaatgaggaagaagtagttgatcaggtatacccctgtttatttagttcagaatgtactacccaagtttcattgagattaatgttgtgtaattgaaatttaatcagtgttctactgtgttatatgatacgtactatcaacttgattagagttaattacattttatatgtttttgtttatgtatttttccacagtttcacccgattgaggcacgtttggaaatcgctgcgaggataataactaatgaactaaatgaacttcgctcaaaagtgattgaagatcgaag

SEQ ID NO: 210881 - DNA, 683 bp, Cannabis indica
atactcattgaaaaatgttccgtatatatatatatatgtaacaatatacattattactattacttgtaacaattattcattgtatttgtaacaattatttatttttgaattttttgttataattttttctttttaattcttgatgatttattacagactacttggcaatagttatgttgacaagttcttctctaatggatatattttacaacaaaattattaggttaaattttttttttgtctttgaaagattatcactggaagtatcattataatacatatgcatttagactcaatttcatttcataataatttttttcacaactttcaatcttttgccgtgtatagagtataaattattcattttgcaatctatataattatttttcaattaaggtttcattttttaaaaaatattttcggacaccttattatatttggtaagagtattttatatactttataatttgtatttttatcatgattaaaaataatttgtaaatcacaactcgagcaaattataagactaaattcatctatatatatttatataattatgttgttagagtaagtgatataacattatctcattttagtattgtcatttttttattttgtgatttttgtaagatttatctaattttatttaagtttttatcatttaataaataattactaataat

SEQ ID NO: 210882 - DNA, 768 bp, Cannabis indica
ctaggcaacaaacttttgtatatacactatgaaacttttgtgaatacttttgtaaacaggatctcggtttactataagtatattattttagtgtttataattaattaagtaaaattttaattaatcacgattttcaataaactcattgattagcaataagctgcacaattagttaaatatcacgtgaacatgcctaaactagtagggtgttacagaatcacattttagtattttagtaatatagttagacatttggaatgtcgagattagttaagattttagaattgaccaaaatacccctaagtggcaagagtgcttgttggtttgtgcaagggcaaaatggtctttttgccctaagttacttttatctcctagtggaattttgtgtaaattataatctgattatatttttaataatttagttagataataccttgtatcccattttattcaattaagaaaaataccaaaaaagtcaatatttcctcttccttctctctctttctctcaagctccgtagaagtcattaagaagctagggtttcttcagcaatttagcgctttattaacatcattgtttaggtttcaatcctaggtaagcttcctagctcatccttttgtggtttcttaagtttcaagatagcttctcttgcatgattatgttaattagggttatatggttttaggagttgtttaattttgtgttctaatgttatattatggttgtttgggttgaattagagttattttgtggcttggttttgttgtt

SEQ ID NO: 210883 - DNA, 606 bp, Cannabis indica
ataatatcaaatttcatatgtaagatgtatgacacacttaaaattcaataaaatgtatataattgagaatatattactaatgtacaatagaatttattttttatactaatgtacatttaatcataaatattaatttaattactaataatttactaattccctgttaatttttttttatgtaattatgcggtcattacatacatattttattacttcaatgaatagtatgtatctaagtaaaaaaatgactatcaattaacttaaaaatattttataatttttttttctatatatgttatttatactatagcatttcattttaataaaatacataaaatatattcaaataatatttaaatgatatcgagaaaaaaaattaatgtatgatataatataaaatttaagataaaatataaaaaaaattaattacataaaaggtataaagtgacacattatgtataaaaataacctccataaggtgtggacaacatttatacatttatgtgattttaattaccaaaatacctcttacactatcacttacacaatcagacgatagttgttgcgtgttgcacgttgttgcatcagacaaaggttgcatggtgg

SEQ ID NO: 210884 - DNA, 390 bp, Cannabis indica
agacatatctttaaaatattgattattgatatatgtatatatacatatattaggttattattaaatgtgtactgcacgttatatttttagtttttatttttgttatgggtagttttaaaattttataaattaaaagaaattaataaattttttaattttgtgttttttttttaaaaatatttaaggataaaaatttgaagaaaacatactcctaatattaaaaataacaataaaaaaattataatattataaataatatattaatatttatatatatttaaattacttaaaattaatataagagttgaattaacttaaaataaataatattaatatttatatattcaaatttatcaaaaataaattatattactatatatatttataaaa

SEQ ID NO: 210885 - DNA, 683 bp, Cannabis indica
attctaacttttaacatctattccaattataaaatatctaaattttgtaatcaattggattggatcggttcggttgggcgcattgttgagcctttagtttaacaagccattttaagtgtcttgagtgatggagcttatctcactcaacaaagcgattatcactctaattttgaaaaacaaaaagcctcaaacaatgagagattatcacctaattaacctttgtaatgtcctttataggctaatctccaagatacttgttttgcgcttcaaggatgtgctgcctttcattatacccgagacataaaatgctttcttactgaattgacttataaaagatattgttttggtagctttcgaactcattcatggtatcaagcataagaacacaggtcgaaaggaaattgcaggtttaaaattagatatgagtaaggcttttggtcatgtggaatggagttatatctcagaagtgatgcctaaaaatgagatttcatgataagtgaatcgcggtgattatgacctgtcttactactattggtctctctttccaaattaagcggggtctaacgcaaggatgtccactatcaccatatttgtttttgatatgttctaatggcttttcaagacttttgttgcaatctaagaattaggggcacctcacgggctattctcttactcgtcgtgct

SEQ ID NO: 210886 - DNA, 702 bp, Cannabis indica
ttctgtagaagaaaacaattaattgaaattattaactgctaggttacctaatagcgagaggcgcaattataataattgatttaaaataaaatagtttaattatagtacggtactcataataattaatttaaaataaaatagtttaattatgattatttaattttaaaatattttatattgtatggtggctccaccaacaacctgagtgatcccttggagctcatgaacaaactcgaaggtgtatgcagctggagaagcattcatctcgtctaagtttctcagaataattaaatggccttacatcacataatttccatcgaatagttccattcggttgccagccattctctattatgctgagaatatatcggaataaaagcaattggacttcgagataaaggtacgatagaagatgtttgttgtttcaatctcttaatttcctcctcttgttgttgaatcctagcttccatttcaacaaacttttgctctaaatctgatggactctgcagtggttttttgtgaccacctccaaaagtctcttcacaaccttgagtaatagggggatccctatctttccaatttccaccagtatcgctcgcattagtccaactacaatattcttgctaggcgtccattctacaggaaaaccctggacgttcatgagttggctaggtcaggcagccatcaaagtcgaaatctaac

SEQ ID NO: 210887 - DNA, 718 bp, Cannabis indica
gaagacaagccatgcatgtaggtatctagggttttggagcgccggcttaacgatgctctcctctcttatggacaattaaactttcatattaatattactgatttaattaataatatgtatatttatttatactttatatataaatatatatgatataacgccttcatcacttttttttcattctattttattgtaaaagtcaagtcgaataatgtataaactgttgaatttgctatacaatattatattctttaggtgatatgaacctacctatatatttcaacatttgagtaaattatatatttatatttacacatcttgatatctttttccatatatacctataaatattcaaagtcgatctatagatatagcagacatattaattacaaatgtaataatctgcaaataattaaaaatgaaaaatctgattttcatattttaatatatatctaagaattttgaaatttatccaaaattaataattatgatttatatatatatcatattaattatgaacaggtatatagtgattataataataccatgcatacatattaatgtatccagagatatacaaatttaataatattctatgtcttttatatatatgtatgtattaaatatattttgaggaagtagagatatctatataatatatattataaatatctataaatataaagtagagatacgaggaaataatgtctcactctaa

SEQ ID NO: 210888 - DNA, 547 bp, Cannabis indica
ttgtttatgttattttatttgttttgcatagtttcgtgtatgttttatttcttattttttttatgtttaaaattttcaggaacgtccaattacagttgttttgctgttgaaatttcgatagaattaagataaatttctctaaaaatgcataaatattagaagaaaagtgttagattgcagtaaaaatgcataagtatttttttatagcattttaattttaatgttaatatttaatttattattaaaaaaatatatgtaatgttgttttttagttaaaaaaaaaagtgtaagtttaatagtttaagaaaataaagtttagtattttattataactttagtatagtttaggtaatatttaattttaaattttaattttacaaagtttatttgatattgaaatattaaaaactttgaattttttgtgtttatgtgtttgcaatatggtaggttattctttacaagtttaacgtgcttatttatttataatttttttagaatgtgtaggtttatcgttaagtctttcgttggagcaatactagacgatatt

SEQ ID NO: 210889 - DNA, 883 bp, Cannabis indica
gataacaatgtgatagtccaagagatcattcactcgttcaacaggaagaaaggcaaggagggtttctttgctattaaaattgacctggtcaaagcttatgataagctgagctggcgatttattgatcatgcattagattgctatggtgttccccagaaattccgtctgtggatttctcagtgtatctctactacatcgctaaacatctgccttaatggaggtcaggttgggaggatcaatccttcttgtggccttcggcaaggtgaccccctatccccttacctcttcatttgggcagctgaaattctctctagattattccacgatgctcttcatcagggggccattaagggaattcaactaagtaggggggccggttctctctcacattttctttgcggatgatctaattctggttggtcgagctaacttacttgaggtgaatggtttctggagatgtttagagaacttctgtttgtggtcaggtcaacaggtgaataagctcaaatcatctattttctttagtaataatacccccttaagcttgcgtgaagaaattaaagaagccttgggaattgattatcctgaaggctgcatcaaatatttgggattgcccctgtttagatctaggcagaaggatgctgacttcagttttatccttgacaacctcacggcaaagcttcagggatggaaggcaaaaactttatcaaaagcaggtcgagccactctgataaagtcagtgggcttgtctttgccaatgtatgcgatgcaaacttcgaaagtctcttctcgaatggtaaacaaaatagatggtctggttagagatttttggtggggatttgagaaaggaaatcgggggcttcatctaaaggcttgggacaaa

SEQ ID NO: 210890 - DNA, 479 bp, Cannabis indica
taggaatttagatctgacaagtgcctcttaagccttctctattgatacccaaattccgaaaatacaagaaaatgaaagatagaagggcaaattcgaggattccttaagcctcccgatgaattctaaagacacccctactaacattttctttccatattaatacaccctcagccccctagaacattcctaataatttcctattcatgtcctatcaagtgatttaaggataagtagaacgagtacaaaatattttagccaagactaaagccattttccgtagtagaacacatacgtgaatgaaatttggcaatcaacaaaaaatgagacaggaaatagagaccattaacaattaactagtttactctatgtgcaaacctgtgaaatggctgagcctatgtcgctctctacagaatttggtacatgtttttctggttctttccgcatgacctctaataagtttagcctgaaaacacacccat

SEQ ID NO: 210891 - DNA, 1089 bp, Cannabis indica
aaaaacaaaaaataacatggatagagatatcaaagattacctgaagggggtttgatctgatcaactgggttttcctgctgatttatcttcttcttcttggtcttagctttactgtttgattttccagagcagggaatccaacccatcttttatttttatttgttaatttattatatatttttttctctttcttatagaataagaagaaggaagatacaaaaggaaagagtaatctttcttatgggaaagataaaagaaagaatcaaagtgtgaaactcttcaaccgaaccaatagcagacccaacacgagccagaccagtgatagagagttgttgttgtggcacttgtcttggaaaatttttgcctcttctctattttttattttttattttttattttttgttttttaattaaatattattattattatttagagtaacttctaacgtttttatatttttttaaaattattcattactttcacttgaatgatgaaattctttcctttcaaaatataaaataaaaagagagaatgattaaattcctttaattcaaatgtttgatgttatgttaccccaaaaaattgcattattactgatttagatcacttgggggttaatgattttagtaaaaaaaaaaaaggttatactgttaccatattatattgtctaatttttctttttttaatatttgatggaatcatttattctgttttgtgtaggataaatacataaataatgtgtattttagtaattattttaacttaaaaactatttatcaaagaattatgtggagaattttcacaggcatacactacatactaatttttcagtaatggtagaagaggggaaaaaaagaaaatagtgaattgctttttaaagggaaaagaaacggcatcgttttgaataacataaatgggctaatgattgtacaatgggcctcccataaattatgagctggatattaccattaatggcccacaatacatgcgtgttaaatggatggctaggatcatttggaagggcctaaggtgtctcccaaatctaaccatagattttctctctgtttataaaatatgtatatatatat

SEQ ID NO: 210892 - DNA, 805 bp, Cannabis indica
tgaccaagtaagtgaaaaaacaagagactcaacaaaatatgtatcaggtgcacagaggatgtgacaaaacatatcaataaatcataatcctccccctaacaagtaggagcgagtgaagacgaaaaataaggtgtattttccacagaagttacatcgataaaaacaagatatttgttaagattgggacaataacacataccctttttgaagacaagaataactagaaattcacacttcaaacttgggatctaatttaattacctgtggacaaacatcacgaacaaagcaagtggtactaaaaattcttggctcaataggaaataatggcttattgggaaaaagaattttataaaagattttaccatgaaaaacagaagatagcatgtggttaatcaaaaacatgcagtagaaactgcatcagcccaaaatgatttaggaacctgcgtttgaaatacgagagctctagctgtttcaaggagatgtctattttttcgttttgttacactattttgagatggagtatcaacacaagtttcatggagcatgccgttttgagccatataagattaaaatacactagattgtactcttttgcattatcacttctcaaagtatgaatagacacattaaattgattttgaatttcagcacaaatggcataaaaaatagagaacaattcagaacgattcttcaccagaaacaagcaagtgacacgagaataaccatccacaaaagtaacaaaataacgaaaattaggtttagacaaaatgggagaaggacctcaaacattagaatggactaattc

SEQ ID NO: 210893 - DNA, 682 bp, Cannabis indica
ggcttcttctctcgaatccaaattcactcctcagccgaatactcaagccaagatacttcagatcatcttcattcttggatgcaaatttaggatcctatccttccttaacatggagaggtattgtttggggtaaggaattacttgctaaaggacttcgatggaaagttggcaatggagaggatattctttgtgcgtctgcccctggcttccaggtcatacatcctttaaaccattgcaatttcgtggaaataatgcagcaatgaaagtatcagaccttattttgaattgtcggcaatggaactatggtctgctgaacacattatttctgccttcggatgttgcattgattcaaagtattcctttaacttttgttgagcatcacgacactatgatatggcaccatgaatctactggggtttattcagtaaaatcagggtatctactagccacaaaacttgaagaacaacagcctatgtcaagtgggaatcaagctcagcaatggtggaaaaaaatttgggggttaaaactgccttctaagatccgtatctttttgtggagggccattcatgattgcctaccagtggcagacatccttcatactcgacatatcgcggactcaagtcaatgtactctttgcaacagagctaatgaaacgattttccatgctcttttttactgtaaa

SEQ ID NO: 210894 - DNA, 742 bp, Cannabis indica
tcaaataaaattatatattcatatcattatatatttaaatttatatagtaaaaaaaacttcaaaacttttaagtctgcagttttgaagaaatgtagcaccgatccacttaagttatgtttgataaatctctaaatgatacatatataattaatgctaataaatctctttactaaaattttactatataaaattcattataataatatatgaacttatatagattgtatcatagtaagatttgatatatgaacaaggacatgtaaaatattgattctaagccagtaaaaaaaaaaacaatcatgcaaatatgaataacttgtttatattttaattatatatacttttaatataatgattaatatttttttatctattgttttacagttcaagttagacgctccctatagtaacgaggagatcaatgccgtacgggatgagtgggccaaatttgtgaagcctctgattatagattaagtacttaaggttactacacttttgttataatacatgagtaacatgttttataattattgttatcttttgcatatgttattagtttatatttagtttacgataaacatgaaatttaagttttagaatcgattttattaacaattttggtattgtgtgattagttaatagaatcgattactaattttatgtaagttttaaaaatattattttatatttttttgtattatgtatttaataatacatagagttattataaaatttgataat

SEQ ID NO: 210895 - DNA, 1325 bp, Cannabis indica
ccttgtcatggttcgggtccaggcctgtgtcccgaatccaaacaccgactacgggttttatctcagccctgggtccatatctggatcccaatctcgggttcttgtctggttccatttctggtgccgagtcacgacttgggtcctaggttcaagttcgggtctttgtcgggaactaggtcgcggtcctagttctgtttcccaggtccctatcctgattctaggtccaggtcccggttatcgtgtgggtttgggtccttctctaggttcgcgttcgagtcctagtctcgtttcaggtttaggtctctgtctgggttttgatctgggttcgggattgggtttaggtgcttgtcttggtcctagtcctagttcggttctagttccatttgcgattctgagttcgaatttgggtttcagttcgggtcagagttcgagtccttttctgagtttgggttcgggttaggatttcagtgaatgtccagattaggctccgagtatgggctcgcgtcctgggtcttggtctaggttgggtccgagtcccaagttccattcccgatctaagtctggattcagttcttggtctaagtccttggttctgatccttgtctgggttcaagtttgggtcttggtctgtgtctagctttgggtctgattctaggtgtggtttgagctccgctctgagtctgtgtccgggtttgtgtcgaggtctggaccccgatctgagtctaggttcggttccaagtccaagtttgggtcccgagtgcgggtccaagttttcgtctaggtcaggatctcggtcctgatctaggtccagcatttcgatcccattctgtgtcttggtcgagtccagcttcgttccaggccccgttacccgaatcccgagtcaagatctggatcactgtcacgggtttcggtctggttcttgttcaggtcccaagtcccatttctgtgtttggggtcgggaatgagactcgggtgcgattctaggtcccgacaatggttctatgtccttagtctggttccatgtttgggtctgagttcaagttcgggtttgggtcaagagttcaggtttgggttgggatccgggtccggctcccaattcgggtatatgtcagattaggagtccggatcctaatccggttacagttctaaatctaggtcaaatttgagttatgattcaaagtccaagtcctagttccagtcccggtcaactttcgatttaggttccaattttgggtcacagggtactaggttcaggtccaagtgtgggttcgggtccttgtcatggttcgggtccaggcctgtgtcccgaatccaaacaccgacta

SEQ ID NO: 210896 - DNA, 675 bp, Cannabis indica
aactgtgtaccctccagaattgttgtaatgccatattaatctatctaaaggttagaaagatttgggaatgatcaaaatctttctagcctcgtcagacaaaaaaagctcctcaataagaacaatattccaatcaccaatggaaaacttaagatcactgaccctcgaaataagaggatggcctttgaaggagtatgagagtgaagccgtaagtttaggaatccatacttgagaacgaatatccatagaatgaccttccctaataagccaccacccaccctccacaaacagttgcctaccccaaggaatactcttccaaatgtaagaccttttgtaagtttcatccacttgtaaaaactcaccataagaaaagtacaaacctttcatcaccatagcaacgagagacccaggaacataatgaagtctctaagcttgtttggcccggagagctttattaaagatgaaaaaatcccaaaaaattatatccccatccatcttgtgccaacataatctctcccaagtacaccaatgcatctttctataatcatcatctcctccccaccaaaatcgagcacaaagtcagtgaagctcatcaattaacttttcttatgtcttcgcattagctataaagagctggaagtggaaacggactgcgaaaaggtggctttgctccttgaa

SEQ ID NO: 210897 - DNA, 975 bp, Cannabis indica
tctctctctctctctcttattcagcctaagaagaactagcaaaaactaagccaatcattcatcaaattttagggaatttagtttgaaatcacggggttttagtggtacaatatgaggtaaggcctagaacctttttctttttagttttgaaggtttttctttgattttaagcatacatttgttgagaagtggttctatttgaaccctaggagttgtgggatgttttctatggttgatttaagttattttaagtttgtttgtgtttaatttaagggttgattgtagttattttgagttataactacttttattgcttggtttatatttattaggccctaattacgtgttctagagaatatcttgaagtttggtgttgttttaaggaagcaatgagatttggtgtgtttctgaagcagaaaacagcagaccattttctcagaattggtctaccatttttgttggtatgacctagaaaaacagtttgctatttttagaaaaatgatctgccatttttgaggcagtttttccaaagtcttgttttttttttgcgtttttctaatatttagggttttgccatgctacttatcgataggaaaacttttagttttgagtttaggtcctcaaaaagggttttagcaagttgtttacttattttgcatgattatgacatagggcttccgttcaacgcataaatttccattcaggttgaccgacacatttgaatctgaaaacaaggtaagattattataaaagtttatacgtatatgtgttatatgcatgctatattatgtgatttatatactaccaacactagtacggttgcagtacagaatgtattggtacaatatatgatgttaaaatgggtatatgacacagtgttaccaatgctagtacgggatgagtacatagtgcatgtggtacaacactcagtggtactcgaggtgcgattcagctctaccaacactagtatgggac

SEQ ID NO: 210898 - DNA, 789 bp, Cannabis indica
ttgggctttcataatcactggatatcgttagtgatggaatctgttcgttcggtaaagtattggattcaatctagtgggcatacggtgggacctattgctcctactcggggtattagacagggagatcctctctctccctatctatttattctgtgtgcggaaggcttgtctgctttgatccgaaagtttgaagctagaggttggattagagggtgccgtgttgcaaggggagctccttcaatctctcacatgttctttgctgatgatagttatctctattgtcgtgctcaggacaatgaagctcagcgtatcgtggaacttctaaactgttttgaaagagcatcgggtcaaaaggtaaatttactaaagtcttccatttttttcagcaaaaacacggaggttttggtgaagaataacatatgtacaatccttggcataccggaagctagtgagcagagtacgtacttgggtttgccaaacactttgagtaggaacaagaactctattctcggctttttaaaggagaagttgcagaagcgtattgagggttgggataacaaacttctctctcgtgctggaaaagagatcctaatcaagtctgttcttcaatctctccctagctatgcaatgaatgttttcttgttgactaaaggaatgtgtcaagaaatggagcagttaatgtgtaacttctggtggcgtacttcgaataaaaaggttaactgcatacattggatgagttgggatcgtttgtgcatcccaaaggatcgggggggacttggttttcgcaat

SEQ ID NO: 210899 - DNA, 695 bp, Cannabis indica
aaaggtggcttaacccatcgttctggagataagcatgtcgacccctttgccataatattatgtcttaacattgactgtattcattaaataacttaaagatttgtgagaccacaacatcagaagggttggctttgcgaccatggacaatttggtttctttcaccccaaatataccaagccgcaacaaggaacaattcgtaatcatatctagatagtatctccgaagccttcagaactatttgtttgaatgagatatccattgagagattattcaacagagtaacacgtaattccttccaaattttcttaaaaccacgacataggaacacaacatgactgttcgaatccacactaaaaccacatattggacaattagtatgatcaaccactttccttttttgaagccccacgtacgtagggagagcatcatgaaacccacgccaagcaaagattaaaactttcttaggcaaagaagttttccaaaactctttccaccatactgagaaccaactcttagaaggggaaggatcaaattgagccaactgcgatgccacaaagtatccacttttcactgaataagtcccgtcagctgtatagtgccacatccaagaatccgctttcggaaatttactaattggtaaagaacaaatactttgttgatcaaccacattacatttgcatattccaaccactcat

SEQ ID NO: 210900 - DNA, 802 bp, Cannabis indica
acgtatacgttgattgagttggagctatattaaccattaattattaagtcaaacatttataataatgttagaaaatgatggaaaaacacttgaaataattatatatttgggcactcacatgtttctaaaatgaaaaagtttttaaaatatttaatgaaacaaattactaaaaacatactacgtacatagataattatgctttaaattaattatgtttttattttaaagttcttttaaaatttattattcgtgctatatatttataaaatattatttattgttcaaaatatatattttattaattattttatatttaagtctttttatacatgggtatatatgtatatattaattttgatttggttataataaaatttacaaattattataagtatgtatatacatatttttaattatttttaaaataaaaaattatcgtgaaattaaaatttaaatatatatattttatatagatgtaattttaattttaaatatatataattaaattaaaattgtttatataaaaatttttataatttttttaaaaatatatatatataataatattataaaattaataaaaaaaattctgtttggtaattgagatattatattaaaattaatataaaaaattaaaaagtcttattaaactaaaaattctaaaaacatcatacaattattaatataactccagccaaatttagccagcggtttgagcgtccatgcatgtggtttctgtgtattaattctcgatagactacatatacattaatatcctactcattacttctcttactcatca

SEQ ID NO: 210901 - DNA, 563 bp, Cannabis indica
aaaaatataaaaatcaattatcatttaacaaaactaaaattctgtaaatttatcactgtacatctattaaatgtgaattcataatcttttttggcataataataaataattatttaaaaaaaattaggggaattaccccatatactatttttttattttttcttttcaaatttacagtttgggtttctaaagtggttgcagcgctagttgcaataggagtttctatacgattttttgttgcaatttaggttgcaacactagttgcaatagggatttctgtgtaaaatttcaaaaaaaaaaagatatataaaaaaaaacctatttttaaaagtgtaaaaataaaaaaatgccaaaaaaattaataattaatatttaaatatgttaattattttatgtactagacaataaacatatctacccttctaagtttgtgctattgtgattatgattactgtgtttataaatacaagttaagtaagttgtatttttaataatatttatttgatactttatattttaaaatcatacaaatatatttgttactaaagtcaaaaaaaaaaaaa

SEQ ID NO: 210902 - DNA, 753 bp, Cannabis indica
tcatctcaatcaaaaggtacaatctttctttctttttcagcttttttgtgattgattctatataattgtaaagatgaaaagaaaagaaaaaggtttgaccctttttgttgcagagaataagaagcattattcaaaagccaattgagtattttcagctcaaaaaatctagtttgcctctacaagttgcagcaattttggccactgtaagccacgaatcatataatatatatttgatacgaattttgaattttgataggtactaaattatgaactttttatgatgttaaaaaatttatccgaaaagttgagatagttggatttaaagacttttgtctgttcaattttactaatttgacatatattaaattgtgacatctgactattttgttagtgatattggacggaaattttgaatccaacaatctcaataagtttgtgaaatttttaacaactttcagagacacaatttaatacataacaatttgtaatatgtatagtttatgggaattattttagcaggtcaaacttttatatgtactaaattatactttcgaactttttaagacgttaaaaatcttttgaattattgaaatagattgattcaaagactttggtccaatacaattttactaatatgttgattgttcatatatcaaattgtaccctttatatgttctgttagtaatattgaacgaaagtcaataatttggagaaatttgtaacgatgttcgatgttcagagacacaatttgtt

SEQ ID NO: 210903 - DNA, 678 bp, Cannabis indica
aacaatctcataaaaattataatgcaactataagataataaaaaaaaaagactaattaggatttttgcctttcgaattttgatatgtatcaaaaatcataccccctcaatttttaaagtcgttaaaaataccccctaaactgttgagattattgcatttaaagacttttgtctaattttagtaaataagtccaacatggatgaaagtttagggagcatgatttagtacatcaaagttcgagagacattattgatattggggagcatggtttagtacaaaaacaatcactgaaatagtaaaattgaataaaaataagttagacaaaagttcttaaatctaacaatctcaatagtttaggggaaatttttaaatgacagaaaagttcaagagcatactttagtacatgttaaaatttaggaggcaaaaattctaattagcctaaaaaaaggctaattaataattttttcccccgaactttgacatgtactaaatcatgccccctgaatattttttggctgtttaaaatttcccctgaactattgagattgttagatttaaggacttttgtctaattttgtaaaaaaaattctaacatggatgaaagttcaggggacatgatttaatacatatcaaagtttgaggggcatgatttagtagatatcaaagtctagggagcga

SEQ ID NO: 210904 - DNA, 530 bp, Cannabis indica
caatcggagatggagagctcggttgaccttgggagatggtaattagggtcactctttcttcagccgattcacagaagcaattgagaagtgttgaaagtttttaggtcattatctatttgggaaaaggttaggtttttctcttaattttgctttattttttatttactttggaaatgttttgaagcataattttgagtcagatttccttttgaatttgtaatttaatctgcctgttttgttgtcctcttttgattaatctgatatcctgaatttggttcaagagtcttttctctgttaaaatgttttggatgctgttttaattatggatgttttgattcttcgctgggatcccagaatttgctttcgtttttgtttcagtttttttgaagtatgcttaggtagttccaaattatagaattaaatctcagttttgttgttggttttcttgagtagttttattgctactcttaatatccttattccagtatttgtttttaccaatctatgtagttttgatcttatggtgattt

SEQ ID NO: 210905 - DNA, 697 bp, Cannabis indica
atcaaaacacaacttaaatattggtagagccttatcattttaatttcatttatctttacctcattggagttaacttatttataaaattgtttaccttataaatcttactccgtctaaattacttaacaaaaagacttcttttgagatcctctataataaagctcccacttatgaccacctcaaagtttttggttgtcttgcttttgattcaacattggaaaccaaacgacacaaactctctccaagatctcgcccttatatctttatcggttatcctttgggtatgaaaacttatactcttttaaatattgaaactcaagagatcattcaatccataagatgtttatttctatgaagatatttttccacttttggaaacaaactctaaaacctcgataaatgaactattctcacattctttaccgccttttacacgacagtcacatactccttccaaggaaaattccccaattcccaacactgatgaaacttcatcttcttgtttgtcaacaacacaactaaccctattcttgatgaagcaccatccacacccaggaacatcccgactatttctccaattacttcaaaaataggatgaacattatccaaatctaaatgtctttctgattacatttgcaatactactgttgtttcttctactgctaaccctatttataaatatttgtcttataataag

SEQ ID NO: 210906 - DNA, 601 bp, Cannabis indica
aacttaccactccaataagatcacctacaactcttggtgcaattccaagaccggtgcaaattccaccagctgatgggctagaagaagtaacaaaagggtatgttccaaagtcgatatcgagcatggttgcttgaccaccttcgaccaaaatcttcttcttctctaagattgcttcattcattacatgcacagaatcaacaataaagggttccaacctctcagcaaacctcttgtatttctcaacctcttgtttgagcatttctggactgtatttaaaatctcgaaatcttgatgcagcatctgataacaaaacatcaagtttctgagggaaagtatccatgtgcctcaagtcacctactctaatgccatttcgaataactttgctcgagtaacaaggtccaatccctctccttgttgttccaataaaagacttggcaagctcagcttctctaagcccatcaacctcttgatggaaatcaaatagcaggtgggcacgatcagaaaccaatatccttccatcgcaggagactccattcgattcaagtccatcaatctctttgaaaaacccaggaagatggatcacaactccatttccaataac

SEQ ID NO: 210907 - DNA, 506 bp, Cannabis indica
ttggagaacataactctggagaagtctcctcaagcattgagatcaagaacactccaagtggacttgcctattaccggtgaaagaaggtgaacaactataaaattcctgtgttcgtctttcatgaatttacttttgcaaaccagtttactttgattaactatttcttgtgttcatcttactcgtgttacgatcttcttagatccgttgatgaaaaactacatcaatagaagggatgagaaaaaataatatgctttgagaagcttcacatgttctgataccataagcaaatgagagaaaataattttttatttctgatgatgtattttaatatatacaaaggatatatataatacaatgtgaacacctagtaatactagattaataaaaaaacattaaatgtaaatttacaactaatttacagctagcttgatttcctatattatcaacttgaaggaggaataaaagtttgaagatgatgctcacccctaaagatgagggaagagtag

SEQ ID NO: 210908 - DNA, 718 bp, Cannabis indica
cctaatggtttagaggtcccacgtgtcgggcttagtggtggtcttttgttgctctggacacatgatgtggatgtaaccttgctttcctataatataagtcattttcactgttatcttaagtttcctaattttactgagtttacttttactgctttctacggtgcaccacacgctcaaaataaattgcactcctggcatttaatagatcgactaggttctaactctcggctccatccttggctcattatgggcgatttcaatgattacctgtctctttcaggcaaaattgggggtaatatgtctcgagctccatccacgcaatttcaatcattcatagacaatcatgaacttcaccctctcacgtcgttaggtaatctcttcacttggactaatcgcctaaagcaaccaaatcacactgaggaacggcttgactggtgcctctccaatgatgcttgggatgccatctttccggcttcccgtctaaatcatggcaatttttttggttctgaccatcgccctcttattctcaccttgcatcatacgagcgatcatcgcaacccttccccccgtttcatttttgataagctttggatgtctgaacctggattcgaggattgcttgcgcgatgcttggactcagaccacttcaaattctcactccaatcctttaattggtctcaatgaaagactaacaaattgttcctctcgactcaaacatt

SEQ ID NO: 210909 - DNA, 740 bp, Cannabis indica
tgattcgaaagaggaagaaaaaggaataaggaaggtgttttcttttctctaggtttttctaccactctctctttctttctctaatatctattaaaatcaataatattaataaaataaacccccatattcagcatataatccccacaaaagacaaatgaaaggtagagggttttttaacaaaagacccatttacccctaaataactaaattatttaaaactttctaagggcaatttagtcacatactaaaccccaaaaattctaacacctctaactataataccccgataatattctaaacgaataaaataagactctctaaaggcccaacgtcgttttccaccgcttccgaacacaatcacagaaattgagtaattacataaaatagcataataacatatatgataataaatatatttccaaaatatacatttcataattattaatttaatcttatacataaaccctaattatttaatatttcaaagcattaatcatatgcggtctttacagtaaacacccctactgttttgaagacaagaatatgtggtattttaggaatggaacttgcaaatgagaatagcacttatttgggtcttccctgcaccatgggaaggaacaaagatgctatcttaggattccttaaggataaaatgcaaaaacgtattcaaagttgggagggtcgtctcttatctaaggctgggcatgaaattctgccaaaaactattgcccaaagctctt

SEQ ID NO: 210910 - DNA, 1069 bp, Cannabis indica
attaatatcaaaccatttcaataggtttttatatgaaaataataaatattatattttaatttctttttattaactcaaacaaaatttaatataccaattaatttcatgagttactaaaaaatatattttaaaataaaatattataattttttttaaaaaaatgtaaacaaaacgtaacctaaatttataattatgaaaaaattaatacacaaattaatattatagattagtctactttttttgttatttttacatcaaaggtacagtaaatgatataattacaataaattcatttaatatatatcattaagtaatcaaattgtgtaacgcccgtattttataataataatacacggagtctaaatttttttttttaaaattttatatattaataaccataaagatcgggatcccaggtatcaaaatttaggttaaaagtactttactattacatatatatatatatttttttttaaaaacttttgcggacatgcattttcaaaatacagaattcaaaatattaaaaaccgaaaccctccgggttgcactgccgcgatatgtacaatcatgtcgagtcccgcctcactgttcctccagctttgcctttcctttacctacacaaggtagcaaactgatgagtcaacagactcagtaagatatgcaagaaaacacgaaagtaacacgttgccagctttatgatcaagctgccctgagcttaacaacgaagctccccaaatggttaagaacgttcttaagggtagtacgactactgtaccatatgcactaaagtaccaactttgtacttgtgttggtagagtcctaactgtactcccgagaatttactaagtgttgtaccacgatcacgacgtaccctgggtactcgtgatggtaacaccgtaattatattaacatccaaagcaagcataaacattcatatatatattcttacactatcttacctcgttccgtgctcaagtgtgccgatcagcctgagtggaagtgcagctcgacgtataacagggccctaaaccattatgttcaaaaaccgatgagagactcgctaaaacac

SEQ ID NO: 210911 - DNA, 1071 bp, Cannabis indica
gacgagggacgggtaaggacgaaggtacgaatcgtgggtcgaatcggttcgggtcgggtaggtccttgatcgggacccggagggtgccaaccaagggtttgggggtctcggagggtttggaatggaagatttcaagggtgaggaaggaatcgtggagtgaggcggtgagtgggagagtgaagcgttcgttccagacaggttgggttgaaccagaatcgtcggatttggtggcgaggcgacgatcaggatcgacccagaaaacggcgtagggtttgagatcgccgccgtttttccaattgacatttttgagatgcttggcggagacgattgtgagctcaagatcgaggggtttggccggaggtgggcgagaagaagccatttgcgtatctgcgatttgtttgcgctaacgtgcgccggtaccgattttggggtgagagtaggttatgagagaaagaggacaagtttggagaaggaaatcaggaaagtatatttggtaggaaatttatatatagtttaggagtagtgatatgttaacacataattaatggataaattgggccataaaatacctaatgttataatttttttttttagatatgttagtatgactttcgttaattcataaatatggatacaaagaaagttcagatgcaatatatttaattttttattttaaaacttaatattttatatcaaaaactaaatgttacatgcttcaacaaaaaaaaaaactcagttcttataacaatattcgtatggtattagcacttcaactcgattactatgttccatatactgcactaattcactcaacatttagttttttatattaaaaatattaaatttttaaaataaaataaatgaatataatgcatcttggccctccacgttaagggtcttcatcaaactgctcgaaccgctcaaactgtccgcaccgcaccacattgcgaaataaatgcgatttaaaattctttgtggtgcggtcgcagtttgaatttttcctaaactgcacggtgtggtgcggtttgcatttttgaattaataataggcagttcaaaccgcaccgcactg

SEQ ID NO: 210912 - DNA, 687 bp, Cannabis indica
cattgtttcatactttgtaagcttagcagccacaaccactattggggtggtcgttattaagaataaaagacttacaataatacttatctttcgagattctacgacgttaaattgttaatgaatgaacatctattaaggataaatctcactaaaccaagaactatgtagaaccaacaatggagatcaaatgtgcttttgaataaagctcattatttaaaataatgtatttttagttaatcattaattttaatctatatattttaattatgaaaattacttaatttaagttggtctgaaagttaattttgaactttaatttaattcgaaaatctatatacatataatataatttctaaattaattaaaatataataaaataaatactagaaaatatcgaatttaagttgttctaaaatgaaaaaaaattcaacttaaataattttcaaaatttaattaaataacaaattaagtatcttgaactaatcaccataattttaaaaaaatattctaatttaagttgacctaaatataacaaattttcaacttaaatatatttttaaagaacattttaataactaatttcttagaaaaatctacttaattattaatttttttttaaaaaaaataattctaatttcagttgatccaatatcaatttgaaaagtttaattttcaacttaaatatat

SEQ ID NO: 210913 - DNA, 534 bp, Cannabis indica
taaataataataataacaataataataataataataataataatatatgttgtaactactaagaaatacactatatataaaaagtcaacgagatgaagcatcttcatgtctatacggcattctaagggtcatagcaaaaacgagcttaattccaattagtttagggaaaaagtcctcctaaaatttgtgttaattaaagaccatttttcgtaccattttggaccacatacttcagtgcaatattgtatatatatcgtgattcgtgaagtatataaacaattagacaaaataaagtcaccaaatatttaattttgtccagaaattttgggagtgcaacacatacatattcaatttgcttgacttcgtaaaaaccatattattttgccgtattcattgactacccagaatgatctagagtttaaatggtttatgttttattattatttataatattttaaaaatattttattgtcttttgttgtcttagatataattttactacacttagaatttctatccaagaatacacttggg

SEQ ID NO: 210914 - DNA, 522 bp, Cannabis indica
taatagtgacttaagaaattaataatattatagttaattattaggaaaaaaaatattagcaaaatttgtaagtaaaatgatttttttttaaataaatacgtatataaaaataatttaaattaatttttttaaaaaaataataatagttcaaataaaaaattaataaattttaattattattttattttttaaataaatgtataattaaatattattatgatatgtataatgtttaaattgtatacatgtagtcttatcgtaagagtatacactttacatattaataactacatgatctaaattcaatggtcaaaaaaactttcctacgggtaggaaacttatgctaagtcctaccatagtcttgccctatatatataatataatataatatttcactgtaaagctcatgtcaatgtcaacttaaataattgaactatatttttacaagcagcactattatttggtaagaacgctcaaagtttttaatgttactatgcagttactctgatgactaacagttat

SEQ ID NO: 210915 - DNA, 619 bp, Cannabis indica
caaggccgggtgagtagaggttagttttggattatcaacattcgacagccaagaatcaagaagaacactcactgaagacccattaccaatttgacgtctaaccccttcacgaacaacatcatgagcttcaagaatactacgccagacaaaacttgggttgcctcctagttctgccgagaggaagtctccattcttgtagtatctcgctttgaaaattcttcccaccaaagaatgtggctgacacaagagacgcatatatctttatatattataagtgagttatttaatgggaatttatggtttaatatattttttttattctgttaaataacaataaaccctaaaatataaattagaccctcaaagccctaactcaattccaatatgaatttctcttccgccatctcgatgaaattttcgttgaagaaaatcagtattgtttctatcgttccagatacctcagtttgaggattttgtcacttccttcttgctatcatctcttattaaaagtattacaaaaaatgctaattaagattttttttttctccgaattttgacatgtaccaaatcatgcccctgaaattgtttggtcgttgaaaattccccatgaattattgag

SEQ ID NO: 210916 - DNA, 518 bp, Cannabis indica
tgaaacatgtatgcttaacattataaatcataagagctcatgcaatgtttaattttcattgcttaaagggtaatgagtctttgcaaattaaatacatcttagtgtaatcacacagagccacatcactcaatcaaggcctgatattactttagtatcaaatatgaagtgtacatcctcaactcctgttttatatgattgtatgacatacataaattaaatgccaatcaaagttggaatatattacaagatgtaaaacttaataaggattgttacaatttacataattattttttcttaaaaaatatttctgtattcaactttaacattaacagtaaagttaatggtcaaatcctcttagcttcattgtctacctatgtttatcatctatgaaaactctgtataaatttatatatatatataaaaatcatgaacctcatttataattaaaattaaactaatatattttcactcacatgtctcaaagctattaatatttgaacttatcgtctgtgaaaata

SEQ ID NO: 210917 - DNA, 538 bp, Cannabis indica
ttttttttttttttgtgttatatagttatctaattaaaaatacattaatttttcttttttaacgaaatcatgcaatttcgtttttttatgaaacacaaccaaaccatgcagtaaggaacgatttagattaaccgagccacctaaaacggtcttttggtttatgatgtataatggtttggatagttgtggttcaaatttaaattgtgatttgccggtttagatgacactactacaaatctaagctttagaggcaatttttaaggcctcttagcgtcagttttggcaaaagttgctatcgacgctgatcaaggcaatcttataggatctaacataatcgacaccgtagtgtacactatgacatcgattttttaaaaataactgatgtcatatgtatactataaaattgattaatagtatataactgacgccatagtgtatataaaatcaacaacaaatgctaaaaaaccgatgccatatcattcaaaattaatttaagttttctaatttaagacctattattaaattcaaaagtctaatt

SEQ ID NO: 210918 - DNA, 727 bp, Cannabis indica
taaagatcccaacctcacttgaagcaacttagcagcagccactgaaaacccacctcgaattcccccggcccacaaagcccacactatcccttccgatcccgaataacacctctcagcctgacactcacgactagcaactaccgaggcaacgaaccaccgatggcggccttcatcgctccccaccttatactccaagaattaatacttttgctgacactattttgtgtcagcaaaagtcttctgtttgcactgggaaagctttgtcaacacaatttggtgctggtaatacctctttggctataattaatggtgttacttgatgtaattcttttgtttaatttaatgagaatacttctcctttcaaaaaaaaaaaaaaaaatatatttgaaagatataataaaaaaaaaaaagtaacttactccatctttaaaattaattacttctataaataagtattataaagacagatctacacatatgggagctttgcccccttaaactatatttttttaattttttaaattttttttgttcaattgtatttttgttaattttcaatgaaaaattaataaattgtacccccttaattttatttttttactactttataaagttcaacctgtgcccctgattacaaacatacaactacaagtttcatttaataatactaataattatttaaataaagattataatgagtatcatgattattcatcatcaatatcgt

SEQ ID NO: 210919 - DNA, 758 bp, Cannabis indica
tctattagagaacccagccaaccgaaaaaccaaacctgtgccagaagatctttgtcccaacctctttctggtatcgaggaatttcttgagggtgggaaagagatctcggctttaggaaatgggatcttttgatgatgaggagagtgaggtctgtactgatatcaaggctctctacatgtagctggtctttctaaagctatgtgtagtcagtctttctacgagctacatacagacgatctttctctctcatcctttgtttaggaagataatttaatggtttgcccccagtggcattttcataaagacaagtttgtaaccagttttagattttttcttatcttaaatggcttgtactattttcatttgaacttaatacaattgtgtttgcttgcatttttattcacaatgtaaacaactatattttgatcaaatgtacaatacttttgggtttttccattgctcataatcttcctgtttaagtagttagtaatctaccaaacttttttattttcgagcagttgttaattctgcctcgctatagcagttacaatctgccttaagaaaacttaaatatactttaatggttttatcacattgtatatttttaatttgctcgtatgaatagttatattatctatccatgttctaggctcaagtacttttatcaaggcgcgtgatgcctcgttttgtactttcctagctcgcgagaaccgttattattcagttttatacgctagctataacttttgatttttctt

SEQ ID NO: 210920 - DNA, 996 bp, Cannabis indica
aaccttgccttataattttcttaaataaaatctgcccggcagtgtggtttccaaacaatccatcatgcacttcagacaaaagtcatacagcttcttcttgggtaacacatctgagaaatcgcatggagaacccttgtctgtacataattccctctactatgatgtaacgtgtagccttcgttctcattttttgagcttcatttcgaatatctaggagttccacagtgttgatgtaggtggctattggcgtcatccagtttggggaagcatcaatcatttcgatctcttccgtgccagtgatgctaggttcctcgaagaactggatagaaaccaaattcgctctatcacttacattactactcgtaagccgagctaatgcgtcagtagtcgtgttttcttcccttggaatttctctagagcgtagcttttgaactgtggaagcagatcgtgtattttgctcaaatatgctatcatcttttctgcccaagcctcgtattctccagatacgtaatttaccaccagctgtgaatcactacagatttcaatatgttcggctttcatctcccgtgctagttttagaccggtgatcaaagtatcatattcggcattgttattggatgctttaaatccatacttgactgcagcatgcaggtgttggcccccaggtgtgacaagggcaattcctgcaatggatagttgatctgtagccgacctgtccacatgtaatttccaagtcgacttgtcttcactgttacttggctgaggtatttgtactggctcggggttgccttccgatatgctttcttccttgcctgtgcattctactacaaagtctgctaaggcctggcatttgattgctgtttagggtgaaaaagtaatttcttaatgacccagttctaccgtccacttctgtaactatccagaggcgtccatcttttgtaatatttggcggaacggttgatctatgtacactcaaacaggatgagcttgaaaata

SEQ ID NO: 210921 - DNA, 582 bp, Cannabis indica
ccctttgtattcatcagattcttccagattgtattagagagaaatatacagcttcatctacgacaataaaatgggttcatctggaaaaaagaaaagcatctttttctttctttcttttcttcttttgatttgtttgtttccctatgacagtaaaattatctggacaagatgtagaatttggacatcataggatatagtcccatagatgttggtccttgaaatgttagtattgttttgttggatgtgaaatgttattttgacatcctaggatagtagtatctcttcaatcttttgttacttcttcactctaatttaaaggagagatacttgagttgaagctgctgttagtataagctaaataaggtacgcttattatttctttctgacattaaatattataaatttgtgtttgtaatcaaattgagagtgtacaataacatttggaaattgtatgcttttcaacctttttcttagaaaagaaataagactctttacacttaccatatcagttaataaccctatctttttcccctcaaaacttagatatcatgagatcacttctttagttaaaaaagtgaaatg

SEQ ID NO: 210922 - DNA, 553 bp, Cannabis indica
tctactgatctttgactcttttagttttgtttctgtctctaaattatgtctgattattgtttctatgtacaaaggatgatagtgtctttgacagttgcttttgaaattagtactatttggctttggtagttagaatgaataattatgaaacagtgaacaggcaagactaactagggaatatcctcttttcattttaactgttcggccattatttttgtgcaagctcatttttcttttcattttacgcttatatgtgatatgaaggatgtaggagcacctgtatatgaacttgttttttttcttgatcagacctgaatagaaattttccaacatgtagctgtaccacccatgcctggttaaaaaggggtatgagggtttattacactgcccaagataattaaaactaaaacttccatttcttttttcggaaaaagagacaaaggtcaagtgtcttagactgacctcctcccatttatattagggagcgcagaggaaagccacggaaacaaaaactttaattttattcagaaggtttatgtaaagtatactttgt

SEQ ID NO: 210923 - DNA, 1125 bp, Cannabis indica
tcgttctctctctctctctctctctctctctctctctccactttgatttgcgcggtggcgctaccaggccatggccatttccccgagcgatggtcgtaactttttggtaacactcatcttcattactctgtaaccgtaaattttcttcttcgatttctactatgtttttgttagattcgaacgactgtgtgcttgagctttcgaattttttaatgcatttgtaattttattttttcaaatttgaaggagattgcattattgcatatgcacgagaggttcaaattgtgcgtgttaccatggtattgaggtgaaagctgaaggtttcgtcaccccaggatcggaggtgcacaacacgttggggaaagcctataatccatggatctgatgtggttgatggccacaacatccatggatctaatctagtctccctctcgttttatcttcttttattttttttagaattgtatcatatgttttgtataataatctttgattttgtacaattttaattatgaaatttaaattttaaaatatatttattttatatattttaattaatatttttttttatgaaaattagtactattatatatatttattatttataaaatatatatttaaaagtaattaaatttattcaagagaatactttcgccaacaattataaatagtcattagttgtaaatagttatttaaattgacttttttcaccaattataaactgtcttttaaaattctatatttttatgacacccacatagccaacggttttaagaaccattagaaaattgtacaaaagacagttataaactgttgggaaaaaactaattttatagtagtgatttcacaataaaccttttggtttaaaaatgattaataatattgttaagaaaatgattgatgatatatacatatatgtttctaataatttgtacactttattataactacactcttctaactacaattaatgtatctatcactattattatttttttaaaatatatgtttggacataatatataaaatttattttgaaagtaattaattctctcatcaaactagatctaaaatatatatgttcttcttcttctacctatgcttttgtttgaagcatgggaggtg

SEQ ID NO: 210924 - DNA, 762 bp, Cannabis indica
atatatatatatgttaaatataatattttctccaatttttttacagtaatacatcaacagttttatgcttccttacttactatttgtgctacaactttttttttttttatatttgttgaactaaaaattatatgttatatatatatatattaatttaatttttcggaggcctcaaaaatagtggggcctggggcctaggcccaactatctcaccctccggccatataatcaatgtgcatacacagtttaccaagcaccgcaaaaggtgtaattacattgtaatttcttttctctcttttgattgttccaagttgtatttttcttctccttttctgcaaatgtatgcaaatataataaaacaagataaatttttcattacttaaaattacgttctctatttctcttttttttttagtgtagcgtaatggtttttaaaatcatatattagcttaatagcttaaaggtcctgggttcgaactcatgacctctccctttttcccatccctccctcaccactaagctagccttagtggcttatgttctctctatttctcatcccttaaacaagcccgcacaattactatttagtattcagaattaaaataaattgataaaacaatgtaactaaataaataaaaataattagaattaatatttataacatgttatttattaaaattgtttagaaatagaatgataaggttttatcaaaatgcttaaattcaccatattgttattatgagttaaactataatatataat

SEQ ID NO: 210925 - DNA, 509 bp, Cannabis indica
aatttttttatttaaatattttctccgttttatcctttggttaattaaaaaaaaattgaactaatcacacatactctctatcaactagctctctctctctatcacttggctctcattctctctatcacttgactatttttctctctctaacactctctatcttagctcactctttctcaatcttttgacctatcttagtgaatggccggaccttatcatcaaaaaaaattatacacattcacctcaataattagtagatattgtccaaaaaaattcttaaatatgattagcatgtagtttattttcgatagatctgtgtcattgttgtttgcagtggtattgttttgctggttttttcatcgaatggcgagatctggttttctcgccaaactaagatttttaattgattatcgatgctttttcgattatataccgatatcttctcgataattagagtaaataggtaagagatgacaatttttgatgctttttcgatggtatatcgatac

SEQ ID NO: 210926 - DNA, 1416 bp, Cannabis indica
aatagaactctcttaatattatgtctacctaaagtattaatgtatttatcaaaattattttttaataatttattataaaataataagatacactgtcatacatactttttgagttctagatattttattgaaaaaaattactttaagagaataatttttcaaaaaaatattaaaaaatgtatatttttactaatttttttttttactaataacttactatcatattagtttggatttaatggtaattaacaagaaataaggtcatttttataatttaagaagcccaaaataacattctctcttttatatatttatagattactaataattttttttttactaataactcactacaatattagtttagatttaattgtaattaacaaagtaaataaagataattttgtaatttattgtaggaaacccaaaacaataatatatttaaaataaaaatgttacccttttcttaaagaataattaaaacatgatttctaacaaatcattttgaaatattaaaaaaataaaaaaaataaagttaattaaacaaattttcaagttaattaaacaaattttaaaaattaaaaatataatttgtaattcttatcaacaattcttttggatattgaagacatttgaataagaatgaacacttaaatatgaaatttaaaaaggaaaatttagcggcaaaaattttcaaaaatttcgtaattgatgcaaattagtttccaatcttcaaaaatagcgacaataatccccatggtccacttttgtgtaagtccgttaatcgtaaacttaattgatccgttaacttatttaaaattgtgacatgttaaaatattattagtctaaataataatttaattaaaaaaaattaaattaaaaaaagaataaatagcttttttgcctcccgaactttttaccctaccaaatttcgccccctataatattctgcttgttaaaaatatttctcaaactatttaaactaattaaatttcatccttctgttactctccgcttcactttggtttaaaactgatgatgtggcatattacatgtagagaaactatataatgacatggcaataggggtgttcattggatcacatccaatagatttggacccatctgatccaatccaattatttattgcatatttgatttttccatccgatccaatccaattgaattgagtcatccgatctgatttgatccaatgaatctattgaattggatcggttccatccattagatgctttaactggttttttattggattggattggatccatccaatggatccaatgaatgaatccaatctattttagccactatttaggttgatttcattaaaaagaaaaaatataatgaaaaaatataatttaaacctaataaatccaataataaacaatagttgaat

SEQ ID NO: 210927 - DNA, 685 bp, Cannabis indica
aactttgatgcataaattgaaaggatttaaaattatttagaaatacacagcgggttttttaatcactgtgtaaaaaggagaatgatcaatattcatattaaaaacaaaataagtagttgagtgcatttttaaaataaatttataacatcccactgagctaaaaatattttactatataaaaaaataaaatcaaggctccaccggcgttctagaccgtttgctcgtctatagcccctcacagtatacataccagactgacccagctcatcaaaattatattcaatgttccctgtctattgcttgtagggggaaagtaagtggggtgagctaaaagcccagtaaggaaatgctttaacacacataaatatttcaatacaccatacatgtcttaaattcacaataatacaatgatatacaataccaacatattcttaatgtattaagtatttcaacatcatactttaactgataacgataagtaaataattatatacatggaaaataatattacatgcgtccatgctaatctaaaaccataacatcatacgtagtgattaaattataactcttatatcatactcatagaataaccataatactatcgaaataagcatatcataaccttatcatatcatggccattacatgcataactcgggcttaggccctacataacctgggcacac

SEQ ID NO: 210928 - DNA, 785 bp, Cannabis indica
tctaatattatatttcaaatcttttaatttaacaaaaataaataaatttgaaaataggaatttatggttaagatattatcattttatttaaaaatatataaaataaaatacctttcatttcgaaaattttagtgttagaaaatcctacaatatcaattaaaaaatatataacaaactattcaaaaaaaaaaatcatgttattttaacataaaatataaattttaataaaataatattctaataagataaaatgtcaaataattaatatttatctaatcttaaaatttaaattaataaaatgtatttaaaaataataaatttttgaaaattgatatttatggttagcaatttaaaattatctagattatctttaaattttattactattttaatgtcaaaataaaatcatttcacattaaatatgtaaatatagggataattgcggcaaaagtccccaaaaacttaaggttgatgcaagttagtccccaacctcgaaaattggcggtaatagtccctaaggtcgcaatatttgtaagtccattagtccttttttctaacggatcgttttctaatttaaaatgtcacgtgtcaataaataattggtccaaattttaattttaattcaaaataatttaaaattaaaaacaaaaaaactaaataaattattttaaaattataaagtattatcttttcctttttttttcttttttcgttttttttttctttctttttaaatttttacctcacaaaagacagtatcacaaacaattatcgttctagcatag

SEQ ID NO: 210929 - DNA, 1321 bp, Cannabis indica
tacgctaagtatcgttatcgtatatcctccacgcaacgagattaatgcctcttcatgcatacttgcacttacagggtttctcgtcgatacacaagttaacagttcgtacatttctgtctcgcataacactgtttacccagtcgagttataaacatactctgcaaattgtaattttaacgagttactccatgccaaatgtacttacgaatgcgtgtttgagttcttcgttcttcctagctcgacacgtgtctttctcttatgtgctcaccgaattttgggtataaaaaatttaatttaaaagtattaaaaaaattaaataattattttttacatgtaaatttgaattagacgttaagtctaaaaattaatcatactttataaaaaaattattagttatattatttaaaatatctaaacttatttacttattttattgtttaataatagttatatacattttcttataaataaatttaaaaccatattaaattttagatattttaaaaaatataattgtattttattagatttaattattattagtattatttaaattaataattaagtaatagcaactgcaagaaaataatacctagtgatattaaatgtgactatataagaaaaaatgatgttttttttttcaaagattataatttaaatttaaactcactatgtagcataaaacatatttttttaacattgcatttcaattttaaatccattgcatatatctaaaagaaatcttttattatcatttttttttacctaattcacataaagtattttttttaacattacaattcaaatttgaacccattgctcatattttaaaaatatctttctattgttagtttatttaactaattcatgtatgtaatatatatatttctattattgttttcttttgaaacaataaataaaaaatgagtttatacttcttaaagtaatcactattgtgatatcattactcattatagtaactaaaaaaatatttttgtataataattgttttagaaaaataataaaaaaaagagtgtatgatatttcttaaaaaattaaaagtattgggattaagctaaaattataagttttgaccttgcttttagccaacaacaatgaatcaactaaagcaattagaaataataaataataataattgagcaataagagcacaaatttcttatagaggttcggccccgtgctactggcaatagcctactctccttttacttatattaactcgtgagtaatgaagcaagaatttctggaacttcctcgaaagtattttagagagtatttagctagtataagtgctctattg

SEQ ID NO: 210930 - DNA, 671 bp, Cannabis indica
tcccaaaaaatagaatatcattaccttaattttccaaaaatctcatgttctttctagtgatatccatctcttcaaatactgtagaatcctaattttacacctttttctaatttgaactgctaaaaacgattggaattatttaataaattattttattaattttttaaaggttatgaaatcatttttaatcatctttcattgtcagttattatgccacctcatagtcaattttccctctaaaaagagatgaaattactactctatcctttgttataataccacatcatcaatacaaacggtatttttaaacaaaataaacagaaggactaaatgtatgcatataaaattatacaaggactatttgtaacaagctgaatagattaaggggcataatagtatagtgtcataagtacaaggggtaaaaaagataattattcatataaatatatgtagtaagagattgtggtagaaaagttaaataaatattaaaataagtttaccttggagcactcacagtagttcttttttttttttgtttttttgtaaaaaaatgtgtagttataataaatcaaaaggttaaaatataccataagatattttacaatttttttttaaataatgaataatacttctctgcaagaagtactatttatgctcagttaaaatgtagt

SEQ ID NO: 210931 - DNA, 628 bp, Cannabis indica
aatcatctttttctgtgaaaattggtgccacgtggcaacttttcacaagactgtactcgtatttctagacaaaaaattttcactataatacatgcccctagttttgtgatgacaactatttgtcaaatagcaaaactattcatgagggacatgcaaattgctctgttacatggcggtgatctttgattattttgtcgagggttttgaaaagacagccatatttattactttatcttcccaagacgccatgtcattgaacccttagaggtttgtgcaggcgtggtttgagacaaccgttggattggatgagctttggttttcaaatgccacatgtcatgatcttaatgggtgagattgatctatatttaaaccgctttgatacgaaatgattcattttattttccctctcatttttcgattttcatcgaaacttttctctctaaaatttcaaaaacctttttcaaaattgtaatctactttgaagaatttccttttactgaagatctctttgaggttcaaaagattcttcgaagtagtaatcaagctcagaaactctaatagacttttggattaaaggttggtttcctctaaaaactttttgtcagtttaaagtgttttctttgaataa

SEQ ID NO: 210932 - DNA, 624 bp, Cannabis indica
ataaaattataattttcattcacttttatcctgaatcagttagtattttatatttgtaactaaacttaattttaaatttgttgaaataagatttagaaacaattaacccaaaactagagctccatttctttaatttagcaaacaagaatttttaaagaaagaaacaattttgacttttattcaaaatattaagcccgagattatctattgtgagtaaatagctcacctaagaagattaagcctgaaaaatgtcatataaagttgttgaaacttaaacataccacaaacatttttccagagtttagtcatttcatttgtagaaatattagttattggtttgtaaaagggtttcacctgcaaaggggtgtcctctccggaaggaacacaagcagcaaaattacaggcttgggattgatcagtgtcagcaatgaaatgggctccgaattgtgcaagttgttgggtatcaccatcacttgcgtttatcatttgaatccctccactttcgtaatattttcttatgcattctgatgcaaccacctcgctagtaattcccttaagcctgtccactacaccaagtaactgcatttcaaaattttctacataattcagttaattccattaaaa

SEQ ID NO: 210933 - DNA, 523 bp, Cannabis indica
tattccttgacaccatttgaaatatgagacataaagtgcttgaatattctataaacccgctatgctcaaccatagacaacacttcaataagaatggaatgactaactaactccataatggtgcacaacactcttgccacccatctctattctaggcttgtacttcagtttgatgctcagaacaaaaaaatattcacctagacaattaatcaaacatcaggtaccgaattatctataattaacataggactaaaggatattttctgccagttggctaatgtgactattgactgattctaattaaaatggtgttcatttaatgaccaatgcaggaaataaatcaaatataattaccattgtgaacattaaagctaaactaagttgacattgaagaaaataaaactgggggaattattgaagtgttagcatttatacaggtatatttatttcgatcttcccataaaaaatgattaacactacactaaaagtcctctcatgatatgtcactactacaaaccaagcct

SEQ ID NO: 210934 - DNA, 531 bp, Cannabis indica
catgggatcaatcatctattttgtaatcctagccccaatcaatgttaaaactgccatcaagccactatctatatcattattccagctcgccaccaattttctcacccttacaacccgaaacccactttctaatattaataaacaccaaatgcctatttagcttcagatattgcacagataaatcattattattgcaatgttgaaattgaaaataattttatatcataggaaaacccaatgataccatgtatatacaatacaatattgtataatctactgactccccaataatcccaataatctcatataaaatattacaagcctgagagaaataaaaaaacattgaaactttacctgtattagttttgctgccgtcgaggagaggagggaggaggatggttcgtctgggagaacgattgagcacaataggtcaaaatcacagagttagggcagtagggtttgaaaggaagagatggcagtagatgttaacaatggagagaaagagaggggagcggagcggagtggtcgaca

SEQ ID NO: 210935 - DNA, 1518 bp, Cannabis indica
gttttaaaaaaatacaaattgttaagaagagatactataagaaagtaaaaccgtccaaaatataactcattgattaaatagatatgatttttaaattaacaatatgagtaaaaaattaatacaatatttttaatactattgaaatagtaaaattttaaaattattcataacaaaagtaatgtatctaaatattattttattatttaaaaatatttaattcaataaattttaagaaaatagaataataattatatagtaggattatataaaaaattaaagaagacattttaattaaataataataataataatcaaagcagttattaattaagcgagagtttctcgccaagtcgccatcacgcatgaaaagtggactatcactacaaccactattcatttatggaaccaccgaaggcaactcacgacgaactcaaaccaccttgaatctgccaaaatccatacccgtggtcggcgtaataaggaagaatagaaaacaaagtttcatcaatgtcgaagatccacaagtcttttccattgccgaccatttttctttggagatctgtactatatccccatccagtactgcaatttttcacatattctacacatttttttgggattgttttccatggattcagattattagcctcaacggaaaatctccaactgctacactctaatctattctcttcttttaaaagggcctcccattgttctttcaaatgggtcttgttgaccataaaaaaaaatacaaaaatgagtaaagagaataattataaaaaaaaaaattaattaaaggaatgaaagagaaaaagaaaaaaaaatataaaaatatgttttacatctttactattcattgagttaaatttagggaagaatttattggagtataggatgagctataatagttaagggttaaagtatttgttgatgttcaattgtaagctcttagttatttttttttaaaaaaaaaaattagctattgtagctcacttgttgtgagtgctctataaggccatttctaatgggcctgcataaacccaataatagggtgatattacactaaaagcatgtccaaccacacggcatttgcaacatcaattttgggtttgcctacagtgtcccaccatatttaggtgggcacggtagacaacactaaactttttttttcttttactttttaataattatataatatttaaaaaaaactaaataattatttatatttttaagtgtgctaaaaatatattagggtgtttgcagtgcgggtagtgcggtttttgaccattttttttaaaccaatccatacatgcggtttttccaatttctcaaaccgcacccgcaccgcgaaactaaaaaatcgcggaaatcgcaccgcagaaaatggtgcgatgcggtacagtttttgcgatttggactattaccgataattaaactatcacaaatacaacaaaacttgagcaacacttgtcaaaaataccataaggcttgaaaataaatatataaaaaaaaaaatac

SEQ ID NO: 210936 - DNA, 528 bp, Cannabis indica
gtctaaataattcgtgaaaagttaaaatataacttatttaaaaaaaaaaaaaaaatagtctaatgtgccaaagaataatgtaaatttagcacgtagtaaattttatgtcaaatttagcataatatttgttatgatgtaaaatttacaccacaataaatttactacttttttatttacatttatatcatttctgttattttattaatatatttatctatcacattaaattatgaaacatttatattattttttattgtcttccatattaaaataataataaaattaattatacagttattagattttatttttttaaaataaaatattaattagatattaaattttacattaaaattttgtaattatacattgaagcacaaagctaaaatttagtataaatttaccacaaaatttttttttgtgtcaaatatagcacaattttttacatctcctattaaaaatgaacttattatacttaaagttagaccactcgctctaatttctactaaaaataaaaaaaaaaactaa

SEQ ID NO: 210937 - DNA, 946 bp, Cannabis indica
tactaaaataataatgataataaattacttccataatttttctattatttgacggtcaaactcaaatctgaggatgtacatagttaactggtttatattatatccactaataaactatacaaaaaattaaacaacggtattttacgatatcttgtcccaatcaatcagataattaaatagtaaaatctcatttttttaagaaaattgtactgaaaaactatacatacaatatttgacttagatcaaaaaaataaatactactatattacctaattttctttttaataaattgtgtaattttttcataacagaattagtaaaataagttaaataatctacttaatttgataaaaaaaaaagataaaaaaaatagagcaaaaatacgccaagaatatttattgtaattaaataaataactaattttgaaaacggctaacaatttttaagacgattgacacctcgtaattaaaaattaatgcagtgctaaatttgcaacacactaaaagttatttcaaatttagtataaaatatagtattagtttattaaatttggacaataataaatagaatttgtactagttgaactatgagtcttgtagagatatttgcccactaaattttattttattacaaaaattctctctaaattataaaatttgtagcaaataatctcatgtagttacattcagataaaaaataaaaatatatagataattaatttaatgaagaattatgatttaatgggaatatatgtatatgtatttttagaatatacatttttttttcatgtgtatatacatttttatgttggtatgtttaatgcaataatacaagtgtcattgtttagaattgtaataataaattgtaacacaataacaaataatatatcttactaattactaaataaaataatccaaggtcagagtttcaaattacccactcatta

SEQ ID NO: 210938 - DNA, 1178 bp, Cannabis indica
gaaaattgttatttatttttgtcaccacccaaacacacccacccaagcacttcaattagtctatggtggcaattactgtaaataaagctgcatcaaatgaagaaagaaaatttaaccgagagcatctcacgctacatgtaatgtgttaagtttggtaaaatcaagttatggaccacatgtaatactacttttcataaatttcaaaatagaagctacaccagaacttacagtgataattgagtcaagcttgaccgaggattccagctgatcgtccaaccacagaacagatgcaagaggagccggatttgctaatccagtagtctccagcaatatatgatcgattctacaaacaatgcaataataacaatgagtacccttgcatgcatgaccattaacaagatacccaggtcgagctatgaaattaaatgaaatgggaagagtagtgtaggtatagcagtaaaaaaaggtattgctttcactcttatgtattcattcatgtaattaattaaggcctaaaagaagaaatccacaaatgtcaaaacaatctccatgtctatacaataaggtttaagttcttcaatacctttccttcctctggacaagttgctccagagcttgaaccaaactatgtttgacagtacagcaaacacacccatttgcaagctcaatccattcttcaataagtgctcctccatcaccttcattaatcattgctctttccacaccgatttcctcaccaaactcattcaaaatcacagcaatcttttttccatggttggagttcaatatataattaacgagctgagatttcaaaaaagaccagaagaagaaatcaatattttataaaaacaacgagtaaatgagcatagggaaaatcggagtgggagtcgagttttagcttacagtggatttaccagcacccaaatagccagtgatgacggtaaccccgacggagacctctgcgtcttcgtttaagggtcggtctttggtataaggctctgtggattggtcaatttcaactgcaagtggtggattttcttcgtcgtcctccatttccgattgtgtttttcttcctccggatactgtaaaacgatttggactactgccattggggtttaagtttttctttttcttcacaaaaaagaaatatagatatttttcttcacaaaaatacggac

SEQ ID NO: 210939 - DNA, 557 bp, Cannabis indica
catgcatggaccatgcagacgactttacagaatgcttcaaagtggtctagaggtatggaatgaagcttaatccgaagaagtgaacttttggcgtcaaatcaggaaaatttatgagatttatcgtcagccaaagaggaatagaggaaaaccctgagaaaattcaagctttactaaacatgccttccccaagaagcacaaggatgtgcaaaacttgactggaaaggttgttgccttaagtcgattcatttctcgatcaactgacaagtgcatccctttcttcaacattttaaagaagtaccaaaaattcaaatggactgaagaatgcgaggaggcattcaaaaaactaaaagagcacatggctaaaccaccggtattgtcaaagccagttcacggagaagacttgttactgtacttgacggtttctgagaatgctgttagcacagtcctagtccgggtaagaggacaaagtccaacatccggtgtactatgttagcaagcgcatgataggggctgaaatacgatatccattaatctagaaattagttttttgcctcctg

SEQ ID NO: 210940 - DNA, 724 bp, Cannabis indica
tcatgctcccttaaatttttttggccgtttaaaaatttctcctgaactattgagattgttagatttaaagacttttgtttaatttcattcaattttactgtttattttttactaaaattaaacaaaaatccttaaatctaacaatctcaatagttcaaagaagaatttttaacaaccaaaaaaatttcagaaagcataatttggtaaatgtcaaaattcggaatgaaaaatacgatttgaatcccgcaccttgacaaatagtcaaagcttttttttttttttgtacgtgaaatagtcaatctttttattatgctcaagtattaacaacattgattttcaaaatttaatgaccacccatactttaaattattgtttttacgtctctgatttgcagtcacggcttttggagcctgggccatgtaaaatgtccagctaaatacaattttttgcatgacaataccgatccacaaaaatcaaaaaaatataatgatcattcctcccaaaaagcccaaaggaacaaaaaatgctaaagtaaagctgttaacttcaccttcagtccagtctatttcatgtaaggttatcaccatcttactactttgccagtttgcaacaatagatagagcaaatactccagcaaaaaagaagtgaaggccatcaaatgactgccttcaagagtcatatgggcagggcaacaaagtatcatatcctctaatactaccattat

SEQ ID NO: 210941 - DNA, 712 bp, Cannabis indica
caaaccataaccaacactaggaccagaacctggaccgagagcttgactaggatagggacctgacacctgggacccaaacttggaccgagacccgaactgggacctggtcataaaccctcgccgggacctaagacctgcgagccaaacaaggatctagaacctgacaaggacccaaacctgaactcggaccaagattgggaccgagacctagacccaaacctagactgggacctggactaataccaagactcaggacccgaacccgaacctggacccagaccaggacctaggaatcgaacttggatgggggacctagacaagggacataagctttggaacatagatctagatctaaatccaggattgaaacccgaaccaggacctatcctggacccgggaatctatagtcacacgcagacccaaatccaaaacctaccccagacccagacgaggataggaacatagacacgaagccatactaggaccaaacccgaacccatactcgaacccaaaatcaaacccaaacccgatacccgaactcaaacccatacccaaaatcagacccaaacctaggcctatacccagaccagaactcgaacccagaccgagatcgaaacccaggacttatacgcaaaactacaccaggactcaaattgagatcaaaacttgggactcgaaactgaacattaacccagacccaggaccctaaccc

SEQ ID NO: 210942 - DNA, 580 bp, Cannabis indica
tgttgtttgctaaattgtacattttagggtggtttttttagctgtcttagttgattttgagttatttttttattttaaattttgtaaacttagtaccctaaaattataaaaaatatttgtgtcttaatatttttgtaaactttcacccattttacattatgttttgtaagttctccctaattttttttaatgccaaaattttgtacaatattttaaaattattaattattagtataaatacatgtgctttattattatgtacatgataaaaataaattaaaattaatataatcattcaaagagctatgaacacttacgtaaaactattaagttctcgtacgtgttggcgtgttgcccttattctttataagtactagtactgagattaataagtgacatataatatggctattaatggctatggtttacttagtttgacacgtatcgattttaatcccattataaaaaattttacttttagtcacaacaaaatttgtaattaattaaaatcgtcattcttatgttgtgagtaaaaaatctgtggttaaaagtataagtcacaagaattataatttattgt

SEQ ID NO: 210943 - DNA, 996 bp, Cannabis indica
agaggttgtaatccctggtttttgggttgtcgggcaaattgggctggttatgtccattgtcctgtctcttcacatactgcttgaagtggccccgagcgatgagactttctatctcatctttcgactaacggtactcgtgtgttgtgtgcccaatgtccttatgttatttgcaatatctggtaggatctcttttatgcctcacatgcctcatgggttcgagcttgctgaaggcaaccttgtgctcatgcacgaggtaaatattttcccaagtttcattaagctcggtataaatagtataaactggcacgtacttatcgtgcttcttttgtttcttcttgtcctttgacgactccttagaatcgtcttttctctttgagcgagaggcccctcagttatcaactctagttgagacagtatttgttgaaacattgttgggtttgcctcctgagccagtttttaacaagttcatctcttttcgagcttcctcttttcggacaaacacctgagccctctcgttgaactcaatgatgttcttcaccggacgaccctgtaagtcgtcccacaattcgcccccagcggtggatagatcagtagtgatccccgcctggagggcagtaagttgtgtactatcatccagatttctaactcttgcagcagccatgctaaaacgacttaaatatgccttaagtgtttcgcctggctgttgctttatattagttagcgaggacacctcggatcgcctatcccttgcggcctggaactgttttttgaagtccttggacagctgttcccaggaagttataaaatgatgagtaaatttgttaaatcagctgcttgctgctccaactagcgaggtgggaaacaaaatacaacgtaaattgtttgtcacattactagctcgcattattgtgttgaagttattcaaatgcgagatcggatcggtggtcccatcatacgatgagacatgagggtttttaatgtaacgtccccgcttca

SEQ ID NO: 210944 - DNA, 567 bp, Cannabis indica
gaagcaacatattaaattgtccaataatttgataatgataacaatgaaaaatattatgatagtaatattcaaactataataattataattatcttttatatgattgtgtgtaactattattgaaaaaaaatataaaagtaactaaaataataaaatacacatatattttagtatttagttcattaatggtaatataaatacaaaaatatagagcacggatttccatataataaataggttggtctatttcaaaaatatggatcggcccaaataaagcatgcactatacaaattcgagcacggtacaattaattattggacttgcgggtcgtattaggccgaccctataaaattattgtacgacgcgacccatattttttatggcacgatacgacacgatttatatttttttatggtccgacatggaactactcgtattttaaaaaatacgaaaaaaatagaccgaactagcacgatacacacatatttatagccacggttatgcttgagatcttataacaatctacttttcctaaatatacatcattagttgaattattttttacat

SEQ ID NO: 210945 - DNA, 727 bp, Cannabis indica
cttcaaacctgccaaatacattgtgtttaatatgatatgatctaatcaaagcacaatcaaaatcataaaagaaaaaagaaaagtcaaagtttccaaacaaaagcaacttttccataaaaacaaattcttctcttgtaagaaaaatcttcctaacaattacaaccagctatgaatagaatttttcataaaagaaagagagcaataaaggcacgaaaatattacaataaaaattctttaatttcttaaataaaaacataaattaattagaaaatatttttttcaattaattttccaaaaaagactttgtaatctcctccttttgcagtttagataatcaaaatatttttaatgaacaaaaacctgcaataccaagttagcaaaaacaaacataacaactccccttgagaagtacaacattaaaccaaaaaagaatgctaactttaaactgaagtttaacacaaacaccaacctcaactccccctagaaaaagggtccagagttgagtatacaaacacaagaaattaaaaatattactccccctttttattcatctataatggtcaaaaacaaaaagaaattaaaacaagtccaacaataatcaccaaaaacgtaaaagtaaacgaaagagaacacaaaatttaagcctcataaagcttgatcaaagtggaaaattgtttggagatttcttgcggaacctctttcatggcagctaagcgattgttcacca

SEQ ID NO: 210946 - DNA, 575 bp, Cannabis indica
gcactcactttccgtacactgttattattgagaaagaaatttaggttataaatacatattgggattaggggttttatcttgtaaagacatggattagaagtttaattaacttatttttaagttggggattttagttttatttgtctcagaattatatcaggcattatttatacataaggtgcaagtaatgtttagttgcttgagtttcttggatagaacagttttgggtggagaattaatgtttaaatcttgtctaaagggctctgcttagatataattatgtgtacaagtggggccatcatgatatgcaaattatacattacatatgttgcaaattgtagctaaagccaacagtgaagctaaattttaatggagtgtgctttttgcaagcttctgtttaaaaaaaaatcggcaaaaaaggaatactggtatactagtattggtctcaaaaaaatcagtgtctgtatactggtattggtattttagtgagtacagtttgtgccaattcaaattgtttagtgttactgcttactttgtttattttctttgtattgacaaagtcatattgagtaata

SEQ ID NO: 210947 - DNA, 1305 bp, Cannabis indica
atctagatcctagtaaaacaatccccaatatccaacaagtggctacacaatggggagtgttactgagccagagatccctggccggccccctgtgttcctggttgccgatatctggttgttctcgttgtttgacctttgagaaaagtctgtccttcctctggcaggggaagatatgttcttgttccggaggaacttggtggaagtcttccttgaagtggatctctaaggagatcctaacctcttccatcggttctttgttcgaactgtcttatcagatcgctggcctctcggttgcagcgatttaactcttcttgttgagatcgaaggatgtactcttggtcatccatccatcttaggaatttatgtatctactgagcaaaaacattgcaatcagcagcgcatggttcttcaattaggcttggatagcctatagcttctctgagtctggctaactcaaagtcttctccaaggttaagatggggctcgccaattggaggctcgctaactcctgggcctgtctcttcgacgtagaactggagacaagatccaattgttgttccatgaggctatttcccttgggtccttccttcagttggaggcatcaatagtgggtctactcttggagtcaagggcctgccacttggatctagtgggatgctcgtatcagtttggccagctgtagtggccaaactgtggcacctgttgtggtgacagggttcaccacatttgtagtgttcatggggactccagttgtgactggaacctgagtgcctggatctgcaatctgtgggtcttaagggagacctcaagatgcagatggtgcgataggagttcttctgttcaccatggcatttgattagattatgatatccacgctctcaatgaaagcactaaagtgttgacctcaaaaagtgatcaaccgataacatgttcgtatagatctgatgcttgccacgtgtttgcacaaataagagtgaaaagaaatagacacacatatttgttatacaggttcgacccccttgttaaagcgggtaatgacctactctcatttttgttgtattaataccaaaggttaatattatccagatcactataggtgggatctgctatagcacccttaggaatacaatgtatgaatcaataatggtaaaactcaaggttgagatgatgctagtgtaggcgtgtgagagatgaagtaagggtgagagaatttttcaaacatagacttagagcttggaggtaggttttcaggcttagatgtaacttaggtttataggctaaggttaaggactttatataggaggc

SEQ ID NO: 210948 - DNA, 749 bp, Cannabis indica
agctaaactttattattttttgaattctttccatttttaatattagaaatagtaatatcagaataaatctatttttattgattttttaattaataaaagataaatttaagttttacagttttttttaacttaagattgaaaagatatattttaaatatagatagaattgatgttatcttttaatataaatgataagatcagacattataaatattacatattttaaagtttgaaatatcctttgttatacctgaaattaagctggtacttcagaaggtgacacatgtcaatctcagagaatatgaaccaacaaatataatgacaattatattattaaatgtaaaatagaataactcattaaatgcaaaaataataaagtacatttaaaactcttagactgcacaatctttagcgagacaaggatgtacaaactattgattcgcgtattgacgagaaaccatttcgcgtcataggacataatcgcaaggaagacatcgataacacatagcgaggcatctacctcacaatatgtaaagaggtattgacgaggcaaatcgactgttagaacacttagcatataatatacaatatactaactaagtgtaatagcttgaaggacatgattgtccagtttgcaaggccttatggtcaaagagcaattcttaaatttgctcagtacactggtgctcacgtcattgctggaaaacctatgaataaaacaagatgtttatgtactaggcaagacacct

SEQ ID NO: 210949 - DNA, 553 bp, Cannabis indica
atgttttggttgaattaggtgtggatttggctaatttttgaagctgaaaactgggttttctgggtttttaaacccaatggtcacgacctagcgcttaaccaaagagggtgagtcccccatttgggctctagtcgcgaccatcgcaggtctggccgcgaccatggtattggcagtttattattttttttaagcttttgttttcaccataacttttaactcgggactccgtttgggacgttctttatatcgttggaaagctcgttccaagctctatgtgattatctataatttgaatatcaattctatattttgtgaaagtggatttagggattaaccctatacgtgtgaattccagaaattgtgactaggattaccggcacttggtcaggagcaccgagggatttggaatctccacgtttatgggacatcaggtaagaaagtagttagcacgtagagttatgcacagtggtgcttatatttaatatgataattgaaagtaattagaaaccggggttagggttattatcctgacatgagcagtttaatggcctag

SEQ ID NO: 210950 - DNA, 574 bp, Cannabis indica
acctaatacaagaaatgatgctatagaggacgaatgctttcaacaaatgagagcatctaaaatccaaaataatgaaatccaggcaaatggtttctcaaaaagtttgaaattgattatgacacctctaataggcatcatgtcaagcaaatgtgatgcatctgtttacacatcctgtttcaacacatggtgttatcttttacataagcttggttctgctgttaattgttcctcagtgaagaagcttgtgttgcaacctgtatgtgaagcagtttttcagaatggccctgatcataagagcatttcggtatggaatctgtgcataaatttaattgatgatttaattttagcaaagtgtagagatgcaaacattgagccagctgacccggaatgcaatcatttatcagctacaacctccattaatggacctttgacttctggaaagtgcccatggaaacagtatcctattaaatggttgccgtgggagctgagtcaattggaatttcatttaaagattatttacagtctcatcaatcaagcatcgaagataactgtttcccatgagaacagaactttg

SEQ ID NO: 210951 - DNA, 535 bp, Cannabis indica
ctagataagcaaactttacaatataaacttagcaagagaaaagtaattcattacacaaaaaaaaaagataatcacaattcacaaattgcatatactgtgtaacccatttattctttttatttttctctttcacaacaacaaaataatatatacacaaaacccaaccaaattatctaaatgaaaatgtatgatatttaattaaaactacaaatctcttctgcaaatccaagtttagagcctttagtatcataaataaccctttgattcttctgttgataatttccaataataccaatttcttcttcataagccaaacttgccaaagccaaacaaatctgagaagcatcagttttaaccatatacaaaacaccagtcacatcaatactcaactcagcagcatttccatcaaactgcattttcaatgttggaaggttgatttgatcatacccactcagattgaaacacgtgtccaatattgaaaatccaggtgctgaaggaaacccagaaaattgtttcacaaactcttctttcacaa

SEQ ID NO: 210952 - DNA, 537 bp, Cannabis indica
caaacatagcatcttttttcaatataatttcagctgcttttaactttggctactattttgaaacttaggatcaaatatttcaatttattcgtgggatataattattggatatcttaatcttatcatgtacctctgcattgtttgtttcaataaaatttggtacagtttttctttcatcatttaagggttgctttcttttcttaattaaaatgatttagcctcaagtggggtcctttcaaaatgggcacaacatcatcataattattgccttatcatgcaatatatgtctctgatttaactttggtcttcctttttgcagaaactctgctaatggtgcatggacaggtatacatacattaattttgaagaatatgatgcgtattcttggttgaatatttaataattataatttgatgatataggaacagaaaacttggtgtgtggcaaaaccatcaacagaagcagcagcacttcaaggaattttagactatgcatgttcacaagtggattgcagtatcatggaaaaggggtgccctt

SEQ ID NO: 210953 - DNA, 627 bp, Cannabis indica
agaaaaaaaaaaacagttattttattttgccatgctcaattttaagctcttatcattaaccggagagcgcttccatgaaccctccgcagcaggcgtgaagttaaggtgcacaaatttagtgtgtttcaggattcaaatttttagggttgaagatattgaaggaggagctttattttttagtatgttcactatggacctacattaacaaaacactctcaactatatcaaaattgaggcatgcaaaaacatctaaaactaataactacattttataaaaaaaatcaaacaacattttctctattttattaacctaaacatctatcaatttcaactacaaataatgataaaaaatagataattttaagggtcagggcatttaatcaaactcatcaaaactcacacgaacactggacataataaaaaacacattcttattattatgcttgtgctcctgttagtcacgcatagaaaaatcaagttcattattttcatttctatgcaaataactaaaatccagacataaataaagcattacaaagtttttcatgcagaaaacctaccaaagtatcctctaactagagtgctaaatattggttggtatgtgtcctccactcattgcaaataaag

SEQ ID NO: 210954 - DNA, 701 bp, Cannabis indica
gaggtagacaactcaagattaactagacaagctttctctaaaatatcaggtcaagattgcgtaataatatgcatgccaagtcatttatgataaaaagaaagaaaatcctaacaacaaccttaacgaaagatccaataagccaatagtgatcaagcacaaaaaagaagtgtgaagtaagctaggtttccaactcaaataaacatctgacagcatccacctatcaatgattattagccaataatctttcaataaaaattaggacataactaccccattattcacacgtgaaataagagaaataatcaaacgaacaactatgacgagacatccaaaaataagagaacatgataccacaaaatatagggccaatagacatatcttgtcgagaaaaatatatatattacccctactaaagcaaattgatccatacaatgaaacattatcgcaccaattaagaacatgaccaacaacaactgccataataataaaaaactctacttatccagtagatcgctgacaaatcaccgttattatagaaataaaactaacataaaatagtattaaaattaaaataattgaaactaggcacaaaatgagacaaaccaagaatgaatcagacccaaaacaatcaccaatctctgccaaacacctaaacttagatgatgatgatgaactttcgccacaaattcgtgcccaaagcc

SEQ ID NO: 210955 - DNA, 626 bp, Cannabis indica
ctacctggctttgccttggcttctcggacgcagatggcgcattgcctctacaaggcccagaggtgtctaaaacatggaagcttgcccaactaatacccaaacggatactcaaagggcctaatgtgaatgtcaaccaccttggagtgtcgcggatgtctaccttttatgcatgccaaatcaccaagtgacagttatgttttttctgatgaagatcaaattttgtctcctacatccaagcttgatattgtgcacacctcagcccccttcttaacagacagatattacagacctctatttttaaaggagaaagctttaggcaaccgtggcctctatttttaaatgtaaaatctttaaaagacacatgtccatatagtgcaaaatggtccccatcgtccagatgcagcacacacaagcacaatagtttccatgggacccaacgatcagctttgattattacatgtaatttaccccattagtgggctatgagcagaaatcctaggccaatcatgggcatatccatacctgtcacttagcctaaaaataccctcccatttctatatggatgggggatcacatccaacatagctaaaactctatcaagtgtactcttcatctcctccacaaga

SEQ ID NO: 210956 - DNA, 1085 bp, Cannabis indica
tcaaaactcataattaatcgtatcttaaagtgtcaagcactataagaaatgacatatatcaatattgattacaattcattatatacactcctaagcctttccctattttttcttcactcttcttcttcaacctctctctcttccccaacccctaagccccatctcaaccaccgccctttcctggtcgtcctgcctgtctgctcccatctatctcggccggccgctttcgtctcccattaatatatttgattttagggatttgagggatatgttttcttttttcgaaagaggagaaacaaaaaaatacaaaaataaaatttagggcttgaaccatggaggatccacaagccactattactattacaaacccaactaattgatttttttttttttttgtacaaatacattatatcataaaacactagtaaaaaaaattaaaaaaaaaattggttgagacttgacatattcttgttgtgtcactatttcactcttctttctcatcattctcatcatcatagttgaaaggtagaggcactgatttgaatgctctgtacttgcctacattgttcaagtgctcattttcaatcctaacaaagttaaacatcatcaaatacttgttagtttcacatcaatttataatctctactaaaatgtcttaaggaaatttttaaaatattttttttttatattttatttataattttacgatgtaaagtttttatttataaaaatacgcttttaaagttttaaaattacaaaaatactatttttcaataaaaagtaagaaaacaacttaaaaataattagaaatcaactgcacgatgttcacccagaaacttctctaataacgtagacatcaatatttgacacgtggcaagaaggatgaagtcacaaagttgagtagaaccgagtcatagcaatcgacctgggaggagtccttagccttgcgctcaagttgacttcgggatttttgggatggaagttcggactgtaataacttgaatccaactcactatcttttagtattttgtaccatgaagacatggagcaacttaatccaaacccccgagagctgaaatttcacg

SEQ ID NO: 210957 - DNA, 962 bp, Cannabis indica
aaggaggaagtctatatgactcagcccccgggttttgaactccctgatgctcctcatttggtttgtaaactccataaagctctttatggtcttaaacaagcacctcgtgcttggttcgaaaagttacacacctgcctggacaatcttgggtttcaatcatcaaaatctgatcacagcttgttcattaagcacacttcctcctcagttactctcatcctagtatacgttgatgatattatcatcacagggagtgactcatcactcatttcgactattatcagtgagctgcactccaaattttcattgaaaaatctaggccagttacactactttctcggtattgaagtgcaaaccacttcaacagggctgcacttgtctcaagctaaatacatacgagatttactgattaaagctcaaatggaaggagctaaactagtgccaacaccaatgattagcaccttgaaactgtctgcatatgaaggggaaccagttcccaatccccaattgtatagatcaatcgttggtgctctacaatatttgaccatgactcggccagacatttcctttagtgtcaatcgagtatgtcaattcatggctaatcctctattgcctcattggaatgcaatgaaacgtatcttacgatacttaagtggatcgatttctcttggtttgactctgaagcctcttactgagtttgaaatttctgcatttagtgatgccgattgggccagtgatcctgatgatcgtcgttccacttctggattttccatcttctttggggcaaatctcattgcgtggcaatgcaagaaacaacagacagtttctcggtctagcaccgaagctgaatatcgcagtgttgctcaagctatctctgagctcacatggctgcattctctgttcactgaactgcgcattacactgtctcgaacaccagtactctggtgtgataatctcagcacagt

SEQ ID NO: 210958 - DNA, 646 bp, Cannabis indica
tcacatccatctgaagaacattcaggcttagaacttgattatactctgcgacagacagaaatcaagggttagagatctgagtggaaggagacacattattctgctgccctcactgtaaggtttcttaactttttatgtgttttgtttatcgttttagaagttcatatttaggttgttaaatcaacatacttgtgagtagatctaagttcctggtaaaataaattccaacaatatcttgtaactcggtgttgatatgttgcattagtgacatgcgacttagttcatttttcatcaagtagatccagggataactttagaagttcctagttttcttcgtgattacaaaactctcgtctgtgagtcaatatgctcacttcaacaagtaacattgcttccgagccaaatgctagcgaaaagggagtgtgtcccgttgccgtcttctcggtagttctgtgagcccagagtacttgaggtagctcgtcgacttacctgcctctggcagcgtctaacttcttcttaatagtatcttttaaggttttattaacaacttccacttatccattcgcctgaggcctggatactgacaggaagctcttacttattttgtttctctcgcagatttcagtgaacaggtcgccatcaaatt

SEQ ID NO: 210959 - DNA, 543 bp, Cannabis indica
gcatagaagaacttagaacaatgcatcggtagtacttattaaaacacaatttataaatatatatcaaaatatatattccacatataataatttttaagttgtacaaacctattatgaatgatattattattttttattagcagctgtaattggtggtgcttgctcaaaatttttaaattaccttacagttgacttttgactttctctaaaaaaaaaaaatatacatatatattattatttaattcatatttattctagtcttagtaaatatttttttttgtgctgtcagaagacaacacatagattgttaaaatttttgagtgcgggtaaagtgcataaattttattttaaaattaattggcaatgaagaatataggtcattagtcttatatatgatatttacttttcacacattaataattaataatgtgaaactctataatatagattaattatttatttaataagtacttaaaaaggttttatgcttaaaaattaaaattttacaatttaagcatagaacttgaaaaaaaaaatgaactt

SEQ ID NO: 210960 - DNA, 905 bp, Cannabis indica
attcatttgcgatcatgtaatgaaatgcaaaatacgtatgcattttctcatatcaaaaaataggctgaatgaaaaattggctatatgggtgtataaaatctcaacacatgtatggtgtataaaaatctcaatcttcatctaaaagttgttcttttaagtttagtattggactttgagtatgattttgtggaaaattactttttttttagcatagtaggattttggaggtttttaatttggatatttcgaaagaaattattattttcaactctatgtttaaattaagaattctatccattaaataattaagaaatcattattttgccgagacttcgtatggggagttttagggaacagaagtaagtttcaccgggtttcttgggacaaggtttgtcttcccaaagaccttggaggtgttgggttttgagaaaggaaatagtggaacatgactctcttggctaagtatctttgggctcttgctagcaagacggattgtctttgggtcaaatggataaactccatttacttgaaaaacaatgacatatggaattgcccgaagaaggttgatacaagttggtacttcaagaaaatattgaatataagggacaacattaatgttgtgattctcaatcaagctgtgacggagaataagttcagtactaaacgttgctacaatctgctagtggagggaactaagactgtttttgcaggggcaatttgggacaaacgttgttgtgccaaagcacggattcatttactggcagatagcaaataaccacctgcttactcgggtttttcttcaaaggtttatggctattcctagccgtctctgtccagtgtgtgaaaatgatatggaaacccatgatcatgtcttttttaagtgctagattttttgacacaggtag

SEQ ID NO: 210961 - DNA, 602 bp, Cannabis indica
gagtgactatgccataaccaaacccagctcgatcacgaaaaatagtagcatcaacagttaccttgattgtatactcctgcggcttaacttgaaattcaactccatcacagctttaaaaactgaaaatgaagtgtacctctattttgggttaatttttattgtacaagacaactcgtagatgagataagaatatcatctaccgtaacatacttttggttccaaaccaactcgttttgagcctcccccaacacaacatatataacagtttccccacacttttccttactgtatctttgcaaaatttgatcaaactaactgtaaaaatcagcagcaacaatcagcctaaccccagccaaaagcctctgccagcatttagaagtgaatgaacaggaaataagcgcatggaaaatagtttcctcacctctttgacaaatcagacacatgatttgaactaggaccctcttgccacttaattgagtcaaggtgggcaaacaatttgaagcaacttgctataccaagttgagagctttcagcagtggtagaattccagagcttgcgccagaacccaaaagaatcagttacaatccaattttctttctgag

SEQ ID NO: 210962 - DNA, 509 bp, Cannabis indica
aaaaaaaaaaatatatcgaaaattggaagcaaatgtattattaattatgtttcattttacaggacatacactacaacaaaaaatgacattttatcctcatttttaatgatactttatcccgattattgttaaaataaaaatcaagatatatatcctctacaaaaatcgggataaaaaattatattttatcccaattttttatgacttggatttaaaggttttttctattttttagaggaatttgcggcgaaatatacttgtgtttattatcccatttttcgcactatgacgtggcagcacatgctggtgacacgtggaccttattccctacatctggctggagagatgtttcgagcaaagctcagcatacacctacacgaataatgtcttcccaaccgagcagtagagaatccgggcagcgtatcaacacttagtaattccaagacttgcatcgtgaagcgcaaaaacaattcctataagtctggaatcgtatcacagaaatatggcaa

SEQ ID NO: 210963 - DNA, 949 bp, Cannabis indica
ggaaaattagaatggaaacttatttttaatccattgattatgatttgtggcatattatatgttatggtctttacattcctatgcatattttagatggtatagaaactataaagaaatatgatgcatatgatgaaaataataaaaaggtgatcggctcatgatatgtaaaacatgttagaggtaactcatgaaggaactaatgctatgaaagaaactaaaattcaaatctattccacataatatgaaaatttcaagatgctacaacatgaaactattgctaacatatatacttgtttcataactattactaatggtttgaactatcttggcaaggtacttacacaaaaggatatggtgaccaatattttgagaagtctcaccaaagcctaccaaggcaaagtagtttccatccaggaagtcaaggacctctcaattctaccattggaagagctcattagttttctcatgattcatgaaattttcatgaatgctcaagaagaagaagaaattaataaaaagtagaagaacaccattgcattcaaatccacttcacatgatgatgtgaagatggtgatagtgaaatggaggacatatccctactaagaactttaagaattttttgaagttcaagaagaatgcaaatagatttgataaagaggtaactcaagggagagctcaagaaaagatgatcaaatcatttgttgtgaatgcaaaaagtcctatcatgtgaaaatggagaaatagaagaaggaaaatgatgtctacttggaacgaaagtgaggaagaaagctctaaagatggataacatgagatatctaacacttgcttcatggccattaatgataaagtaagcatttctaatcaaacaaatgattttaaagttgaaagtgatgatgataaaccttatatgtcttatgatgaattaacaaaatctttcaatgatttgttt

SEQ ID NO: 210964 - DNA, 984 bp, Cannabis indica
tgcagtaacagtttgaccatgacggggtggcggtgtggcagtaacagtgaggggacgacctccaaatcgccggcaatggaggttgggtttgggtttgggatgacaggagagggtttgattttgggacgacgatcgctgagagggttgggtttaggaggaatacagatgggttcgaatagggtttggggctgaatgagagtgtgagcgaaagagatgaatgggagagggatattttaattttttaacatatacattatatatataaagaatctttcccaacagtgtttatcagtgtggtatttcccacggttataaaccgttggctatatttactatttccaacagttataaattgttggaatttattgtttttttcttaaaaaaatatatgtagtattggccacggttctccaccgttggcaatagctatcccattggtttttttcatcggtgttaaattgatggaaaaaacctcccatcacctttttcaacggttctcataatgtaccctcttattaaccgttgggaatagtcctttttgtagtagtgaatatttaaaaattttattagttttctaatgtattttttaggcaaattttaagattagaacaggacctcaaaaatacttaagacgaccctgttcatgtgacataccagaaccattgagtatagaagaggcattaaatgaaaagtacaagaaggagtggtctcgggttgtggatgatgaattaagctcacttagaaagaacaagacatgggtattggttccaagacctaaggacaagaaggttatcccaggcaaagggattctaattaaagattaaagaaggtgtgacagaggaggagccaataagatttaaggcaagattagttgccaaaagtttcactcaagtagaaagaatagattacactgatgtggtctcacctgtagtgaagtataagaccattcgactgatgttggcaatggcaactcaacaaggttta

SEQ ID NO: 210965 - DNA, 578 bp, Cannabis indica
taagaagattgttcctcaaacttttcacacacgcataaataaaaaaaaaaggagggcattaggaaatttattgaaataagggtagggaaaattccctcccatctctttaggcaccgtcggcatcctcgccctcgctaacttcgtcagactccgaggaagaatccaccaaatcttcatccttcttaaactcggaatatttcgcaaaaaactcatccagatcccaagtagcagacttgccctccttaaactcggagtacagtttaagggacgactgataactcccactaaggaacgccttcttgacttggcccgtcatgactttgatctccttggccagggattctttctcagcaaccagaaccttttgagcctgagtcgacgccttttcggcttcggataactttccactcaaggaagagagtttgtcctttgccgtctcggcgtcagaacgaaaggcatcgcgctcttgcagcaaagtggccttctccagattcactgccgacagactagtctccagggaagccaccttgccactgagaacccccttttctgacccaagggccgaccgagtaaggtcc

SEQ ID NO: 210966 - DNA, 555 bp, Cannabis indica
aaatacagtatttttaaaaaaatccagcccacaatataaaaataaaaaaaaattaaaaatttcaatatagcgtaaaaaacttatacaaaaagtaaaaattacatacgagtttatttttttatggcataaataaataataccatgagattatagaattttttttaattattttttatgtcataattttgtaaaaatacatttatttttttacttaattaaaaaataacaaattttttgttgtttcacttgtgtcttttatcccagattaaaaatatcattgcaatacttttatcttaaattaaaaatcatagatgaacttagattcactctttgcatctcttacaaatatagttatttaaaacataaaaaactatataaccccattaatttaaggaagaaaaaacatcccaccaatacctcttttacaaaataagtgatataatatgtacaaacacaatttatatcataacatttcacaaatctatatgtgggaaacaattaaacatatcatcacactactaaaataaccttttgtcaaaacacaaaacaacaagc

SEQ ID NO: 210967 - DNA, 669 bp, Cannabis indica
ctcaagatcattattacaaaaaaaaaaataatatttagttacgaaaatctacgttaacagttattctagtagtttttatgtggattgttgtgtgaattttaattgagatttacatattgctctgttagttactatataaatttctataaaaatacaacaacaaaaaaaatataaaaataaaaaaaaaaatcctaaaaataaaactaattacaattaaaaaataaattaattaaaaaaaaaacaaaagaccattcataatattagtggaccccactcttgccaccgttccactcaaaagttgagttgagaagcctaacctcatcaactagaaagaaccggtcagcttacaacctttccttttcatcaattaatacctgtttttcaaaaacatttttttatttttcctacattgaaaattgaaattatataattatccattaaaaaattattttgttggtttgtataccgaatcgaataacattgttttttctttgatttttgggaataacattataaatcttttaggatatttgatgctccaaactcgactatattaaccccctcaaaaaaaaaaaaaactcaattatttcaattattattgtttttcccttaaattttgttctattaaataaaataattatcaataagagaataaaagagctctacttt

SEQ ID NO: 210968 - DNA, 788 bp, Cannabis indica
gctcgtggatacaacgactaggcacgagatcctgagcttcatggaagcctatttggagtataatcaatttagaatgcatccaccagaccaagaacatacatgtttttgaacagatatgggcctgtactgttacaaggttatgtcatttggtctaaagaatgttggggctacctaccagaggctagtaaataaaatgtttaaagaccagatcaaacaaaacatgaaggtatatgtggatgtatatgctcctcaaatctaggaaggttggggggcatataaaggatctggctgaatgctttcaaaatccttagaaaatacaacatgaaactcaatcccttaaagttctcctttggagtcagcttgtgtaagtttcttggttttattgttaatgcttggggtatagaagcaaatctacagaaaatacaagccctcctggatatgaaatcatcaataaaaactaaagaagtccaaagcttaactggtcgaatagccgcactcagtagattcgttttgaagtcaacaaacaagtgtgttcctttcttcaacatccttcgaggtaacaaaaaatttgaatggacggaagaatgcgagaacactttccaagagttaaaaagacaactttcaaagcctctcgtactctcaaaaccactggacagagaagatttaagaatatacttagtcgttatagagtatgctgtaagtgccgtgttgataagagaagagaacaacgtccagcatctagtctactatataatcaaagggcttgttcaaagctgagggatggtatc

SEQ ID NO: 210969 - DNA, 811 bp, Cannabis indica
tttttttgcatggagttatgatgatatatatctgatgttataatgatggagatctctaaaagggtcactgtttaccactagagcatcatcaagattcacacagagaattgctctattttatttttgggggagagtgctctctctctctttctttttgtggggttaaaatgcttatatttctttttgtggggttaaaatgatcatcgtcgtgtgagaatcttgatgatgctgcagtggtactcggtggctaacacttatgctccagacctcacttgtacggccgtgaagatcatcatctttcttcttttcttttttacaggttttatttatatacatactattatagtctagttgcttcttttttaatgatttggtaatataggttatcatttatttgagctttaacttatattgtttatcatttattttattttatatatttttttttttaaaaaaaaaggtgtttatattatttttggtctccgttcttttatttatttatttgtattttattaagggatgataaactttaagctaatatattttatggcattttggagtggttatatatatatatatatatctatatgtttgtgtgggtttactttaatcatctcatatataataggtgtgtattgtgtagatatatttgggtacatcactgtaaaaccctttggatatgctaatttgctatatcttgtacatgtgtgtatgttatgtatacatatatatttattttgagtacttttgagttataatttagatatagatcttcgttaaaatttgttcatgtgaatatacatatatatat

SEQ ID NO: 210970 - DNA, 826 bp, Cannabis indica
acttcaaaaaactaaaaaaaaaaaaaaaaattaccatcccacttacaccattatttttcatttagtacacaacaacctatgtttatgatgcaaaataggtaaagataatttatttaagttcatggatcataatcaaggataaatatgcattttattttaataaagaataaaaattagaaaaattaagctcaaaataggacaacaaaggataatatattgaggttagctttttgactcaaacaatttaaaaaaattgccttaatcatttttacacaacaaacatttaggatttcgcctcaataaataatcacacaagttatagttatcttaatatcaaccaaatctacatatacacacaaaatcacatattatatagaataagtagaacaacaaaaaattcatatacactatcaaaagtaagcataacaggttaagtacacaatccatcaatttttttacacacactaaatagtagtatcaaaagagtttagcattagtttatcatcgaattcataggtcataagtcaacgttaatacaatcatccaataataaataaactaaaaactacccataaaaactacaataaataaaaaaattaaaaaaacataaaaattttctttccatccccaaacttaaaataagcagtgtccccacttcacaataaaatcaaggaaagagaaaaaaaaccagagcagctaggactaagggtcgataagcaatatcactgccatcaaaagtaggtggatcgtcatcattaccagcaagtggttgatatggtctttgaagctcatcaagagattgaggataatcagtgcatcacaaatg

SEQ ID NO: 210971 - DNA, 671 bp, Cannabis indica
taaagtaatgagaatctttaatagggaactgctaaacattgtttactatacactataactctagtgtgtgtgattttgattcagatcacatatgtggatagacatgtagtaaaggtgctgcgtataattcgattatgcatgattggaccgatatgtaataaacatatttcattaacatgttgtttaccataaaagagttattcatatcacaaggatgattattagtagatcagcctgaatcctaagtatacacgaactcatatttgtgttcatcgagttctttgattcactcgttaaagtttttcagagaagatgattcttacaacttctattttgggagcttaataacatgagtggctgggaacatgttatacaatagtggaatctaagctttcctaacgattcgaatattaattcccttgtagtgttaattttgagaatgctaacagttggatctaaatctataataagttatagattaactgctcacattgaattagtggtacataaggaatcaaaagataattagaagggtaaacgataattttgaccaactctaattatgaactaataattagaggtgaattgcttatattgattatatcaatggactacaactaagaattccgtaaatatagttttatattttcaaagagtgtaattccatattt

SEQ ID NO: 210972 - DNA, 855 bp, Cannabis indica
tttcacatagaacataattaacaggcctagaattctaatatatctctataattacgcaaataataattaaaagtctaattttgaattaaaccttaattatctattaattcttaaagaaagagcggtcattacaattatcccatcattaaaaggatttagtccttgaaatgtaacctgaacaactctaaatattgagctcttataccagactctgattcccagcttcctccaccctactatttctctagagtaccttgaccaaagctgtggtcttgttgtgaaggactttatcttttctgtcaaggatctgtactggttgctcctcatatgacaaatctggcttaagctctaggttttctgtcttgttcttccttattccttttagtttgaaaagagagagagaaaatatagtatttatttgcttaactcttttcttccaatgacttaattattaaaacttaatcttatcttaataataataataagtctaataataaccaataaaagaaaatctataatcaagggcaaaattccataactgcccctttacttctaatttaagtagtctataggtttaggggtaaaatggtctaaaaccataaccttgcctaaatacaatattccaaatttcacttatatttgtcccactaagaaaaatgtttctaactcacccatgtgactctaatggccatttaccgcattttttactgttaccaagcaaaaatcaacaaaattataaacttcacatatagcacaaatatacacttagagtttaataaaatttttagaattaaaaaattataactctaatgcccatttttctaaaaatagggcccataacatatatattcatac

SEQ ID NO: 210973 - DNA, 647 bp, Cannabis indica
caaggcatctagccaccagaaaaaatttaggggattggtgtggatcatataggtcggattcagaaagggagtgaacaactctctctttctcagataggcatagagtggcattcatatcttgtagaattgattccatataaggacacgaagaagaaaaagaaaagagaaatcgcaggttgctttgatatttatatatgtgatttagcctcaatatggagatcatggaaccaagaagaacatgggattgaagccgaagaggagaagatgtgggtggttattagtgaacatggacatgggcatggtggagaagatgaaggggaaaaaccaaaaaaaccgtagaaactgcaacagagaaaataaccccaaccggctacttatggttttaaattatctataataacattgaaatattaattttaaaaatgttagatattttttttggaactactttaaatcaaaaaagtaataataataataattaataccaagataacataatttaatatttactgttaatttattaatcaaaatataaaaactttcatgaatttatagtaagaacaaaaataaattatcttttagttttgaatgagaaaattgcataatcggttataagcttttttatttattaaatttataaactatta

SEQ ID NO: 210974 - DNA, 511 bp, Cannabis indica
tctcaaagaaatttgattagatcacttcgagattttactaataaattttattctctaaattaatgtgatttcattgactaggagtattcgcaagaatactaataccgtgtgaaaatatcgtgtcatttactttctacactattattatgatctattctattctgatgaagcaaatttcgattctattgaaataaatttataacagtttcctattaattaaattattttttaatataattatttaaaatatcttaattatttaatttttttcaaaaattataactatgtattcaaaatacttaattttgaaagtgcaccgaaaaacatatattatatatatagtatatgatatatagatagaaaaatgttaaagcctataatattttcttacgtatcaatttgtgtaattaaatattgggtcttatataatttaaaagaaatgctaaaagacaccaataatgcctaacaccttactaccttgctatgtgaatatcgctattggtttaactaa

SEQ ID NO: 210975 - DNA, 704 bp, Cannabis indica
ggaatggtacctgagtgtggtgcggtcattcacatgccttaggccatctccaatgagacagcaaaatcctatatgtgctgttaattttttctcaaaatgcttcaatcacacttcaaaagccaacctattttcatggacttctacagtgtcacactaataatggtgggcattgtagactacggtatatattttttttaataattaaataatatattttaatatttattaatgtaatttattcgatttgataaatatttaatatttaatattcttcttatattaataaaataatatagtgataaagaatatattttttagtgtaatttttagtgttgtggttagaattgaaaaaataaaaatagtgttgaaatagtagttttttggtgtagatttaacactaaatataaattttaccattggagatggcctaaccttataggccatgaaaaaggtttataaggatataagatcattgtgtagtggaagaagtaaaaaagcacacaacaaatatttaaatgagtgtgtattgttacttcatgtcttaaacttgatgtgaaatgtgaataaacaatatatttaatgatttgaaaatatcaccctaggaatgtgtggtggtctaaataagtactatatatatgtatatgtgggagtgtgtctattacactagtcttcagctgactattccacacatatatatatatata

SEQ ID NO: 210976 - DNA, 602 bp, Cannabis indica
tatgcatttctcatcctggtactagaaaattaaatactaataatatgcatagacctttgctgcttaatgatatgctactggtgcctaatatagacttaaaaatttggttagtgtgtatctagcctaacatctgacaatgctgtgtttgttgagtttcaccctgatttttgttttgtgaaggacaaatcacaaagaaggtgctgctggaaggagtgcttagagatggtctttatcaactcaactcaagtctcaacaagcctggttatggtcaaaaatagtgtcaatacttccctggtgtctcgagtctgtcaaaatcaagagttgctcttgcaaccagttttcaaaattccaagaaagatgtctagcataggcgtctagctcacccatcctctaggattcttaaacttgtttgtgagtccaacaatgtaaaatttttcaaagatgaaatggaaaatttatgtgaagcttgtcaatttggcaaatcacatgccttgcactttaaattatccaattacagagcctccaaagtgcttgaattgattcacactgatttatggggacctgccccaattgcatctaatacaaatttcaagttcatttca

SEQ ID NO: 210977 - DNA, 612 bp, Cannabis indica
agttgctagccaaccaactaatttgtgtcaggggagggatgtctctttgtgattcccatctatctttcttaatcaatgaactcgaggttctttcaaaagaaaatatgttgcttagatattattttattactaattttccatttttttcattgtaggaaggggtagagatagagccattaaaatacttaaaactatatttatttacccgtatttgtaaacctatttaccaattacaacatgttaagtacctcaatgatgcagctagggctacacaacacgacaacacaattcgaaaataatatgaaataaatggctttaggtgacacatttaatttttgtgtcaaatttgggtcgacacatttaacatgtttaataaatgtgtcatttttggatcaacacgcttaacccaaaaataatacgattataacatttataagcatacatataagtatttttattttattatatcatgtaaaataaaataaaaactcttaaaataaacccctcataaaaatatttattaaattaattaattgagttaagaagatgatattatctcagaaaatgtgaggaccatgggcttatgtatccaagctcctaataagtagattc

SEQ ID NO: 210978 - DNA, 582 bp, Cannabis indica
atacaatcttttttctttctgttgactatatcattcactactatatttcttcgattgtaatttatttgactcgttaattacttctttatgctttttttttttttgttagcttttttttttttgtgtttgactttttctcttacaatttttgttactgctcaatgttataatctttttgttatataaattgttcatatgtatacatacatctattgtgttaataaacacacataataaatacatttatatacatataatatatatctatatatatacatgcacacatctataataaaagatacttatgtataaagttttaaattttattttttttccatccctacactattatatatacatgtacatttacttatctcttttttttagatttgatactgaatgatgagattttttttttgatttcaaattccacattttatgatatgtttctataaatttttatgtttgtgagttttttacaaaattttcaagttttaatcttccttcctatattgtttaattagatatttcatatttgttcttctctagagacattgttcattgctttttgttttttttttt

SEQ ID NO: 210979 - DNA, 913 bp, Cannabis indica
gaaactaaattttttaaagtttaagtttaaaagtttttaaaaaagaaaaaaactttaacctaaaatttaaaaactaaacaaaaaaaaaaaagatactataaagtaaaatttgttttatttttacttttaccttctttagttttttttttttttttgaggtaaattttattccctttacatttaattgcagcattcattattatgattacttaatattagtgagatatttcattctaaacttgacaaatgagatatatagaatttgtaaagcttctttacattttttttttgggtatggaaccttctttacattagatactctaaattgttttttttaaaatttaatagttatgtagatatatagattatacaatattatttattattctaaatatatttgtttaatttttttaggttttagtataatttttatgtagataagtgtaaatttattaatatagttagggtaaaactttttgtaaactaatcacaatttattttttttttttaaagtcaaaaatagaatatttattaaacactataataagcaatattaaatattaatcaaagcaccacaaacaaataaaaaaatacataaatcaatcataaaaataggacactaaaatttttatgtggaaacctaatgtgagaaaaaccacacggattgtaatacgcttaaatcatctactatcatcaatgtttaataataggattacaaagtcttctctagtataactagagactcacagcaacatcaagaataaacaatcttgaatcaccaatttaatcatcatcatcatctcaaaagatagatacacaaataaaaaaaaatgtttggctctcaccaccgaaaatttgagctaaaatagatgagaatcaacctcttaatcttcaatgcaaagtagcacaatcc

SEQ ID NO: 210980 - DNA, 671 bp, Cannabis indica
tgaggtttgaagtccttgggaatgtatagaaaagaaaagtggttggtgcattttggtgttatgaatttagaggaacaaatttctgaactcatatggggcatcttgacgagagaatgacaatccaatctcaagatgaaactaaacaaaaaaccagaagtttgtggaatatgacaagcttaagccaccattttatactcaaactccagtgacaagaaggccaaaggttgggagatctaacggttggaagtggggaagaagacgaaaagatggttcataatgaccctcaaaaccgtacaaccgccagaatcaaaggacgcatttttccaaaagggattatgacaaaaataccttctataattatttaaaagtactttttattaaaaaagaacttttgaaggaacaattgttacaccagaagttcggctaccatctcagtggagaacacgtgtcaagataaagggaatatggatcgatgaaaatcactttcaatgaaataactcattaattgcataagtagcagagtatatttaaaactcgctgattgtaaggtcttatgcgaggaaaagatatacaaattgttgcttagtatattaacgagaaaccatatgccattggatgtataaggcaagacatcgactacgttacatttggaaagacgaaagcgacgcata

SEQ ID NO: 210981 - DNA, 1505 bp, Cannabis indica
caaaaatcaattcaaggtcttattgtaccattttagaaatacagggttcattttgtcatttaacataacagagggtccaatttataacttttgcaaaacacagtctaaattagtatttacccttttatatttatgacaaggaatcaaggttttctttttcaaggccccatgacagaaagagcatgcaatctatatagtaaaatacaatttgtatttctaattgtctaattactaaaaaccaattttaataattatttgtggcaatcataagaggggatattggaagctgagaaaaataaacaaagaaaacagttggaaatagtttaactgccacccaacaacacaaaagatttcttaataataataattattattattaatcataaaaatgggttagacagtgatgttgcaaagattttcccagaccaaaatatttgaatcaacaaataacttcttacaaagctctgaggtggccatgacacaactgtcatacacccaattttttgtttgtttcttctttatttattttcatttttttttttgtagctttctctctctctccttgaaaaaacagctcttgttgtgagtgagttgttatataaaaataaagataacccaattgcatggcctaatgggaatactgatcacccacccaccaccaaggggtaccccatggccttgggtgtagagagactagagattccctaaggttctctattatgaactggatcaaaatgatcatgaccattgattttctttctaggtttaaatataatatataccccactacacaagtttttgatggtccccaacaccacaccgcagatgggaaagggatagggataggtttggaaatgaaaatagtgttgaaagaaaaagggaagattattattattattattaacacccttgactcaatgatagaacctcctaatctaaatttagcaatacattcaattactatactttttttaaaatttcttttaggaaattggttaattaaaataacaaagattaaagaaagaaagaaagaaagagatattaattggattcttttggtttgtttagttgagtgctttgaaggtccaaactggaaaggagttgatataattgtgaaaagggttagctaagctgccgcaactggcttttctcctaattcgccttgcctctcacgcctctctggctttggccatagtatatttgtatgtgttgtgacttgtgagaccctttcctccactccacaccaaacttttatcttaagcacacaccacatttctctctctctctctccatgtgttgtcagcagcaaatatttaccacaaaaaataaagctttggtaggacttgggttgggaggggtaccttatctacttcattataagatattattgaacatactcttagtactactactactatttctaaagccattaatactatacttttgtcctttttttttacaaaatttatacaacccaatcaaatgggaaaaatacataacattct

SEQ ID NO: 210982 - DNA, 820 bp, Cannabis indica
aaaaaaaaaaaagcaatttcaaaaaaaaaaaagaaaagaaaaaaaattgtgggcggcaaagcgtatgttagataaggatgggtactgaggtgtaataataggattgttctatttaaaaaaaaaatctcaataaaattgtgtattcacttttttcgtttttttgttcacatttctccaagttatgtattgaacttcacagtaagaacgaacttatcgatattgtttatatacttttctctaaagccaagccgaaaaataagtttgttttttcaaggttaatgtttatgggtgaaatgaatcctcctaaagaaggaaatatttagttggagttaggctaggggtttggataagagccatgtaatgttttctgataaaatttcaccatcccacgagtcatcgtgtaagtcgttgggatggtgcctgcaaaaggctgccgagtaataatctcgattaattatctcccaaactttcacatgtatcaaatcatatcgcttgaacttttaaggtagttaaaaatatttcctaaactattgagattgtcgaatttaagaatttttgtctaatttcattcaattttactatttcagtaattatttatgtactgaaatagtaaaattgaatgaaagtagacaaaagttctttaaatttaacattttccaatagtttagggaaaatttttaacggccaagaaaagttcaagggcatgatttagtacatgaagggacaaaaatcctaattagcctccaatttttgctttgttaatttgtcgattttcataggcttttgtgtgagtactgagtagataggcctctgcagaagc

SEQ ID NO: 210983 - DNA, 884 bp, Cannabis indica
taatatattgccacttattctagttggcatttgatggatctaagtggcataagagaaaatagggtagcggctaaactccttagactgttaagtttgtcgatttaattctcatattggaaaaattatggctaaactcagtctctaaccttcacaatcgttttggtcagttttctttccgttaatttttagttgttaagtaccaaatagacgtgtcactatgtacgtagaagtgtccacgtggtaaaattttattggaccacctaatatattgataattaaaaaaataaattaaaatatttaaaaacatttaaaattgaaaaagatacaaaatttccccctttctttcttatttcttttttttctttctttttttccttaatattttctttcttccctccggattcttcttcttctttgctgccaaggaaaccaaacccccaccacccaccaaccctcacagcccatctataaaagttctaatctgaaataacaatggcagaaagagcttgaaatggtggtgagtgagtgaatgtgcttagattttttaagatgttgtataaatctattctatataaaatgtgtttatgtaacgaaattcttagttaaacagattttaaaactttttttttctacaattgagaaatttgtttgggttttgttttttttcatttatacttttataattacttttttaaatcgagaggatgagatctcaaagagagggagagattgaaagggtgggtggtagatttttgctagctggttgacaaggtcgggagtgtagttttgttgggattgaggtcttgtcggtgtggttttgggttttggggtgagggtggggtggggtggcggtggcggtggtgggggacgttggttttttgggc

SEQ ID NO: 210984 - DNA, 592 bp, Cannabis indica
gttgatcacttggatcgacccaatacttacatattgggaacattatagtgcaattgaatgagagcgcaaatcatagatatggaatctatagcttctataactatttagaagtgaaacgatgattttcttagagtttggcttaacaaacataaaattgaagaactcttatttcagtaattatattaatttattgaaatatcatttataagaagctaagtattttaaggataaaatatattagagggtagaacagtaaatttattcctactcgatgtaaattatcgccgtcttacatccttaatagatttcgaagacttcattttctttgtcttacaagcttcaaccttagatgaaagtggtctttttttagaactagaagcctctggaacatcagaggcattagacattccctattttgcaatgtctttcatacctattttaggttcaccttcagccttcagattagtggactttgaaggagctttctcaggtttcttagaatttttttagcggggaaaggggacatcgaatctgatctagtggtggtcatttatacacaacaaataaaacaattgagagagagagagagaga

SEQ ID NO: 210985 - DNA, 593 bp, Cannabis indica
acttggaaaattgggggatggcaactcagttaagatttctgaatccagttggcttccatccaacgacaagcttatctttaaacctggtcttctccctccctcccagactgtctcttttttattaccccggatcggcattgggatcttaacaaacttcaacactattttgatgaggggatgtgtaactccattctatctgtgcctattgatccttctcaccctgatgctctcatttggaatcatcatccttctggttgttttactgtcaactctgcctatcatctggcaaattcctccatatctggccctggcccttccaaccctgctacctataaaagttggtgggtctctgtctggtcctccagcattccccctaaaattaagcattttgtttggaaagccttcaatcatatcctcccttccaaccttaacctctttcaccgtaaatccgttccctccccaatctgctccatttgtcactctcacccagattccaacacccatgcccttctccattgttccagagcaggtaaagtttggaagcactcttccttttttcatttttactccaataataaaaattgtgatattaa

SEQ ID NO: 210986 - DNA, 694 bp, Cannabis indica
atttgttttatatactcaaatatgcaaaattatcaactttatatatacatatataaaaatggtgtatacatattttgataccttatatttcatctaaatataggtttgtaccttgtatttttaataatacttatttaatactttacgttttaatatcatacatatttggtaccataaactcaaaatttgttgataaaattttttcaatataataaaactgtcttcaattttacaaattttgaattcaaatttaattatttgattacatataactaaaaactgtttgatcaaattaataaaattatattattaagttttactttagggtaccaaatatgtacaatttcaaaatataaggtatcaaataagtattattaaaaatacaagatactaaatgtgtttttggaaaaaaaaaatcatgatactaaataagtatattctcatatataaaaaaaaattgaaaactaacatattttgtataagttctctcaccagtcagagtcggggcctcttattaatttatatcttataagaatggggtggcaccaaatccacctcatgaaaataagcctaaaacgacttgagtcggctagccaaaaagggtcttgaagagacgcttgcaaaagtagtactatgcttacaaatgagaaggacgcttctcgatcaaaaactataaaataataagaggatgatt

SEQ ID NO: 210987 - DNA, 672 bp, Cannabis indica
tatgttgtctaatggagtaaagagccagatatatgttttattatattcatctacaaaacccttctacttgattgccataaatttatcatgaaggacccatttgagtatttctaaattcagcaccagtttttttttatctcatcccaacttaatatgtctttctttttaatctcttattgataccatagtataatatcccctaaaaatgaaatgatattgatagcttcctcaatcttcttgtcgttatcgtatccattacaagagaaaaatctttctgcttataatatccattcattaggattctcgccatcgaaacatggcatactcaacatcttgaatcattttcatgtcagaatcgtgagtccttcttgctcctataacaaaatccccactctgagctctgattcaagtggaattcaaccataggagcgatgctcgtggttgctagttgtattccagcattgacgcgttgtgttggggcgccatggggttttttggatccttgctttcctccttttccatgctgccaacatctccattaacatcctccttgaatttttggataattcttcatttttcttatacttccaagaaagtctcttaaaatgtacggtaacatttgttgaagagattcttgtaattgttgatgaagttgtcgcatcatcttttgta

SEQ ID NO: 210988 - DNA, 831 bp, Cannabis indica
ttggagatactctaagcgcatctttaaaagtaaaaacttaaatttggtgttgaaattacactaaaagaatatattttaacactaatcttttattttctaaaacactaaaaattaaaaaaaaaaacaatccttcattattattattcttcaatattcgagcacctatatatagaatttttgtttttgaaaaaaacaaaaatatgttccatgactctttttatttttttaattttaaaaataaaaacaaacatgtgttgttctgtaaattttaattttatttttagttaagtcatgtctaggtctaggtcggttcgggactgggatgggagtccgggcccctgtccaagatcggggtcggggtctaggttcgagttttgaggcgggggtccgagtttgtcttaggccaattctgggtctaagtcttggggcagggcccgagtctgggtcttgggcaagggcccgagcctgggtcccgacccgattcgagtttgggtcagggatctgagtctgatcaagggtccaagctcttgggtctaggactaggtccgtggttcgggttcgatgtcggggtctgtggactgatgtccgggtttggatttgggttagggtcggggtccaagctccgactctagggcccgaacttcgggaggcagggttcgaatcagggattcgaggtacgaagtgttgttctttgttcgtagattcgggtccaggtcctagtttggtgtttaggtttgagtcccaattcagggtctcaattcgagggtcggggtcgtggtctaggttttaggccgagtctattgtctaggtccgagtctgggggttgaatct

SEQ ID NO: 210989 - DNA, 811 bp, Cannabis indica
aaaataacatacatataacaaaaatcaacaacaaattaacaagagtacaacataaaaagacagtattttctgtaaataaaataaaaaaaatcgtaaaaatgtttaaaattccgtaaaaccgtatttttgttgtttttatgttttttgtgaaataatctctcttttcaataagattcccaacctaaaaaattttattagcccgtaacttttaaaaattagcatcattagttctttttactttttctttgtgtgtttttttttttttcttaaaaagaataatgagtatttttctcctgaacttgcactaaccaaataatataccttatgatatgtggcttattaaaaagtactctattacaataatgataatattttaatctagttcattataattacaaatatatataaaaaaatatgttatataaattttttatttttttatatatttttaattatttttttctatagtataaatttatatgcatttgataaaaataatttttaatatttttaaattatatttttatcacttgcaaaagataaaattgtagtttataagaaacataaattgatattatttgttaataataaaaatataaatataaaatattttttaaaataaaataaaaaattagaaatttaaatattatttatttttaaatatttttcatttaaaaatattttatttttatatatataataataataataattttagtaaaataattattataaagtctttaatcaaaacagctttttcttaaaagttgggttgtaccagctttagcttttagctgtagcttttccataa

SEQ ID NO: 210990 - DNA, 748 bp, Cannabis indica
gtgattgatttaatgaaaaaatcatttcaaattttttgagaaaatgtccagccttttcaaataaccctaattttcatattttaaatttgaattgtgtgtatttataaaaagaaaaattatcgattctagtaactttcttgatattttcaattatatctgatatttatgcctcttttcgccctttcctacttacatcttcttacttcgcttacccttttacctttaattttcatttcctctattctacaatcatgacttcaaaaaacactaaaggtaaatccaaattgactactgagaaagcttctaccttaactgatacaaattttaattctgattatgaatctacttacaacaatattttttctaaataccttattccaaaaggagtcaccttttgcatactaacacatacgaagctaaataaaagtttggtagaatttgaaatatctaatggtgaaatcttggtcagtcgaaatcatatgtaactcttgtgtttccttattctcactttattggcttacatcctttctcttactagactttctatgatttagttacctcccaacatcgttcaaacggtcttaggcatagccgctttatgtgctatcaatggtaaccatttctcacttctgaattcttcatctatttcgacaaaaccacttgcatgtctcgcttcatagcctagtacatctccttaaaagcactaattatatagtcacaagtttaccattgttaggttatttttagt

SEQ ID NO: 210991 - DNA, 795 bp, Cannabis indica
agtgagaagtttggggttgagctgagtttagggtatagtctctgtagagagtttaggaatccctctcaagttgtccaagtacgtttatataaagaatcaaatctcattgtagttcaattggagggtagaatcgtcattccactccatgatttaaatatgttatcctattgttgtgggttgtacacctactttcccaaagatatcaatccacgatcaaaaaaagtagaagtagttataattgtcttggagtgctatagcccatgaattgtgtacatgatcgctgtgatattagatttggtctttgggctatccaaattactttcatgggctgatcacgtgggtcaagatagattctaataaaccctctcgcatttgagcttaccaccccttaaactatagagaaaattacatggtatacctactttactttatttgtttttatttttacctttattttcatattttaagatatacccacttttaaagatgatatcttcattaaaccccttaagttaatacaaattatatgctagacttaagtaaaaagtgaggatatattgggcaacccactcaaaaaagtgggtatatttttaaaaaatatataatatgagagtattttttattaattgaaacaaaaaagaggtatttttcaacttatccctaaactatatcttagatctaaatatttctaaggccagacaactcataattaattgggcttgtacttttcacaccacgaatatctgaggcctattctgaaatttgggctttcgttctcttgagcagcctacacaa

SEQ ID NO: 210992 - DNA, 915 bp, Cannabis indica
ttgctaatccatttcttaattacagggtattacatagagagtcttgatctctgcacaggcctcattcccctcatcatcagaagatcccatttcctgaagtcgagatctatttcccaacctcaggaaatttctcaacactgaagagagtctgacgcaaagatctcctagcacaagttgggatctttggttggctggattctgtgatagaaaccacaccaacttcctttccaaatccacctgaaaccatgccaatcatcctttggaattcttcatcagcctgaggaggatctttgagatttctcacaagatctataccctctgggatcacttgtgaggatcagccatggcaggctacagatttcccctggtttgggttggtcggaagctcctcaaccctagaatccatcgtttctggctttgattgaggcttgaagtctgtaggaacaaagggaaaatggttggtgcatctgggtattatgagtctggaaggataaacttctgaactcagaagagacattttggcaggaaggaagtaatccattctgaaaatggatttcactaaagagccagaaggattgtgaaaaatgacaagcttgagccgcccatttatacacgaagttcagtaacaagaaagccaaagattgagaaatctaaagattgggaatcgtgcagaatatgcatgggcaattgataatgatcttcaaaaccatacaactgccagaatcaaaggaggcgtcctttccaagaaaggattttggcaaaaatgccctccataattattaaaaagctctttttactttaaaaagaacatttttaggggcaattgttatacccgaaattcggctggaggacacgtgtcaaggaaaagagaatgtgaatcgaagcaatataatttatgaaataactcattaattg

SEQ ID NO: 210993 - DNA, 838 bp, Cannabis indica
gatcaggctcacctgaaaaaacacggcttatcagcggtgaaccgcaagatacttcaactctaaggtcaaggaaagattcctgtcagtaggagacttagtccttctaagaataatgccaaacacgaagaacccagcgcatggggtcttcggggataattgggaaagaccatatcttatcgcagaaaaggttggcgacgcaacgtaccgactcgcagaactcgatcgtactgcgattcaaagagcctggaatggcgagagcttaaaattttattatcaatagtactcgcactatatagtttgtactcactatgtatttgtacttagtcattttttcataaaaatcctaagtatagggggtatatacaactatgtactattgatcacttaagagttatgaaatttttcaaaattttccaatttttgaaattttcctaccttaatacttattacaccaagttgtagttaagtcgcaatcgagatattataaatagcaaaacacgcgagtacccgagtactacgaaaatgttatagataaatatccccgagaggatgtaaattcgttcaaaagaaaaataatataaacttgtccaaagtacaaatcgcgagtccccttgtatcgcatatatatatataaaaaaagagtctaacacaagtaaatattaaagaaaaaagttaagcattgggaccagcaggggcagatccatctacgactttgctgatagcctcgaccacgacttcctcattgtccgcggcatcagcatcctcgggaaatagattccctccaccgtcttgagtctgcataggcgacatggcttggaaagcctcagccatctcagcg

SEQ ID NO: 210994 - DNA, 613 bp, Cannabis indica
ttgtattcatattcatagagctagccttaagtattttataatttaattatcttttttgtatatacatgaaaaaatctcatattttaatattaaatatatataattatttaattattaaaaacttaaaaacaaaaaaaaaaataagtgtaacctacaatttatacgtttaattatttatagtgtgcaatagtgtgaaatcacactatttttggtgttttaagccaaatggagatgacctaacttgcgcaactatatcatctagagagaaaaaatagactaaagagagtcgttcctttacttggagagtgaaagtttcatattacaaattgacattgacttatctgtgtatcccatgaaccatttttttcctttctcccgctaaacacatttatatattgaacgttaacatcagatgggaaaataaacaaaatcaacaaatagaacttcaaacacctcaatccagccccaacactctttacagggcacaaaagtaacgaaataccattgacaaatttatggtgcatcgtttaaatacaagtgttgatttacaaaacctttctctctagttaccatgctcatctttatccctgcaataattaaataaaagaattag

SEQ ID NO: 210995 - DNA, 822 bp, Cannabis indica
agactaaatatgcttactaccaaaagtttttgtggtatatgaatactattagctactaatatttttttgtagctaaaattatatgttggcttaaaatataaaattgatgcattttgtgtatatattggaatttattgctactaaattatatcatatttttacactagcaaataaaatatttttagttgaaatgttttatgtattaataattagtaaataaatagcaaaaatataaatataatacatataagaataataaacataaaaacataattacttgctccaacaacaaaaaaaaactaatactatattttcttaaaaaaaacaataatgtatataagttatattttgttttaatattaaataaaggtaaaaagaaataattaaatttataataaatgaataagataagctaaattaaaaaaattataaatgccataaaaatttgaaagaaaataatataataaacaactcatataggatacataaaactttgttgaaacaaagatactacatggatcctctctagtagtagtaagcctcatgagtaaaaaaaaccaaaacaaaccaatagataaaagcatcttaagaaaaaaaaaaaaaagacacttactatctgaaaacaaattaataattagctataaaaaattatataataaaattaaaaaaaaaaagtaggagcacaaatacttctaaaacaactttcaaaaatgaaatatttgcatagcactatataacaaagtttactttctattgtgataactcaattaaagcattccatcttctgcaatttcttctaaaaattagtcagcccattctaca

SEQ ID NO: 210996 - DNA, 658 bp, Cannabis indica
cagagtatgcagcaatgatgttcactcccggagccgttatgtcaggctacaacataaaaaaaaaaaaacaaagttaaacaaacattataaaaaaaatcccataaatcattgaaaaattattatattaattaataagaaaaccttaagaatagaaggttcaatgaaactaggccctctagatgaaaacccagccatagaaggagattgcttgacatcaaatagagtggttgcttgagcaatgtgtgccaaaggagacctaaataatgaataaaaaaaaaattaattatgttattgaaagaaatttcttccattatgataaaaaaaatagaaaaaatattagtacttagtagacttgaggtaactaaagagcaaatttgcatcattgtagttgagatgagaagctggaagataatgaggatcagcaatgacatcatttccatctgtgatagtattagccaaaatcattccgattgcaccggcaagagcagcttgttgacccttttcgattcgagcattgtcgcccctaaggcagactagatctccccttagccttttcgggtcaagagtgttaggcttacataacaaactgttataaaattatgtcatccatcagtgtttaacgtattatatcgtattgtaatacgacgtaccaacgagc

SEQ ID NO: 210997 - DNA, 595 bp, Cannabis indica
gaaataaccccgaaccacacagccaccacaaggcagaaaactcaaagaatcaacaaccaagaaacccgtcaaccaaacaacctgtcaaccaagaaacccgacaccgaagacacccgacaaccaagaaaactctgaactatccccacacaaccttaacacctgaacattaacaaagcaacaaaaaaccagagaaacaaaaaccatgtcatacgacaagacgtaaccttttatacaaatttcgactgctgaaaagatctaccgacccccgctggttgttaacggcatgaagagcacttgagatcgtcgactgctgggacattcagcctaccagaaacagaccagtcaccggcgactgcgaggaaccatgtcagacagacggctgctggacgagacgactgcttgaggaacaaagatgactgcctgctgggagaagcagtttgcaactgcacctgcaacaaaaccagaaaaacaaatgaccaactccggcgacgctgacaaggcgaatcggatacggcggcgctggtggttacattccttgtggcggcgctagaagggttacgttctccgtggacggcgctagtagggttacgaggtt

SEQ ID NO: 210998 - DNA, 559 bp, Cannabis indica
ataaaatgatcatattacagtaaaagttatgttataattttttttccaaataacatattagcaacctaagaaaaaaattataattattatacactttaagcaaattagttcgctaacatgtgtttggaagttactatgtaaattactaggtagtgtaactattaggtggtatttataagtttaacaattacattatattttaaaatattatgaaataataattacaatatgaatttctaacatcaaacacatagtaaatacaagaaaataatatttttttaataattaataattgaaatcaaatttttttaataattacaaataattctagagagtgtaattatatggtggttttccaaacacaaaaacaatcttaaaaagtgcagaacccaaattaaaaatgtgatatttatgaaagttttaattttgcagacctaaatcaatagaacctacctcaactctttctttctcataccataaccataacctctcctacctcagtctcagttactcaactttacttcgggaggggaggagacgactcggggttggtatgctc

SEQ ID NO: 210999 - DNA, 856 bp, Cannabis indica
ttgtttgtgcattgtcctgagcttgtgataatggcggtgaagggtaatatggctgttgcgaacataataactcaacaaattctcgagtttgtggttgttgtggcagagtcggagattgttgttggtgcaaaaaaatcggagattgttgctgaaatttaccacgaaaaaatattgactttatggactgaaaaatgaacttggaaaaggtggctgcagtgaacccccaatttgactatacatcattggttgctgagaagagtccccaaattgaccaaacatcggttgttgtgactgtgatcctccaaacaaattagagtagaaaagttgaggagactgcgaggagcgtccaaacatgttcagaattagaggggatttggaggaacttccatgcacgttaggagagaactgctaagcctgttgaaacggttgttgttgcggccttggacaagttatactaccttgaggctgtgttggtaaatattgctatgggtcatacaaatcagaagtgtcgtgttctggtggaaagtgttcacgcattctattcccatctcagccataataccaacatcttgggaagcagttgaccctgcttgagattgactttggctttgacttgaagagtcaaatgttaattttttccctctttccgaagctataccaactccgcgtatatagtcactcctatctcctaatacattatccataaccttgtaatggatgtcaggcaacaactctgaggatctcgaatcattaccagatttagcttttaagtatgcttctggccatctcttcctccatctcatgggtcaatttgtccaaactatagatgaaatcgtttaaaatataacaatgtcat

SEQ ID NO: 211000 - DNA, 923 bp, Cannabis indica
ctttaaaaataactttttcaaaaagtctttttaaaaaaattacaaatcttaacttcttcaaaaatgattattttatttttttatccacacacttagaaggtatttttttaattctaaacagttaaaaaagaacttatagaaactaaatcaaatgaggtcattatctcttaagatataaattttaaaatagcataatcattccatcacattttattcaattttatcacaaattaagtgaagtgttgaatagtaattgataaattaaagtaaattaaatattcttgaccatttttacgttaatgaataatataataaaagatttttttaataataatttatgttttaattttttaatcattaaagtaaaaaatgtgataagtatttaatttatatatatttatcaactactatttactttgtcactcgttttacaataaaattaaatagaatataataaaatgatcatattacagtaaaagttatgttataatttttttccaaataacatattagcaacctaaaaaaatataattattatacacaacaaattagttccctaacatgtgtttggaagtaactacgtaaattattagatagtgtaattatcaggtgatatttataagtttagtaattacattatattttaaaatataaaatatatttaaatatgagataataattacaatatgatgaatttctaatatcaaacacatagtaaatacacaagaaaataatattttttcaataattaataattgaaatcaaatttttttaataattacaacgctaattaggattttcgcccctttgaactttgacatgtaccaatcatgtcccctgactttaaggtcattgaaatgcccctgaactacttgagattgttggattttaaggacttttttttaattttagttaaaaaagtc

SEQ ID NO: 211001 - DNA, 950 bp, Cannabis indica
tgatgctttggttaacaatgccgacattaaaggttattcttgagtcaacccagatctgatttctgggtttttcctccttttttgggggtttgatttctggaataaaaaaacgaagaagaaaaggaagaagaagaaagatgaagaagaaaaagaaagaaaaagaagaagaagaagaaaaaatattaattatttttaaaaatattttaaactatttttttaatatataaattattaaaaaaaaattgattttttaattttattaaatatttataattattttttaattctaatattacatggaccactaaaaatttgccacgtgtataagggtgtacatgtggacagtccaccgtggcacttaattgtgatttttggatggagatgtacagagcaaaacggaaccagggtttaggtagttatgttgccaaaattttaatttttgtgattatctgttacaaaccgtaaagttcaggtagtttagccgccaatatcccatttttctattatattttctagtgtgttagtccgagtactataaagagaagcatatcactactattcattttggtactaaacttaaaagtgtaatatgagagagttggagggggtgttaaaagagttcattgtgtatttgatcaatatctctcatgtgaactaaattgtaatggtgctaggctaatctctcttgtcacgtattgtaaaatcactttggagattaaataaagaaatcaatcattgttgaaggctgttttatcagattgatttctctctcattttagttttattgttgggtaaatactattttggactctgtgttttacaaaagttaccaattggactctctgttttcttaatttaagtattctagacattgcagcattaggaaagtaacagaaagagaaggaaagaagaacatagagaaagaggaagaaagagagaaagagagaaag

SEQ ID NO: 211002 - DNA, 903 bp, Cannabis indica
aaacaataaaatcattattattagtcacatggatatcctcttcatcaccatttatatttccttccaccaatttctccctcaaatctcgagcagtaactccaccttcccctaaattagttgccagcccacgatcaccaactccctcaatcaactcctcagtcaccgctgtctgccccgcccctaccatcaccgacgttacaagcttcgaactcccctcccctctctcggaaatccctcctgcaacacctgaccggagccatttagctctaattttttcagaagcctactgttagctttcaaaaacatctcataaggcttttgaatcaaatgagcaggtgtatgaaataacttaggacaaaaacgttccgaatggcccaaaataccacaaatgaaacaaaatgtcgagagattctcatacttaaatttgcccagaaccaactacgatcctcacaaaaaattttcattctcctccgcagaggtttttcaacatcaaatgttactcggattctcatatattccctccacactcctgagaagttgttaatatccgattccacaaatttacccattaaatttccgatatccgtcaccaccttcaacgactgaaaaccatgttccagatcataaatatgaatccataagtctaaaaaatgaaggttcacattcctgggattctccccttccttcaatctatgaataataagttgttttttattaaaagtccatggactccctgtgatcactctctcaatatctatctcatgataaaattgaaacaaaaatagattagagttcagttctttaacatacattccttttccgggctgccatagaaatgccatcatgttttgaaaagcatcaaaatcactcagtcttcctgagagaagtttcccaatcagacac

SEQ ID NO: 211003 - DNA, 527 bp, Cannabis indica
ttacttaacacttaacagtcaagcatctacagtagttccagaattataacttagatattattactaccaaaaattaaactttaatatttatttacaactagaaattaaacttaagttattataccgcaaattactttaaattatttgacacaatactaaatatatatatatatatttaaaaaatatatatatatatatttatggaattgtgaccaagcacactcgactcgtcatgatattgtagagtaattgatcgagcaattgatggagcattgccattataggtacagatatgcccaacattatattaatataatgtgttacgattaattagtaattttttatattatttattaaatcaaattatataacactcaataattatttactccaacaataatagaccacatgatgaatcttaacatttctctagttgacccgacacaatacaagttataagcatgcatcaaactagttcaaaagatagagagataaagagctcgacaatagttaataatgtatgacat

SEQ ID NO: 211004 - DNA, 605 bp, Cannabis indica
tctaccagtgttgtacttttgtaatctgaatttgccgcttaggtcggctagtgaaaagacttgtaatactttgtaaaacattttagggattccgaaatatgtagcttttgattgtaaagtttattacaagaatttttttaattcttttttggattaaagtttaaattttccgcaattatctttgtagtattcccggttaaggggattagggtttcataatcggttgtcgtgacatgcctagcaacaaactcagaataaaatattttgaaagttagagatatatgatattaatatttttactaaacttaagtagcaatagcctttattggcttcaaaatatcattgtataatagattaatatagttagttaccgatcaaaattaggaaagtgttttcctcatcatattttttttggtagtctcattcatcaagagatcatgttttcctatcaccaagattggttctattaaatattttagttttttctatcatcaacatttggttctttcaggtttagtatattatataataaactgatgtgatcaatgcatgatcaaacacctcgcaaataacacaatgcaaagatttgatcaagaacagaattg

SEQ ID NO: 211005 - DNA, 554 bp, Cannabis indica
cccatgttgtcacaccagatgatcggggtatgtttgagaggaaattgcacttcctgaagtaaagattgaatccatgtaagttcggctgtcacttgagcaagtgctctgtattcggactcagtgctggatctggaaacgacagcctgtttctttgatgaccatgacacaagagagtctccaaagtagacacaataaccagccactgatctcctatcatctgggcagcaagcccaatctgcatcagtgaaaccagtaagagttaatctgtcactgggtttgatatgcaggccgtgatcttgagtgttcttcaaatatcgtaaaattcttttggctgcagaccaatggacatcagttggtgctttgaggaactgacttagtttgttgacagagaaactaatgtcaggtcgagtgtgtgtgagatattggagagccccaatcaagcttctgtattctgtaggattgttcagcagtgtaccatcttcaattgacagagttttccctactgtcatgggagtagggcacggtttgagatgtgtcatgttgttcttctcgag

SEQ ID NO: 211006 - DNA, 619 bp, Cannabis indica
taaagcataagcataagcatatgttctgccattccgatatattctcatgggatattatattatgctcttccttttttttctttctttcatgtcattatcttttaagaaacaaagcacaaaataaaatctcattatcaatattttttatagtttcaaattttaaaacatttaaaacactcgtccattaatacatttatgatattggggataaattcagagtttccaatggtaaaatataagcctttttttatgacactttagctcttaaggatgtgcgtagactttaccttaagttttttttttttttttttttgaaaataaagtagctttattcaaacaaatcttccaaaactatgaaagaataacaagtaggtaaagaattcccactaagaacacgatcaacctcataaagagaagcccgtgctaaagcatgcgcaagactacctaagttaagcaatagaatgggacaatatttggctacaagacgtaaaaaaacaatgctaaaaaaaggcaaccttgaacttttatttttttttaagtttttatttatttattattttatttttttttataattttaaaccgtgaaaatcatgaaaattattccaaaaaaaaaaaaa

SEQ ID NO: 211007 - DNA, 532 bp, Cannabis indica
aaggttttgtattctgaatctccctacaaatgaaaaatctttgagtaacatgattctgagtatttatagttggctctcaaagattatagatctggttctttgcgtaagagttatgattattattttgtcaaagatcatttagtatttggtttaattataatggttataaagagatcatgatttttattctataatgatcaagataagagtcaaagttgttgctgcactgattttaagattaatataaatatatatatatatatatttaacagccattaacattattatattagtttcttttacaatatatatatctataggaactgattttaagatatttcatattagtttttttaattaactttatattattaatatttagggtaaaaggcacttaaatctgttattatattagcagtagttgatgcattgcatgaataataaaatatcttagattgtttaaaagtatacatatgaatacttatcaagtgaaaaatataaataaacgatttgccttttgcttttttatatt

SEQ ID NO: 211008 - DNA, 568 bp, Cannabis indica
tttctttgatgttcttattgattttaacttgatgagtcctgaaagtaattcaatcatgacatgtttacttaaaggaatagaaacaaatagtatggtattaatttccatataattgttttctaaaataatgtgtctcttcttacattttttttatatatataaggacaataatttttttaatggtaaatattatttgtgaccctatattatataaaagttattaattggatcttttaattttaataaataacattcaaacaaaatagtacaaaataataccttaaacttaatttttattttttttttttaaataaccaacctaacactattacaaaaatggtgtttcctgtaggaaaaagtaacactcagagctcgcactcgatgaaaacggctactgaatacttttgcctttggttttctaccaaagcaccggtgctgacaaaaaaaacaaacgacaaacaagtaatttttttataaaaaatatcatcaaatgggcgaaagcccatttacccaaaacctaactacactaacacaaacctctcagccacatatttctctctctctctct

SEQ ID NO: 211009 - DNA, 592 bp, Cannabis indica
accccgcccagaaaaatgagtctgatgtgctggaatgctcgaggattggggagtcctcgtgcattccgaaatctcttcctgtgtatcaggaaaaataggcccaatcttctctttgttatggagtccaagcttgctgctggctgtggggaacgttttagattaaggctttcttttgattctgtttttgaagtccctagaaatggtttaagaggtggtcttttgttattttggaactctgaatttgatgtaaatattttgaattactcctctaaccatattgactgtattataaacttccaggataatataactatgcatctttcttgtttttatggctctccttattctgttgaaaaaatacattcttggaccttactcaatagattgtatgacaatgctccttctttaccctggtttgtttttggtgattttaatgactatttttctcttaatgatcgctcgagttgttcccctcccccccgccccatctgctatgacacactttacaaaattttatcctaaagttttcttctctcctttgcagtccggttgggaatgtgtatacttggaagcatggtctctttgcttgagc

SEQ ID NO: 211010 - DNA, 508 bp, Cannabis indica
taaaatatattccaacaactggatttacagcaatggaaaagatttagtaaggccagtatagtctaattaaaaatatcgacatactgtagatatttttagcaatgagacgagcacagattagttgtaatctttacattaaagaattatggttaactttattcatattatatttcatattttattaaatatttaataattattaatttttattctttattttgtaggtgttctattagaggtatggaagtcacaactctcaagtttgaggtttttttttcctaatattaaggttttattgtctagttcttctaggatatctatgcatgcctttaaaatagacaatgaacttcttagatgaaagaaaatcctccattttttgagtaacgtagttacctttgtttattttgtttgagttttgtgccctaaataaacccatttcaatataataaaatttacttattaataagatcagaaataacattttatgttgcatggttcacatgattta

SEQ ID NO: 211011 - DNA, 526 bp, Cannabis indica
cttatcatatgtgtctcaacttatagaatctttctttgattgtcaagaaaccaataatggtggcagagtactaatgggtaatgatgtttcttacagggttgttggaattggtaaggtggctataagataattcaatggtgaagtgaaaattctgcataatgtgaggcacgttccaaaattgaggaggaatctgatatcacttggaaccttagaagatgaagattatggctataagtccttaaatgggaacttaaggatcacaaaaagttcaatgcttgtgatgaaaggaaagaaagtacatagattgtaagtactcaagggtgaaattgtacttgtggccgaggcaaatatatatatggcatcaaaagctcgaaaatatgaatgaacaagggcatgatggaattgcacaagaatggagtcattgaaaaacttcagacatgtgcattaccattctaaaaagggtcgagagcatttcattaaaaaaaagtttatattttttgtatctctaattaaaacttaattgtta

SEQ ID NO: 211012 - DNA, 650 bp, Cannabis indica
tttttacatttttatgttaatttgttttgtagaaattgcattttataaccactttactttatttaatttaatttttatctttatttctatattctttaagatatacctattttgtaactttgctgcccataatgcggctaaatgagcgtttacccaccagatgtatggatgtattccagcctccgctttgccggagaacctactttgtaatgaccgtgaggtctagcttttgattatttaatgaagtttcacgctaattttcaaaaaaaaaaaatatatacccatttttatagatgatatccctattataccccttaaattaatgtgctacacttaaatagggcaagggtatattatgcaactcactcataaaagtgggtagattttaatgaaatataatcatgtgctacaaaaaagaaatattcctcaacttatcccatttttttatatatatttttacgattttttttataaaaataacatccaaacaataaaataaattacataaacgtaataggaaaataacatcaaagcaataataaaaaaaataacatacaaataataaaaaatcaactaataagagtgtaatattaaaatacatcaaaaaattgtatttaactgtaaatgaaatcataaaaatatttaaaatt

SEQ ID NO: 211013 - DNA, 392 bp, Cannabis indica
gaaaaatgtttttaataaaagttttagatctctctttcatcttttcaaaacatcttgaatcgtccaattttgagcaatattgaaagagttatggccaaaacatttttagttgacgtagtaggaagctcgctatcaaaaatcgtgcttcaagcactgcgtcactacaaggtagtgtcgcagcccgcctactctaaactgtgaaaattaggttattttttatctttttttagctatataaaggcccttttttcaatacttttaagcagatgagtttgggaggagaaaaattagaggcagggaggcggctttggagactttaaacatttattttttcgacgagtttctttcttctatttacttttcatgttgttaattagttgttatcaattgtt

SEQ ID NO: 211014 - DNA, 577 bp, Cannabis indica
tttttcttccttttgcatcgtttataaattgatgctaattgttagtgtcgattataaatcaatgccaatagctctttctattaaacagtcactcaattttattactgtcgatgacgaaaaaactgatattttgatcaacacgaatgcccaattttttagtattgtcattggaccccctttcccctaaacccactccatctaaccctgtctttttccagcagtttccatcattctccattagtgttcaaacttttcttcttcttcaattaataaagattgaatgacattctaaacattcataagccaaaaatttcatacaatttccttcaacatttaaaacctaaatttcataataaacatcaagttaaaaatttcaacctacaattaccaatttagaaattcctccctcataatacatattggacaaaaaaaaaaaaatcaaatcagacataaaaaaagaaaaaaaaatcacagcctttgatctttcttgggggtattcgatatagtacagatcgtcgtaaagcctttttcttctcaccatcctatcgtttctgcttcaccgaaatattttgatttg

SEQ ID NO: 211015 - DNA, 655 bp, Cannabis indica
acatgtggtgccacatttgtataagtgtgagtttccctaatagataatacaatttaattttatttattataatttaattgataaaataattaaatttagatgtatggacaaagtctttcttctcataaatatagtcaatgaatgtcacacacaaatgtgacatatattctgttttattaaaacacttctatgtatgatttgtgatatcttatttaattagaaagtgaagtctctttattgttttgtgtagagccaacatcagggtcgtttactctcaagattcatcacaaaggacatttgcaaagacatggtaatatacctacttactttggtgggaagattgattatgttcatcattgtcatattgataacatgtctatgtttgagctacatgggatagctagggatattggtcacacaaatcctgttgaaatgagcttttattttaagtgggataatgaaacattggagtgtgttgatagtgacaaagttttggttgagaagattagtcaatttattaaaaatagtcatgtccttgagtgatatttttgtaatttggattatagaaaaaaaaaggttctactttaggtgttgagaaagggttagtaggtgatccaagtggatcttgtttgggtgaaggacaagtggatcacat

SEQ ID NO: 211016 - DNA, 699 bp, Cannabis indica
gatgttgtttactagtgacaaccaccatcatgtttggcagatagcaacttgtcaacgaatatatgttgatgctagatttgttgatgactcttgaataatacccctagaatatgaagaaagtgggcaaagtggtaccgtcattgggtctaaagtgatgtcaaaagacgatggtcctccttgtaatgacccagattatttgaggagaatatatgtctcttgaccgaagtggtaatggagttggttctggagataaagtcaaaatagaacccttgggtcactctgaagcttgtgtacctgaggaagttagggaattagcaggtcgttgatgcaccactaataaaagccatcattaacttgattgttcatcttgctttctgtatttttcttacatactaaccactcattgttttttcttgcaaataagacgagttttttcacttccatggccacctactccaaacgaaaaaagcctccaaccaggattaacgaacctcttggtcgagaggttgtgcaagccatatatgtcaattcttatgttcctttgaagaagtctaagaggaaagacaaagttattgtgactgaagcttcttttccagtaaggcatccgcgtataaggaaggagaaggttattgaaattgatgacaagccttctacttccctggaggtcatttatttagaagacattgatgtgatcgacct

SEQ ID NO: 211017 - DNA, 1037 bp, Cannabis indica
atatatatatattagattttataaacttggaaacaataattccaaatttccaactaatagtattaaagaattagaaattatttttagaaactaacttattttaacttattttgttattactactttatctttacctcaataataactatttattaaattgtagtcattatcatctttcactataattatgaagaaattaaaaatttaataggttctgaaaaaaaaaatatgtaattagtttatatataattattttaaactttgattttcattcaagttgacattttatattctctaaaattagcatcatcaattatatgctatatgctgttcaataatgacattttctttgtaaggatttgttctgtgattttaatgtaatattgactaagatcatatatatactttgagtgaaattgttttttttttttttttttctcaataatacagttttgaaattcttcattcgaacaaatctcataaaattgggattgtacactttttttttctttttttttttaaattttttgaaagttttttttcaaaaaaaaaaatagtttcttggagaatattggtatgtttttcttctttgataacacttttgtacacaaaatattttttctttaataatttcatttattttaagaatgaagaaggagtagaaaaatttaaagaaaataagaaaaaaaataattaattgctatgtcatcaagttatatggtcataataatctaatattaatttttaaaattgacaataatcatatatatcaatcattagagggaaatttgattaaatatatataaaactttaacattttttccttaaattcatatgtattaaaattggccatatataaccacattaccattttcccaataataccccattcgacccacggtggacccaatcgacgaccgaacccacaaccatatcgacgaggcaatcgaagaccggatccacgacccacacggtgcacgccatccataacaatgtcgaaggtgtgttttcattttcttaatacaccctcctcacgt

SEQ ID NO: 211018 - DNA, 995 bp, Cannabis indica
cctcagacttggactcgaccccagatttgaacttagactactgacctatattaaataaattcaaacaaataaaaaaaataaaatttatagagctcatttttattttttaaaaaatatacaatcatttttgtgatttaataatttaaaaacataaatgttatcaaatattacttaatgtgttgaaaagaattcaaatttattttttaaaaggttaaactattcgaaattttagataaatttatatgattaatcttgtaattatatttaataccagcataaaaataaataaaaaatgaagtaacccaacatgtatttttaagatagaagttatggggtttatggaggccttaagctggctaaaaactaattcttggtatcaggcaataatagagatcgattgtctcttagttgtggagttcttaaaaagtaccgtgagtttggtttctttattttatttggtattgtgatcaaagaatgtaagtccatactttgagagtaaatgtttcattttatttggttaagcaattagctaatgtgatgagccttctctctccctatctgttcgaccactcttctcctctttcttcttcattgaatttcgaaattcttagtgtaagagtagtgcccacacacagcaagtgatacctcaatcatagtgaggaagatcgtgaagaaagacattcagcaaaaggagtttcagcatcaaagattcagagaaagagatccaggttcagatattgataatgctctgctacagaaaggaatcaagggctagatatctgaacggaaggagtcatattattccgctgcacccaatgtaaggtttcctaaactttatatgtgtttatttcatcgttttagaaagttcatatttagggtgttaatcaacatacttgtgagtagatctaagatcctggtaaaataatttccaacattacaggggtactagtaatggaccctccgcaatcatccagaacacagggcgagcaagtaga

SEQ ID NO: 211019 - DNA, 653 bp, Cannabis indica
tatctaaactctaataactcaaaaaaaatgtactataaagaggcttaaaaagaaaaggtatttttttaagaacaaaaaaaaaaagaataaaaaagtatatcatgtaaagaaaattcaagtttggaaaaattaattgtacaacaggacaaactggttagtgaggctttgttccaaaaaaaaaaaaaaatctgagggtcattttgggagggcattaagttaatataaagattagaaataaaaatcacgtgcgtaaattcttcgttaaaaaattgaacactctttttgtaaaatattttcgaaacttttaaaattttaataataatggacacaaacataatttaaaataatattttaggaaataaatcatctgctattctttatttatcttttatttattttttaaatttattggtgttttatttagaaaaagatattgttacccataaattaaataattaattttttttggaaagaaattatttttaattaaatgaaataaggtgaatgaatttaaattacaactgtgatttggtttggttactcaattttttatctttctttcaaaaaccatgtgaccaccaatcaccacctccattaatatcctctatataaaacgacacccactcttccctcgccttcatctctctctctct

SEQ ID NO: 211020 - DNA, 595 bp, Cannabis indica
tcgagaagtccttgataaatatctagtagaatcctgcgtgacctagaaaactccaaactccttttacagaaattggagggggtagattttcaatcatagacaccttggctttatcaacctcgatacctacccttgagatcgtgtgtcccaaaactatcccctctttcaccataaaatgccacttctcccagttaagtaccaagatcaactcctcacacctgattagtaccttctccaagtttctcaaacaattatcaaaagataaaccaaaaaccgagaagtcattcataaaaatctctatacaacccttaatccaatctacaatagatagccatcatgcacctctgaaatgtcgctagagcgttacatagtccaaatggcattctcctaaaagcaaaagtgccatatggacacgtaaaggttgtctttttctggtcctctggtgctatggctatttgatgataaccagaatagccatctagaaaacaatagtaatcttgtccagccaatcgatctagcatctggtcaatgaatggaaaatgaaaatggtctttcctagtttccttattaagcattaggtagtaatgcaaatttt

SEQ ID NO: 211021 - DNA, 860 bp, Cannabis indica
cactgatattatgagggacagttggctctggaggaggctgagttgaatttgctggtgttgacacaccagaaccctgcaaaggcacaagataacttgccaagtttggcacaattggattagagggtgtaattctttcattaatgatattggatgagggagtgtgtgctgtaggaatgatagcagatgtaaagaattcatcataggcataggaatcagtgtcagatggagaaatagcagaaaaagggaatgatatttcttcaaagataacatctcttgaaatatagacacgacccgaagcatctaagcacttataacccttgtgattcaaactgtatcctatgaatgtacatggggaagacctgaactggagtttgtgtttattatatgggcgaatgttgggaaaacatttgcagccaaaagtttttagagttgtgtaatcaggtgtaatagaaaaaagtttttctattggagagacattctgtaggacaggagttggtagtctattggagagatacacagctgttcgaaaagcctcatcccaatattttaatggcatagaagcatgagcaagtaatgttaagccattttcaacaacatgcctatgttttctctctactagaccattttgttcatgggttgtgggacaagggtgcctatgcaagatgccaaattgtttaagtagatctgtgaatggtcgaaattcaccccccaatctgtttgtagacatttaatttgttttcccaattgcaattcagattcggctttaaattgagaaaatgtttttaaggcatcagatttattcttaagtaagtatagccaagtgaatctggaaaaggcatcaacaaattgaatatagtatc

SEQ ID NO: 211022 - DNA, 860 bp, Cannabis indica
ttttgaagtataaaattaaaaaagccctttctttttaaaatattacaactcaaattttaaattcactacatatatttcttttatcttttcttatattaaatgtagataaataacataaaatatttttttaacattgcaattcaaatttaaaatcatagtagatatctaaaaaaaatatattctattatttttttacccattccacgtttctaaaaaatatattttctatcaatattttttaaaaataaaaattaaaaattatttatgtttcttaaaaaattaatattattacgttgttatctatttcatttactaaaaaaatatttctgtaaataaatgtatatgatatttctaaaaaaattaaaagtattacagttgaactacaattataattaactttattttaaatattacggtaaatagcggtataagtacctaaagttttaagtttgtaagcgacctaaactcaatgtttatttttagcggcatatgtaccaaatatttgtaaaactttaattttcttctagtttcgtcagtacagaccctgttttgaatttattaaaagaatattttgaggtaactgatactatatatatttctatctagacctaatgatctagaattcgggccttatatatgccctgtttaaaacaataacagagtctgtactgacaaaattagagaaaaattatagttttataaatattgggtacttatgccgctaaaaataaacattgggtttatgccgtttacaaacataaaactttaggtacttatgccgctatttaccctaagtattattctttttatatatatatataaatagtgcttaaatcaaatattttttttgattaaaaaat

SEQ ID NO: 211023 - DNA, 662 bp, Cannabis indica
tcccttttaaggattgcattgtaaagattttcattatagttttgaggaaaatgagattagttattgggtgcttctacaatgtactacccttaaaaggaatgcacagatgaaccctctattatttcggtaatttagaaaaatttcagtctacgtttttttcattggtgtatggtatagttatttgagatatccaataaaattttaggaaattcagaataatttacaatataaaaagtagtgttcaaacaatctattttacacgcgtattaaataaaagagtcttgcatgcaacagaatgtttgaacactattttagcgtgttaaattttctaattctctcaaattttgcaggatatcttaaataactacaacatagacaaccatgaaaaaattaattagactaaaaattatctcaaatgtcgaaagagatagggattgcattagtggacccttttaggggtgcattgtagattattattattattattattattattattattattattattattattattattattgttgttggaaagatttggtgcttctacgatgcacctcataacatgagtgtattgatacaccccctatctattttggcatttagaagaattttttactttaatttttttatagtcgtgtatattatagttatttaag

SEQ ID NO: 211024 - DNA, 732 bp, Cannabis indica
tcaccatttggagctcgagatgagggaacaccagagtgataatttcctccatttcttgactgatttacactcaaattggcttgcatctttagtgaaagatcagttgtggtgttgtggtgttcaagtcttgattcatgagagagtaacaaagcttgtacttcctcaaaagaagctcatcaccgcgagaagtgatacccgagactacgggatcaaattctggtccaagaccattcaagagttggagaaccaagtcttgtgtgtcggcaggtgagccagcaatggccaaagcatcggcagtggcttgagctttctcaacatattcagcaattggcaaggtgcctttttgaagtctaaagaaattaccctttaattgcaagagacgagctttggtctgggatgaaaaacgttgttcaagagccctccaaaccgagaaggttgttgtgtaagttgccacagaagcaagaataggttcagacattgaagacctaatccaagagagaagaagttgatctttcttcttccactgcagatactcggggttcggagttccattgaccaaggtttgtggtggagtgacatccgagaacaagatcggatcaagatcgtgccctataaccgtggggacgatttgagacttccatgagagatagttgagtcggtcgagcttgatggtgagtgaagaagacagagagttggcaaatgggttccagtgaactggagaagcagcggtct

SEQ ID NO: 211025 - DNA, 985 bp, Cannabis indica
tcaagagggaacaggagctggctcatatcaaggcccaggcaaccgccgaaagggcccttcgtattggagctctgtcggagcggaggaccactagacctaagcctgtggtcccagtaccaaatactggggctcccgaggccagaacttcgggttctggtaagtcccccttaacaatacattatgttcctcctgtccatgagtataccagccttaggcctatagggttcaatgagcgtctccgtaggtttgggataccttccacccggtgggggaatcatgccaaggaatattatttctcccacttaggccattatctaggtaggtcccggatggattctggacctccggcgcctattcccttggattattcatctcatttatcctctagttggttccttccctcagacagttttctcggggatgatgacgccagcatcatgattcgagactttgctagggccgaattagagagtcagggtaggactagttttattgctttttgctaagtgtatgcttttttcatggatgtcctgacacttatcttctttgttgcagcaaccaggcccagggatgaactcttggcaactctcgttgaagtcctgatgcttccccacctccggctgcctcccagttggttactcctgggaggtcctcctccaatgccccttcgggaaccatcgtcttggtggatgaggaggaggaagttgagaaggtgaagcggaggacccggttgcccttgagtgtaagcgaaagggcaagatgatggaggtggagtcctctaagcagcccgcagggtaaacactccagccccgagccatgactctgggattccctccgaggcggaggaatacactgtgcttcatggcagagtgttgactccggttcatgctgatgaggagaggcagaatcttcgggtggccaaacacaattacgcccttgacgagtaagccttgaagaaaatccttcgggaggagtagcagaatac

SEQ ID NO: 211026 - DNA, 585 bp, Cannabis indica
atgtctttataaaactttagatggtaatcgacaagtcttgaatcacattgcaaaatcgtagatgtccacaattttagaatggtttaaatgcattttttagagatggcctcgaaacttaaggattgtgatggtagaattaggtgcccgtgtataaggtgtgtgaacaatataggtttcaaactttacttgttgtaagagaacacatattcgattgggatttttttactggttacaagaagaggacttaccacggtgaagcagaatcaagcactactaatgtagtcaatgaccatgatgacgttgatgatgaccatgaagttgacgagatgattttgatggtggatgacttccttcaaccgtcaattgaaatagatgataattctaatgcaaatcaatggcatggcgagttatttgaggagattgaggccgagtagcatcctagttgtgattgaatatcttcttttaactttttggcaaagttatggtattcaaagctagaggaaagattcctaataaatatttgatgaaatactgaagttgttaaaactagccttttcaaagcaaaataaaattccatcaaactac

SEQ ID NO: 211027 - DNA, 640 bp, Cannabis indica
aggtgatgtgttactttccgttagcttcgcgattgaagaaactatgtagttcaaggcatacggcaaaatagatggtatggtaccacactggtaaatcaaaagatgatggggtgatgtgacactttgtggatggtgcaacgtggaaggactttgatgtcaaacatcctaatattgctagtgaacctcgaaatgtttgtctaggtttagtgctgagggctttaatctatttggcaacatgagccaagcgtacagcatgtggcctgtagttttggtgacttataatcttccgccttagttatgtatgaaagataataattttatgttgaccattcttatttctggagaaaaatcaccgagtatggacatagatttatttttaagacccttgggggatgagttgaaggagttgtggcttaacggagtagatacgagagatagtcgaaccaacattgtgttcaggcagcgcacagctcttctgtggacagttaatgatttttcagcttgtagttatttgtctggttggagtgatcagggatacaaagcttgtcccacttgtaatgaagatacctcttcaatttgagtaattggtaagacatcttatgtcggtcatagaagaattttgccaaataaccatcgaatg

SEQ ID NO: 211028 - DNA, 933 bp, Cannabis indica
tcccagttatcttgaaaaaaaaagcttgaatacccgtcaggtgctggagctttaatcctggaatatcaaagataaccttcttaacatcttccttagtatactctttcattaagctctctgcttgctgctttgtaaccaagggcccttgttgcatgatactctgaattacttgttgccttttctccattttactacctaatagttggtagtaaaatgaaagaaaggcttcagtaattttgttctgatcctctacccttattccttgttggtcttcaattgaaagtatactattttgtctccttcgttcccgtacgcttgcatggaaaatcgctgagttttcatccccttccttaatccaatttactttggacttctgctgtaaaaaagaggacaaccccttgagtaaaagactgtatttattccttgctgccatttcttgttcaagcagctcgtgctgaagtgggtcagcctgaatcttcatttgaatcgctactaagtcctccttcgcttggttagttgcctcttgaatattggaaaattcttttctattcagctctttcaattcagcctttaacattctcaacttgcacacaagttggaacattttagtgacagcaaccgaagccttccaaattcgggtaacaatctctaagaatcgtggatgtgaggaccacattctaaagtatttgaaaggcgatttacctctgcaaatttcgggataaattgagacaattactggggtatgatcaaacaacccttccaccataaaaacagcctcagcattcggataatcatccatccacttcctattagcaagcactcgatctatcttggaccatatcctttcatttccttgtcttttgttgctccatgtaaagtaactgcctctaaatttaatgtcctccaacttgcagcaatgaacacaatcaataa

SEQ ID NO: 211029 - DNA, 2309 bp, Cannabis indica
aaatcttaaaaccgcaaaaaactacaccgtggaaatgcggtatggtgcagtgcagtttaagtggtttacactatcattattatcaaacattataatgaaaattcaaaatcaatctaataaatttttaacaatacaaaaaaaagtattaaaattttaaaaacataacatatatactaatcattaagttaattgtctctaaaaaatatgtgatatacacatatattatatatatttattcttatatgaaaataaaataaaaaaaatattgtaaaaattcataacttcgtaacatatagtgcggcacggtttgaatcgcaattattaaattcaaaaccacaaaccactgtaaagaatttcaaaccgtattttttatgtggtatagtgcagtgcaggcagtttgtgcagtgcgatgtagacggtttggtgaacatccttacttgttgtgattgtttggacttaactcttaagagtaatatcatcacgatttgtgacctattctttaagataatcatcttagagtataggaaccgtgtttttttcgccctctaaaattaaaacaataattttctcattataattaaacaagatggtggatatcactataatataggtgataagatccttcaaccatgataccaaaatttaattatgtcatttggtgtataatataagctaacaatattgatgaactttctatggatgaattatacgattctttgttaattcatgagcataaatttgcatcatctaacaacaacacctgaaaatcaaatagagcagcaaatcttggatagggaagcataacgaaacaatgttgacaatcaatttaaaactaagaatgagccatgaaatgatcacttagaactctctctagctattattttttatcgaggattcgtccttgtatatattgtcgttggtagatacaagtctacttagtggcaagctggtcttggactatcacggtttaggcctgcacttaaggcctacccaactcgggaatctcaaaaaaatgttttgttttactgatttttgaaaatatcaaatatttttaaataaaggcccaatacaagcttcaagtaggagagacacaattacagctctatcctaaacaatacatatatgtcttaggataatgccatattaggggatcatcaattttgactagggagaagacacaatcacacaactgctctattctatcctatcctaaacaatacagatatgtattacgatagattcatattaaagtctataatatgaaaaagcataaaaactatgatgtaaacgaaagattaagtctcaaaatgagaactatttacaagttggaacttggaagaatatgaaaaatcactggcggctcaatgactagtcagaaagaaaatatcaagttcttagtaaaatgtcagcatagttgcaattgcaagtctccaattttatcacgcacttcaataaaagtcttacatttgttaacaaatatcaatggtaactgaaaatatatgaggaataaataggtttttcagagttttgttcacattttttttatgcgaaaattcttcccaattatacaattctttgcaaatattcactttatttgtattttgttcatttataaaataatttatttatgtggccctgcattatgtattataagtgtaattaagagtgtttataaaatataatgatctaatctaatttaattcgaaaatggtagatattcacacttgtgcggattagattggattgaaaaattcaaaattcgtacttgtactgattgaatgttgattgatatgtaaaaatgagcttttacaaaaatactaaatttttagtaaaagtttactaaaaatacttttttataaaaatacttttttataaaacaaccgtaaaacaacaaaataaaacaattaaaataacagtgaaacaacaaaaaaaacaatcgtgaaacaacagtgaaaatttaacacagtaaacagtataaaacttacacagtatttttttttaaaaaaaatccatcgtacagtaaaaaaaattaaaaattgagtatgtggtataaaaactcctttggttaattatgaaaagttcccttatctgttatccacgttcaacttcctcttaccatcgggctttaaactgaaagattcagacccagtaggctttagacttaaaaatataaatgggccactcaaccactagaggcccattaagttgcagggcccattaatagcttccttataaaataataataataataataaaagatgatgccttcactttagagaaagcgcgtgcagaagaagtgtaatgaaaat

SEQ ID NO: 211030 - DNA, 783 bp, Cannabis indica
catgttagaaatatacaatcaataagtatctcacttgagttttggaattatgttgagcatgccattctgaccattgttgtaatagctcttcaagcttatgtttactagctctgaaaaagaaagagatctgctcaaaaatcaaccattggagagtaccaacagtttccaaaggctaaagatcgcacatgaataattttagacgataaatatatataaatgtttagcaaattaaggaggttatctttcattatgatactaaagattcccagtttcccaccaaccttgttaaggaggtatattttacacacactgaaggttgctgctgttcatcaaacattacccgagatctcttgacacccgaaatagctggtaaatttgaattatggaagaagccaatttcacatataatcgattagctaaaaagtcagataataattaagttggaaaccattggttctaatactatttaaactgtaatcttatattttccacccatttgtattagcttccaaattctaagtggagtagaggtgaatattgtcaatgaaaataaataaacctcggtataatacatgaaaagaaggatacaactgccgcccatcttttttatcccaatggaactttcttcttgggaggcaagacaaccaatctcggcacttgccccagtatttgatgcctcggcaactaaaacattttcagtcaatttgacattcacctgtaagaaagatgagttatcaacgacaaccttttcaaggtttgtttctgctatgcaccgactatctt

SEQ ID NO: 211031 - DNA, 727 bp, Cannabis indica
tactcttcaaaaggagtattttggaacattctaaaaagttttttagtctgtggttttttataattgtgtatgttgtaattatttaagacttattataaattttagataattttaaatgatttacatgctgaaaatttagtttaaatattatactacctacatgactattttgtattatacatacagtaagtgactatttactttaaaatatttatatcaataaaattattatttttttatattttatatgttattatttttgccttaaaaataaaattattatttttaatagagtaatttacggcgtaaatacctacgtttaactctcgattgtagaaaaatactcaaatttaatttatgacaataataatacctaaattatattttttgaacttctataagtatatgcccgttaaatgtcaagtcattatccacatgtcatatttttattggtatatttaaattaatttgtaaataaaaataaacaaattaaagacctggaccaatcagggactgccaattgaccattgaattgacacttaacggtcaggtacatgcagaagtttcgaaaatataacttaggtattattaccgtaaaaaattaaacttcaatatttatcagtaactgagagttaagcttaaatatttataccgtaaattaatcttttcaatatttacacataaatactttttagaatgaaagatatgtaaatgctacataattcct

SEQ ID NO: 211032 - DNA, 619 bp, Cannabis indica
ttgggaccttgttcttcgaatcccgggggttgttgcatgtagacctcttctaccaagtcaccattcaaaaaggcattattcacatcaagttgtttaatgtcccaatggttgtagagagcaatggtgataatgatacgtatggtagtgggttttactacggggctgaaggtttctgaaaaatcaaaaccatattcttgatgaaagccttttgctaccagccttgctttaagtttagatacactcccatctgcattttctttgatcttatatacccatttgcaccctattgcttttcttccaggagggagaggaacaattgtgtaagtgccattctttttaagtgccacaatctccacattcatagctccattccacttaggatctttcattgcttcttgtagggtcaatggagtgttagagctgatatacactttgggtttatagacccctgcttttgctcttgtgaccatgtgatgagtgttgccaggaggctgaggtgctgctgctggaatcacaggggagattgctggtggtgtatgtggagatgcaggactaggatgaggtatgggtgactgtgtaggtacagatggagggtcatttggagtttgtggttggctgg

SEQ ID NO: 211033 - DNA, 1268 bp, Cannabis indica
caccttgttgataaaggtagtactagaatcatcccacttcaccatccctaggtaatgttggattgcacagcttacccagtatatccccttacggatcacgggaatattaactgtcacaatcacccctccttacggggtttgacgtcctcgtcgaccacacttccgtctaggtcatggctatgataccatttgtaacgttcccgctgttgggttctaccctaaataaaattcatttcaatataatcagatttactaattaataaagaccaaaaattgcttttatgctgcatggttcacatgatttatttcatgattatatttgatgtataaattctattaaggcgagaacatatgtaaatatatatatttgttcatgattatagtgtcatcaacacattggaatataatcatgattatatgttcaaaagtttaatttccatgatttgtcagttcactggatttagactggcatgatattcagcgataaggtatacataaaccttgcataagtgttatgtcctttctagggcattggaaaagtttaccagtatttgatgtagagtatacatttggaagggaccgatattgatcttagacaagatatcataaacttaccgttatatctttctaagacaatatcaatggctgatcttaggtctatggatcttaatcctaatatggttaggttcaccttagttgtattatttatgttcttgaagttgttagtgaaagctaacttttagttctgacagatatttacatcttgggaacatggtagttcaattgagtgggagcgctaaatatagatatagaatctatagcttctataggtatttaaaagtgacacgatgatttcctttaagcttggcttgatagagataagtgattgagatctcatttcagtaactatattagtttactgaaatatcatttatatgtagctaagtgctttaatgataaattacattgaagggtagggtaaatttatccctattcaatgtagatcatttatagaggatctttgactatttggattgtcacaatggataatcataacgtatctatatcgtggtacatatagagcgttctatataattgagagtgctattcaattccaaatttatagtggcgcaaggcagaattaataaattaaaaaatttacttggtgaattctagatctacttattgaaagctcggttatataggcccatggtccactcactggttgagataatactgcttgcaaactcagttagttgattttaatt

SEQ ID NO: 211034 - DNA, 1057 bp, Cannabis indica
tgacctaaaagatgaccataatgacaactacaacaaagagtatgaagatgagaattatgagcaagatcccgaaggtagtgaggataggcacaggaactcactgaaactcaatgagactggcagagcaagagaattctctcgaaaattctaagaaatcctggcgcgactgcaatctaaagttggcctccagaggaagatattcctgccccatgatttaaccacccaaagctggtccatctgccctagcaaatgataatggaaaaggtggatgaacgtaaagataaagataaagaactttatgttatttagccacatttaatataagtaaaagataagagagatatgtgtagtgaatttgaatttaaatttgtaatgttaaaaaattacattttttgttatataactacttttaatataatatatattatccattttttgacattatattatccatcatcttgaaaattgattttgggttctcaaataattaaccccaaattataatgccaatcctaaaacaaaaaagagaggaaaaatttaatttcataaaatgcatataaactaactctaatttttaaattttccaaatttttacaacaatctaaattttttaatgaatcaatcaaatgtggcttttaataccacttgttaaaaattttcaacactcatacactacgccacatatcaagagctaaatcaataaataaataaattacatattaagtgtataaatatatatagatataaagaaaactcttgttgattcaaagctagagaagaataataaatcaaataatgaaagcgtacattaatcaaccgataagcatgatccctgtaaagataatcttagggtaatgatcttctaagaaaacaagatttaaggctctctaattttctctcttgacaaagaaagatgagaatagatcgcaactcttatttcttggagaccaccattatataaactaataaattattaaattttagcattttttaatttagtgtctcaataaattagaaatatcatttatgatatttacacatttagtccataacactt

SEQ ID NO: 211035 - DNA, 574 bp, Cannabis indica
taggttggtgtatggaaaaatcctctcatcgtaccggtggagttggagcataaggcctatagggcaatgaagaccctgaacatggatttagcagctgcaggagagaagagactgttacaattagatgagttggaagaattcagaaacgaagcatatgagaatgcaaagatatacaagggaaggacaaagaaatggcatgataaaaatctgtttaggaagaaatttcaacccgagcagcaggtcttacttttgaactcaaggttgaaactttttcctgacaaattgaattcaagattgtcgggatcgtttaaggtggtcaaggtattcccatatggagcggtggaactgaaaggtgagagtctaaaaacttttaaagttaatggacaacggttaaagctctacttgggaggtcaaattgaccaagctaagtccgccatcatattggcgtctctttgaaaggaaactcagcgtctggctataagacaataaagacagcgctcttgggaggcaacccaagtgatttaggtactttgatgtttttttgtcgagacttttgtttatttgtttatttttt

SEQ ID NO: 211036 - DNA, 948 bp, Cannabis indica
agaaagcattcaaaaaggcaacctgaagctagtataagagcctcagccgaacaataaggaaaacaaacctacctagaaactacacgtggacggttcaactacagatcaactgtctagtgcagggattgcccttgtcacacctgtgggcaacacctacacggggtagtcaaatttggattatgcaactgctgatgccttaggccgacttgcaagcaataacataggtgataaggctaatctaatcccaattcaattccttgaagaacctaacatcacctgtgcaggagaaattgaaatgattgacccatcaccaaactagataccaccaatagcagcctacctcagtactggagaacttccaaatgatagaaatgaagctctgaagatgagaagaaaggttgcacagtatatcatcgtagaaggagtcatgtatagaaggggattttccatgccactacttagatgtgttacacaagaagaagctacacggctttcgtctgaagtacatgatggattctgtggcaaccacgcagctgggcaaagcctatcaattaaaataccaaggcaaggatattttctggctgaccatgatcgaagattcaaaagcttatgttaagaaatatgataaatgcaaaagatttttaaagataccccgtgtatcgcctaatgagctaactgaaatgcaaagtccttgaccttttgctatttgggaaattgatctaatcggacaattgcctaaaggtaaaggggaagtacagtatgcagttgttgcagtggattatttcactaaatggaccgaagcgagccattagcaacaattacatctaagaaagtgctagacttcgtggtaaaaaacataatacgtcaaatctgactcccatacaaaatagtctcggacaatggcacacagtttgacatccaattgttcactgatttctgtgtgaacca

SEQ ID NO: 211037 - DNA, 745 bp, Cannabis indica
ctggtaccttctatgttttgatattttgaattgtacattttggtatcttgaattcaatttaatcaataaaaaaattgttaatataatcaatggtcttcaattagttgagttttaaaattaaaattaattatttaattagtttttttaaagctaattatttacttatgttagtaagagcaatttggtcaaagttaataatattttttttgaatttaaacaaaatatgataaagtagcattattgaaaatactgataacaaacctctctatatatatatttatgtgggagtccaatttataagcagaaataattccaaaaagaaaaaagaaaaaaacaatttaacatatataccaataaatgatgagccgatcatcatgcctagaaccaaaacatagttgcagtttgcggatgccgaatcgaagattgagggcagtagtcagaatcaaatatgccttgactaaacaaatgattagattttgatctaatagaaatagcatatctttaactctttaccttccgagagaaagagaagcagagatgtgggtgttctacctgatttccctgccgttgacggtggggatggtaattttgacgcttaaatacttctatggacctgaggtacctcgttagggtttcgtcgatggacgaagaagagaagaaagaggtttgaattgaaggggaagagctattttttagattaatcaccggttattttctttttaaaatggggtgtgattctcgaata

SEQ ID NO: 211038 - DNA, 864 bp, Cannabis indica
aaatgaacatgatgctctcattcgcatctaacattcaatcaatctaaacctagttttctaactctatcatacaattagtgaatgagagcctctttcatagtgattcgaacccctcttactgttcttcatcaattcaagcctttagttatagagtaccatgcccacataagtactcaatcatagtgcagaagacggtagttaaccaaactgaaggagaaggagatccaggctagatcttgttattactctgcgacagaaaggaacaagggttagagatctgagcggaaggagatatattattttattgtcagcaatgtaaggttttctaaactttatatgtgtttatttcatcgtattaggatattcatatttatggtgttagattaaaagattataatcaacatacagtggtattccctgatagaggctatgtcagtctgggtggtgttatttgtgatggtacggggttgtgtgggctacatgggcaattggagttattggtgactttgtggttcatgtggcggagctcctagctatccgtctcggcttggaattggccattagatttggttttcatttatcacgagctgattgtgattcaactgttgttgttagctggattaatagcctaagttgtaatgttgtttatcagtcaatcattttttagatttgttctttgttagctactggcagtagtggtccttgtaatgctattttgcgttctgcgaatagtgttggttatgcactagctacgtttgttacgaagtggtgtaggtgaaaacatttggaaagatacttttaatatttgtctgtaatagttgatttgggtcattaaataaggttgaggattttcccttaaaaaaa

SEQ ID NO: 211039 - DNA, 886 bp, Cannabis indica
atttatttttaccatatatagtttgtacataataattaagaatatgtttctcatagttaataaaatgtataataaattgtaaatgatttttttgcccatataatgtaattaagtactataatgtacataaaattggaaattctccaaaaaacaatcatgcttatgttgatcactatgggatgaagaaaccacttttttgctgattttttcggcaacaataccaattccgacgacttttctgacaccgacagctactctggcgacttttttgacaccgacagcaaacttcaaaaaagtcgtcggaattggcatagtcgccaggaaaattaccaagaaactagtttttggactttctctgcaacaatgccaattccgacgactttaatttcttagagtttgctgtcggtaccggaaaagtccaagaagtagctgccggtgtcaaaaaatcgtcggagttgcttctggcactgaaaaagtcatcgaaattggcattgttgtcggaaaaatcactggaaaaattaccaagaaactgattttttcatcaacaaactggtttattggtgattttttcgtcaactataccaattttgacgactttttcgaaatttgtcgaaaaagtcactagaatagctgtcagtatcgaaaaagtcgtcgggattggtattgtcaccagaaaaatcactaataaagttatttcttcatctcatagtgatcaacatgattatttttttttttaaccaaaaaaaaaaaaaataaaataacaaactagaagtttttttttacttttttttcaatgagaagtagggccaactagacaaggtgacttccatccttaacgaggaaattcccaaaatggaagttggacccactcaaggatgccactgtt

SEQ ID NO: 211040 - DNA, 872 bp, Cannabis indica
ctcctttgctctgagggcctctcttccattcttaagaaatctgaactctctgaaaatgcttttggtctcaagattgctcgtacttcccctaaaatttcacatctcctttttgccgacgacaatatcttgttctatcgttcgaacatccaagcttgcaatgtcatcaaagagcctcttgccaagtacaagaatatctcaggacaattggtcaattttcagatatcttccatcctttttcccccaatacaagtctcacctatcaaactcttattcaggattacttgcaaatcccttctaccaatcaccttgataaataccttggattacctcagtgttttggtagatcaaaaaaccactctatcaaccctctcaaggacagaatttggtcttatctctctaaatgacaaggtaaatttgtatccaagggaggtaaagaaattcttctcaaagctgtcatccaagctatccctacctatatcatgtcgatcttcaaacttccaaagtctttctataactttgttgaaaatgagatgactaaattttggtggggatctaaaaatggataacgtaaaattcactggaaaaattggcgatccctgtgcaattctaaggcttctggtgacctcggttttagatccctaaaatcattcaaccaagctatgcttgctaaacaagcttcgagaatccaaactaaccaatcttcccttgccactcttttcaaatccaaatactatcccaggtccacctttctggacgcccctctgggacactccccctcttatgtttggcagagcctgcactagggaaaatctctcctcaaagctggtctctgttggagaatcggtaatggagtcactactcacattcttgag

SEQ ID NO: 211041 - DNA, 847 bp, Cannabis indica
ttttcttaattttcatagaataaaaaactacattaatttgtgttaaatttacaattttataacaattttttaattatgtaaatagttatatttattgatctatataaaaaaaagttatatttattgaagcggaattggttgcaattcttatagtttttggaacgggcttgggatgatcgttgtggctcagtcctgattgaattagatttgaaagtggcggttgaggccctggtgttgggggagttacctcttgcctggggatcttttcctgtttttagaaaatgccttatgtttgttacatagtttcatgttgtttctttcaagtttatttctggtgagttgaactccttggctgatcacctggcttcccatgccagagtgtaattgtgtttgccaaaactcttttggttagggagtcagcctcctttatggttgacacttgactctgtttgtgttttattttcttatcgtttttgtgtttaatgaaggcaaagttaaaattaaaaaatatatataataaaaaaaaagttatatttattgaataaaaaaaaacattgaaatttatattcaaataaattatttatttatttacacattgtccactcatattagtatagaaggtatttctttagattccatggtatttacacattgatacatatacgctatgagttatccatttgttataatcctaataatcaatgattctctatagataatttacattgagtagggataaatttaccgttacacccttcaatgtattttatccttaaaacacttagcaacctataaatgatattcggtgaactaatataatactaaaatgagcgctctatcatttatc

SEQ ID NO: 211042 - DNA, 943 bp, Cannabis indica
gaccatgaagcagattttccagcggtatgcaaggctttcgggacagaaaataaatcttgagaaatccgaagtgagtacgggcagaagtatctcaaagcaattaggccaacaacttgccaacacacttggggttcgatgggttcctaatcatgcaatctatttggggctgccaagttacttaggcaggaaaaaaaaagagatttttgaggtactaaaggatagagtttagagtaaactcaaagggtggaaagcttcaatgttctctcaagctgtaaagaaattcttataaaagcggtgatccaagctcttcctagctatttcatgagttgctttcgtctcccaaagaagttgatcaaaaatctccattccttggctgccaatttttggtggggagacacaaaggaacatcaaaaactccattggagcacttgggacaagatgtgtaaaccaaaagaagagggaggcttgggtttccgtagtctcgccgaattcaatcaagctcttctagccaaacaaggttggcgcctcattcataaaccacactctctattagcaagagtattgaaaaatagctactaccctaatacttcctttctcaatgcaaaatgtccccaaaacgcatcttgcatttggaaaggaattgtttggggaagggagatcatatatgaaggtgcccggtggagagttgggaatggtagaaccattcgagtttggcaagacaaatggctaccaaggcctaatggcacaattgtaaaccggcctatagaagcaaatcctaatacaacagtgagcagcctactaaataacaaggatgaatggaatatagatactctcaacaatcactttcataaggaggatgttccttggatactaggaatccctatagatacccactcggaggacatgctagtttggcctttactaaggatgggaactacattgt

SEQ ID NO: 211043 - DNA, 578 bp, Cannabis indica
aatactaatatttacacatatcctcctataaaaataaaattaaaactctaaataattaataaatatatttaaaacaataaataatattctatatatatatataaaatcatgataaactttaaaataaaaaagaaatttagaaaatttgatgtagcctatttttagttgagttctttaaatattttaaaagttctcaattttaaaacatctaattgttcctaaagtctaatgttttttttttttttgaattaagcgtttatatattacaatgcataacctgagactcgaacccagaacctccaacactaacgcacccctcctatggccacttgagctagcctcaactctcaagcggtttgagtctaattgttttctatctatatgaaacactttatttatttattttttaaataaagggtcctaatttagactagtattattcttcttctcataaagaaggcagagatggtctaaagttcattttttttatttctatatagctaataagattataagagatttaccactgtccaacaacataatcatgttattagtgtattaagctcacataatcatgt

SEQ ID NO: 211044 - DNA, 813 bp, Cannabis indica
ttttttttttcattctcccaacatcactgaaatttttaatatatttttcatttcagacacatttaactttcttttttttttcaagtgatgttgagtttacaaaatatttttttttcttttcttttacctttctcaatcttgcaagttttctttcttctatcctctcacacactatgtatttcgctcccccaaactaattgtaaagcttatgatattattgaaaatgtagtgaggacaaaattaacagtgtggatacatcttttggttcaatatgtgaagaaacaaaacaggtttaggctcaaaaaggggtaactagggatattcatttcatggtacgcttgaaaggctcaaactatccaaacaactgcctaaatcatgttcttattgaatgttgtcaaggatttcgcctcaaaagaataagacatgcaagttctaagctattcaatcaatcttaccagaaaccatagtaaaacaattatgacatatttcacagatcgtcgaattgcattcatacacaagtttcacaagcatccaaactaatctaaagagttaaaagaattaagcacacagtttcaaaatttcaggacatatcacaattaacaacagcacacaactatcttcagtttatttaatcgactaacaaccaaataaaaagactaaactaaagcaaaataactaaaaagaacagaataactaaaaaaaataatttttttataagtcccctcccccaaacttagaatacacattgtcccgaatgtgtcatgcaaaacaagtaaaagggagacttacttgcacccccatcagaaggggttg

SEQ ID NO: 211045 - DNA, 519 bp, Cannabis indica
ataaaaaataattaaaataaactaaccatcttctgcacaacctcaaacactagatgcaatagaaactatatttacaagcccaatctcagagaatcagaatcacactattatcttctttgtacatcatatccttcgccgaagtgatttttcgaaacctccgtgtcttctctgtctactggtctctctctctctctctctcatcaagaacatttgagggctacagtccaaacaattgtatggatttgtaaaacataaaaaaataaaaataaagaagatttaatttaaaaaaaaaaaaaagaaaacaatgaagaagaagatgaaacatagagatgtaaagcttaagaataaaggggatcatgaaaaaaagatataaaagtgatgaaatgtcaaatgagggggtaatgtgtgattacaaaataaataataatatataaagttttttattttattttatttgttattttgtttaaaaagtgaactgccaaccatgaatctcatatcacaattttttttaaaaaa

SEQ ID NO: 211046 - DNA, 516 bp, Cannabis indica
aaaccttataagtctagtaaaaactaatgtaaggaccgcttagcttaaatttggaaattagcagataattagagtttaattacagaaattatttattaactctaaattattaatttatgatgatttatttgaattcaggatacattttatatgccatatatagaatttcataattttacatattcagtgctcgacaacattggaacgtggtgtttggctattagaatcacatcttagtattttagtatagcgaggcaatataattagacattgggaatgtcgagattttagatttcccaaaataccccttagtgccattttatgttggttggtgaggaaagggcaaagtagtctttttaccctttgtagtttgtcctttagtggactttgtgttgagattataatctgattttattagtaattagttgatgtgtttagataaatcaagttgtgtctcttttattcaaagaaggaaaatagaaaatttttaaggaaggaagccactctctctctctc

SEQ ID NO: 211047 - DNA, 539 bp, Cannabis indica
atattaaaagtaatatattatcactttccacttagcatttctcagtttattaactcttgaaactttttataaagtaaatgaatttttggcaaaatataaaagtgtactaatgtatgtgtgatatggagagagtcctacatgcataaggacacacaattaattttattattttatttatttgagaaatatatttaattaaaatagaataataatttttttttcaatccatttatatctatataatgcagtcggatactctatctgcaatattatattttgagagtatatttaatgtttcttaacatattagttggaatgtgatatagtatacgatgggttgttttatcttggggacaaccgataatttttcaattgcttgcacattcatggacagttttgcgaacatcttaaagaaagcgacctaatctgcgactcaactgaaaaatttcattcagtaatattgttactcttttatttttagtagcagcgtttacaacaattgctggatctttgagtgcttcgatgagcccaacgagatc

SEQ ID NO: 211048 - DNA, 851 bp, Cannabis indica
ttattctaaaatttgataatacaagtagaaaaaattgcataaaaatttgcaattttctcttacctacatttatgcttcattttataaccaatgcaataagtcaaaaaaaagtatttcaacaatttatgtgtcattttaaaacagacggtataagtttttcgtgacggtttcaaaataccacaaacgattttgcatcatttccaaatcgacatagaagataaaaaagaagagtgtatagtttgtgtcgctttttaaatgaagataattatttttgcatcatttaaaaaacgacactgggactatgacatatacgtcaattttttaaacccacgcaaattctttaaatgatacttagaaatcgacagaaattgtactttttgtagtagtgaattttcaacacttaggtgacgtttagttgggaagaattaaaatataggaaaaacaataggataaaattaaatataaaatgcataaaaaaattggtaaaaatttattaaatttttcctcatatatcttgcattagaatgatcattctttctattctaccaaaatgataaaaaaaatcattctatttgaataatattttaatactttaaaatgcaatcaaataaatgaatgcaataaaatttgttttatttttatttaattctattttattacctccaaccaaacagcaccttagagaaattatatttcgatttttttaaacgaaaacatacattatagtaatattagatattctgcatacttttgataaattttagaaaattcacattgttaaaaataaaatttaaacaatccgttatattatatttttttacacatattttattattttgaactttatttta

SEQ ID NO: 211049 - DNA, 1085 bp, Cannabis indica
aagaagatgaagaagaagaaggatattgatgacagttcttggaatatcattcacacaacaacaaattaaaaaaccagtaagttatcctacctgatgagatactaaatatataactaatataatgtttgattgcttctatctaaacctattaatatgttctataataatgtcatggaaccataaatatataacagaatcatggaatctttattggtggtattttactataatagaaaattttgtggacaaatacttatacacagattatgaagtcacaaatatactaataccaagagatttctcgtaccaagatcttaaaacactaacttgtaattttttggaaatgaataacatcgccaccattctagaaatacaattaaaaatacttgaaggtgcatcaccaataaggatcaaatatgacaattcttgtagattcgaagtcctttgataattatttttaggaagtaatggaatggttagtgaagttgtcaaaccaactacttgcagcccttgttagggaggttgggaataatatgcattgtaagttgtttaaagtattgcttgctcacattatggtatcgaagttgttcaggtgtgccacatgatcatttgtaccatcatactatgcaacatgtgggtttttgaatccttgaggaaattatgaattcaaatatcagtggaatggttctgtttcttcgtctgagtcgtatcccgataatttcccatattctctaccctggtatttctgaacttaattatcttccaacttattactcatatccacgggatactgccccattagttgttgcccgcctgtattttgatttaatcgattgcgcaaatctggtgcattacgattaagtgctagcgtaagtcaagttgtcttcggtttagttgctcgcgaagatcagggtcgcgatgcctttgatcataattactcagagatcttgtcatcgagtaacttttagattggtaactttaagaattactaatactctctcaagcactgtgataataatgtcgtgatccaccttcatctcgtgttctcctgtcatgggcatgagtttgggttgatctgctgtgcc

SEQ ID NO: 211050 - DNA, 876 bp, Cannabis indica
tgtgaagtctgctctacgataaaggcatttgtgaatggaaatttggatttcacctgttccctaaagctacttatcagctcctctctagactactaattcagatcacagaccgttattcctagatactagtggccaccctacaaagtttaagagagttttttaaatttgaagagggttggacgagggatgatagaagtaaactggtggttgccaatgcttgggactcggttagtcactctcgggcccctgcgcgtattttcaagaagcttggcgcgactcgggccactcttcttcattggcatagaacttaatatggtaggattgattgggtcattaaatatctggaactgaaactggatagtttacagaaactaccagcgggaacccgagattggaagaaggaatgtgacattcatcgatctctaaacgaaactttgaccagaaaggctctccattggaagcagcgagcgagaatctcttggctcaaggaaggtgatagatgttctaaaattttcttcctttctgctgctattagaggaaggagaaatgccatcgagagtatatagagcaagaataatgtctggcttactatagagaatctataggtcttgaattcactaattttttcaaaaacatttttgaagggtctgacactggccagaatttggattgtgggcatttattcccagggaggctatctttagaggaccaggaggggacccttctctgcccttctcgggatgaaatcaagagtactctgtttgccatgagtaaccataaggccccggggccggatggaatgtcagtgcttttcttcaaacattaatgggagtctgtgggtgatgatttatgtgaagctgtctctgatttcttcat

SEQ ID NO: 211051 - DNA, 528 bp, Cannabis indica
gaaagacagttaagaatgagggagatgaagggataggggaaaccaaaatgttgaaggatgtgctcaatataggcccattcaactttgtcaaaggccttttccatatccagcttcaaagcagcccaaccgactttcccatgtttacggttagtgatcgcatgaataacttcgttcgcaataataatgttataaaaaatagatgcgatcagagagaaaggcgccatggttatgggaaataagatccgagagagaagatttgaggcggtttgcaatagttttagagacgaccttgtatagagtggaacagagactgatgggacggaagtccttaacccgagaagcatttttaactttgggaatgagaaccaaaatagtttcgtttaccgggctaagatcagcattggtggtgagagtgtataaagccgcctggcagagatctctaccagcagagtcccaattttttttgtaaagaaactaggattaaatccatcgggaccagggaactaagctggaaaagagcaactttga

SEQ ID NO: 211052 - DNA, 560 bp, Cannabis indica
caaaacgacatcccaaaagctccaaaaagagtacccaacgcccaggttgacaaatggcttgctgcttatttaattctgagttccatctcgaccattcgcctagtttttcataataattgagagccttaaagttagaaagtctaattcacaacttcatattttcacttttcttgcaaaatgacttgctctaaaattgggagttttgagtctcccattttagcaaaatagcaatatctcagagaactagtaactggcttcactagaagacattaacatgctaagtgatgtataaatatcacttaggcatcaaaaaatacatacctggtgcgttttcccacttgcccaacgtccaggttgatattacatgtcaacttgggcgctgaacgtcaacttgggcactgggatgtcaacttgagcgttgggcccagaacaaccttcagtaaaatggtcataactcactcaatatagatttgattgacacaattcaacttgcattttgaagctattttaatgacctatcaagtcatgtctcagactttaatcatgaatctgaagctatc

SEQ ID NO: 211053 - DNA, 537 bp, Cannabis indica
taattttttaatttatttgttaacataattatatatttttatttgatttttaatatatatattaagatatgagtttttaaagataaataggcttgaatatttttcttcaactaaatctttgttgttttaacatacttattagatttttaataatttttgtttaatttgttaaggtatgcgtttgaaaaaaattatataatagaccaaaaattacaataatacataaatacgaaaaaatttcatttttactctttgaatttttttatttacaaaaatacatcttcagtaaaaataataaacaaattttttagttgtattatagttgtcatgatgtagtttttctagttgtttttagttattttatagttttttagttgatttataattgtcgtgagattgatttctcattgttttttagtttttttcttttaattttttgttgagcaaagtgtatttttgtaattttaaagcttcacaagcatatttttgtaattaaaaattttagttaggccccaaaattgtaaataaaatataaaa

SEQ ID NO: 211054 - DNA, 532 bp, Cannabis indica
agcttgagttcctggaatgcctcatctgccaattggttccaattaaactggtccttttttaattggtcagttagtggttgagccacccgagcgtagccttccacaaacttcctgtagtacccggtaaggccaaggaatcctctcaaagctttcaaagttttaggtgtaggccagtccaacatggccttcactttatcagggtcggctgccactcccttgttggagattatgtgtcctaaataggatatttcagctttcccaaagtcacatttttttttgttgacgtagagctgattttgggctaggatttgtaagacctcatctaagtgtttttggtgttctttcacggatttgctgtaaaccaatatatcatcaaagaagacgagaaccgagtggcgaagatggggtctgaatatgctattcattaatgattggaatgtagctggtgcgttggtcatcccgaaaggcatgactaagaattcgtaatgcccatcatgagttcggaatgctgtcttgtgaacatcttcagcct

SEQ ID NO: 211055 - DNA, 568 bp, Cannabis indica
acctttagtgacactcttggcgtgaatgggtaaacgtgtccctactcgcatggcgcgtcactatatcataaatttaattatttttattttttattttgtttaaatatagttggctccattattttattaattcgttacttttttattttttttttatttttttacagggattgatttcaaaattttaaaagtctgatttattaaaaaggcaataaaatcaatttaaaaaaataataaagtcaaaaagagaatagggttccaaaatcaaaacccttttcctcacactttctctctgaccaaaccaatcccctcttttgttcagcaaaaaaaaaaagttcagtaaaaaaaaaaaaactacaccctctttctttctcctttgtcgatctagacagcacgctggctttccaacccaggcggcgccaccgacttcccaacccagacgacgaaggcttttctctctttcccatcattttcttcctctcgtcgaatccaaaccaagacgacgctgaaggaacaactcgaaacctcatcgtctctgcttcgtcttctctctgccttgcccaagtga

SEQ ID NO: 211056 - DNA, 710 bp, Cannabis indica
gtatggatggtgaagttagaaaagagaagaaagtaaaaaaatactatgggtattaatataaaatgagccatttatttttaattttagtaaatttgtgttcaaaaaatttaatatgaaccaaatgtattcatataaattcaatttttcatagcaatatagttaattgtttgaaaagttatcacaaaagtcgtgctgtgtcaaatcaacccgattttgagttaaaattttgaaaaccataaataaatgagtttgatttgaatttaacatttgagtgtaatacttacacttagatcttcagaagacgccaacataaaatcctaaagaagaattgacacccttattcattccatacttatattactagtattttttttttttaaaaaaaaataatattacaagatatttccccatcatttcagaagactaacctcgtaaattccatattgtgaaatgtgatttttggttgaaatgataagataagcatatgttgccgtaggtcaatgtggcaatatttttggaagtattttatattactagtttttgtacgtgcaacgcacgtgtaatatatagagttgaagattgtatagtaaaaaaaaaaaaaaatcatatgttattattataaagataaattattcaaaaaaatatataaagatcgtaggtattatcaaaaaattaattgaaagtaaattatgaatatcaataatttgtat

SEQ ID NO: 211057 - DNA, 510 bp, Cannabis indica
cgattcggccaggttttgacaaacggcctgaagctttgcagcgacggaggactgaagacgcttgaaatcaccgaactcggtggagccctgatggcggaggtgtgggaaattaagcctagcgaaatcacctctgagcttgtaggcggcacggtcataggccaaggcggcttccttcgctgtatcgaaggtgccaagccaaagcctagtccgattcttagggacacggaactcagggacccatttcccccaatgtcgttacctaacccctttgtaaagctttgtgggtttcagtggagaacccacttgcttcatcgggataggtttgagtcccaaaaagctgaggacatgggattgtggttattggtgtttttggaactggatttgtgcttgaatctggtggatttgagaaggggttaggctgttgagtccaattaagcgggagtggtaacggagaaggcttgaaaaaggggggcaaattagtagagtaaccaaaagagacgagagaatctt

SEQ ID NO: 211058 - DNA, 998 bp, Cannabis indica
cctgttgtctcccattcaaaatatcctatcagtttggtaagaccattaagggtatgaggtctgataatgccaaagaattacagttcaaagatttgttcaatgaacttgggattatgcattatcattcttgtgtgcaaagacctcaacaaaactctgttgttgagagaaagcaccagcatttactcaatgttgctagggctttactctttcaatcctacattcctttggtgtattggggagaatgtgtggctactgcagcctatttaatcaatagaacacctacacctaatctcaaaaataagacaccttatgctattcttcattctaaagagccatcttatgaccatttaaaagcctttgggtgtctagcttatgcctctactttgagtcaatcaaggtcaaaattctcacctaggtctgccccttgcattttttaggatatcctccaggtgtcaaaggttacaaattgcttgatttgaacaaaaatctcacttttatttctcgagatgtttatttttatgagcatattttcccatttgtttccactggaggtatcccccctgcctatgagaatttttttgctcattcaccacacactgcaccagaaatggcagattattcgactgttcttgcaccagatgttacaccagctgttgcagaaacttcgaattcttctgcaccaagtattgtatcaggtgaaatctctcctctcaaatcttctaatcaatattctgatcagtgtttgtctcaatctgctcctgttcctgcatcaggtgagttgtctcaacctgattttgttgagccaactgttcctactgatctgaatgttacaccagatttgccatctaatattttttctcataccagatcaggaaaagcagtaaacaaaccatcatatttgaatgagtatcattgctatcttgcttctaccaatttatctaagttttctaaagtctcttttgttacaactcatgctttttctcaggtcattggctaca

SEQ ID NO: 211059 - DNA, 1412 bp, Cannabis indica
gtgtgtaacaatattttataatttttttttgtgttttttttaattataccattattatgtttcctaagtggtcaaactatatactactagcttgatactactatttaattctaaagaaaacaatttgacttctatatgatttttttccttgaaaaaaaaacatatatattgaaacattaaaggtcccacacactttaaagatatttaaaataaaataaaataaaaataataaaataaaataaggcaaatggcgcaccgttatgggaagagtaagaaagagaggccattacagggcctttcagattagacaatagtaagatccaacatatacatatatatatatatatatatatatatgacagttacgaatccagttatatgaacaaaactgtgtactaagtagtatatatagagagagagtgaaaaaaaagaaaagaaaaaagactagagagagagagaaagagatacaaaaaaagggaagacataatagcaagaacgagtacacgaggtggtggtggtggcagcagccgtatctccgcgtcaacactcgacggaaccccccctaccaaccacattcatcacgataatatcgatgatgataataaggttttttcctcggtttttttagagaaattattccatatactattattttagttttttttttttaaatttatgatttgagttgctcgtataattgtttcagttcgtaaaaaaaaaataaagtgtaaaaataaaaaaatattttgtttgtttgatgtggatttggttttaattaattttgtttaatatggttaatatatggaatttagaaacctgggtggaagaagtttctagctcatgttggacctggttttttggtctctttggcttatcttgatcctggaaattgtaagtactattaactatcttttaattatttttctctgtgtttttttttttttgtgtgttttgataattatgaggagattaactttggaattatgttacagtggaaactgatcttcaagctggtgctaaccatggatatgaggtattttaattgattaaatataaatcaatatgtatatgttaaataaataaacataaaattgttatagtaaaatagtgtccaattattattattattattattgcaaactaattatctaaaattctactttttttaattacttaattattaataaattatgaactataccacaaacatttgtggtatttatagaaagtgaggggaaaaaataaaataaaaaagcgtataaatataaattaatttataaaaaatgacaattttaaaaacaatttagcaaaccaagggcatatatgtaagattagttataaaaaaaaaaggactagaaggaaaacattatatctttgatcgatctcgaactcttctccttaatacttaaaaa

SEQ ID NO: 211060 - DNA, 940 bp, Cannabis indica
ggtagaagcttgattcactttgggaataggttcattagtatgtgtgggggccagaggatgggtggtagcctgagtctcaatctcggggaccttgagatcaacaacctgggaggctcgcttcttgttgggagttgctttcatgggccgttttgacggactccatgttgacatctaatgaagtctccgaggcagtcaaccttttctttcccttcttgcctgaagattgaaagaggtcttcgagattcatttcagtgagacaaaccaatatgttagcatatgtttgaaggcaagaaaaaggggaagttgcgacataatatcccgcctaagggatttaccataatcataagaagacgaggtaggaggactataatatcgactaaagtctctacatcctgtgatcctgaatatatcataggagttaattggttctaaatcccagctcgcatctatatgacctgccatatccagcatggtcccatactactcggctatcccataatacgagtcagtacaactaatttggacgtagaagtttgggtaccaactatcaaacctatgtgcaatgcgatcaatgagaaggggattccaggtgtagaaattataatggctatcccgaaaagacactaaagtagtatgctcagccctaagcactgtgggtgaccaaccacattgattacctcgggatgctccttcttcggcttctcgagggactgcattctataggtagtgtatttgagccacataatcctgagattcctcgctgggactagaacctactgccaagaagaatacttgggatatttgtaatcacaagtaaactccttttcaataaggagacccacagacctcaggttgacctcgctcaaaaggaacttagttgatcaaagactaaatggaagacctagtaggagtctgcatcgctcagccatctcgagagtag

SEQ ID NO: 211061 - DNA, 725 bp, Cannabis indica
agttgttatccccctgaacatttggcccgagatgatggttgtaacaccagtgaaccttcaaaaattggtgcttggagcctcgagcatatcaaggctggagcaatccttcctctcagggagtactttaggatttctgcaactatcccaacattgcaccattttaattgacaccaaattcttataggatcctcacttgtttaaagtctctttaccacatcgtgaagtgagaatgtccaacgccattagagattttatatttttattctgtcaaggcttgtcctgcgaggaaacacagagcatgaggcttttattatcttgggtttcacataaatgatcgtaagatcatcacgaggctacccaataaaaatgagttcaaggatgacttcttttagaccactggtctttatcccatcaacacagctaaatttcaaattatacgtaagtaacaactcccctcaaattcttggttttgagttttttatgagctttttgttactttactaattctatctttattgtgtttccagtgatcactaaaagacccatccctaccccatagatcgagaaaagacacaagattcttcttggtctttcttacaatttacgagcgactgaatcacaacaagcatgcatatatatcacacatacatacattcacatatacaatatgttctatgctattcttacctcatttcgtaatttaagtgagttggccaacttgaacg

SEQ ID NO: 211062 - DNA, 858 bp, Cannabis indica
aaaaaataagtccgaaactcccttccggaaaaggttcagtagatctaccaaaaaagcaaaagagaaagagagggagagagaggtaaagtgtaacaaaaataggagaaaaacatgatatctgcaaaaaggtaaaattgtaattaaatttttttaaaaaaaaaaaattaaaaatgaaaaacataaattatcaaaaagtttaaaataccgaacattaataaaaatgtaaaaaatgctaattttggcatctagtgtaaaaatctcattttattagctaatttattatatttggctattttgttaatattttttaaaaaatatttactaacttaatttctaaatttatggatattttacattttagtcaaaaaaaaaaaaagaaatttttgcaaaaatactggattttggacaaaaatttataattttactgtcacatgaattttttacaaaaatactgttttttttataaaacaatacagaacaaaataatttaaacaacagtggaacacctgtgaaaatttaacacagtacacagtataaaattccacctcacaataaaagtaaaaaagtgaaaatttcattatgtggtgtaaaaacctaaaaaaaaaaaaaaagtcatttttcctcaaactttagaatggtgaatggtcattgattggcaaagatgggctttttattcaagatcttcacattgggcctgtataataggattggaagccttatcatttttgttccagaataaagtaatggattcttcttcaccagtcaccacacccacacgtttacaaagctgcatacgtcgactctagcttctcccactctccactctcaccaatcaatcaccattcacgattcaccaat

SEQ ID NO: 211063 - DNA, 625 bp, Cannabis indica
ggattttagcgttcctcggggttaagcttagacgacagagctgggttcaccgtgggttgcgacggaccgttctgggggttgagcttcgacggcggctgaaagttttgggttttctcttggttcggctgagagagaggaatagagaggtgatgctgaaagtaaaaaatgtgaggggtagtttaggaaaattaggaaagttgtcatatagtaccaattttaataactatgcatttaggggaaaaattaaatggtattttaagcatagaatttcaaatttccctaagatttttattttattttttcaacaaatataaataatataggggaattatcttatatactaattttttaacttttttttaaatttacaatttagtttctaaggtagttgcagcgctagttgcaataagggtggtttgtacacgattttttgttgctttaggtttcagcactagttgcaataagagtttctatgtagaatttcataaaaatacaaaaaaaaaaactattttaaagtgtaaatatgaaaaaacccctaatatatatctatgtatattactatatttttttagaggcaaactaatataatgacttaaggattagtttatatgttataatattaaaa

SEQ ID NO: 211064 - DNA, 526 bp, Cannabis indica
agaaaatttatttattaattagtgtttttatttaattaattaaaatcatttttaaacgggtcggtttaactaattagtaaacagagacgttttcttgtctattttcagcatcgttctcacgatctcaccttctaacattcccatgatcagataacgtctttcttcctgttactatcttttgtactttctctttatataatgcattaaaaccaacaagcgaaaaatatctttttctaacaaaaaattatatacataaaaatatacgattatattacaatatgtattccaagcagtagtgttttgttgggtgtggtatttcgacgattttctatcgtgcaatagagctctcatacagtagtttgactgggatgttttatcttggggatgatgagtctaatagtctgcttgcacaattctaggtagtgatgtgaacgtcttaaagatagcgacctagttagcgactcaatccagattttaattcgataaatttaatcttttttatttactgcaacgtactatttcaaca

SEQ ID NO: 211065 - DNA, 1121 bp, Cannabis indica
tactgcaacgtactatttcaacatgtttttgactcaatatttaagtacctttaataaatttctagatggatcataatactaataaaatctcataattaatacttttcataatcattcatcataaatagagacgttttctcgtcttgattttttagcattgttcatacaatctcactttctatcattctcatgatcaaataacgtcttttttcccgttactactttctgtgcttttcctatataatacatttgaactaatgagagaaaaatatctttttctaacaaaaaaattatatacagttatataagattatattacaatatgtatttcaagtggtagtattttgttgggtgtggtattttgatagttttttatcgtgcaatagagctccgatacagtggttcgactggactattttatcctgaagacgacgagactgatagtctgcttgcacaattctaagcagtgatgtgaacgtcttaaaaagagtgacctaatccacaactcaacccaaattttaatttagtaaatttattcttttattttttgcaggaactatttcatcattttttaactcagtatttaagtacttttaataaatttctagatgcatcataacactaataaaatctcataattaacactttcacaatcattcatcataactacttatagaaaaatattgatacgggacttttttttttctatttttataacatgtgtatttataaacttaataaatatctgacataacatattatatacatacgtatattaattagtaaacagatatattttctcgtcttaattttcagtaaagtactctcatgatccaacattctaatgttcctataattagaaatatctttcttctcgatactactttcagtactttctttatataatacatcaaaactaacgggaaaaaaatatatattttatcaacaaaaaaattatatacagttatacaggttattatatattttgttgggtatactatttcgatttattttttattcgtgctaatagagttttcgatatagtagttcaattgtgttgttttatcctgaggatgacgagactgataatttgctttgcactaatctgagcagtactgtga

SEQ ID NO: 211066 - DNA, 731 bp, Cannabis indica
tcgaactattctggaaagagtgtggggtttagccgaagtggattggggagtaaagatcaagaggattactactgaagctacattcttggttttgatatctctcaaaacacatattaatctttttgctgtgataacttttgcatcataaaaagaacaagcagccaatacgacttttattcttagtctctctctctatgtcactattaacccctagttatgtccatagatttgtcttgtgtcatgtttgttgttctttcaattcttagcctatttctatgtcactattactaactatataataattggtactccttatgcattcataatttatccacaacgaaaatgtaatgttttgatattttgccttactttacaaaaatattatttttaatgcataatttgaaaagattcaaaagtacttgaaatacaacagtgagttttagaatcaaaatataacagacgtaaaacaaaatataataagtaaatgattttaaataatacattttcactgtctttaaaattatcaactgcttaaaataaaactaagacaccacaggcattttagatcgttccgtagccgccgcagtatacacaccaaaactctccctgctcactatatacgtagtaagagtacttccctatctaatatctgtaggggaaaagtaagggggttaagctaaaaggctagtgaaaaaatacttatcttactaggaaattttacatggtatact

SEQ ID NO: 211067 - DNA, 1335 bp, Cannabis indica
atacggttgggcggggctgttgaggaaatatgtggtggagccgtcgcatatgtggtggccgaacactcttgttcaaatctccctattcaggtaaattacagagacgagaatgttaaaaaaaaatatataataatttaataaaattactacagtatttaattctatactattttttttttcaaatcatacatgttccttttattataatatataatatatggtggttatgcacccccatagaaaaagaaaaaaatagtagtaataatgcatggcttagccatttaagaaatttttttagtcatgtatattatatttattatttaaaatttttggtaaatttttagaaaaatattaaaaaataatttataatataaaaaataatatttaatatgtttcacacgcatataaagtaaaagagttacgcgttcttatttgaactatatttttaatattaaattttttaaaatttcttaacattttaaaaattatcttaaataattacaacataaactattataaaaaaaaaattaaaacattgtcatgaatgttaaatagattataaataggaggtgtttttgaattttccaataatacatataagaaaattatatgatgcacatctgttttgatatataggggaattttgtagtccattttttttttttataaattacaattttggattctatattttacaaaagttattaattggaacctctattttgttaaatgacaaaatagacatgtatttttcaaaattgtacaaataggaccatgaactaattttttgtcaaaataaaacttaataataatctgatctagagatgttatgatataactaatttgattttctgtatatgttcgtattaaaaattgtcttatagttggttatgaattattgaaaattgagctcagtattctatttttatcattttgaaaaatatagggtctattttgtcatttaacaaaacagagggtctaattggtaacttttgcaaaatacaaggtccaaaatggtatttacccatttcattgttgtatacgttgtagtaaattaagacatcctgtaaaattttgagaaatttaaaaaaatttaacaagccattcaaatagtctgatccactcatgattcttttattccatgcacgtatgaaataaattatttgaatactgttttatattgaaaattattctaaatttttcaaaattttaaaaaatttctcaaataactatgatgttatgattataaaaaaaaaattggggactaaaacaataagctcacatatatacatatatattctataatcataaacaattattattttattaattagt

SEQ ID NO: 211068 - DNA, 545 bp, Cannabis indica
atgagttaatgtaaaactaagatgaatactagtatgatttatatttttatttctataattttacttaaattggatcacctcaacagtaactatttgtattaatatgttaaaaatttctggattagtcatcttttagtaatttttggaaagatcccaatttaaaattcatcaaaattttagactaagattgtctccaaaccttctggggggcaatgttgtaacaacaaacaaaggtgtgatgaaatgaacaataaacacaacagttttttcatcagtaaatgtcagcagacaaattcaattactcctccaactccaacctgttggatatattaacagaagaacagtaatagatttaatggagtggcagaaaactcactgttgaagactattacaatagcactcaagtgtaaaaggaaatctatttatgttactttttaacttttacctcttgtcctaatgtttttacaacttcatatgcatgcaacaaaatagtcataatggaaataaatgaagtaatccaaccaaatatatatatataaatatat

SEQ ID NO: 211069 - DNA, 1325 bp, Cannabis indica
attggcaatgttgatagccttgatttgaacctcatcttagtagctctacccttgataccttgcaagaattaacagaaaacctgttaacatatgtagtcgaaattcaaagcataacatagagccggattcttacctgtataccagaatgcatagtagcaatagctacacccgctgcatccttaatagtaggaaaattacacatggcaacctgcaatacattgagcttaaaatcagatgcatcttgtatgagacagtataaatataaatacatagcaagaactaacgaaaagaaaaatatcccctaataaataaaatgctttccaaaacaactgaattttgtacaagtagttggcaataaaattgtatatttttatgcataactcaattatttcctgtgtcacatattgtacacataaacattcagttagtgtccgttattaatgctatgacaccttaaatataaacaagatttcaccgtcaaaaggcacatgaaataaattagtcaattattctgatttgtcctaataagccttcggtaaataaggagaaagggaccaaccactgagtgctgcggaagtttctgaagcctaagagtgacttctgttattacacctagagttccttcacttccaatcaacaggcgagtcaagtcatacctatttatacaaatttgaggttataaaactgaaagccttttaatcaaaacaattccattcaaatgacaattcagaaacccactcgtattttcaaaatccactgatttggccaaagaatttgtatctaaggctcatttcattaaaaaaaaaaagaaaaaaaaaagaaaaaggcaaatacaatctaaggctctgattacgggttgacaaattttctctagttctttgagcaagtatagggggtgtatacaacgatagagaggattagataaatatatgcaatatttatgaaagatgaaattacactgattaatcactattatgccttttaaatctatgcatttctctaaaaccttttaaatgaaggaatattgtacaagtttttatgctaaacaatattaataatatagttgaattatatatttttcaaaatatccaagtgcaccaaaatccataccctgaaagtgaacaataaatttataaactacaataatttatcacaaaatgaaaattcatagctgttatgctaagacttttgaaaatactgtctctataccaagaaagggtattcctttttataatgtactaattctcgagtaatattgccatgaattaaacttaccctgcagcactctttcgtgcacgagatgctgtcttgacaacatctccatt

SEQ ID NO: 211070 - DNA, 638 bp, Cannabis indica
aatcaaatgtttcaatcatcaacatgcaatcatgagaagtaatgcaatacctagttatttttgtttggatttgattgggagctccgatcaacaattttcaactcattcttgtatgatctgcaacaatttaaaaataattatatgatttttagtataaatctatgtccgttaatgttgtgtttcattactctattttttcatacctctttttagaataattttggatttagaaggagctgcgatcatcatatttttaactcatttgtagtacgaactgcaacaattatatgttttgttctgcgatattaatgtatttatttcaaattttggggcttttatgtttaatatctgtttcaatttgaatttgaatttgaatttagtatggagctccaatcaacaatgtctcatctatttattgaatgatcttcaacattcaaatgacaatttttgaataaggagtataaatcttactgagttctgtatgagattagaatttcgaattgttgatacctctgtgtaggcagatttgatcaatgagaatttgatgttaatggattcacctttgttgatgtttgttttttgtttctgtcaatctcattattggagtaggtaagtttttttgttgatttttcattgaa

SEQ ID NO: 211071 - DNA, 535 bp, Cannabis indica
gggtcttgcatcagtctgttctttgatcgctccaagtatttctcagttcgcaccacttgttcaaaaatattattaaaaaattaatggaatgtacaaataatctcatacactcaaaatattgattattgctatgcactccttcatttaccacccttaactttttaatcgatggctataaaaatgtcactatcatagggacaaaactcatatacctaccaaagacattttttatatatatctattctatataaagtatatgaaattcttggtttttaagaattttatgggtgacttttgatttttatttaataaaataataaaataatatttatctataataaaataataataaatatcttaaattaaatatttgaatttgaactaatattaacaatcacctcaattaaataccccacaaaggaggagggagtcgactgaacatctcagccattggcaggaatttcgcttgattttagtcaattttgggctgaagcagggctgaagcacctcttttcatctcaggtgctggatatcc

SEQ ID NO: 211072 - DNA, 798 bp, Cannabis indica
gtactgtgaaaacttaacgacacatatatatttttatctttatatattaaaagtgcttataatggtattttttgtttaactagaatatactttaaaaataaaaaaatattactgttaaatttaacgatattagtaggtttgatcctcccgttaaattcttaaccattagttttataaaacatatcgtttataacataatttataattagtcactaaattcttaaacaaaaaccactagaatttaaaataaaactaatatttacgaggtttgctatattcacctatttttaattttgtgattagtcattaatttgtgtattaatttgttttgaattttcaattcttaggcttcttccacaattgaagcaatatcttatgttgattatggaggtggtgatgatgtcataaacttagacccttcttcattctttaaaaaattgccaaatctaagattactgaatctatcgcgattactgaatctaaggccaatatatcgtgaaattggatttgaatttcctgatggtcttcatgacccttttcctggtgagcttagattcttagaatggcctcattgccctttggaatcgttagggtcaaatttcacaccacagaatcttgtttatcttagtatggaggaaagccaacttaaggaactgtggaaagaaaatcaagtaagtaaaataactatatatatgctttattcattaaatattataaatttcatacattgttagttttaattgagatattattcttctatttatatcaaatacataattgtggaatttgatcctctaa

SEQ ID NO: 211073 - DNA, 519 bp, Cannabis indica
ataaaataaaaatattactatgtgtacccatttacctagcattataataagatgagagcttataactataattatttaataaacattttattaattttttttatatgttaaatttgattcaattcatattcttatttctatatttttatttctttcaacaaactacctaatgttatcttcaattcctcaaactactcgaaaaataaataaaatcactcatcaattaactaagtacactacagggttagatctagaagttatttcattcagaaataaccataatgttttatcttgtatatatattctcaacttttgattactattttaatgggtaccttctttctaaaaaaaaaatgttaatcttactaaggcaactcatagcctcaaaatagttgtacgaattgatttatatggttccttgtaaatgggaggttctcttttctttcttgaatttcctcttaattataacaatccggtatggccaacgctctcatttgaatataacaatatttcatgtat

SEQ ID NO: 211074 - DNA, 692 bp, Cannabis indica
ataaaatgaaaattgttttcctttttattttatcttatttcattatctctaaccaaatgtctctataaagtccaataaccttgaaagaaatggttgtgaagaggtggttaattttttttctttttttttttttcaaagggggtgtttaattgtctttaatacaattatatctttatatataatatatgtataaaaaaaataataaaaaaaaactaataccggaaaatctgtggtcttcctgagtttaatggctctcccattttactggagacattctcagaaaaacagttctattgttctcaacaatcttacaacatgtttttgttttataattacttactaattcattgcacaaaataaactaaacacaattttttttaaaaaaaaaatgttgcacattacaatttacaatctacatatcacacctgccaatttcaacaaacacaaaaaaaacccatcaaaaagccaataattctactctaacaataaaaaaaaccaaaatggttactacaaacaaatttacataataatagagacatgtgtaacaacaacactctcttcaattgaactactaacattcgagtcacggttgttattgttgttgttgttgttgttgtggtcaaaaggcatagcctttttcttaatgaactcaatgcaatcagcacagcctcactttgcatatgatcatcccc

SEQ ID NO: 211075 - DNA, 664 bp, Cannabis indica
ctttttaagagattactttatatactatttaaagctttgtattttatttgtttatattaataatatgtccatataataatgattataataatcatcaaaacttataatttttagactcaatatttatggttttaaattattgtccaaatagttgttagaaaaatagttgtaacgaccccgattttgacaccaaaatttatctagaattttataaaaagatttaggaaagacttgctataataacaataaataccattataaaaatgtgatacctcaattaaagttgtatcacacctttcgaacatttttttcacatatataaggtactccttaagtgagagcattactttcactttcaaaagtgagaatgtttttgtagcttttgatttttaatctaatggtgttaattaatttgattataatacggtatctcttacaagattaataacttttttttatttattattttttttttaaaaaaaaaaccatccacatctagcaattgtaacaatcatcccacatttccaaccatttttaaaataataataataaatagaagttaatacactcaatcttctaaagatcgatgaagaagtttattatttatttataaacaaaaattctgaatttttgctgttaattactaattacttctctagaatga

SEQ ID NO: 211076 - DNA, 503 bp, Cannabis indica
tcgtgtagtacgttgtagttaattaagacatccaataaaattttaagaaattcaaaaaagtttaacatgctaaaaataaagttttaacagtttgtcgcacacgtgattttttaacttcatacgcgtgtaaaataaattatttggacattattttttatactgtaaattattccaaaattttcaaaaattatacaagatgtcttaaataaatttaatgtacacgaccactttaaaacaaattagatatcctgcattttttaaaattatataaaatagtaccggagctcaactcttgatattttttttttaataaaacaaacttgaatacaatttatagcacgaacttatcataacacatctaaattaggttattattaagttttattatataatgtttcatctatatatgaataatatttttttttttcacattttggagccctcatcgttctagggcacaaagcgcacacctagctcgcctcgcttcacttcacttgagggct

SEQ ID NO: 211077 - DNA, 1269 bp, Cannabis indica
gtgagaataaaaatatatacacacataatacatatagataacaaagaaaaaaaattaaaaagagttcatgaaattatttcaatcagatgaatatttttttttattatatagtgcatcgtgaccttgaaacaactcaagaacgttataaaactattataaataatctaacatagacaataaaaaaaagaaaaaaaaaagaaaaagtgaatgaattttttcaattttttatttatacaattaatgtatgagtcatatattcaaaaactaaaagaaagaatatttattgtaattaataacaattaataggttatatttagtacatatattatttataacaattctcaatttttttttttttagtaaattcaaattttaaattttttaacgttagacttcttaatttattcaattcaaacataagaaaataaaatctttacctacgagtaggggtgcacatttatactcgaaacccaaaatccacctggctcaacacctcaaaaaaaatgggtttcaatttcagtagattgagtttaggtgtaacccagttctttatcgagctgggtttgggtttaaaatttttgaaaactcaaaacctaaaatttaccagtaacccgactagtattttatttatttatttattaattatttttttatgtatatattatataattatattatatatatgtcttttttttaattgtgaatttatgagtgtgtgttgaattgttaatgtgttagtttatgtaatttgcatatataataataatatattgtataattgtattattttgtagttttttgttaaaaaaaagatatatttttatttaaaaaaaatacttagcttaacacaaaacccgacccaagcccacccgagctcgtcccaatccgaacccaaaaatccaaaactcgttaaaacccacccgatgtgtacccctaccgagaagtggtatggaagggtgagtatgaattggaaataaaattttggatttcaattttttctatcttaaaattcaaaatctaaacgaggcattataaattttttttattaaatgaatatggtatgtattctattatgaacattttttttttttttcttgcaactattgtaagtaactcctttcaaaataaaaataaaaaagaaataaaaatggtaaaagtaaccactactagaggaaacctccaatacccgtcaactaaccggtaaggacgccttaacgggacggcaacttccacgtcaacatcgtcgtgacatgcacgatgcttaatgat

SEQ ID NO: 211078 - DNA, 860 bp, Cannabis indica
attgctataattataaagtttctagatctaccaaacagagggatacttactaaatcttatttgttgctgtgttaatatcacaaagcaacatcacatggttggtatgtcagttggtgcttctaatcaacatataaaccttaagtaggccatgaaagatgtggctatatgaaactgtaaaaactatatgagtggctcttatctataactccatgtcattcatggacctactgatttttcaaattaatcaatgtttatggatataagtcagacattaagtaaaaagtgtgtgctacaatgttttttgccatgaattgagtgtaaaaaaaatacttggttttgaactattcttcatatgataaatgtaaagtattagatcaagaaaagccttcatttctttaattatctttttttttaatttaacatgataaacaaatggatctaattgagctataaaaagtaacattactgattggaatcttcttgtttttcaggataaagtactttctagataaatattattttgtgtgtaatttttatccttgaaagccactaaaagatagccaggggcagtacaagttgtatgactgataatgatatgatccaattatagagtagataaagattttacagccaatgcttctttaattattaatttcaatatgaatatgagtgtgacccttgaaattgggacaagtcttacacatattcatacaaattttgtgatctgagttggtatgctctgtggtggggttgggaaatgaagagaaacaaaactataaagaaagattatgatatgaatagaaaaggaagacagtaccatgtgattgcccaatggctaatgcctcctcaccagaccccca

SEQ ID NO: 211079 - DNA, 706 bp, Cannabis indica
tctcgcaagaaatgacgtttgccctctgttattttttgtaggaaacacctataacgactagcaatatcttcctggttgatttttattaaatggtctgtaatttttgcatcatttatttctaatttttattggggttttgaaattctgggtttgtacgggatggcaagttcactaggatactctgtttctaaggattctggagaataaacttctgaactagattgggatatttttacaaaaaagagcaatcccaatttctggatgaaatttatcaaaccagaagtttaaaaatatgataaacctaaaactttgtactctgcctaaaccctaaaaattacccataaaaatttaaaccaaaatcgctaaaaccaaatggaatggcataaatgcaaactataaaaatagtgatcaaaacccaggaatgtgaaagaaagaatagagaagaataggtcacttaccattttaagtccagtagttgtatgataaaaaattctgcaactgaagacggagtgaacgacgtgatgatctttttgaactcttgaaatcgaacatcaaatccaagtatatgtgcaagaagaatgtcagtgacagtgagggcatgcaaaagcttcgaaaaaattcggatgaatttttttgcagaaaagctcaagaatttttgaaatggcaaaagtgatggaaaggatgttcttttttcagttttatacca

SEQ ID NO: 211080 - DNA, 880 bp, Cannabis indica
aaaaaaaataaaaaaaaaagagtttttaaaattgttcaatcacatgaatgtatataaatatatatttagtgtattatgacctttaaataattcaagaatttaaacaaaatatttattttaggacttgtgttgataacgtgttataaaataatatagaatagagaaagaaataagagaagaagaaaatgagagaatgaatgaaatttttatcacactactaaaaaactagttttttatgacagttttaaacagtcggacaaagtattcttgtcggtttctataaccgtcgcctattggactattgcaaaacgggtggaataggcgacaattcaaagttgtcgcccaaaaagcattctcgacagttgaaaattgtcgcttatagcatgcagtatagggtacggtttaaaactgtcgcctataatattatactcgatgaatttaaatcgtgccctatagtataataacacacctttttttttattattttaaaattttaataatcataaatttttgttatatatttatttatatcataatcataatcgtcaaacaacttgagcataaataaaaatttattaataacacaactagtttaggctaattacaaaattttatacaattctaattctatcatcatcaactatgaagcaaaaaagtatttacgaaatgaaatacactctttaaattctaagatctcaacttcaaatattagtattgctccaaagaaagacttaacaatatatctacacattctaattaaactattaatgaataagcacgtaagacttgtaaaaaataacctaccatactacaaacacatcatcacaaaaatattaaaatttttaattatttctatatcaaatatataaacttttcaaaa

SEQ ID NO: 211081 - DNA, 537 bp, Cannabis indica
ttttttttaaaaaaaatactatttgacgtgaataacatgattttattaaataacattattattaatattagaggaaaccaaaccaggccactaagttacaatctattatctacatgatccagctgattttattttctccaatcaatattctaataattacctatcaagaattaatagtaatattaaaaccacggtcaatttagatattaataatctttcttttatatttttcattttttattgaacttctactaattttcaattcaaaacgtttttttttttttaaaaaaaaaaaacaaaacaaaagtcaaagagatagatacacgtaaatttatttgaaaattaataaataaataatccacatttttgttttcttacttttaacgtgaattagttatatattagtactgccaattggtagtgacggagtttagggctgcctgccatgatttaatttcaattcttgaaaaaataattttttttagacaatttttataagaataaataatattttaaaagaaataatatttttaaaaa

SEQ ID NO: 211082 - DNA, 648 bp, Cannabis indica
tttgttggtgtgtcttttatttggcttctttttggttttcgatgttgtgttgtgactttttaagctaatgctgccactattaatgtaatctccttttcatcaaatatttatgtaaagagtaagtagtactactattaatttgtttgtataaaatgtcaaaattaattagtagtactacttactctttgcttccacaacaaaacgaatatgactactcttgtaattggtattgtaaacatgaaatttatgtttttcatatatataatttactgcagacccgtcttaaggtgatgaaagacctagggcgaaatttgaaatgaggccttttttatataaaaatttaaaataaattttaattaaaatttgacacaatatcaattttaatttttttatttaacgtaaactataactcaatcaagtaatatttaattattaagagcatatttattaaagtgttatatacttttacacatttgaaagaaaaaaaaataatgtgtttaaattatatatatttaaaaaaaaaataataaatatacattttatttattattaataatatgttaaaatattttaaaaattataaattacttcaatatattttttatacgttatttatttatgtacatttaacaaataagtagtctaaaa

SEQ ID NO: 211083 - DNA, 526 bp, Cannabis indica
gctgtagagcttacttgcccaaatcaagactcaagagagaatctcaactcttagattatgctagtaatgatggaactctacctcaatttataatggtatgagttttatttgtacataattgatcatgttacatatgtagatatatatataatactgatatatgtatatgcaaattctcacacttaatagtacaaaagattcatcgtttagtcttttcaccgttgggtttgtctaattaattagaaatttttacaattttttaccaattatttaaataatagtttaaaaaatttctaataactttcacaagcttttatcaccatgttttcaaaaagaaccctacgttttcaattcaaattcacattcaaatgtaagttcatcaaaactctttatttgtcaattcaattgttaattattttatttttaagaaaactatgttaattattatgtttaataatcaaatgttcaattgattatttgtaatgagttaggttttttattagatgattttactagtttattttct

SEQ ID NO: 211084 - DNA, 622 bp, Cannabis indica
aattaagtttttgcgaactctagtttttgttttataagtttctgttgagtattcaaattcagtgaagtgtctttgaactttattgagcttgaatcctctatcgggaacccttatgattctagatgaaatgttttatacactttcagtcaaaaatctatgttcacgatctgataatctggaagcattgttccctaaggatcttgctcccggatgtggggtgaggtgggggacctctccaaccagtttatgagaaagactctcatgtacccttgctatatccattaattaactgcttggtttttcccttattcttttacggttgtcatcatggttgatgcgattcaagctaacgaggtggagattcttgaacaataaagaattgaagcaccacaagtagtgtataattcatctcaatgggagatggattaacacactaataaattcaaaaactatggggcgatgtgtgcctacaaagaagagccccacctcaaaaatatcctccacttattttggaacaggctttcttgttaagagaatcatcgttcaagtgcgcggatggatttggtgtctggagctgggcacatgtgaaagtagctgcacattgtgacgccctactagatta

SEQ ID NO: 211085 - DNA, 742 bp, Cannabis indica
agtcgcagtcttctccgtcgatacacttgagtaacggctaactaaaacttctgcgatataaccttccgtcatatataacatatcgggcagctcgatgtcgcagctttcttgcttccatcttgtcgtcaggtaagatacccctttctagatatgcgactattggagtcatccaggtgactttgtgggcggtatctatttccataattgcttcttgatttattgttgggtgagccaatacatccaccggaattacatcgagcaattcggcttctctagtcgaggccaaacgggccaatgcgtctgcgtatgaattatgagcacgcggtactcgagacatgactactttcttgaatttttgcatcagttcgcatactatggctagatacttaaccagtctccctcctctggccaggtattctccattcacctagcatactacgatttgagaatcactgaaagcctgtagatactcgattctcatctcgagagcaagcttcaatcctgcgattaaagcctcatattcggcttcattgttagatgcagaaaattcaaaacgtaaagcagcgtgtaccttaaaattgctgggactgattaataggattccgccaccagaaccttcgctatttgaagccccatcgacgtacaacgtccatacttctccattgggcatagtagtgtcaaccttgtcgtctatgagtgccacttcagtgcttggaaactcgaggataaaatctaccaaggc

SEQ ID NO: 211086 - DNA, 506 bp, Cannabis indica
aaaaaaaaaaaaaaaggttttaaagggtaacctattcatgaatgaatttatttctatttatttttttatgtgtattttgttcctctctcattcctatttttctatattcatttatggaatgccctcattttataaatgaaattagatgtcatcatctaagaattgctctcattccaccataatttagatgctctcatccatagaatgccttcattctactaaaatttggatgctctcattcatagaatgttcccattccacaaatgaatttactgtcaaaattatttgcagtcaaatataaattttgattaaatgataatgaattaatttcatcgacaccttatttatgctatatatatatatatatacaaaaatagatttctgtacagcgaaaaacatgagtcagtagtggtttaaaaggttgcaaaagaaagtgattccaagggataaattattcctttcaaaactcaaatcgtatactatatatatatacatgccaaatttta

SEQ ID NO: 211087 - DNA, 653 bp, Cannabis indica
gagtttgtactttagtcagatgtatcttgattaccctattcgaacatcatgttgtaacaaacatttagatcaatcgtttgttggcttctaagagtactccattctgcctaaataggaaaatgtaggacacgtgtcatccagctcattgccatgtcatggtgccaaaaataagataacattttccccaaagtctgtgcaggaccatcctagtcgcacgtggacttcacttagtcaagagtcttgtctggatgggtgacgtgtgtcttcgacggttgatgctaatccaacaggactctgactagaggtttcttcgatatctgatcatttaatgccttttaaaagttgtacctcaaataacggttcgatgtttgagcatgcttgacggttgtacttcttgcaatgagtacgaacgtttaacttttgggagaaaacccaaatatttgaattttgaaaatgatttttcccttttctgattgcttataaatcgagatcgaaacttttggcaatctttttagccagtttcactctcaaagaactagagcaaaattttcatctaagcttttttgaaggacttactggaaaacccctggcgataccatccaagcagattaagaaagattcgaattagtgagtaagtcagtctccctttcttt

SEQ ID NO: 211088 - DNA, 931 bp, Cannabis indica
gtatgagcctcatcaagtatttcctttttgagctcatcgttgttcggaacataaactcaaattttataaagtagcattccactattcgagattgagaaatccttaggccgacccgataatacctcatctcgaatttcaactaacttaggatcttccaattgtgtctttctgatcctttccaacaaatctgactgaagtgtcaggttatgtaacttcccaaccaaaaattcaatttcaaccttaccaattctgaggctaactgaggagctatcattatagtattgaagacctgcccgagaccttttctactcaaagtattcgccaccgcattggctttctcaggatgatacagaatctcacaattataatccttgataattccagccactgcctctgcctcatattcaaatccttctaagtgaagaaatacttgaggctcttgtggtctgtgtagatctctcatttttctccatacagattatgtcgccatatctttagagcaagcacaacagtagcaaaatctaaatcatgtgttggataactgtgttcatattctttcaattaccgggaagcatacactataaccctatcagcttgcatcagaacacatcccataccctatgtggatgcatcacagtaaatgacaaacttttcttggtctaatggctagtctaacaccagtgatgtgatcaaccactgctttaattcttgaaaacttgcttcacacttgtcgaaccatacaaatcgttggttcttcttagtcaaatccatcagtggcattgaaatttaagagaatcctttgacaaaatgttgataataccctgccaacccgagaaaacttcatacttcagtaattgttcttggcctcgaccaatttttaactgactcgatctttcctaaattaatcttaattctatcttttctgacaata

SEQ ID NO: 211089 - DNA, 519 bp, Cannabis indica
ccacacaattaatcaataacaactcaaataagtctaatatcatcaatagaacataacccaagtaacgataacctaaacaaaatcaaaattacaaagtgccattaaagctccaagcttgagttccatgaactcaagcttgctcacaacaaccatactttcagctagcacaaagcaataaccacaaccaaaatttagatttaaactcaaagccacatctcaaataatacatcaaaaacatctctaaaggcaatatccattaattaacaacacaatcttgcatacaacatcaaaactaactcaatttctatacttatgcaacttaagaacttaaagcaacctaaacatgctttaaacatccaaatatcagcagcaaattaagaacaaataagtgatacaaactacctcaagatcttcaacaactcaagcaccaaagatccccattaattcaagcttaaccaagaccaattttgtcaagaatcaacaaagtgaagagatgagtaaaaagagagagagagagag

SEQ ID NO: 211090 - DNA, 504 bp, Cannabis indica
tttgagtattttagtcttgtatgcgtgatatgcttttgttttgttttattgttggttcttctttattcttcgacgactcactattaaattgttgttagtggttgtgaatagcaagttctctgcgactgaagtggttgttagtagtgcatctacgtactttacacaatagttcagtgcacaagctacgaagttaaatgaacctgttgcaacaatttctactattgtatcttctgggcagtggataaaacagaatatacatgttcttaaagttaattgtaatgttgcaatcttttctatttgattttattttaatttttttgtcaaacgatctaaaaattaagccactaattatttaaatgattgttataaaacatacccttgattataatctaccctctaaaaatttctctacatatcaagtggaggcgtccgtacgtccgtctatactttgtttgtgcctaaataagcaataaaaaccagctcaaataaaaaaaaaataaaaat

SEQ ID NO: 211091 - DNA, 2004 bp, Cannabis indica
aaaaagaagagagagagagaatagagtaaaatttctctctctcatactttctctctaataattgtatatctctgaatatgtgaatatgtgtctctttggtttagagctataatcatatatttatagtgtcactgagttagatttaaaattaaaatgtattaaaaatatattattaaaatccttacggctgaaactcatatagaggccatgggttccaataatgtcattttaagtttaaatttatcttttctcaaaaataccaatttttaattctaaccttttaaatgttaatttatcaattatgactaattatcatataaaattaccatttaacttatttattaattagactttccaaaatttcttaattaacaaataaaccctatatttcttttttcttctcaaattcgccctagtttaataaaattcataaataagacatgatgttatttagaatcctaattgattaattaaaaccaattagttgagtctacaaagcaatatgatcttagctagtgtgggaaccataggcctatgtaatcaagctcccaataagtagttctagattttatcaagtaaattctctatcttattaattcatcccgactccactattgatacagaattgcactcttgattacatagaatgctctacacaccaagtatagatacactatgaatttatctattatttaaatttacaattatcattgatcctctatagacggtctacattgagtagggacaaaattatcgttctaccttacaatgtattttatccttaaaacacttagctacttgtaaatgatatttcagaaaagtaatataattattaaaatgagcgctctatcttttattatgttaagccatgccctaagaatactatcatttcacttctaatagacatagaaactatagatgttcatatttatgattaacactcacactcaattatactactgagttcccaagatgtaagtataggctagtcccacaagtaagttgatagcgaacaagtcaaagaacatgtgtaatttaagctagagcttaaccatcttaggattaagatcaaatgatctatgatcaactaagtgatattgacccagaaaagatataacggtaagtttgatatctttttcactgtcaatatcggtccaatctaatgtatagccgatatgtttgatcattgtttactttgctaatgccttggaaaatatattccactcaccgaagtgtaagtaaaccttattgttgattatcatacaagtataaattcagtgcagagggactaaataatttgaagcatacgatcacgataactttctactgtgatgacattattataattgtgagtaactacatgttcgagatttaatagaacttatatattaaacctataatcatgtaataaacatgtgaacaaagcatatgactaagtcatggtatgatttctaatctttactaaaagtaaatatgattacattgaatttgggttttatttaggacataaatcccaacaaactcccacttgcactaatataaaactaaagtgcatttcaatttagtctcatatacttgatgtcttgatcaaatgtagtattacgcataaagaatgtaataggatctcataggttgtactcagttacaacctactccaccatcatattttccttagtcacacaatccatgattttatgaattcctcatctatatgttttactcttcttaggttataggattatttaatgtttggaaattgcatctatgttatcatggagtcacactagcaattattccatatctagaaataacactaaagtctgtatcaaactttcctaagtctgaataattcagtcattgcctttaggacaacattattattcgtgtatggtattgggtagtgatgggattttggattggtaataggatgggagcggggaagggaatacaggtatagtctccaaagagtgagcattggtagatagggatgtaaacggggcgggg

SEQ ID NO: 211092 - DNA, 1066 bp, Cannabis indica
tataaatatatatatatatatcttcgacttgaacttgagatattttttgtggccagctatatatatttatagctataactgatacaataataatgaggacacaaattgttatatacaaccccaactaataatgtagtcatataattaggaataattaaaagaaaaaaaacagatgattataacatttttttaatatattaaaatggatataatagaaaaattagaaatagacatatggaccaaaaaaaaaagagaaacaaatgccttatatatatatatgaaaaaatgggtttaaacaaaatactggtcaaaattattcgtaagatctaatcaaaattaaataaaattgtagaaaatttaaattaagttatatatattgttttaaacaaaaatatgataaaattaatgttacacccaaaaataaattagttatgataacagtaatttcagtgattcaatttgattagtaattgatgtttttgttagagagcataattaaggtgtaaaaggaaaatagaatatataaaatctattagttaatagtattaccctttttattgtcaattaattatgagactccgtacactttaatctcaaattctaattaatgtttgattattaactacaaatgaaaaaaaaatatatatataattgtaaatgataagtgacaaataatgaaatacatccaaaaggtggttgataaaaaaattaatgatgaacaaaatgtgggttaatttgaaaatgaaacagacgtagataagtgaagattttatttgttttggtcttatatataacattgaatgcatgggaactgttgtgttttattgtttacacattttgttggtgctgtgaaagtttgacacgtggatataagtgaatttatgtttaatttattttttattttttgaataaaatgaccaaaaataagttagttttggtgaagctaaaggcaacaaaaattagatatacacctcaaaaaatagataacaagaatttaaaattcttaaaaaataacctcataaagaataaagagaatggagtgagaatatgtttaattttttacaaa

SEQ ID NO: 211093 - DNA, 707 bp, Cannabis indica
aacctcgagatcaataggttcagctcataatttcttcatatgagcgatggttttcctttgcctcttgggaggaaccacctcggcagcaggagggactccagggttggatgtccttttctaccccttgcggtctagaatgtcttcataacccttatctgcaaaacaagacgaggcgttacaatcattataaaaaaagcgattaagaaggggaggagtataattttccacctaagggatttaccaaaattactagaaggcgagctaccactagatgaaggggtagaaggagcataatattcgctaaagtccctacaacctgtaattttgaatgtatcaaaagggtcgattggttctaaatcccagctcgtatctacgtgacctctcctatcttccatagtaccgtattgcttgactataccataaaatgactcgtgatatttgatctggacatggaatctagggtaccaactgtaaaacttatgagcaatacggtccacgagaatggaattccaagtataaaaattaagacgggagtcttggaaggtaactaaggtattacgctcagccctaagtacagtaggtgaccagaacaattgattaccttgggatgctccttcactggattcccaaggggcagtgctatgaaggcattgtgcttggcccaagcgatcccaggcgtggtcatcgggtggaacaattatttgctg

SEQ ID NO: 211094 - DNA, 688 bp, Cannabis indica
tcaatgtcttcaatggtgaaacaaagaacaacataaattcatatcactaataaccctcatctaatacatttaaatatttaatgtaagaataatataataatttaaataaaataaattaatttctaaatataatttttaagaatcaccattctctataattataaaaaaaaaattaaaaaacttcttggtaacctgctctagcaagtcaccaaattgccacctcatcaatttttttagtacccattaatgggtattacccattaagaaattatccatatatatatatgttactttatgaactttgtaggagatagaggagtatattttaataagaaccaattaggttgagcttatgattaaaaacaatagtatcatatatttttacatattgttgttctcaataattaatgagtaaacaatgactatgaccataggtgggtgggtgtgttggaggtcctgggttcgagtcccagataaaacatggtagtaatatataaacgcttaaataaaaaacagattatattaaaataatattttgaaatagatattactctcatcgtattggtcacgagttacatttttttatttttttgaaaggtataaagtacattcaagagagaaatggcacccccaacaagtcttatgaaaactaagttgtacaaaatctcacaaagacataattcaacaa

SEQ ID NO: 211095 - DNA, 649 bp, Cannabis indica
atgaataaccctactttagagcatctccaaattctagctagagtcgagtgcctaaaatgtcacataatccataaaaagaaaatattttatttatttggtaatttttttctaataatatttcaatagtattagatttttttagaataatttacagtataaatacttaagtttaattatcaattgcaaataaataattaaatttaatttttaacggtaataatatctaagttataattctagaacttcagtaggtaggtacatgactgttaagtgttaagtaaattttcacatggcaaaccctgattggtccaggtcattaaatttttattttttaaaaaattaatttaaatgtcctaataagaaaataatatatgtataataacttgatacttaacagccaggtacctacagagttccagaaatataacttaggtgttattactataaaaaaaattaaacttaagtatttatttataaccgggagttaaacttagatatttatactgcaaattactattttctttattgaaaaacatagtacaatattatcgtctccttttaaggtgatgcactatcttagggttgttcatcacacatttttttggtcaaacaatttataatccctaagccgctataaaactatttgaag

SEQ ID NO: 211096 - DNA, 1178 bp, Cannabis indica
aagagaaggctttccatgaactatagttgggtggcttccgatagggtagcaggaaaaattctacaacacacatcccctcatatcccttgcaaatccatttgcatcacgaaatacttgaggtgggagagaggatcttctcttcctgtgtacattttccatgttggcattttaaacttgtggggcaacgccagaagattgatctcgggagagaaaggagttccacgtgctcggtccagctcgagatcattgtttctctgtccagccatgccttggaacatatttttcagttcgtctagctatgcttgtacggctgggctaacctgctcgacattctagtcgatttgaattacctcagtatctttctgagcgggaatttgagcacgggctccgggctatatgatcgtcgtgacaatctgatcgtctactcctctccttctattcagatcattccttaggtcatgagccgtccccaacctctcgaatacagaagtgtctggctatcttagcgattgattttcttggttgataggtggaatgacaccgttaacctggttggaaccatcaggtatgacctctcccgatgaattactaaacaaggtctgcccgcctaccgctaggcctacaagtggaactcgtgacttgggattgggcggctgactatttgcagtctaggaagtattcatcgctggatcctcatccatttcacccaggggtatgacacccggaggttgctgacctacagtttggtaggcttttcgtatcagcacggtagcttgccgaatacgattttcaatctctgtatgatgagcccttaacgcttccatctctttgtctctccactcggtaaacatacgcctttgttcgagcgcggagttcttcctgatcatgatgtagggtattggcatgaccctgtacgagtccaagagtgtcacagagatttcgtaactcagtatcatctccaatggtcgtttgagtgttggtaacgggcagaacggctgtgttatgaatgcccttgttgggtgcgaaattgttattcccagtctcttgcacaccatgcgcaatttcatctataggagtcgttacaccgtgacccacgtttgccggctattaaggattaacagctaggggaacccttgcgtttcttgggttttgcaatgtaggatccaccatctgtggat

SEQ ID NO: 211097 - DNA, 705 bp, Cannabis indica
attcacctcaataatgggtaggtattgtccaaattttttttaaaacatttagattagtatgtagtttattttcgatagatctgtgtggttgttgtttctattggtgttgttttgctggtgtttttcattgaaatgatgagatttggttttctccccaaactggatttttaacaaattatctatactttttcgattatatatcgatatcttctcgataattagagtaagaaggtaaatgatggtaattttcaataattttttgatggtatatcgataatattttgatctaggataaaatataacaaaaaatagtaaaatttatcacacaaggcaaaatcatcgagaaaccatcgatatactattgataaaccatcgataatcaattaaataccaagtaaaagataataatagtctgccatcgataaatatcgatactatcaataatatagtacattgataaaccattgatactatcgataaaagactaaaataatttttgcttggtattttaattgattatcaatagtatatcgatggtttgtcgataattctatcttgtgcgattaatttcgctatattttattctggatcgaaatagtatcaatatatataccatcaaaaaagtgtaaaaaattatcatcccttaccttcttaccttaattataaaaaagatatcgatatgtaatcaaaaaaagcatctataat

SEQ ID NO: 211098 - DNA, 636 bp, Cannabis indica
aaggtttggtagttcaagtgcatgcgagggttttggcaagtgttagctagccttagtaggagttggttagcctttgtatgtgttggcagccacactgggtgttggcaagcctttgtacaactttcctcgcaaaggtcaggcttccttgatcaaacatgtccttttttggtctgacagttacctttggccagctagcttgtgctcaaaccttagccgaccatacaagcttctcctagctggcttatgtactcccttggtcgtccaaacatggttgtgcagcttcttgatagtttgcttaactccttttgctcattgctggacagtcttaccatacctggtaaggagactttgtcatgctattgacaaggttgtattccacgcatcctcaatcttggcttaagtggacatgccacatcaggtggacaaaatttagaataacaaggttccttgaaggtattaatacccctgtataggtatctaaaaggggaaattaattcatttaaaattcaaaatatggatttcccccaaaagtgaacgttagcactcattacaaaagtatagacatgacgcttgcagtatcactcaaccgtcaatgcgtaactcgacgtacaattttcaagaggcatttaatgcccc

SEQ ID NO: 211099 - DNA, 981 bp, Cannabis indica
ttatgaaacataaaaaactaaaacaatattttcacgtgtatgactctatctatatgtgaatttattattctatttttgatttaatatgaacaaattcaccattaaaaatttataaaacaatgaaaatgcattgggatagtattgatgtaattttttttagattacctaagttggattgtttgggaactccagtctaactttttaagatgtgcatttcatggatttgaaaattgaagtcagaatattagttttatacgatttaaattgaatttctagttgaattttagttttatagtagtttttttgtatttttttatgaattcgaaacagcccatgtcttgattgattctggtcgtcttcttatgtgaagtcgccagaattaatggtggttcttttttggttgtgtttcgtttcaattgtgttgggttgttgggttggtcgatcgaaggtttcgtgcgtgaggttatttgtttcgttccgtgcggctgaagtagtagaagaagtagtattttggtaatattagtttttaggttgtattaatattcataggttcggttattagtattgttgtaatttaattcccttttttgtgtatacatgaaaaaatctctttataaaattcaatattatattttagttttattattattttaatttatttataattaacaaatacatatctatttatattatattatattattattaaatataacattttttaatgtgtcgtgctgtactgtaggtttgtttcttgttatgtctttcgagctagtctgttcgtatttacgtactgtgttattcgtgcttgtcgtgttgtgtttgcttaagtacatattttttttatcgtgtcttgtcaatttgtagtattgttttgtatcgtacccaaactttgcttggtggtgctcgtgccaattttgtgtcgcgtcaaaaaaatctaatttgtatttatagcactagatactagatattaaatactac

SEQ ID NO: 211100 - DNA, 589 bp, Cannabis indica
tatcattccttttttaaatgcaatagagctcataataatatataaaaaagtataaacactccattttttttttcgcatcatataaacagacacaacatagaaatgcacattacaacaatattacatacttgaagatcattcattcatacacccatcttggttagcagaaaaaaaaaatcaatgaaaaggcataaacaactaaaattgacacccccaacatgaccatttctctcaaattactaataatatgttatagtaagagaaattttttttttttttgagcaaaagtaggaactttattacttcaaatcatccaaaatcaaagatgaaattacaaaaggtaaagacaaactagtaaaaatacgatcagcctcagaaagagaggatcgcgccagctggtgcgcaaccctattagcagatcgcttaacaaaactcaaagagatattaccaatctcggcgcataacgccttacattctaaaataatatggccataaggagagaccatatttttattgctttgaatatcgctaatcactctcaaacaatcagattctagaatcgacccccacccaaccattggactttact

SEQ ID NO: 211101 - DNA, 696 bp, Cannabis indica
ggaaagagttgcagaaatatgcagtaaagaacactatgtacagttattatggactgattttttttttttgaacgcggtgatcaaaatcacacatgattaaacaaagcagcaatccacaatcggcagagacacctcctcgaaccaggatagctcatcgtctaaccgaagggcatgctttgccaaaccatgtgctgcagaattcttatcccgagtcacatgggacaaaactgcccccggaaatttagacaatcaagctatgtcttcagaacagcaccacatcacattgagaaaacaccttcccaaaaaaaatatatatacatatatatatatatacaaactaagaaaaacaaaacaaaacaaagttaccactcaacaatcaccaacaattactattctcaaataataatgaatttagctaccaatttctaaaggccttctcttactaatattgactaaatcaaatattaccacacaaattcaagagcatcaaatattaccaataaactattcttgaattaaacatgcatctatacaaaaattaagtacattagataagctcatgaaaatcatactaaagtttcataaataactctcctaattaatcaacacttgagaagatgaggaatgttgtagtttgttggaatcatgataaagtattctatgaggttaataaatatatatgatcataatctacta

SEQ ID NO: 211102 - DNA, 593 bp, Cannabis indica
gtcccggtcccgatcccggtcttggtcccagtctgggtcagggtccaagtctccaaggcatccgagtcttgaattaagttttttttaaaaaaataaattaaaatcgggtcggatcagattcgatgcagaaaaaaattaggcggggcagagcggatctgatccaagatccaataagtactcgaaggtttcggatcagaggtgatccgtcggattagagctccaacccgctccaactaaattgatctttttgacatgcctaaaaaaataaataaataaataaacatagaaattttcatattgaatatcattccttttttaaatgcaatagagctcataataatatataaaaaagtataaacactccattttttgtttcgcatcatataaacagacacaacatagaaatgcacattacaacaatgttacatacttgaagatcattcattcatacacccatcttgtttagcaaaaaaaaaaatcaatgaaaaagcataaagaactaaaattgacacccccaacatgaccatttctctcaaattactaatagtatgttatagtaaaagaaaataaaaaacacaacttttgatatttaa

SEQ ID NO: 211103 - DNA, 867 bp, Cannabis indica
ataataatattcgagcctttataataaatcattcaacaattgaaaaagctcaatatatatatttttttgctttgaaataattaacatataataattaatgacactattttgtttttcttttttcaaagtaaaacaaaaaaaaaaaaaaaagaaagttaaaattgagttgagattgagattacatatataaaaaagtcaaggatgatggttgactttctggagaattgaaagtaacttgttgaaagttaatggcttctgttgataatcatcaagaccagcttccacaaactctcttatattttcctctaaagaatgtgatgaaactcctgctattgtgctttcaatacccatttctctaagttttttgtagcctaaaaataattaaaaataaataaaaaaattaattaaaaaaaatgaatgaaatgggtatattttaaatataataaaaataataataataatgaaaattacctcaatgccattcatgataggcatatcaaggtccattttgtgacccaagtagtgaacatcaatggcttctctaccatttgaaacgacctcgttttgaatgcccatatttgtaagagcttcttgtgtagtgtttggttgatcacattatcatccaccactagagctttcatcataatcaaattattattattattattattattattattatattacatctcccatttctattgttgaatattgcttcatcatcttcatcatatacatatatataaatatgaatataatgatatggattttttttttttttttttgtgaaattatgacaaagaaagaaggatatttaagcttgaacaaagtttggtttggcctacttaaaaagctgcagaaattagt

SEQ ID NO: 211104 - DNA, 536 bp, Cannabis indica
aggggggggagaaataggtaatttattaaaacttctcttattttactttatctattacaaaagatactaatctatatttctataaaaggacaaaaccaaacaagtaagaaaaattccattttactccttaaattaatctaaaagaaatctctaacctagggttaattttttcataactaattaccccgagataccatgctaaacaaatacttaccaaacttataaaacccacaaaaaattcaaacatacattgttgtgacatttctggccacggatcgggtctccgtagttgctagacctgaaatttttttatttcaccattagcatatttcattttgacatattccaataaattttccgtaattaataaattatgcttatttattcatatttcataaaatatgccctaattatcaaaatgtaacttttggcatattacaaagtgggtgagtgctcccatgtgttatagttccctaagagtcatgatcaagaaataccaataggatttggtatggcaagtgaccaataaaggcact

SEQ ID NO: 211105 - DNA, 1095 bp, Cannabis indica
ccaaaatggtatttacccgaaaagatataatgaaaaaatggaaaacttaataaatcactatatttgttttttttttttttgaagaaaaatcactatatttgttaatattactaattttgttaaacttctacccaataagaaaaaaaaaatgaagcattggagaaaaatttgtttaacatagaataaaaaataattgcccataaatacttatattgctgagtttattgctaataaatactcaaactaaaaaaaataaccaatagaataagggaacagttaaatgagtatcacaaaattgttattttgagaattcttcatgtcactatttttttaaatttgagtatttattagtaacaaactcaataatttaaatatttatattgtaaattatttaaaaaataaaataaaaattaatatataaattaaatttgatgtattttgacgtctaacaataattaataacaattgttggatcaactcaactattaatagttatagagattctcttacatgttttagcagcagcagcaagagtaaagatatcggttgcgttggttccggtgatagccgagccgatgacacagctgagctggtccctcttagctcccatagcttcagcaactttggcgcattggcttgcaaccaatgcagccgcggaagccacagcggcttccttagcattagttgagtctttcttagaattctcggccgcaaccactgccagagccgccgccacaccagccactgatatggcggcgtgcacctcggctttttgtagcctgtcctcctcttttctacgttgctttatctctttcacccattttttttattgatataacattcttgaatggcactgccttccatgacatctatagtagtacgtacaataatatttaattatatattaataattacaattagaataattattatttataataatgttgtaacttgttaataataataattacttacccatctttttttgaaatagctattgtaattcaattctggatgcattgcttgtttgcatccatatccatgactgaatataaaaaaattaattatcatatataataaaacttcaatcaatta

SEQ ID NO: 211106 - DNA, 923 bp, Cannabis indica
atattttcagggccggccctgggcacaaattcctagcatgtacaaaataagacatacatgacctatgccgtaggtatcttagggattaggtgaaaataatcttttatccttccttgattgatgtgagtcttcataatggagccgtcactagactcgttgattatcgtgtaatcaccgtaaaagaggcttacaccatttgtcaaatcctcttatagaggttctaatacgtttttcacatgccgcattaaatgcaaaatgactgctcgaacgggctcttcttctccgagaaatgcattgttacatttctagctcccggagagtaaatgtgtgctttacgctcctctccgggaggctcttctctgtccattcatgacttagccaatttttgtgagtgaggtgctcttgaaatctacgtgtcacacgcagccgctgccacgtatttagagaaaaattcgactagtaaagggtaaatgaggcttgtacgcgacctctgattaccttataaatatagtggcacgtgccctaggcgcgtgggttgcatttatgaccgtgaatgcacttctctgtccattcatgacttagccaatttttgtgagtgatgtgctcttaaaatctacgtgtcacacgcagtcgctgccacgtatttaaggaaaaatatgaggcaacatttaccccccaagtctcatttagtaaagggtaaatgaggcttgtacgcggcctctggttaccttataaatatagtggcacgtgccctaggtgcgtgggttgcatttatgaccgtcatcattgatatttatttctttttgcaggcaacgattcgcttcccgtccattgatagacttatgcgtttaatgctggtgtcagagaggcactcagacggtaaagataccagtatttggaaggatccttgggtggcccatggg

SEQ ID NO: 211107 - DNA, 743 bp, Cannabis indica
aaaactcacgattttttttttgtaagtgaaaagggtaatgacatgatcataaaatgaaataaaaataaaaatctacatagtgtcgatttagaactcaagctaaattattataaatagcagtttgttgatgcgattgtgaataatggcttattgatacggtttgttagaatttaaaatgaaagaaattaagatacatgtactttcatctcaaaatcagttgataatatgggaggagtatctactcatcttatatatggtattttatttttacaaattagcaatgttaactctaatatatttttttcacgtttggcctagaaagtgggtataacaaacgacttttaagagaccgtatagagctgaacatgacatttgaaataaaatcccacaaggccaaattgaaaaatttgtgggtatacagtacgttggaaattttgtgaattttaaaacagctcaagaccctaatactgagaaactggcacatattagcggaaagatctcaaatggaggttaaaaaagaaaagtaaaagttttttgtttggctcgtttttttagaccgataatactttagactcacaacggatcacaagcagctctaatactatgttacaatttaaaaaatgaaagtaggtgtataataaaatacatagggttccatctagttatatagatcatgtataattagacacttcacatgagattgagaacaaaataaaagtgatatataggagggataaagattg

SEQ ID NO: 211108 - DNA, 643 bp, Cannabis indica
aattggagacacgaagagcatcaatttccacaagagtaatcggcaatgcgagttgagatatccaattaagtgcatggaagagagcttttgcctccatttcatcttatctgaagcaaccttagacaggtttcgagatagccgcaatgacttcaccattatggttcctgacgatggcaccaactcccaaaagcttagaaataggattaaccgcagcatcaacattaagtttcaagccaagcatatcaggtggtttccaaggaattccttcagctggtagagttatagtggatgttggaacagtcggttcactaacagcagtgggatgattttttgctttttgataatttcccatgtagtttgtagcataattagctagagccaaaccatcacgccttgattcaccatgattaattttgtttcggtcagtccaaattacccacatgatgataaagaacaattctaattcttgctggcttagtagtgttgcaagatggaagatataatctccaccaaccatattacgtgctttgttgaaatcaattgggaaattgaagtgcctccaaacagatttggcatggctacattggaacaaatcatggccaatcgattcccaggcttgagaacataaagagcacgctgcaga

SEQ ID NO: 211109 - DNA, 641 bp, Cannabis indica
aagtattttcttagtacaccccaaaaactttcaagtaatacaatgaagttgttaaaaaaaaaaaaaattaagaatagcaccagtccctgttattcttttttaattataattgctactgtcactacaaatttttttacttttagtcacaacaaaacttgtgactaaaagtaaaaaaattgtgactaattataaatcatgattcttatgttgtgactaaaaagtctgtggctaaaagtattagtcacaaaaattacaatttgttgtgactaaatgtatttttagttacaatatttgttatgactaaaactaaattagtgacaacttgtaactaaatgctatgttttagtcacaacattttgttgtgactaaaagttacatttagtcaaaaaaaaaaaatatgttatgattaaaagttaatcactaaaaataacagttttctatagtgtgtaaatattaacgatcattgctattaggcaccagtggtgcctagcatcttctcgacatgtcacgttgcgattggttagcgatacttcctaaaaactattatattaaattatgtgggacccgatacttagttagaccaatagcgatactgacatataagagggtgctcggcaccactactgatgccctttagcatt

SEQ ID NO: 211110 - DNA, 592 bp, Cannabis indica
tttttaacgatctttgtggattgtgtgatgttagttcaaagtgattcttagtcgttactatagttatataagtttataatatatgttcagatcttttgaacttttttaatggatgatcagagtttgcagagcagagaaaatttcatgtggactttattttttgctggaaagattatttggagtaatattgttaatttttagtgatctttgtggattgtgtaatgttagttcaaagtgattgtagtccttataatcgttattatgtatgttacctttttcaatattttcatatatgtgtatataatatagaaaaattctgcaagggtgaattgaagacccttatctatttcagtatctaaaacagcctgcaaatttttgacatatttagaaaaatttaacacgccgaaaatagggtttaaagagtctattgattttttttatttcatacgcatatgaaatagacaatttgaacatacaattctatattgtaaattattctgaatttttatgaaaaaaattgaactaagaaatttttttagataccgaatcagctaagggttgcaccacatcatctattttagtgggttgaagc

SEQ ID NO: 211111 - DNA, 576 bp, Cannabis indica
taatattttcattctcagcatcagaaggtgccccacaaacttcactttgcaaataagactccacattctcattttttgattgcacgctcatattataataatctctaggatttatttttaaagctacatgccatctttcgtgtttgaggtcttccacatacattacttgttctgcttgcgaagctaatataaatggttcatcttctcgcatcaattttgataagtttactcttgtgcaatcttcttctttcttgatgccacttgccgaaatccaatcacacttaaataatacaacacgatttgctgaacaataatctaattctataatatctgttaatatcccataaaatgtaacatctccaaaaataggatttggatccctactacttgaaaaactttgagttttggccgtcataataaccccactattttgagttgttaacttctttttgactttctttgtatgaaacttaaaaccatttattaaatattttttatatcgaaagaaagtattgttcggtcctttagccaaataacgcaaatcttcagaaactcgattatcaccattatcatata

SEQ ID NO: 211112 - DNA, 636 bp, Cannabis indica
atctgagatccctaaactgatccgataaaaacaaatggttctccgcaatctggttggaagattaccatcttcctcttacaatcaatactggctgaatacttggacaagaaatccattcccagtataatatcaaagtcctctaaactcatttcttttaaatcagcactcaattctctatcctcaattttgattggcataaacctaatccaccttttgaagataattaattccccgccagacagtagggttccaaaccctgatttataactatcgtgtggtctatccaatttactaaaaattctggctgccacataggattgagtggtcccagagtcaaacaacacagagaaataagagttgttgactgagagctgacctgtaaccattgaagggctgacttctgcatcagcctgagttatcgcgaacacccttgctggagtgggttttaccacaggtgcttcagtcttgagttggggacaatcccttttgtaatgccccgacataccacattggaaacacccctgccctttacactcccctagatgatgctttttacatctggggcactctgggtaagtgtatcgggtttcgaagccaccctggcgattatcttgaccctggttcccacagaacctc

SEQ ID NO: 211113 - DNA, 734 bp, Cannabis indica
tgttaacataaatcacttctaatatcttattgataacaaatcggattatattgtaatagattttatttagggcataaaatcccaacaaattcttgaagtgttaataattggctccaaatctataattagattatagattaactgttcataatgaattattggttcataagaagtcaagagataattataagggtaaaataataattttgaccaactataattatgaactaataattgggggaaaactaattatattgattatatcaatggactacaagtaagaattatgtaaatataaatttatattgtcaaagagtgcaattctatatttatagtagagtaataatggaattaataaactagattattcgattgaagagttcaataataatcaagtgtttaatagatatttaccgagattttttataaactaaatatttagagcttagaaaagaaaaacagattgaataataaatacaagatttttacgtggttcgggcgttaactatccttagtccgcgagtccattttattagacaatttggtccgagaataataatacaaattagtataatagactgaaactctttattcctcttgttccccttgaagaagaagaagcttcataggaattttggttgagtttttaggtgagtagtacacagtgcttttttttgtctttttggaattgcccctatcttatggaatggaagagtatttataggccaaccccc

SEQ ID NO: 211114 - DNA, 737 bp, Cannabis indica
tattttagtcttttatgttacttgcctatataagactttcttattagttatattctttacttttgactttgtaattaaatgaaatcttaatttctctgcatctcttttattttttattagttatttttctcttctcaaataattatcatggtatgagagctaaatttatgagagggaattacttaagcgtaatcatagttttcgcagatctaactttttcaagcgtctatacaatcattgtccgtacaacattagcacagttcaacattccaattttcagtattgatttcttcaagttttttcttgattcgcatagtaattttgagtattgatttttgcaatacaattttaaattttcatcaattttgtatttggaaacatttgcaatttgctctatttctgaattggccaccaataaagatgattctcttcaagcgatgaatgtgatcggatggaaagaattattcgtattggaattatgttatgaaaaattttctgaaaggaaaaaagatgtggagttgtatttctgaaacaaaatggaaaccaccagatggttatgcatgcaaatctgttagacaatcaaggagtagacaattcaaaaattttcacttggacaagtaactctgttgaacaatctattggtgcccaattagcaaagtacgagacaacaaaagaagtttgggaccatcttttgagattgtttataaaaatcttattttgcaaagcagtttcagttg

SEQ ID NO: 211115 - DNA, 687 bp, Cannabis indica
atatcaattcaacagattctaatattattttttaattttataaaaaatatactgttgtgataaatgttaaggaacattagttagttatggttgttagaattagttatttctgttagttagtttagtgagctgtcataacaaattcttttcttgttttgttgttgtaattgtgtatatgtacacatctcttgtaatcagatcattttcatggttgaataacagactttctttctctccttctctattattctaccttatcatggtatcatcagatctttttcgttcatcctcttcgtcttcaacacagctgcaatgactaccttcttcaccggcgacaatggaggttcgtctcaaactagtggtcttactactaatcttcctcgatccactcatgttactttttctcactctctttccgttcgacttgacaaacacaactatcttccatggaaatatcaagtatttgcagcaatcaaaggaagtcgattacagcgatttctcgatccactactcactcctccaaagtttctctatgaagcaaatcggcattccaatacagttagccctgagtacgaagactaggagcagcaggatatactcgtctcttggctattatcgtccatgtttaagaaaattctcacacgaatggtagggtgtgatacggcatctcagatctggatcaccttg

SEQ ID NO: 211116 - DNA, 874 bp, Cannabis indica
taaacaagttcaagcatttcttgaacttgatcaatctctaaagttaatatactgagatatttagaacagtaaccatgatggctgcattgtttcttcatcaccgtcaatattttaatttgaagaaactaggtgaaatttatggtatagtttctcaaaacgttaagatctacaaagttatttgttatggaaagttagatgacacctggaatggcattctcagatttctaacttgtccatccagaagaagctttatggaatggtaattgtcattcagaagggcattctcggatgtttatcatgtccaccatgaaggagtcttcaggatagttagtcctcctctagaaatgtgttttgaacggctagctattctctcttggaagggagtctcaaataatcaactccatctatctctattcctatctagaaagacccttcaacgtgtgctttagttcttagtcccgaaagcgtacacttcatttgggagcactttatcttatgctaacgtggagatactgttacgaggagtttgttaagttttttaagtcgtaactaacttaacaacttagcacctccagtcaataactttaggatctatatcatggacccataaatacgaccaacaattatcatttaaagaaggatgagatcaaatgagtttcgagaggtgattttgaagagagagatagagaggtagagagagggagaggtgttgagaaaagagagagatattgggtttgagttttgtatgaagaatcttctgtagttgaaaaagatctttgggtaagagtgtgagagaaaatactttgaggggatccaatagagaattgacctcgactgtattctacactgcacttgctcaatcaataaagaaaat

SEQ ID NO: 211117 - DNA, 721 bp, Cannabis indica
ttgtttccctattaattattaataattggtacattcaaaagttaatattcattattagaataaggggttacaaagcatgtaagaattatggaagtttatgagttgaatatttacactacatgaaccttttttttttctttcttttttatgattagtgttactttaatgataataaccatttttttgttaaaaaaaacataaagaaaatagaaaagaaaaagagaaagagatcttagaagacccaaatcccaataataattgtcagtttaagtagctttatccttttcttgattgaatttttagactataaaagaagaatctaagtagggacatgaaataaagttttggagtaaatcaaatgattggtgttgttgagagcatctgcataatatgtataaataaataaatatatctatacctatttgtaaaacattgaactgagaatagaagacaacaggcaaattaaccaagttcattattattataattaagaattatccaaattaataattaataccataaagaaagtatattgtaatggatgatggtgcagctttcctgctaggtggttgggacccaagtttaagtatttaaaggcggttcacgagaagtggttcgaacccatatccacaaccaccaaaattaagcggtgattaattaatatttattagttaatcagtctcataaaaatggagcactcaagactttattccactcacaa

SEQ ID NO: 211118 - DNA, 1730 bp, Cannabis indica
ttaggatattcatgagaaagacagacgctcagcaaaaaagcaataaaactagtcctaccctgactctctaattcggccctagcaaactctcgaatcataacgctggcttcatcatccccgagaaagttgttcgagggaagaaaccagctggaacataggtgggctgaatggtccaagggaataggcgccagaggtccagaacccatccgggatcgacctaaataatggcctaaataggaaaaataatactctttggcatggttcccccaccgggtagaaggcattctaaacttacgaaggcgctcatcgaaccctataagcctaaaacgggtatactctcggacgggaggaacgtaatgtattattaaaggagacttaccagagcccgaagtgctggcatcgcgagcaccagtgttggggaccgggaccacatgcttgggcctgggggtcctccgctccggcggagcttccaagcgaagggtcctcccggcagccgcttgggccttggtataggccagctcctgttccctcttaaagaggtacttctgatatcggccctccgccgtggcaataatgtctacccagagtgccctttctgctgccggagtcctcgcattcgtgcagatgactttggagagggtgaagtcatccaccgactggttccccgatattagcttggccttccgacagttctctgtcatgaccaactccccaaaatcgagggccttcttgtcatacgtggagaaggtcttggctcgctgaagaaacacttgggtaggcgcggtccgcatgtaaggagggatcctaacccactccgtgagaagctccgggcagtccatggcctggaaaccagaggaaaagaagaagcggtgacgatactccttcacatgttttttatgattgaaagggactaggcccgaaggccataaaaactgtctttaaatttatcccccttcttggggatcgaaactagttcataaaaatacaatatctctgccggattgggcaagcccaactccgggcagcataaaaaatacaaaggcctgaaagcaggcggtaggcttagggaattagttggtacggcgtgaggccaacaaaaacgagaaaatttatgaagtagtcttggagaggaagcatggccccggacatcaggtgggtctggctctaagctccgaagcccccatagttgtggttgggtgtctcctcgtcccgaggcagccggtgataggtccctgagaccgaaggcttgatacctgccaccaccacaatcttttccagttggtgagcgcaggtcagcgtagagtggagctctgccgcctcccacccgttggcacgggacttgtaattttcctaggccacaggaccctgcatgacctcctccagggtggccaggcgtacttcccctttcttggaagatttgaaaccggatgcggaagcagacatattggttctgaaaaaataaaaaaatccagcagttaggccccaaactaaaccctaatgttcaaaaagagaatgggggtcccctaaccgctggaaagaggctccctccggacacttgccaaataagaatgccccaagagattttccttgacaagagtcgggtgcaagaatcccaaaggtagtgacattgcaacaaaaaaaagagaaacaaaaaaggaacagagaaatgaaaaaggggcaaagccaaaaaagccaaggtctactctcagccctaaagttgtcattacgtg

SEQ ID NO: 211119 - DNA, 395 bp, Cannabis indica
tgttggttgtacaatatatatattatttttttttttgtatgatatcactacagaattatagttattagtggcgaagtaccccaccactaataacccccctgcacgctgctattggttattagcagcagaaatctgccactaataattggtcgctattaatgattattagcagtggactcaaaaagtccactgctataatagtagcggacattagtggcagacccccgctgttaatgttttttaaaaataaaataaataaataaaattataaattataaattatataaaaatgaaatacataaataataaattatataaaaattaaatatagtttaacaatttcaaaatattataatttaacaccagataaacacaatattcattactattataat

SEQ ID NO: 211120 - DNA, 1477 bp, Cannabis indica
ctaatgttcaaaccatccttccttgatccaaggtgacagggctgatttcatcattcaaatagattttcctgagttcgtgatgagagagctgttggaccatggagggtttccaggcatgcttcaattttcccacttccagcgagaaaaattgtcagtgttgtcaactagaccagggtagactgtaacaatgttcgagtagtgttcccttctacaaggagcacatttagaaaatgcactggctatgccttttgtgagaacgaaattggacatgcacaggtttcaagcggttcctccttccaggaaggatggttgaagacgtgctaaaatccaaactatggcttctctcccaagactaaaggtgaaaactaaattggtcatgcaatatacttcaagaggttcctccttctaggaacgagggttgaagacgtactagaatcccaaataacattatggaccgacatgtggccatttttacaaaataaaattcaaagtgcataattacaaaagcaattaagacatgaatataaaagcaatgattagggcactcgtacgtttttgaggatagttaagtacgaccccaagtgatctaggaagtttagacatctccaaagtcgtgatcacttatttataacatagcttgtgcgggaaataaatgcgtgaattcttgtgcgaatttcttctttttcattttattgtacccacggttttacattaaaaagaaagtttacaaaaatgtcacatacaactgtagaggaacatcagaaccagatacccctaacctattgataataacaacataaatggtatgcattccaggccctaggaatctctgatccatccattgtcttaagttgaaatgttccctctcctacaaagtcactcaatccagaatattccactaagaagtcagttaaggcttgagctttgattgaaatgctcggctgatattggatgtcgaactggctaagttccatttcccacttaaatagcctaccggatgcctataacttttgaagtaaatggcagagaggatgatttgtcagtaccttgatggcatgggcttgaaagtagggtttgagctttttggaggttatagtaagcaaaaggtcaactttttgatcaagggatatttgaactccggacctagtattcttatgctagcgtagtatatcagtagctagaccattccttcttctcgcactaatgtagcacttatggcatgatcagacactgctagatataggtacaactccttaccttccactggcttcaataagataggagcttttgtcaaatattcctttagtttctataaggcctcctcacattcctcggtccattcaaatttctgttttctcacaacatgttggagaacgggaggcgaaaatgaatctactgagggttgcaatcctttcaataacactttacacatccttgtgcttttttgggagatgacatgtcaatgaaggcttaatct

SEQ ID NO: 211121 - DNA, 926 bp, Cannabis indica
ctggggcagcgagcagctggttaattaaattaacccattattaaattacctcttgggaacagctgtctaaagatttcaagaaataattttaggcatcaagatatatgtcacctaaagtgtcttccctcactaacgtaaagaagcagccaggaaagtcactcaaggcatacttaagtcaatttagtacagccgctgttagagttaggaactcgaacgaccgtatacagcttactgctattcaaacagggattacgactaatctcttgagagctggaggagagttgtgggatgacttactgggtcgccctgtagaaaacatcgagttcaatgagagagctcaggtgttcgtacaaaaagaaaaagcaaggaacgagatgaaattgataaagactaattcgggaaataaatccagcactgtctctgcaggcaccgtctcgacgaaggctgacaatatagagggctctagcacaaagagaaaagatgactctaaagaatcaccaaggataaaaaggaacaaaagaagcacgataagtacgtgccaatttgcactgtttataccaagcttaatgaaactcgggaaaatatctttctcgcacatgaacacagggttgcatttggcaagcctgtcccatgagacatgcgaggcacaaacaggatgcaacaaaattctatagatttcacaaggacattgggcatacaacggatgaatgccgttaattgaaagacgagatagagagcctcaacttgcgtggctactttcaacagtatgtaaagcgacaaggcaatggacaaaaccatccaaatctaaccaataacccaagcaatcaaagattacaacttccttctcttaagggaaaggacaatctggttatctcgggagggccgcatctcgatggagaaagaagcaatgcccaaaagagatatgt

SEQ ID NO: 211122 - DNA, 826 bp, Cannabis indica
tggtgttcttgagcggaagatcttgggtcttatgaattggtatcagagcggaagttcttggtgggtaccggtgactatcacaatggaatcaagagtggttggatcggattcaacattatctaagctgaattcggtggaggcgacactagacagattggaaactgctagaaacagaatcagggaggctgcggagcatcgatttgagtttcaagcctcgaaaaatgaattgccgctgttcgacgcaggagatgaccccgaggaatgggcttacagggctgaattgcactttagcttacaacatttgacaccagcggaaaaattagacaatgcaatcattgtctcgaaggagcagctcggagatggttctgctgggaaaatcggaggtatccttttcaaatgtggaatgaactgaaatccctactgattcgcagattcagtccccaatccacgcacgaaggttcagtgtatcatcgaaggtttaaggttgaagatgacaaagatcttgtgaaatcagatctcctaaaggatattgaggctaagattaatgaagagaaggatgttaaaagcgatgaagagatggacagggcaataagagaacacaaacgagcgttcgctagactcgacagcttcagggaaactgtcactgctgcaccaccgttttctggaatgacggagtggaattcacgtgtgttggatgtgatgaatgttgctagtgatacggagattttacaattggagagttccatggatactgaggttaaaatagacgtgcgatctattcaagcaaaaccaccgattgctgttgaggaactctcacagaaaaaat

SEQ ID NO: 211123 - DNA, 595 bp, Cannabis indica
ccgggcctagatcctttaacctagggtcgggcctagtcgagtatatattttcaaccactgcaagactctaatatgtagtaagtaagagccttgaaaagttcaagtatagactacaaaaataaactacctttaatgataacttgttagtcacaacaaaaaattagttgtgataaaaacatagtatttagatataatttgtcactaatttaattttagtcataataaatattgtgactaaaaacacatttagtcacaataaattgttatttttgtgactaatacttgtagtcacagcaaaagaatgctgatttataattaattataacttttttacttttagtcacaataaaagtaaaaaattaaattttgtagtgccatatgttccaattcaaatccccaaatgctaagaagaaaaatttaggccaatttttatagtaaatgttaacactaaatatattgaaaggtaagagaaagagacactaaccaagtaataagggattataggtacaactagagaaggagaagaggaattattaggagatggtgaaagggcatgaatagcagcattgatgagttgtgttgagccagttccaaa

SEQ ID NO: 211124 - DNA, 698 bp, Cannabis indica
tcagcaagaccattttgttgatgggttgtaagacaagggtgcctatgatgaataccacattcagcaaggtaattggtgaaggatctaaactctcctccccaatcggtttggagagttttaatgtttttaccaagctgtaattcagcttctgccttaaaatgttgaaaggttttgagggcatctgacttgtttttgagaaggtaaagccaagtgaatctagaataggcatcaacaaagtgaatataatatttatagccattaaaggatggtgtatgtgatggtccccagagatctgagaccaccaactgtaggggctcagaaatgatagtttgagatgcctttgggaaaggaaatttatggattttaccaagacagcaagcagagcaaacaaaaaattcagattctttattaacaccagaaatgttacaagattttaatacggtttggactaccttctcagaaggatggcccaacctattgtgccatagagtaaattcattttgtacattgttgttacacttaaaacaattagacactttgatagagtgtagcaacaaaggtacatttagaatttgattgaccatggctgctgcaaggaacatttctggtttgctgttgactttgctgctgtaagtcttgggaaaacagggaggaaatagggctggagtgaacaggtcctagttgggttggatcaaaag

SEQ ID NO: 211125 - DNA, 788 bp, Cannabis indica
actaataagtacggacagtggacacccaacctatcggaccactttaattactacatttttttcttaaaaaaaaaaacctttatagtactgtattgttttttttttaaataatttatgtatatcatgtgctccctatggtcataaattatataattgatcagaaatctcacttacaatcagaaattggatcattacaatgtgtggaattagttatttcattgactcttgaaattttgtacatggatagtcatagaaaaaagggaaatggtttactttgtaatataaaatataaatatacatatggtgataaattaataatcaattatgcaatttatgaggaacccaaattttttgtgtgtaatacattttagtccttatatgattttagtatacacataatggagacaaccacatatgaaaggtctatggcaattatcaagatatgtattaagtacgtgcaaaacacgacaaatctcattgataaatgtacatatttttttttttttgccttgattataaataaatatataattgtaaaacgtttttgtatgtgtatatatttatgtgttaatttgtgtggtgggtccttattgtttattttttttgctggagaactactcaattaaacacaaaccagaaaacaacaaagttcaattggtcacaagagggaccaactcctctgcacttaaaaaaccagaaaagttaagagcaaaagcccatttagcaagcagatgggcagcaagaacttgggagcgaggcagccacactacctccacttcagggagttc

SEQ ID NO: 211126 - DNA, 511 bp, Cannabis indica
atttctttgttttctaattttgttatgcggaagtaagttgcctccttcgagggtcttctatatttcctttataatgatgggaagtattattgttgagattgaaataatttatgtctaatagattttgatatcagattacattcctctttctttgtgtgataggcaggcaaatttggttttgaggaactagaatcaatttggttaggacactcagtgtgaaaaggtttaggaatattactttcttgtggaaccatttttcattcaagttcatgaggcccaagttcagcagaaggctgtagttcttgatgttttccttgtcactttgaatacagtaaatgttaattttacttggtatcttttagttctgtagtggagtttttgtaagaattttcattggggtgagtagttataaattttaaatatattatacaaatagatgtgaattggattagttacttttacaggtaaaagggcatgttgttccgcataagtggattgaattggatcgtgc

SEQ ID NO: 211127 - DNA, 651 bp, Cannabis indica
tatacatatgtgatagatataaatctctaaaatatatataaagcactaaattagtaacttatagcacatataatctgcatacaacacaccaaagcaaataaactacaaaaaaaacaaaaaatactcaagctcaacataaagcacaaaaacaacatcagagaataaaataacaaaccttaaatcactaccgaaaccctaacctaaacaccatttaacaaccaaacataaatgttctacatacattacatagaaaaaaaaatcttaaatcttaaagggagctaaaaagaatcaaatttggaaacctccaaaacacagaataatcataatgagaaacttaaatataacttgccaaccacaaatacattatcataaataacataataaacacataaaacactcaaaaaaaactgaaaaccttaaactaacaacacctttacaaccaaaatacaaaattaaacctccattagagagtacacgaaacaaaaaaaaaaaatacataaatcaataaagtaatcaaaatcgaaacaaatacagcaaacaacaaacaaatagataatcaaaaataaagaaactaaaaaataaattagatcatatgaaacctaactttttacttaagctcagtaacacgttcaacactacctcgtcataaat

SEQ ID NO: 211128 - DNA, 732 bp, Cannabis indica
taaaaatcgaaataatactaaatttaatattaaatatattataaaaccaacatttataatgttattacaaaactatatatatattaaacgtcattaactaagtaaaagtattctgaattcataaacaataatattatctacactgtaaactcaaaaaaactacaaatcaacaacatcatcttcgtcatcaccgggaggggcagtctgtgaggaggaaccacctgcatggctagaaggctaaaatggtagaatcagtagaatcggaggcagatccggcatgttaaatcctagaacagcgccgaccaattggatcatttgttgttggaacgcactcatgatctaattctgagtcatcatcatctggtttgtggttggttgttcttctactccttgtacatcctttgttatcgaaggaaagaagtcttctagaatagggatcatttcatcctctaattcattatcgccaaccgctacatcatcaacaacatcctctagctcccgtgataggtccacttctcatatcatttaatgaagcctcgatcaaatacatatgctctaaccctatctattttttcaaacatattatttaaacatctcacacaaggacatctattcttccatcgcaatccttatattctgatgccattgttaaaaaagcttgtaaaccatttcgaaattcatgacaaccacgatttctgattttaatccaacttatcgattgtcgccatctac

SEQ ID NO: 211129 - DNA, 743 bp, Cannabis indica
tggatgtcagtgaatgtaggttgctaggttttgaatttcataattcttacattatcagagcacccaacttttttattcttgttctttttctttaattgaattttgaattgttttcctttggcagggaaaagatcttctggaaattaattatcccgttggtccttttggtaccaaggtgagtgtgatgtgatgtataaatgattgtaaaacttagtacttttgattttgacgtgggttgttggttggttttgatgttgaattttggtttttggctcttggtttggtgttcagatcttttagtatatgtaatacgtataatgtatcctttacgtgaatgttgttttggatttcaaaagtaaacatgactttaatcattattgcttgatcttaaggtaactctaggatagtatcgagtacagtttcaatttcaatgttagtcaccatgctgatttatgcatcgtctaagtttactaggtgttgtttcattattcaatcaatctattatctatctattttgtatttaatctcctctgtatttcaaatgtgaaatcctaccactgcactattacatttgtataatttggtgactttgaatgtatatttgtttgtaaccttattttgattgcagttctacagttcaaacatggtgaaatcattttagctttgattcaattttaagatacaagaaacaacctagtggtttctagtattttctttatgtgctggaatatgaatattttgct

SEQ ID NO: 211130 - DNA, 627 bp, Cannabis indica
actgagttccggttcttctaaatggatacacagtagctgtaatggctgccgcaaaaacttatccggaatggtgaaatccgagctctttacctaattattaatttaaataacaataataaaagctaaatctaataatttaattatattttttaaatttattaaatgtaatctaattttaaatttctttataagaaattatatatttaattaattttactaaacaagtaaataaatttagatattttaaaaaataaaattactaaatatgttatcaagtatgattaattaatgtctaatttaaatttaaattaagatttatataaaaaataattatctaattttgttgatatatacttaaataattatttaaatgttatcctaatttttgcataagataatgcgatacccaataaggtgacacgtagaaattattccaagacttggaggggttaattgccaccaaaaagctccgttcagaaaaatctacattcaaaactagttatgtctaagtctccagcaagcatctagcctaatttgtgtgtaatgcttcgagtagaacatttttagcaagctaagcagaatctaccgtgcagaaaagacaatgtcaatacatttatgggataagtt

SEQ ID NO: 211131 - DNA, 519 bp, Cannabis indica
tcttatttgtttcggtattcatatagttttttagtctacctttttttataattatacatgttgtagctatttaagattacttgtaaaatttttaaaaattttaaatatttatagtaccgaaaataatttttatatagatatgtaccacgcctaaaaaaaaaaagtctatcaaaacaatttgtaagagcatttctaatggagatacaaataagtgatgtaaatacaaaatattacttactttgttaaaaatctactctaatagtaattataatgtaaaaatctcaaataattaaaagtgatttaaatttgcatcacaatataacatgatgtaaaattttattatgttttatatttatttttatgttatttttaatattttattattaaattttagctaacatactctcttatattaaatttgtattataattatattattattaaattttacatctcaggatcaaacttaaaattattggggaactcaaaatgaaccaacctcgtgattcgtgaagagtg

SEQ ID NO: 211132 - DNA, 504 bp, Cannabis indica
tgaccgggcaacttttaatcctgatattacatccttttgttatctttaatgattttcactctgtttataatcatcgtgcaattgtgtttgttttatctttaccaaatgctttgtacaggtataggtgcccccgaagtgaccgagcagacttatgactcttggtcacttgttttttacaagtatacttttttatctattcagggttttgggttcgaccaaaccttttgtacgcactagatggtaaattagcaacatgttagtaattttgactcaatttgaattttgaaataaacatctttattcatttattgatcgaaaatgtgtttgttaccgtagtaacttacatcagagctatttgatctaacctgatcttttagcttaacatgaaataaaacaaattgcagaaattagaaattgtactttaaatggtggtcatccgacctaagtactctttcattttatctgaacctttggacgtgggccgcccaacaggccattcactta

SEQ ID NO: 211133 - DNA, 1044 bp, Cannabis indica
gatcaaggacattggcgtttgacaggcatttatggtgaaccgaaccgaaatttgaggaggagaactttggatcttttttgtgagctgaaaagtaagtcaagtttgccatggtgtataattggggatcttaataatgttacttctcatgatgataagagaggtggcaatccttatccgagatggttaattgacgggttcaatgatactttggccacgtgtggacttcatgaccttgagttatttggttatccttacacttgggagcgatgccgaagtactgtggattgggtggaggttcgaattgatagagctttagtgactcaatcgtggttagacttttttccctcagctaagctttttaatttagaagcttctacatctgaccatactcctttacttttaagtactgtcaatcaagttgtggtggctagaaataaatatttccgttttgaaaattcatggcttaaagaaccattattttttaaaattgtgaaaagctgttaagagccaggaaattcgattggtgttattgacaaagtaaaacattgtggggggagtgttgttgagttggggaaaggattactctgggaatttttctaagagaatcaaggattgtaaggaagaaataaaaaagtggaagagaggccatgatgatgtttctgtccagaattataattcggctagtgcaaaattaaatgatatttttctgcaaaaggaaatatattggaagcaaagaagcaagcaactttggttgcaagagggggatatcaattctaaatatttccatgctactgccacggcaagaaggagaagaaactcgatccaaaaacttaaagattctgctgggaattgggtcgattggcagggggtttgtcttcggttgtggaggattatttttctcagcttttttctccatcagtagcagcaggaaataatgatattttccagcatgtttctgcatcagtcacggctgttcagaataataaactgctggaaccggtttcggatgtggaaattcgttgtgcgctctttcaaatgcacccg

SEQ ID NO: 211134 - DNA, 592 bp, Cannabis indica
atctcccaatacaactaaagtcttcaagttaaataaatctctatacagtctcctcgagcatggttcaatcgctttctaaaagtagtcagggggcttggatacatgcaaggttagactgatcatactctttttatcaaacacttaggaaaagagaaaatggcagtactgattgtatatgtggatgacataattgtcaccggaaaccatattaaagagattagtccattcaaagaaatgttggcaaaggagttcgaagtcaaggatcttggtgcactcatatattttctgggaaagaaattggctagaagcaaaaaagggatttctgtctcccaaaggaaataaactcttgatctcttggaggagacaagaatgcttggtagctagcccagaaagactccaattgagctcggagacaagaggaaatgtttggaggaagcccagttggcaaagagaggtaccaacagctagtagggaaacctatctacctctcccatacaagagccgacattgcctttgcggtaagtctagtcagtcaatatatgcataatccatgttaaggacatctcaaggctgtatatagaattctgaggta

SEQ ID NO: 211135 - DNA, 753 bp, Cannabis indica
ttattttttagaaaaaattacaaatttataccataaaaactgttaacaatgagaattctcctaacctaaaattacacttttttacatttttatttattgactatactttattaagagtgtttttaaaatatattttttagcgaaacttcatgaaaacaacattaaaataataagtaaataatgtaatataaatataaagtatttatcgaaatgtttgaaatcgatttaaataaaataaaagaaagaaaatagattaaatataaggattgagacaagaatttttatgtggcatgtatgcgtcgtcttcgtgtacagtagcttcacaaaggacatgtctcccttggtggttcgcgcatctcatggtctgacataaggcagaaagttctgatattatgggattcagtattaaaggagtgccatgtcaaccttggctctgaaacaccttttgaactacccatccggcactaccccttgagggtaccagatacatcctactaggccttcttccttagatactcttctagatctctagtgccccgactttagtgctaattgggctagttccccttgagggtaccagatatatcctactaggccttccttcctcagatacccttatagatctctagtgctccgactttagtgctaattggactagttccccttgagggtaccagatacatcctactaggccttccttcctcagatacccttacagatctttagtgcctcggctttagtgctaattgggct

SEQ ID NO: 211136 - DNA, 885 bp, Cannabis indica
cttgttagaataaattatcttatcttagagcactctcaacatcacaagtttttttttattattttacaatacatttttacagtaagatatataacagcttcttaaaaatacattattaaaatcttacttttttttaaaaaaaaattatattttatttattttaaatatataatattaatatatttctataaaaaataattattaaaacttaaaacttaaaataataaataatatactataaatctaaattctcttataaaaaaaatacttcttttgctcatttattctgggtcttccgtgtttggtcctgaaacattattaaaagtaaacacgtgaccaaattcaaacacattattgggtaatccaaattaccttgcggccctcaacaaaacttcataccatgtgctgggaaaccaagggcatttaaggaataacacgtgtcttggtgaaaacaagtgcccagaaaccttagaatttagagcaaaaccatcaaactctggacacccaaaaatgcttaataaatgcttaataaataatcataaccaatccaacatcttcatcaattcatccaaagcttaaaaaaatcttttagacctattatctgttgttataatttctttcatttgaagttatctttaattatcataaaatacaatggcaaagaatgcagctcaatcttcccttgaccagaggctggccatggctaaacgctgttctcatggtatgttcttcttcttcttgctcatactcgctgttatgaaatttagatttgagagctttagtttttatataatataaactctatattagtattagtaatagtaaaaatgtgatgcgagtctttatgatgactcccaaaattctatttaatagatttatatagcc

SEQ ID NO: 211137 - DNA, 769 bp, Cannabis indica
aggtgatgagttgcttgcgttgctgtgcgtctatagtgggagaaatatggggacccacgtactggatctgaaatctgaatcaatgcaacactacgatactacttctactagtactactatgaatatcatggtgcttaaatttaaagcatttgaacccagctctctctctctcaaatctcttgttcaacttaatccaacgtggttgtaatttatatacctgctaataataaaaataattaatcgtacacttgtttcttttaataatatttaatagaaaaatgctaaaaagatggtaagatataatattattattagtgaatttaatattacgtttttacttatttcattttaataaatagtataaaaattattactaattagtaataaaaatattttatcgtgataatagtttttctacatgtagttctttttacagtattggtattaagtattattggtgactacttttttaatatgttgtgttgcgattaattaatgatactttttaaaagttattatattaaactataactaataacaatattaaaacttataaaaatactaaccaccattattttttagcatttctcttcatataaatgatatttttgaatggatattttaataatattatttgttttgatttcgatgctgaggaggacacttttcgaacataggatgtgatggaaagacgggagattccacctacaggctgggcggtattgacctacttctttcccctcaaccttcaaaattgcttttttttttt

SEQ ID NO: 211138 - DNA, 583 bp, Cannabis indica
atgtactttgcacgtaaaagataaacaattaattaataacaaatttatattaacacagaataatagaatatcgttactacattttgttttaataaaaactagacagcattcaaactattaattattgtttaatatattattttgttaggttacaagagatttctagattaactgtatatggatgatgattctgctcccgatcgacttcttttttttttttttttatatataaatatttatatgtatataataaagacaagcctatatatatatttacattcttaatttgtaagtgttttgagtctatattaattaataaaccaatcccgccaccaatctctgccactaatgttgaattatatatttaattgaaatgccttaaaataatgctaataattttaatctcctcttttttgatctctaaacaaattttcatataggaatgcttttttttttttacttgactataaatatatatatatatatatatatatatatatatatactgcttggactatcatgaagactattttcatgtattacaagtacgataaatatatatttattaatttgacagacctaa

SEQ ID NO: 211139 - DNA, 556 bp, Cannabis indica
attatattttgggcagaattatgcaaaatagggtcagaagaacaaagtgaatggtattttttcagccacaaagataagaaatatccaactggtacccgaacgaatagagcaacggtagctgggttttggaaagcaacgggaagagacaaggccatttattctaagcatgacttgataggtatgagaaagaccttagtcttttacaaaggccgagcccctaatggtcaaaaatctgactggattatgcatgaataccgccttgaaacaaatgaaaatgccactcctcaggtacacttcacacataaatcaaatattaactgatttggacacaaatatttatgggtctatttaatttgtttgtgtccattaattttatcaatagcatttttttgtttacttctgtgaattaacggtggcaatttgtgttcaatagtatttgtgttgtgtcaatagattattcatatcaaatgccaaacccaaacccaaacccaacttatttaatagccaaaatcgtatagaaaactataaatcaaaattgatccaactataataaact

SEQ ID NO: 211140 - DNA, 655 bp, Cannabis indica
ggatttattgttattattttgcttatttatcttgagtttttttttttttttgccacattgaggataatgggattttgaagcgtgagaaagtgttacactataaaaatagtataaagacttattattaatttataaatagtgtgaaagactataaatatgtaattatataattattattgaatatagaatggaaaattggaattttagatgaattgggagtttaacactatctcaaaaagtgtatttcggagatttatcctatattaaagcaccttgaagcacatgacaaatattcgaaatacactcttagagacattaccaatctctcaatttaaccaaagttctaatttctcataattttttatttcatatccaataataactacacaattacatatttataaattttcacactatttacaaattactaataagttcttacattattttcatataacataatactaaccaaatccctaaaaatgaaaaaccattagattgaaaataataaattgccatggcattaataaactaaaggaatttaattgagaactgatttacaacaacaccaattacaattacagattatcccaaattagtgtcttttgtaattatgtaaagagttaaaacatatcaaaagtgaaaagctacgtac

SEQ ID NO: 211141 - DNA, 734 bp, Cannabis indica
attttatatttgaaatattatttaataatgtattaaaaataatattagtgtaattataaaattgtaaataaatttattattggagtagtagattattctatttagttctttttttaacatagcattgtaatgtaagtttatatctataaatattctgtaaagtgttaatattatatgaacatctccatttataaagctaaaaagtgggtcaatgacagaagtggtatatctgcaatcacacaaagatagaagtggtatttctgcttcctatgcttatccagagaaaacattagataacgtgaggttaactttaatatataaagatttttcttttttaaaaaaaaaaaaaatattaatattctcccaagataggtttgttagagagatatgtggctaagatgattttttttaatttaaaaagagattattaatatttaaaagattgtttaattttttgggtttaattattgggtttatttgttaacgggagatcaaacctaatcgttaaatttaacagaatattcttttatttttaagtatattctgttaaaccaagaaatgccgttagatagacacttttaatatataaagatactaatgaagtaacatatagttttaaatatattctttttgagctattttagatattttattttttttagattatttataattataatttttttttgaattattattaatgaataaaataatttaaaattttaaaataataa

SEQ ID NO: 211142 - DNA, 910 bp, Cannabis indica
acactaccatattcaatttatcaacgaaaaaatagacaactcaattatatgcagactcgactaaaatgaaaagtgtaaaatataaaaattacactattgtctctgtcgaagcaaaggaagattaaaatctacccatgagtatcattatttttcttatctataatttttagacagatgttatcttcaattatcaacaatttagagattgatttttaattttcttttttatcttacacacaacaattaagttgtgtttccttaagtatttgaacatcaatttttagtttatttttagattaacttaagaacatatttaaattatcaagctttcttaaacactaatatattcatctggtattttttttttaattgttaaaattataaattatattatttagatatacataataataatcttacctaataactaataatattttttctttaatttttaattgtatcacttctaaataaagtaaaaaatacttagcataaattttagtatacgtgcctcgcacgtaagtttttttactagtatatgtatataagttatagcaaattaataactagagaaaaattgtctgttattgcaacacaagttttattttggtgtgacatagattattaataattgtgttgttagagacttagagtactaattaatgataatttgtcgtacaagttgttattaataaaactcatcagacaatactatatgacatggttgccaccactacaccgaaaatatatttatataaaaataaggaccaaaaataaaataaagaaattaacttacatcaatacgtagctagctatgttgagattgaaaggcttgaaaaacgacagagttatggtagtgaaccatatcagcactcgcttcactatagcaatctattataggagttgatcc

SEQ ID NO: 211143 - DNA, 850 bp, Cannabis indica
gcatattctacaaataatataattaattttgatttatttggctagttttaatttgtaaatattatctcttacatattcttttttttatataatatcttttatatatttaattataaatatgtaaatgaaacacatttttaaataaaataattttattatcattatatatttttttattttaaattctaaaaaaaacttaaaatgaaataacgaaccaattttaaaaatatccatttttagagtaaaatattacaaaaaaaaaaattatccaagttttggtcaaaaatactgaaatattagtaaatgtatatgatcttatttatttataaaaacttttttaattattattattatatttttttggctaaaatgttaaagttgatacaaaaatagagtaatttgcgacataaatacttaagtttaactcttgttgtaaatatatatttgagtttaattctcgttgtaaataaatacttaagtttatttctattgtaaataaataattgaatttaattcccgctgtaaataaatacttagcttaatttttaacaataattttaaaatttctaaatagtatttttcaaaaaaaaaattctaaatagtaaatgttaagtaaattatcatatgacaatttttgattagtctaggtccttaaattttttaatttttaattaaattaggttaaatataccaatgaaaaaattacgcatgtataatgatttaatatttaacaactaatagttcaaaaaatataacttaaatattattatagttaaaaattaaatttgagtaatgtaatttaaattttttaaaaaataatcattaaattaagatttatttatttattttt

SEQ ID NO: 211144 - DNA, 599 bp, Cannabis indica
aaatttaatgatctagaccaattataaattgtcacttgataatttacttgacacttaacggttaggtgtttacaaaagctttaaaattataacttaggtattattacttttaaaaattaaatttaggtatttatttgtaattgatagttaaatttaaatatttatgccgtaaattactctatgaaatattgatcttctagttgggtaggccaatttggttggtatatttatccaatctaatcttattttatttatattgtattcgattcataccattttggattagatgagttacatttgtaatattacattatttaatatttattaatttattttacttataataaaataaattattattgttttatgtttttaacaacaaattaaaaagtatttcccctccaaaaaaaaaaacaaattaaataaataatacaattattttttttggtaataaagtataatattttattaataacaagataaaataatagcctccaatctaatcaggacatctccccgttgtaaacacgagcatgattaaaattagaaaaacgagtcaaatattcaattgcctaattctaagatcgtttgacaaaaaa

SEQ ID NO: 211145 - DNA, 517 bp, Cannabis indica
tattgacattcatcgccttctgtacactgtgagaatttacaaataatatcgatcgaataactagcacaagaataacacattgccatttctacaattttatggtacatatatgtgattagttctttgtatatattaggatgataatctcaaatattaataaattatagtaaaaagtaagttgttaatatttatagtaaaaaaaaatcaattatatagttaaatattattattattattattttgaataaggtatatatgcatgttttcattttcatgtgtatgtgtgtgataatgtcctttgtttattgttaaaataaataaaactcatatcaatccatataaaaattcaagaatcacatacaataataataactcataatgctatgggtttgagaaatattgtccgaacatgtaatataatataattcacagaacctatataaaatcaaataattcacttgtaccaacaatttacataacattaacatgtaatgtacaataaaattttatcgttata

SEQ ID NO: 211146 - DNA, 626 bp, Cannabis indica
cgacgtgatacactcaaacttaataatattctttactgcgcgtttattaaactgtatctggaatcaaaataatcaataaagaaaataaatcagtttaaaatagaaaataattaatcgaaaacaatattttattatgttatttactaaattgtacggattgaaaaccaaaatcatattattttgtttacataactaagaaagttaatcggaatgatttaatttgacaaaattactattgttagaatatgcaattatatttggaaaacaaattttttaaaggacatatttgtcctttttatttttaattaataaaactaaaattaaaataaaataaattaagaaagagaaaggaattcccgatataaatagggggaatctttcttttattttctttctaatttgtttggaccccactactttctccctttttaaaatttagtaaataattgtacgagaatcaataccataccattgattctcattccctttaagtaaatattaggtcttaagttatatatataatggggagtattaccgtcaacctcctattacaactttttagtcaatctttgtgtgcgaaaacacatgctgattttttttccaaattttttatggcgatgttcgtt

SEQ ID NO: 211147 - DNA, 713 bp, Cannabis indica
ctaacatgaatgaaagtttaagattgaattaagctgaattgtgatgttaaagtgggtttagaaagtatgtgtactgcagttgtagcaatgaatcatcttggcaggatggttcgggttcaaacgtctcggttggatttttttgatgcattatgtggggaagcggcgacctgctatttagctttgatggttgctaaggaccttagttccaagtttgttattgtggagagcgactcgagagtagttatcaatgctcttaatgggaaggagtctcattgggcacttgagaactatgtctcattttgtaataggtcttctcccttgtttattagttgtattttctctaatattagtagaaattgtaactttgcggctcgtaatgtggctaagtgggtatttactcattagaagtttggttttattctgttatcaaccatccttgaaaaccttttaagtaatgaccgagaggtctagctgtttttatttatcctaagtacgcttttctttaaaaataaaaaattaagaaatataatttagtacatgtcaaagtttgatggacataagtctgaagaacataatttagtatgtaaataattactgaattggtaaaattaaatgaaatcggacaaaagtatttaaatccaataatctcaatagttcaaaggaaatttttaacggtcaaaaaattcaagggcatgatttagtatatgtaaaag

SEQ ID NO: 211148 - DNA, 1349 bp, Cannabis indica
agtataaatgtagtaataggcgtgtgaaggtaattatgtaataaagtgtgtaaaaaaggatttttcatgtaaaaatttctttaatttatataaataaatacaataatatttaaaaatttattattaattataattttagtttagttaacgtaatatttttaattttatagtactttttatatttttttgaaatatcatgcattttttttattttttacataatataatagaaatatatttttttggtaataaaaatgataaaagaattttttttcttaaaatatgtgcaatgaatttaaaatgaaattgtaatattaaaaaatattatgttatatagacacatctcatattaaaaataaaagagatatatatatagtgaatttaaatttaaattatttatttttaaagagaaatattttattttataatcataattaatataatatatatctattagaaaattaataatttatatatctattagaaaaattcataattcctagaaattaaatgaaataaatttaggatttaatcttattgaaagcaaattattactttttttaatttttttattctgtatatattgaaagcaaatcttacaatcaaaacattacaaatgttgttttttaatcttaatttgtactatatcgtaaaaaaattgttaatggttacaggtatccacctttcattgctcaatcaaaccggcaaaagcagcagatgattttagctgtaagtgtgtatcttatcccattacacatatcatttatatatttattcttttttttttttatagaaaaaaaagagatcatttgtatatttatcaattaccgaatattaatcctatgtccaaaattcatttctgtctaagaaaaaataaaataaaaaccaattctactaattgtagggagatttcagcttctatgagaagacttggaaaaacatatcttcttcagcaaagcaattaatcaaaagtctcctaacagttgatcctcaaaagaggcccagtgctgtagaggtatggtatgctccttccatcattaattttttctttctctccctatctctatttatatttacactaataatatatacacttaaatattagacgaatactaagtacaattttttttctcaatttctgtatttaaaaatatatatgggagtatttttttttatagtgacaacatcatatttgtaaaattttaattatttttgaataatttacagtatctacactaaatttttgatattaaatcttttgttaataatgtaaattattatatatttttttaaaaaattacataatattgtaactataatcaactgaaaaaataaatgtaaaaaaataa

SEQ ID NO: 211149 - DNA, 651 bp, Cannabis indica
aaaataaaaaaaaaaaacttcatacaaattataaattagtgcaaattgagaatagctcaagtgtccatatataagattgcgggtggtttgtttggtagttggggtgtatgaggtcaaaacccaagtgtgtaacagaaaaataaaaatgtatgaataaaacatgcctctttcaaaaataacaatacaatgcttaaacaccgtgctaatcaataaaatatgttaccattcataggccaaattatacatacttatcttacatcatcaatattattttattaaatgtcaatttgaatattactcaacactctcatgtggtgtacctaacttacatacttatattacataaactagtacaacttgagaatagctcaagtatccatataaaacattagggtttgttcggggttggcgggtttatggggtcaaaactcaagtgtgtaactaaaaaaattatgtataaaatatgcatctttcaaaaataataaaatacaatgcataaacactaataatgataagcgataaaatatagttaccatccacaggctaaattatacatattcattttacatcatcaatattattttattatatggtaatttgaatattactcaacattctcatatggtgtactttctacactattgttgatac

SEQ ID NO: 211150 - DNA, 548 bp, Cannabis indica
aggtatctaataccatcatcatttagtgtgtagaaggaaccaatggcctctaatttttaaatttttttatactaaaaaatattttcacatttcaatgtctttcaaataaatataatattttaattattatttttatagcctaaaaaatattcaattccaaatattaaatatctcaacatatataaaccctttaatctaaaattcaccccttcatacaaaaaaaaaaattgtaacaataatagcattcaattatatcatcacaacttttttttttgacaattagaatcttctattgaataaaactaaaccagattagaaatcacagaggggccacttcccctaataaactagagtttttgacctttggagctctagcccaattgattgaagcattagcaacacagttctccaacagagaaacaaattaaggtcacaacagctagacttacaaaggttcaaacaatataagagtttactcaattattctctctatttcaaggtagtaatctgagtttgtctttcatattcttctccatcccatttctgaa

SEQ ID NO: 211151 - DNA, 1080 bp, Cannabis indica
ttatatatagatgtaattttattcttaaatatataataaaattattttatataaaatatctacataatttttatttttaaatatatataataatattataaaattaataaagaatattctgttaactacttagatattctgataaagttaacgtaaaaaaattaccgttaaactaagaattttgttacatagccacatttttatatacaatagatatatatctaaattgcgtgtatattttaattataaatcaaaagagaaaaacaattagtttgagacgagtttagatatcatgtaggcatgtgtaactggcttgtttagcaatactgctattgtttattggtacaattaaacgtcgaatgtcatatgattaaatataatagtttttataaactataactaaccattaagaccagaggcggaggtactttaaggggtggtgtgaccatagcccccaaaatatcatgaaatgtataatatatgtagtgtagctaaattatataaatttacatataaatgtataattatttgcagtgtaatataagtatttacatatttaaaaaaataaagttataagtaaaaacatatttaaattttatttttggcactataatttggaaatttttaaaatttatcagtgattttaaataataaaatggtacacaatcataaaaataaaatgcactaaaatattctgttagatctcgaacataacgacacttttataaggtgtactttacatgaatatatatattacatggtaaaaaaaaattattagataattctatatatagtaaatcccctagcataaaagtttctatccctatctatttttgtatttagaagaattttttagtctgattttttttataattgtctacgttgtagctatttagaatcacaagtaaatttttaaaaaattctaaataatttacagtgctcaaaataagattcaattatgttgttgatgcgtgtctattttttcttatacatgtggtaagcaacagttaaaactttattttcagcattgtaaaatttttagaatttttgttaaagtgtacgtgcttataaagaaataag

SEQ ID NO: 211152 - DNA, 603 bp, Cannabis indica
atattacgaaacagtagtggtgactgtatcactgctatgtcaagacctttcccgggtgttttaaaccagaaattatggaagctttggccctgatccatagcctacaatggataaaagaccttcggctacctatggattacattgaagcagactctcttgtagtcattaatggtcttcagtcaaaccatgattcattttcagattttcattgtttgttggctaatattttactattagtgtcctacttccctggagttcatattactcatgtcaagggggggtgcaaatactgctgcccatactcttgctaagtatgctctttcggtggatactgattgtttatggttggaggaacttccacctccactattatctatcatattttaacactctgtttaatataatagcttttctcaaaaaaaataatatcaaaatttgaaaataatattcaataaaaaaataaacaatatgaacaaatttattattaattgcaacactttaggtggattaagggccagtttggtacagctgtgctgtggaaaaaagcagctgtgctgtgctgtgaggaaaagcagctgtagcagaactgtggaaaaaagctaa

SEQ ID NO: 211153 - DNA, 873 bp, Cannabis indica
atttgcccttagggcaaagaaagtatactcacacacattcaagggtaaaaatgtcatttcatgcatgcatgaacccaaataaattttagattaatcatcaataaataaaatgccaataattcaatctaaattgcattttgggcccgaacccagttggcccaaaatacccggttgtgattataccgcgccaacctgtcaaaacacacctgaaaatgacaacacaggcacactatataataatatagttccataagcacgtaaatatattaattccattattttacccttcttgggtcaaaattactaaaatacccctagctgaccgatggggtcttaacatgttattagtcaaataatttctcatatattaagttatataataatataatttctcaataatacataattatctaattagagtttggtaatccatttcataaatctagggtattacaaagggggtttggcctgaccacccctggctagccatatggccagcataggccggctagcctccagcaaagggagggctggccaacctctcttttggcaagcactttgtgggcctctgcagctttcaacctggacaagactttaagttacgaattgggcttcaacaacctacaaaaataggagataaacttcagttatttgcctattctttgaaattaattagcatgttatttacttattgttttaatgtgtaacaaataggtgatatctcttcattttaaggatatcaacctatcatctcttgtaagctctcctatataaagagcactgaaataaacctaaactctctacgctctaagtgctaatgttctaaatttcaagctctacgctctcaagttttgaaaccctagctctctttct

SEQ ID NO: 211154 - DNA, 818 bp, Cannabis indica
tgtccgctataaacgtgaagcacatgttcttgtatctgacacaaacaatgacgatcaattgacttataaagaataaatatagaagaccctaacttagacaagtggaagaataccatagatcaagaaatagattttatatgcaccaacaaagtctggaaatatgaaactccacctaaagacgctacactcatatagggtgtaagtggatttttaagaagaagaaaaatactgaaggaaaggtacatttaaagttaggtttgtagccaaaggctacacacaacaagaaggtgtcgactataaggagttaaggtcaattttaatccgaattcaattctgtaaaattctaacttacatattttctaagttttaattggtttaatttatttccccatataatatgaggacaaaatcatatatgtagctcctaatataccctaaatttccccttactagatatatacaccttcaatatttttcatgtagattacatacggtatcataatatttatattctccttttaaaaaaaaaaaactaatattcatattcttattaatcaaataatatgaaaactacgcgtaaaaaaaaaaaactaataatgaaaactttctatattttttgataaaatcatacaccaattcatccaattatcaaaattttattattagattaaataattatatattaaattcatttaaaaaataaatcaacaacgtgggttttatttattaatattaaattatttatttcaatattctattttcaataattaaagtctcttgctatgttgtcgtacaatggtactagataatgttcaaac

SEQ ID NO: 211155 - DNA, 2576 bp, Cannabis indica
agtctgtaacattcaatgttttacagcacaatttctggaaaaatacacacagctcaattattgtatccctaacttctttcttcaagaactttctaatgccaccgggcatcaagcgttgtagcaacacatgacaatcgtgagacttcagaccagaaattttgtcttcagtctcattgacatttttctctaaatttgaagcgaatccgtctgggaactgcacagacttaataaattcgcaaaattcacgtcgttcaggaagagtaagtgtgtaactagcatgcggtttcctcaaattcccgttacggtcttcaaataaccacaactcacgacgtattttaaggtcctccaaatccaatcttgccttgtctgtgtccttagacttcccctcgatacttaacaaagttccaagtacactgtcacacacatttttctcgatatgcattacgtcaagattatgtcggagagacaagtccttccaatactctagctcaaaaaatatactcttctttgaccaatttaactcagctacagaacgtttacgtttgactccaccaaattgcttgtgttttccaggcaaacgaaattgtaactgctcaagctgagctaaaatatcgtcccccgacaattgtggaggaggtggtcttttctcaatttttccatcgtattttttacttctacgccttggatcatccatttcaagaaaccttctgtgcccaacataaccaatcttgctgcgtaatccaatggaaggagtgtgttcgttacaggtggggcacgccttgtaccctttggtgctccatccagacatcattgcatacgccgggaagtcattaatggtccacaaaatagcagctctcagtgtgaacacagtcccgttgtaagcatctcgagcttggacacctgaatcccacaactccctcaattcatcaatcaatggtctcatgaaaacatccatgtcttttccaggggccaatcgagacaacatcaacgactcaggtttcatgcacttccacgggggtaagttgtacgagactaaaataacaggccacacactgtaagcgttactcatgttaccaaagggattgaacccatcggtggccaatcccaatctcacatttctaggctcaagtgcaaaggatggatgacgtctgtcaaactacttccactcttctccatctgcagggtgtctaagcacgccatcctctttaggtctcttagagtaatgccacctcatgtcttctgacgagtgtcttgaactatataacctcttcagtctcggaattaaaggaaagtaccgcaaaacttttctagcaatgaacaaaaattgaaaactttccaaaaattctctctcttttcggggttcaccaaagctatggcaagaagggggaaaatggctggaaaggggaattcgaaagggaagaagacggggcctacatcttcggatagggttattaagaccagatccatggatgcagtgcttggagtaaaggaattagagatagcagaagaggatttacttcatgaacaggtcgagcaatcaatggaacagtgttctgatgcaatggaacagtgtctcgctgggaagatttactcgcctgaagagacggaagccctctttcagaggtgaagtgaaatcaggcacgatttctccgattggttacaggtagctaatcgaactactcaggatgtcaactctcagaagaagatttctcccccgattctgcgttctggtattgttcgaaatctaaatactagctttgataactctgttcagcaacctgaggtaagacctgcaacttcaaaagttaaaataaattttggtgatatagaggatgaggtgaattattggcagccgtctctggtttgttttgtaattggggctaatcccccaatttctattcttgagggctttgctaaaaggctatggaaggatatggtagtgaaggtgggattgcttgctaaaggaataatcataatccggtttcagaacttggaacaacgtgatagggtgctgcaacaaggttatgtgttctttgataggaaacctatggttatgaaaccatggaatcctattgatgacttcacaaaggaagaagtgacttcagttccaatctgggtgcaattgaaaggcttggatatcaaatattggggagagacatctcttttcaaaatagtggcacaaattggggagcctttgcaggtggatggaataacaaagaatagagatcaattgcaatatctgagggtactaattcgggttagtttggcacaaacttttcctagtaccatatctttcattgatgaacatgatcatgaggtggaattagaagttaaatatgaatggattcctctagtttgttataattgctctgggattggacatagcaccgatgcttgtaggaaggaggagagcaagaatgaccaaggaaaacaagtttgggttccaaagaaacaacaagttactcaacaggctgagaaggatgcagacggatttcaaaaggttttgaaaggcaaaaaagtgagtatgaagagcacaaatgagcaggaaccagggacaactgaagtttgcaacaggt

SEQ ID NO: 211156 - DNA, 830 bp, Cannabis indica
ataaataacaaaatttgcattaagcaaacacaatcacgactataaaaatgatccaatataattatatggtataatttaaaaatcaacacatatatataatggtaaatactattttggaccatgtgttttgcaaaagttattaattggactatttgttttgttaaatgataaaataaacctatatttttcaaaatggtaaaaataggactctaaactcaattttcaataattttttttaatataaccaactttaagacaatgtctaacacgaacagatacaaaaaatgtaaccagttttgtcataacatctctataagttttattatattttgtgacaaaaaaaatcagtttagggtcctatttatacaattttagaaaatacagggtctattttttcatttaacaaaataaagtgtctaatttgtaacttttgtaaatataaacaaaaataaaactggttctataacataatgaataaaaacacataacacaaaataactcaaaccggttataattgaaatataaccagttttgtaacataatgaataaaaacaaataacacaaaataatttaaaccagttgtaattaaaatagaatcagttctataacagtgttataatgaataaaaacaaataacacgaaataagccaaattgttatagctaaaatagaactggttatataacataatgaatgaatatttttagggtaaatatggcatgtgtgtacttatttggtggattggagcatgttgaatgatatttttgtttgagttattttatttaactatttttgtgtgtgaattttaatcttagttgctttacagaacca

SEQ ID NO: 211157 - DNA, 579 bp, Cannabis indica
caccaagaattatactggttcattaagttcgatagattgatatgatctgtggctctactccagttctggaacatcaccaaaacttcttttattgattgagcaagaacataagtacaatacagttgagagcgaatctctgtttggattctctcaaggtattttctctttaacactcttccctgagaagcttctttatctacagaagcttcctctttacaaaacccaaaacccaggcctcttttttctctgtacctctccctctctttgtacctctcaatcaaaaactctctctcaaagaacttacgtactccactactggtattttgtgtcatgttctttttcaaatgaagaggatggttgtatttatagacagagaatatgaatatcgcaaaggcggtggcttcaaataactaagtagttaattcggttaagacttaaccgacttaattgactccttataatgagacctccaagtaacctctaggcatcgagctctctctggacatgtatcacgcttcctggacaaacatcctaaactgatgaagcacaatgatcaggagggatatcccgaataggccc

SEQ ID NO: 211158 - DNA, 823 bp, Cannabis indica
cttattgattattaaaagcaaatgaacttgttctattaatataatattgtttaactgcataggttaattactttgatttatgttaggtttaattcttaatttataatttaggtgttcatttgtggtagattcaatgttatctatctttggttttacagttcaacaataacaagacttgcagcaatgaggagatagacgaaatacaagatgaatgagccagtttcttgaagccttatatattaaatgaacgagtattttttttttttttgagatggaatgagtagatagtacatatacggaatacaacttttattttaattatatatggaatataagttttaggattctttctattaacaattttgatattatgtaattagttaatagttagttttatcattaacaatcacagagttgattactaattataaaaattttatataagttttataattgttattttaatttcttttgtattatattttaactattatagaaaaccattctaaaatctgaaaaatacacgtagggaaaattgtatggaaatctgcaattttttcttgcctacatttatgcttcattttataacgacacaataggtaaaaaaaaatatttcaacaagttatgcaacatttaagaaccgacgatataagttttttgtgacggttttgaaatgacaaaaaattttttgcgtcacttccaaactaacacaaaatgttataaagaacattgtatattttgtgtcggttttaaaatgacgaaagttgtttttgcgtcactttagaaatgttgcaaattagaaactatttgcgactacggctta

SEQ ID NO: 211159 - DNA, 339 bp, Cannabis indica
ccttcctggaggacttcagggtgtcatgacggccaacccttcttgtgtggagcacatattgaaggaaaactttgaaaactacccgaaaggggatgttttcaacacctatttcttggacttcttcggcggaggactgtttacctctgacggagaagtctggaaggttaaccgaaaggttgccaaccatgcgctcaacaccaagtcttatagaaatttcatgatggacaatgtagctctcgagctcgaaaccaagttagttccccttttggaaacactttccaaaacgggtgaagttttcgactttgaacatgttttggagagatttggattcgataatgt

SEQ ID NO: 211160 - DNA, 741 bp, Cannabis indica
gcacgaactgcaagagcatgctttacagcattatccctttttgcttcccttgataatctgaactcaatttcacaacaatattgaaggtcattacaagagtttcaacatagtagaaggatggtaaatagctaacgaaatttcctcaaatcataactgaccttgacatagatgatacaagatctctgttgttactagagtgcatgataacacatagtaagttgtatgcagcaaactccatgtggcatccctcaattccttcagcataaagggattgcaactgagattggcactgaaattgcataaaagagttcatcgagaacgtaacttgtgaagacatgaggtaaccaatattcttttgataaaaaaagaacgaaatatcatttttacaacaggaggtgcaagaaataatatcataattacagcacaattatacttgacaagatcggtcatcaatgacacaatcaaatcaaatggattttaacagatggaataaaataatacacaaggaaaattcttgattacacaggaaaaagacacctgcaaattttctcttcaaatttttattcaatgtattaataagatataatcttaaattaagtcctatgcggaagtactttttttcaaatttttttaatgaagtgttcgttgtagtaacggaacccaacctgtaaattttcaaaaaaaattaaataatttaccgcaccgagataaatttgagttttttcaaacacgcttagaaaa

SEQ ID NO: 211161 - DNA, 2107 bp, Cannabis indica
tacgtcactctggctactttctgaaatgatgactaacgctacaaatcaacacgagtatttctagcgtgctttgtcatataaactataatatatattttaatgacaataagatatggcatattacttgtttttataggtcacatgtcccactttcatcatcttaagcatctaacttgtgaactcttacataagatattttataatgctcataatcttttgtggctcattatggaagattttaataattacaagttaaatagtgatacaagtggtggttgtgtttccaattcttctaatatgtcttttttctctaattttttgaataaatttgagttatttcatttgctttatgttggtaataagtttacctagactaataaatctataagtgagaggcttgactgtgctgttttcttagattcttggtatgatctttttccaaataatactttgcatcacttagggttctatggctcaaatcatagggttattaagctagtccttaataataataataataataataataataataataataataataatcctactaattttgttgataaaagatttcggtttaaaaatacttttttttgaatggaaaatcaacattttattaaccattgaattcagctaccaaagtaggtaacaaatcaactgggacagaccccaaattgaaggtgcaatcaggatagaataaagaagctcgagcaaagttatgagccactttattagctgatcgcctaataaaaaagatagaaacattttgaagttctttaagtaatgccttacaatcattaaccacttgacaaaacatgaaaatcatatcaattgaactacgcaaggcttgaacaaacactaagcagtcggtttcgaggatagcttgagttggttgattgcgcttgatccaacttaaggcttccttgactcccaatgcttcgacaaattctggtgtagccgaaccattgaaacatttggtaaccccttccacaaatagaccttgtgaattacgaacaacaaaagcgaaaccaaactgagttgtatttgcaaatatagcggcatcgacattaaccttaatactatctccatgtggtggctgccactgttcagcaccgtcacctggtattagaccaggactcgggtatgtaacatttaaactctgagcagtttgccattgattaaggtaagttcttgccgacaacactatactttccacactcaccaatttgttattccacactctgttgttccttgcattccaaagggaccaacaaagagcaatcaaaagtttcctctgatctgcatctaacaccagaaaattcgaagagcaccagtcgaaaaaattgtcctgctgccggtgcatcactgtaccaatgccgactctgttccagcaaagagcagccgctagacaagacacaagagcatgaaatgttgtctccttctggttgttacaaacagggcagaccagagacacatccacacgcctcattcgcaactgagtcatggttggaagacaaccttggcaggccttccacaccatgtttttcatcttcggaggtgacttcactgcccaaaattttttccaagaagttgcagcaacatcaccatcttgaacatcttccccattaatctcttgagcaaatctataggcacttttaacagtataccacccagaaatctcacccttccatgtaaggtgatctcggtcatgaccaaactgaagaggaatggacaagatcagattttggtctcgctcgagaaacaaatctgctactatttcttcttcccaacccgagccatccattgccattaaattacaaactttggcactttgaagagcaggatgtgaagaggacacaaatgggttttgagagtctggaagccacggttcaccaagaactgaaatagaagtgccattaccaattgaccaacaaaccccatgagtcaaaagttgacgagcttcaagaacactacgccaaacataacttgggttatttctaatttcagcagtgaaaaaagtaccacgaggataataccttgctttaaaaattcttgaaacaagagtttctggtttagtgagcaaatgccacccttgctttcccaa

SEQ ID NO: 211162 - DNA, 822 bp, Cannabis indica
gtttgaagattagagtggaatttgttgttgtgtttgtcattacagatagattgttatgtgaaagagaaagacatcgaagttgcctcaactatgagaacttgtgcatctctattgtgccactaaagtaattttcattgagtaagaccacttccagttttttcatttcaaaaattgagcttggaatttgttctgttagcttgttcccacccaaccaaagactcttcaattgggatgacaataagatatttaggatggtcaaaggacccacaaactgattatattcaagatttagaattttaaactagggatttggaacaaaattgatggaatttgaccattaaagttgttgtcacctacgtcaagagatgagagacatgataaatttttaagtgaagatggaatggttagtgggcctgtaaattgattctctctaagacctagaaattgtaaactaggcattatgaataaagttgatggaatagtccctgaaaatgcacagccagagagatctaaattacttaagaacatgagattactaatggaatgggttagtcttccagagaaactactggaatgaagattcaatgactttagtttactataagaactaaaattaatgggaagaaaaccacggaggttatcattggatgacacatcaatgacttgaatatttcgtagatgaaaaatattttgtggaaattcaccatacagattagaatgtttaagagatagagatatcaaggaggatagatttgcaatggatttaggtagtggtgaagaaagatctacactacccaagtgaacaggggcggacccacattg

SEQ ID NO: 211163 - DNA, 1243 bp, Cannabis indica
gtcatatattaaaccaggaagcaaaacagtgatgaaaatcacctcttgatggctatcaagaatccttactttcttttcgtataaattcgatcttcctatccagtgataataatggaaactcataccatagtctttcaagtcatcctcaacactcaagggttaatatgggttcataggatttacaagaatttatgttgttctttttccttaatatattagcaagaacactttaccaaataagagagaagaaaagtaatttaagtccttttaagtttcttaaatgtatcttataaataaatttagaatatacaagtataattaaattaacattttgtttttaataaaatcataccacacaaataacttatcttaaatttattttattaataaaacatttatttatttaaacattgtataatcatactacaaatatttaaaggctattaaggatttttatccccaattatgacatatgtattattgtacctcctaaactttttacccattacaaatggtccttaacttattcactgtgttttaaattagttattctatgaagttttgtaaacacaattgacaaataaaatggtgacatagtctctttatccgttgccacgtcagtgccatgtgtataatttaaaattttaaaaaaaaaaataaattaatgtatgtgtagaaaatcattaaactaaaaatcaattaatgattaagaaaattacgtaaacttaaattaaagaaaaattaaatttgttaacttggaaactttttctagtgacgtggacatcaatgtttgacacgtggcatgaatgatgacattacagagttgagtagacccgagtcatagcagtcaacaggagacgggagccctagccctacccccacgctaggatctttgggatcttcgagatggaagttcggacttcaataacttgaattcaacccactatctttcagtattttgtaccatgaatacatggagcaacctaattgataactctatgataatagagttatttatatctttttggacattaaattagttttgttctcaagtatttttattttattttagtgattttatttaattttacttagttttgcataaatattagttttagtatttttagattaattttagttaatttttgtaatattttatcaattttatttagtttcccattttaaaaatattattctcaatattgtgtatatttgataagagatcaaatgtaaaattttgact

SEQ ID NO: 211164 - DNA, 547 bp, Cannabis indica
taaaaacaaccaaacataaccttattgcaatataaaaatcattcataaattaattccatataaactacaaaacatccaaaacaatattacttttattaattaaatattaattactatatccaaacataaacatatatgtttgaatttgggattaaggtagatggagtttcatctcaaaattaattagtaatggaaggagtagttttatggtattttatttttacacatttagcaatatacgactaactttaataatataaaatatatagtgtgcaacaaaaataacaaaaaataacaacaaaaactaacttaacaaactcaaacttcaaaccctatatatatttagtatacaagaaagaaaaatgaaaaatgtagaaaaggagagaaaaggagagaaaactagacgtgaatataaaagaaaatgaattttttatatgatgagaagatatttaaatgtataattacaatttaataattttatataaattattttgaatgaaaataattttaattaatttagtaagggttaaaagaaattaattaagat

SEQ ID NO: 211165 - DNA, 502 bp, Cannabis indica
tgttaatatatgcttgtttcaattgtttcaatgggtacttggtgaaattgaaagtttgaaactgttctcaaagtacaccagagaccagacttgagagtttagtttcatctcactgaaaatgagagggcatgagatgcgacagaagaagagtgttgtgactaggggtgtttgtccaatctaattcgtataattttgctcatagtgcattccatttgcactaagtgtggattttatattttgaatttaattgaattcacataatatctcaaatccaattcaatttgcaaaactacagattgaattagttattttagattgatttttttttaatattgaattatttaatatttattaaaaaagtatttttttcacataaataacaataaaataaagaaaataattattgttttatgtatcgtacaaccaattaaaataaataaaacaaaaaataataaagtcgaaagatgtttaaaaataaatatgttttagattatattttttt

SEQ ID NO: 211166 - DNA, 831 bp, Cannabis indica
aacatcgggattgcaacctaatcaaaacaagtcaactatctactgcaatggaatgtcaaattctgaggtacaacgtataattgatgcatcgagcttccagagaggtgttgctccatttacctacctgggaatccctattagtcctaaaaggctctccccaagagagtgtgatgtcctagtagacaagatgactcacataatccgaacttggagcaccaggcatattttttttgctggtagagcagttttagtcaactcagttctcctcaccatacacacatactagagtcagatcatgctccttccaaagaaggttatcaaagaaatagaaaccatatgcagagccttcttatggaaagggcagcagctgatggaaggtccgggccaaattgcttgggaaaatatttgtcaatctaaaggatctggaggaattggctttaggagagttgctgattggaacaaggcagcgatgttcaaatatgtttgggcaattgcaaccaaggaagacaatctatgggttaaatggatccatagtgtgtatatcaaagaaactgaatggtggagttactctgctccacaacaaggtagctggtactggagaaagatagttgcattgaaaggtatcatcctaactctaactactccctcttcttttatacaaagtcgatacaaaatagctgaaggatacaaatttttatgccccaatgagaatcgggttaagtggagcaagggggtttggggtagacttaacacacccaaacataggtttgttatgtggcttgcaattcaaagaaggttgaagacaaaagataggctatttcgattcaatat

SEQ ID NO: 211167 - DNA, 827 bp, Cannabis indica
gtaatttaatgtttttgaattttaaaaaattaaatttgtgattggttgaaaaatatttagggagttttatattctacctgaaaaattgtgtttgtacaaataccgataattttattaaattttagtaaaaactcaattgtaatagtttgtaacaacatattgcaatcttatcaccgcaaaacacaaatttgtagaattaaactagaaccaaaaataaataaattcagaatttaaaaaatttgacacaagagaattatacgtgctatcagtattctttcaaaacagtactcctagtccacggggataaaatcaattagtaaagtctcaattaattacaaatacaatagacttaacagtgaactcccattgtctttgatgtgtgagtgcttacttcctcccgaagtaaggcttaaactagtcttctcttgaagacctttctcttgttcactcaaattcttcaaccaatcctaagaggagcataaaaacaatagcataaacactaggttctcacagaaagaactcccccttcttacaaataaaaaaatatgtaataatgaaactagaataagtcaaaattgtttcgttgctctctaagtcctattgatagaacatatcaaccctagagatagctaaaaacacgatttcccaactgtacaaaattttcttcaaaaatttcctaatttgtagcatcaaaatcaaattctgcagtagcagattaggactagaaagaaaataacttttcaaattggactaagatcatgaacttagacttcaatccttgccaaataaagtttgttcgatcgtctaaaaacatgtcgaaactgaat

SEQ ID NO: 211168 - DNA, 549 bp, Cannabis indica
ttttatccaaactagcatattaaaatcttaaatctccatgtagtattcaatctagtaaaaatacagtaaattacacacaatttgttacttcactttcacccctacaatagtaaagaaattcaccatcattcataattatgcaacctatcaatttccaagcccatgagcccaactattcaccattcatgacacaacacaactaccttaaatggcacaactaccttttaattatatcctcccttcaaaccttaaccttttccatcacaaatcaatgtcttctcccttttgttctatttgtctttctcatcattacactaacactcattccctagttacgtgttccagagcaggtaagttttggaaaaactattctttttctcagttttattttaccaacaaaaattttgacattaaggaattcatgcttcgtggttttgaacattttgacaaggataagtttgcttgttttctaggtttgctatgggcaatatggaatagcaggaataaagccattttcaaccctgcccatgatcttgatttcagtttgga

SEQ ID NO: 211169 - DNA, 1196 bp, Cannabis indica
aaatgagggcccagattactacaaaattcagaatttgtcaatattgaatattaaatgaaacttgttcattaaactgagcatttttgttgttttcttttatgcgtcctgggtgttaattttgttttgtaatttttggttttcaatgtattttaataatatatactgaataaggtttgaatttgattgttttagatttgggtgacatttgcataaataaattatttgtgtatttttcttgccttcccataagcaagaaagagatatcaaagtatactaacattttcctgcaaaaaagaacaaaattacagtaacatttgaagagtcaaaacatatgggttttatttattatttactattattagatctatgttttgagattctcatttactagttttattttaggttaggttatagttattttaggttgtagtgacattagttttgttcccatactatagagatatttttttatgacttatgagtgcacaaattacctattatgtaggtgtctatatcaaattaagtcttccttctttaaatttactttttttttttaattaaaaaaaaaataaataaaatattgaacaaaaaaaaaaaaactaaaataaaagcgagacttgaatgttgcttttattgcttccttaattgttccatcaccgtctgtaatcaggggcggacccacatagaggcaaggtgagacagtcgcttatcctagaaaaaaaaaaaattgaagaaaaaaatatatgtgcattttaattagttacaacatatatttataaataaaagtgatatttatacacataaaataagtgtaaagtcatttcatacatgtaaaggaggttatgagttctaatcccaataaaatcatgtttactttaatatttttattttacttaatactaaaatataaatttaccattaaatttttaacatgttatgcaaggtagaaaaaaaaaaaactacaacccctcacttataaaaataaaagtagtggcccacctcaactttaaatacctgggtccgccactgtctgcaaccacagtctcggtgccacacttgccacttgctgtgatgaaagctttttttgtcccaactgtagtattgtttttattaattctattatgtctactgctaaaattctttttagtttatagttaagcaaagtcttcaagtggcagtaaaacaatactcaaact

SEQ ID NO: 211170 - DNA, 947 bp, Cannabis indica
aaaatatttattgtgtagctatagagaattgaaccttgagctcttatgagttttttaaagctttaccattacactaaaatattagaactatcattttgatgataattaaactatatatagaagtctcgaaatttaattttgccttaggccccatataccttaggatcggccctgcatacaagcatgctcccacacgctatatacgcaatttttacacacacatatggtattttattaaaggctaattaggttgatatacttgctgattcataaaaaaaaagactaattaggattttccccttttaaattttaatatgtattaaattatgtccctgaatttgtaaggttgttaaaaatttttattgaattattgagattgttggatttaaaaatttttatttaattttagtaagaaaagtttatcatggataaaagttcaaggggaataatttggtaaatgccaaagtttgaggagcatgatttggtagatatcaaaatttgagtaccacgatttaatacatggacaatcaccgaattagtaaaattgaatgaaattagacagaaatccttaaatctaacaatctcaatagttcagagagaaattttaatggctaaaaaagttcatgggcaaaaatcataattagtctttattaagaataggttgtattttcaaaagccacttaaaaaaatatgtttaaaagaaatttttgtttgcccttgaacttagtgggccataagtataggattaacctgtcttacctcaaatgatgcatatataaggggtatttacataaatatagaaaaaaataaagctagtttagataaatatggtaatgaaatttaataagaaaaaatatggtatttaaaataaaaattaaacatatggaatatgctactttgaattaccataaaaaatatacaagtttccttcatattgtttttttttt

SEQ ID NO: 211171 - DNA, 988 bp, Cannabis indica
caaaatatgaagacattcagaatcgtaaatgaaccattgacacttgggaagacctcaagaaagaattgaatgtccaatttctaccagagaatgtcgcctacctcgctcgacgtcagcttagagagttaaagcaagtcgggacagtccgagactatgtaaagaagttcttcgaattgatgctcgacgtcaaagatatgagtgaagtcaacaaacttttctacttccttgaaggactcaagccgtgggctaaacaagagctgcaaaggcagcgggtgtcagatctcgccactgctcaagctacagccaagcgactgactgactacacctctgggaattcgcagccaaagaagacgaatcctcaaaccagcaccaacaatgccgcgagtaagaagtcaggaaagcagtggctgactaaaagtggaggaggagacaagaggactcctgaatcttgctcctcccctaaaagtgatgctgcaacggggaagaagccccttaagtgttggctttgccaaggcccacatagggcggctgcttgcctccaccagtccaagttgagtgccacaaaggcatccattgctcaagaggagcaaggatgtgggaaagatgatgaggatgaagactgcgcgaacatgagcaccgttcgattaatggctgctcttaagaagcatggcgtcagagggaagaaagcccttgggaagggattgatgtttgtggaggccactttaaacggtaagcaggccaagaacgtattgattgacaccggcgcaacacacaacttcatttccgaaattgaagccaagagggtgggcctaaaactagagaaagatgcgggtcgcatgaaagcagttaattcgaaggccatggccacaattggagtggccggaaaagtgaatgtcaaaattgacggatgggagggacaacttgacattgtagctgttcgcatggatgactttgatgtagtatcaggaatggagtttctagtagagaa

SEQ ID NO: 211172 - DNA, 522 bp, Cannabis indica
caataccaaacatgctctatatgattctgctaaaaaaaattcacatttattttgggtttcacagatttagttttgatttattaatggtattaataatcttcacattttttttcttcattttgagatttgtttatctctgattgtatagtaaaattgtaacttttttctagtgttaacgtatggtgttatggaagaatttgtctatttctattgtgattaatttgcaaattaatttaggcttttattttaataaaatacaatttttatataaaaaaaataattactttcaaaaaaatataaatggattaatgtaataatagattacatttattaattatatttgtaaaatttataaatttcacatttaattaattaaaaattataatatataaaatttgaattaaaaaattaaatattattattttttttaaaaaaataatacaatggccctttttgtgggtacatctataaaataataataaagaataaaaaaaataacaaaaatgatatagtgatgctttt

SEQ ID NO: 211173 - DNA, 658 bp, Cannabis indica
gtttattttatatgattagttatcatatataaaatgttacaaaattgatagatttgaattttagtcaattttgtatttttcatgaattatttgtgttatttctaaacttaattatgaaaaatacctaggtagctcagaaaattcaaagtaaattatttatggcttattacagattataaacggtgttagaatggttagatttgacttttaatcatttttagtatttttcatgaatttatttagttaatacttaaaataattatgaaaaaatagttaagtaatgctaaaaatatttttttaatgctatatactatttatgatacgaaataaaaagagttttataatttattggttactgtaggtatttattataattatttgtgaataattaactatttaattgagttttaaatagagtaaatattaaaaattgtgttcactgtttgggaactgtcaatatgatgttacaatataattctagtctatgaaataaatttaagactaggttgaggtgttttgttattttatttatttaattaatcagtattttatatacagttgaagtgtaaattaatacataaatatggataagaaattgtacgtaattctacatagatcaaatatgttttataatttgtataaataattaagaaatatg

SEQ ID NO: 211174 - DNA, 666 bp, Cannabis indica
  modified_base (639)..(639): a, c, t, g, unknown or other
aatccggagaagagatacaggtgatgtcagcaatggtgcctttttcctctgtgggggtgtgtgaaatcatgtggcgatttccatatcttgagcaggtgagagagagagagaaagagagagagagagagtggtgggcaaagagagggcaatttctttgattccctttaagatttgcttcccatgacatgccatatgatatagccccaatccccatatcatcaataataatatgcatactaattctgtctatttattcaataaaaaaacaaactatatctatttatatgatatgatgtgcccattatcatcgccaatggccatccatttcatgtgtatccatatttttttttccttcttattctcttagtttatacttaaaaatggtagagggactagtggtgtttagcactttttacgtgttaatattgtcattggtccgactaagtataagttcctatataattttatataatagttttaaagagtatcgctagccaatcacagcgcgacatgcctagattgtgttaggcaccattggtgcctaatagtaatgctatttctactttatataaaaaccattgttgtcctattaatctatttgagctggcaatggcacattggccagcaatgtttagaggngaaaaagcagaaaaaaaaacaaacagt

SEQ ID NO: 211175 - DNA, 1061 bp, Cannabis indica
cattttgggctgtacaatgttgattgggccggccacagtatgttgtaatattttaccattttagtatattcctgttttttccctaaaaaaaattattataatttctcttaacgctaaaaataagtatgtccctatttggacaaaaatgtagatataaatcatttttgatatagtataaagtattctaaattttatatgataaagtacttaccataactataaatgtaaataattatataagaaaattttaattataataaatctctcttagtagagacaaaaatgatctcccttttgtaaaattttccgaagacactaataacgtataaaaattatcgtactaaaattaatttttcagagagaaaaaaattatatgtaataagagatttatatgtacttttctaatgattccttttaatatatatttatataagatataagaaaaggtaccaacaaacgttaataaattaatattattatttttctttttttttaaagaaaaaaaaaatgttaatattaaatattgttattataaaaagcgttaattattaatatgcttttgttaagaaagtcaatatattgaataagtattacaagtgtcaaattataatatctaagaattgagacaattttagacacaatatcttactaaaacaatttttgtatatatacctaataaatatcaaataatcatcgataaaagttgacgtttatttgtttaatttacatcttcattattggagcacagcaaatatagcatggcccctatattttctgtgtgtaaaatttacaacatgtgcatggcatgggagatggtcttatattcctatagcattaagtcattttctgtgtgtaaaatttacaacatgcatggcatgggagatggtcttatttataatgtacttttatgagcattactattgggtactaatggtaattagtactcttagacatgtcgtcttataattggtaaacgatactctctaaaaattattatattaaattatatgagacttaatacttaattaattagatcaataatgataggcaccactgatgcc

SEQ ID NO: 211176 - DNA, 777 bp, Cannabis indica
ttttgtaacatttatgttacctacaattttattgtaatatttatgttacctataatcttattggagaaacaaacgtgttaaaataaagtaaaataaatcacataatttattagtaaaatgtttagacatctaaattaataacttagttatttgaaggttacatcatggtatcttaatattatttaaaatatattttggtaaccttaatttattgtagaaactaattagttatcatataataattttagatattattaacaaagtatattttagtaacctacgaatttagtttggatattaaattttatttatttataaaattatattactttttggttaattaaataggaaaagaaactatttttttattgtggttattttaatacgtaattatagatatttttctattgttacatagtaaaaaataattatttagttaattataatatttaaaatgtaaagtaattaggaagttaccttttcacacacaacacaaaaaatgattcatttatttataattatgaacttctttatcaggaaaaaaaaaataataataattgtttacgatgtcaataaaaagtattgtaatgttggattttttgtggcgattagtgatcttataattagtgaactaaagcaataccaatgagttaattgtttaaaatatttatattttgataattatatatggttgaaacataactaatgagtatataattgatatggtaaataacttactttttaactatctctgtataattgtttaatataattata

SEQ ID NO: 211177 - DNA, 737 bp, Cannabis indica
ctttgtcccgatatcaacaagtctttgtagattctcagtagttgctatatcaaccgataactcattcccaaccaatgtatcatcctgatcaaaacaattaataataattattaaacatttacaacaagtcaacatatatattaaaaaatttgtaggtatgtaatagcatcacttttactctttttatgtaaacattttttctttttgatataataatagtttgcattataattagaattaattgcggaaaaactctcaatatttttattttacttgcgcttaacccctaatactcaattttttgtggtaaaatccccaatacttgtattttgttagcaatttaagatttccatccattttaagtgttaagtacgatgttggactgtccatgtgtatatctacatggacacaatgtacacatgacacaatttaattggttcgtgtaaaaaattatttaaaaaattaaaaaaaaattaaagcaaaattaatttgaaatttaaaaaattgtaaattataaaaaaaaaaaaacaatttttttcagttattaattaaaaaagaaaataaaataaaaatagtaattgaaaattaatacaccaaattgaaaccctagtttcctattgtcctcgcctttctttctcactcaaactctctccaccttctccaccctatgcggcgccctctgtcatcttcatcataccacgtggtgagaaaccgaagtagtcggcgccaggcatggg

SEQ ID NO: 211178 - DNA, 859 bp, Cannabis indica
ctctctgctcttcaaagctaataagtagtagtaggtaatgtaaagttgttatatatatacacatgagttttttattaatttttattttgacaaaacctcttagacaattatatatatcaatattatttgtttattttgtaactgtataagttttttttgttcatagacatatatataggtaaagctttttaggtaggtggtattttgggtgcattatataggcggcttctttgaatcaagaattattcgatcataatataaagtgtcttcatccattaaaaaaaattagaaataattattactaactgttctagtcgatgatggtggactttataataactatataacttcctaaaagttttattttattttattttttcaaaaaaaaaaagatgaaagtataaaggaatatatacttatgaggatattctagtttctttggggtttgaataaggagccattgaagtcttttctgttttagatttgttgtgtttttttatgggtttggcggttcctaattgcgtctcttaaatgatacttgaacttattattatgttcatatatatcgagaaaataaatttttgttatttttttaatcatctttttatataatttaaagtatatttttagttacaataaaaatttagttgtaaataaaaaagttatatttaggaaattttttatttttacactttaaaataattttttttttttactattttacggtaattttacataaaaatttctattgccactagcagatcaacctaaattgcaaccaaatattgtatagtaacccatatagaaattaccggtaaaactactttaaaaaacacaacaaatctaaaacagaaaagac

SEQ ID NO: 211179 - DNA, 561 bp, Cannabis indica
gtggtttggaacaaaaaagttaccaaaggtatatgaggtaatttcatcagctagtcttacttttaattaattggcattttgctcaagagaagtcttttattccgatacagttatcagatgaggccggaagtgagtgggcggtgggtcaaaccggatttcttaaagttaaaagttaatgttgatggagctattttttcgactgaaggaatgttagagaaaatgaaacagagggatgcatctaatgcattacactctgcactacagagaaacattgctcatcaccaaggaatcaagaaggatattctctgaatcaattctgttgctggtgtggtcctatgattggacaagtgtcactctctcctctgttgctgaaattgaggaagatattttccgttagaatatttgatttcctgccaatcattgtattcaaaaagattctattttacctaattttctgccagctgtattggagctaattgctcacgtttgtaattggcctttggtcatctttgtctatataaagaaaccgaaatctcagcagtaaattaagctgaggaaatc

SEQ ID NO: 211180 - DNA, 522 bp, Cannabis indica
attttcaatataggagtatataattttatgtgcacactagtgaaattaacttaatagaccatcttacttaataatgtcaaaaagatcattacaaacataccattagcatttggtgagttgaggaataagtgatacaaaatgatgaagtttggggccttaaaacaaaaaaggattgatttaccaaagaccacttattagggctacacgtgggttgggttgggcggtttttttatgtggtagttttttagaattacaactcatacctgccccataaaagtttgggttgggcaattttttaggaggcggttttatgtgattttttgagcggtttgagttgcttaaaatcaaaacttccaaagtatttgtatctattaataacaatgctataaaaatccttaaaaatttcatatcaatctttataaactccataacaaggcataataatagtccatgaaaatttcataacaattcttataaagtccatactccataacaatctaaaaaaggtccttaaaaagtcca

SEQ ID NO: 211181 - DNA, 667 bp, Cannabis indica
aatctaattcgcaaagtgcggattgaaaattctaaaatttatacttgtgcggattgaatgttaataattgatatataaaagtaaccgatcaaatctaatctacacatatttgtatatacatatatatttaaaaaataaattatatacacaattaatattttaatgtcaaaaataataatttaaaatctaatacataatatagaaatatatttcaaaatataggagatcaaatgtatattttattattatttataaggaaaatataatctaaatgttttaattttttttttattttttgttttatttattttaattttttattagagatataaaataataatttgttttattttattgttagttaagtgaagaaaaatatttttaaataaatattaaataatttaatattaaaaggtaattaatttaaaataaccaatttaatctacaatttcgtgtattggattgaattgaatttgagccgatatgcaaattagatttaatccaaaatataaaattagtatttagtacaaatcggataattcaataagcccaaaagtcctaaagttatgttaattaacatggtgttgtttgtttagtggattccttggtccaccgtacgtggacttcatcttgtatatgtagctttgaactgcccatttaatttatc

SEQ ID NO: 211182 - DNA, 706 bp, Cannabis indica
gtggattccttggtccaccgtacgtggacttcatcttgtatatgtagctttgaactgcccatttaatttatcacaaacctttaatattatttttacatctgttttgtcttgtctgatttgagactagagtcttttgaagctcatcttctgctctttttttctttttcttttttcatttttctttcaagaaggaatagaagaggaataaaaattcccagtaacaagtgtaatggagtcaagtcgaccacttctcttttcttaatattttccaaaattcttaatctttccagccaaagattctcttaattatataagattctaagaaaagtaaataatttttttttaaaaagaaaaaaaaacggaaattataataaagtaagcaaatccgcacgaacactcaaattattataaggctccttcctaagctatttgattagggagtacggaattcgaggacatccgtaatgggccccatctctaaatgggccccgttttccaaagtggctttgggagactttcagtagcccatcagtgcgttcgtgggtgttctttttgtcgtttcatgtcgaaaaaaaaaattaaaaaactaaaataaaaaaaacgttttttggtaatgttattctatctgggaatatgtcacaaataatatgatatacctaatattccatacatcttaaaaagattattaaaaaagattatatgctta

SEQ ID NO: 211183 - DNA, 1124 bp, Cannabis indica
cactacactcggaaggaatcgtggagagaggtctaatgctcaaagtaagtcggagataaatgtttgagcagggtatacgagaagatccgactagctccatcatgtgggcaactcacatgagtcgactaaagaatgtgagttggatatttttagagatatatcctatatatcttcatgcttgcaagacacaataatatttctaatttcatgggatggatacgcagttcaagaaagaaaggcagctcacctagtttcctatttttctcattataaatatagaaagtagatagttttctcattttattccatattaggttttggaaaccaatttatgtaattcatccctataaaaattagagtcatatcactattaaaggactctaaattaattcagagaaaatacacaaaatctagattcaaaagtaaaattctcacagatcattgcaagagcttttgggagagattaaggttttcttgcttctatacttgagagaaactgagagagagaaaaagaaaaatgctttatttctcaaaaatgaattaatttaaaatgatacagagtcaagtgcttttatagcagcaataatcaacatcctagttggtcaagtataactaaccaatctgttagttaataacagaaatacaaactggtaacaaaaatggcagacaagtgaaaagcctataactaactcaactaattacattttaataggccccctcaagttaaagtgtaaatattaatgacacccaacttggatacaatggttgagaaagatgaaggtagcaaagctttggtgaagatgtctgcaaggttctattgagatgagagatgaagaagttggagtgatccttgctgaacattttctcaaatgaagtggcagtcaatctccacatgtttggtgcattcatggtaaacgggattctcagtgatgtgcattgctgtagtgttgtcaaagtgtaatgttgctggaactttgggagagatgacaatgcctttgaggagagtaaggatccatgtcacttcggaagttccatttaccattgcacaatactcagcttcagcaaatgaccgagatacaacttgctattttttagatttcccgagacaagtgattggccaagga

SEQ ID NO: 211184 - DNA, 658 bp, Cannabis indica
ttgcctcttcaaccttgttgttccttcacaacacttaaactagcaaaattgtcttgttctgcaacactttctacttcctatccaatacttagacaagttgttattcatgggataaatctgtctagagcccaatatcatcataacttagaatatgtgttgggtctgactgatacgtacttactcaatagggagatatgaaacacattatgcactccagacaaggcaggaggtaaagctagtcgataggctacttgacctactctttctaagatctcaaagggaccgatgaacctaggtcttagcttccatttctttctaaatctctaaaattctttcaaaggtgatactcggagaaacacaaagtccccaacttggaactcaatatccatacgcttcagattagcataacttttttgtctactctaagcgatgagcatacgagcttgagtcttctcaatagcctcactagttctctggaccgcctcaggtccaaaatatcttctttcaccgacttcatcctaatgaataggtcaccgacactttcttccatacaacatctcgtagggtgccatgtcgatagcattctaataactattattatacaaaaactctatcagaggtagaaacttattcttggaaccttcaaaatctatcacac

SEQ ID NO: 211185 - DNA, 538 bp, Cannabis indica
ttagtatccatcgagagagcaaactagccaataaatgggcagcagtgttagcagatctataaacatgagagacatgtgctccagggaaattggaaactaaacgattaatattatttaacaagcaatgaaaatcagaagtaagctcttgtgaagagagtactcctttaactactaggagagagtctgtctcaataagatgcacaggtagttggagttctcttagccattggagactatgcataagagccaacgcttccattacttgaggagagaaacagccacggtaaggagcagccataacagccacaacatcaccattacaacttcgtagtacagctccaaaacaagaggtcttcgaaataggatcaacggctgcatcagtattcaacttcagtcagcctaaaggaggattgagcacatggacatctttggttgcagcagtggaggagacagattctacaacagagtgaacaacagggccttttgctcgagcagctttgaattcttctggatatgaaagagaaaaatagagaataac

SEQ ID NO: 211186 - DNA, 1069 bp, Cannabis indica
gagttggagagaaacaaagtgacccagaatgcttttcaacagagttttttaataatttattcttttctattttcttcttatgttcttaattaatttgtgttgaattgttacaatgaataagagtagataaacaattgctagttattgatggatattatttgacatctttttatggttttaatatgatttggttcttctctcatttttctatgtgtcttttatttcattcattcttaattcttttaattgtctggctatcaattagattttgatacgagatctgagaagtgagtgtgaattatgctatagtgaaataagaataaatttaaatataagacgagagcacttatgtggtttggatatagcttataaagatatgtgtttaatgccttttacatgtttaaatttatcatgagaataaaaaatttgcatgtaagtgatatttttatatttgagaagattataaatgacttgaataaacctgttattgcataaaaatttgtaataggaattgaattgtattatgtcataatagatagatacaactgaaatcaataaccctaactctgatccttgtcaatttgcatttagatctatttgtttttttgtttttattgcttttagctttaattttctcttaaaaatgtgattttgcctaatagaaataaaagtttagttttaacgcacttaattataattcctctggcttcgacttcacctgtgtgagtaaatacttgcaatgaatacgtacactttcgtgttaaaatattcacaacatatcctaagtgtcaaagttgtacttaatttatatactcttgtaaacaaaagcttatagtccatgtgtaactctttctagttttacacccactaagacattctcatcttgtgaaaattcattaactttgggaaaaaaaaattccaacatatatatatattagcgaacttttccatacaaatagagagttcattaagacttgtttggtacgccgtattgtattgtattagtattatttaatacaatagtatgtttggtgtattgatctgtattaataggttgtgtaaagttata

SEQ ID NO: 211187 - DNA, 582 bp, Cannabis indica
acatagtctcagaatcatcacatgcgaccgtccttagacgatgtggaatcgcatagctccagtcttttccttgcggatcacagggctctaactgtcacaatttgactcatgcccccttttatcccattttctccctggtagtgattagattaacccacatagtcatcgccctcaagttacctaggatttcggataatactcataaattttcccacctttgttaatgctagatcacttctaaacaaaaaaagattttgttatttgaatcaattagatcgatacctccattagctactcatgtcctatattccacttgggaaaccaacaaatttaactcatattgtcatttctctaatctgtctactctctcagatgagctaccactaaataatatataggcacagtccatttagatttttgatgtctctaattgaatgtataatgtttaatatcaatatcaatcaaaatagcaaatataatatttcccataaaattctaacccgagtcgatcaaaggaccgatactcgagtccctttgagtcataaccaatacttgggcagaaagcacacattcttctcctta

SEQ ID NO: 211188 - DNA, 552 bp, Cannabis indica
ttaaaataaatatattttaaatacattatctaaaaaatacttaaaacatttattgaaattgatgcaaataatgagagaaatgaaatttaaaaaatatatacatttaaagagtaaattttttaaaattgggttttattattagttttttttttaatatcggagtgtattgtaatacccactttaccccttccatgtcactctccaaaccaagtgggaccaaaattgacaacaatacccttttcatttcaatcggaagagactaataattttcttcggtccaccagatattcacaccctaaaattactcccaaaaccagagatactctaaccccacccactacacaatatggaaatttaacaccaaaaataaataaataaaatcatacatattatccaatattcccaaaccctaaaaacacccaccaaaaaacataacacaaaacagtcaatctcttcttatttcattttttgttaaatacaacaacatatatataagaagagaaattaattaacgactacgattacaatacaaattaattaatacttgaaaag

SEQ ID NO: 211189 - DNA, 737 bp, Cannabis indica
gatattaaattacggcataagtctcttaaaagttcattttgatgcagataagtccctaatcttaaaaaaaattgtgacaacaaccccaagcttaaaattttcgttactccgcaggtacctaatttaatagctcaattgttgttctaaaaaatatcacgtgttaataaaaattaatttaaattaaataaataaataaattattttaaaaattaattaattaaccttttctttttatctttttattttttttatctttcttcttcttctagttctataacgtcccacttcaagtctctattgggcccttacacccacgaaatattggctttcatacacgagtatgtcaccctagctgcttcatggactaatgactagccctacaaaccaacacgagtgtttctagcgtactttgtcctcactcgtacacttcttaagaaaactttccaagaggtcacccatcctgaaattaccctaggtcaagcacgcttaaccatggagttcttttgtgatgggctatcaaaaaacaagatgcacattattgatataggtattaccaatcaatctatttaagccctcttcaactgtgtagtcccatacctacacagtctcaaaaatcatcacactcaaccttccacatgcgatgtgggattggacagcttacctagtatttctcactacggatcacgggctactgattatcacaatcacccccgttacggggtctgacgtcctcgtcg

SEQ ID NO: 211190 - DNA, 1009 bp, Cannabis indica
gtatggatttggattgtacgaccatgacaacttggatctttgcaagttctcattccaactgactactaggactaattaatagtctaaactctaaaccatctaaaatcttgttttatatccctttcatttactttttcaaaaaaaaatttaaaggctatacatcgtgaaaaatgatggagcccaagcccaaataaggatgagcttaagctgtagcagtgaagattttgggattaatgggcctgtgggcctagcattgagcccgtagccaaaaaaattagattttacataaatacttattttttggtaatttttacacttttactgttcttcttcttcttaatttttttttacatttttacaaaagtatttttttttcaaaatattgatttaagttttaaaatctcaaattacaaaaatactgtgttccagtaaaaaaataacaaaactgcaagacatcaactcaattgcaatatgcaaaaagttatttgttatagcttcatacttcttctcaacatctttcttttcttggagggggaggagggagggttagtgatagctaaaataacaactagtattttagaagtaaaatgaaagattacattaatagtatgttacaattttaaaatgggataatataatataataataatagataatgaaaaggaatatttacaaaaaaatatgagaaaataaatagcaattttgatatatatggcatgtaaagttaatgccactaaatatgatattttataaccaaatcaactaaatatatcggcatttaaataaaaaataccataaaaaaatattaaaaaagatgctcaattttctaaaatagaatcacactctctctagccacacaagattttttttttctctctcctacgattcaaattgcttaatttctcatgcgatcaaaatcaatcaccaaagttccttcatcaaaaaactgttttttcattcaagaaatcagtttcttcattaagaaactgatttcttcatgaaaaactga

SEQ ID NO: 211191 - DNA, 550 bp, Cannabis indica
ttgtggggttttgattttaaaaacaagtttactagctgtaattttgttttttatttttcagaaactatataatgtaatcattctattcctagtgaggacgtgaggtgttttgtaatgaccaaagcatcttttctcttagacatttcaacaaacacttgttgttcaccaacccaaaatctaagtactaacaccaaaacacaaccaatacaaacaccccactcaatttgaacaacccattaatcttcattaaataccaacacaatctctaataacacaagaactaaaactctaatcatatcctaatctctcactggaaatatcacgagaagtagtaccatctttggacataattcattctggacaaataaaatatcattaaattcccactacaaaaaatagtcaatgcatgttttcaatgagacaggttaatcatattatgacacgtaatttacatacaagtatattttaaggtttgtttcaccggtgtcatttttatcagttgggattatagttcaggttaaagttacctgtctctaggatataaatgtat

SEQ ID NO: 211192 - DNA, 850 bp, Cannabis indica
tacttttgacttcttcgtatttgagtgttcttcctttgttgttcacttttttcttttctttttcaattgtttttgctttcaagattatggtagagtcaaaatcaaaccaaaaatagtggttgtttctgatgtggttcccgtgatgtctaaaatcacgtaccataaattgattggttcgaattatttggaatggagcaagacgattcgactttatctaaggagtattgaaaaagatgatcacttaactgatgatcctcccaaagaaaaagacacttcaagaaaaatatggctattgtgatgatactcgcttgtttattcaaatttgaaattctatagataatgagacaattagtttgattaatcattttgaattggttaaagaattaatggattacttggagtttttgtattctgtaaaagacaacctatctcgtatgtatgatgtttgcaaagccttttatcatgcggagtaacaagatcagtctcttatgaactacttttcgacatttaagaggacatacaaagagcttaatgtgttgttgccatttaatcctggtgtgaaggttcaacagcggcagcgagagcagatggctgtcatgagctttctagcaggactctcatctaaatttgactctgcaaagtcacagattctttgtacgtctgatgtctcctccttccaagatgtctttaactgtattcttcgtacagaaactactccatatgcttctcttaatagtgctttggttggtcataataatcatgcaccgtgaaaaaactccaagtggttccaaaataggcaattcacaagagcctgacaatcaacatgggaatccaaaagcattatgtgcaa

SEQ ID NO: 211193 - DNA, 651 bp, Cannabis indica
gatgagttaaagaatgacctgccagttgcaatgttactactgtaggcttagcttctcccaatcttagtcttttaaaaacaaacaagggcattaagataatgcttgctcacatatcacttagagcctttgtttccatcgaacacctatcgagcatggaatattaaaactacccggatctttaagcttgggtggtagtttcttttgcaagattgcactgcactcttcagtaaatgccaccatctcatattctttcaacttctttttcttggatataatgtcctttatgaactttaggtaagttggcgtttgttccaaggcctccgcgaacagaatgttaatgtgcaacttcttaaatattttaagaaattttgaaaactacttgtccaacttattcatgcagagtctttaaggataggaaatttttatatgatgctcaatgcttataagtggtgtagcttcttttgcttgcagacctttattagtcttcttttcttcgtgtgctagtgctggtgcctattgatcctggtcttcatccacttattgcttagcccttgtcccctcatattcttttccacttctcaaggaaattgcttgacactgctcttttggattaatctttgtaggactgggcaagttaccttgattttggtt

SEQ ID NO: 211194 - DNA, 1096 bp, Cannabis indica
tggcaagacaacttcaactagccgaaagtaggttaactaggcaagatcaattcaatgagtttctcgaaattttgcaggatgttttaaataattataacgtaaacgatcatgaaaaattggactaaaaattctctcatatgctgaaataaatagggggtgtatcgatggacccctaatgcattgtagattttttccatggtcgtgtacattatagttatttatgacatcctgcaaaattttaaaaaaatcaaaaaaaattaatacaccaaaactaaagtttaaactgttgcacgcgtaacccttttatttggaggggtgcattataaaagtacattttaatttattgtgtataaatttaaaagcgaatacaatatttttttgggtgattctacaatacacttccttaaaaggaatgtactaatacacccttcacttgtttcggcatccaaaaaaaaattttagtctaattttttttcatattcatgtacgttttaactatttaagataacctacaaaattttgagaaattccgaataatttacaatatataaaacaatgttcaaacagtctattttacacgcgtataaaataaaatagtcacgcgtgcaatacactgtttgaacgtagttttcggtgtattaaacttttctaaatttcttaaaatattgtaggatgtcttaaataactataacgtacatgaccatgagaaaaaatttgacgaaaaaattatttcgggtgctaaaacagataaggatacatcaatatatctattttaagaagtgtattgtagaattcccttactttttttattttattaaaaaattaatataataataagaaatatttttagtgtatttttaatattataattggaatgaaaataactttaacattaatttaagaaatttttacaccaaaaatctaaaatgataaatttattacacaaatacctatacacgctaaaccaacttttttactcatcttttatattttattactattttaccacatgcacacacaattcaaccttttttgacacgtgattgattgatgtattacatcaatcactctatacatcatttctctcttttttctc

SEQ ID NO: 211195 - DNA, 877 bp, Cannabis indica
cacgtgtctttgggcgcgtggggatgcagttatgaccatcatcattccagtttttgcttgttgtaggcaacgatttgtttcctatccatttaatgatccggcgcattaaatgggtgtcagtcgagtactcaagcgtttccaactgccttgatgaacgcttgtcccaaccattggatctatagaatgcgaattgcttgctattctgaccgtacgatgatgcttgatcacagctgcctcacacccgttctggcctatataagccagccttctcatttcatttggttactttcgttattttgccaaattttctcagagcgtccacagagagaaaaaaaaattccagacaccatagatatctgttcttttttcttcaccgtcgccagtcttctctttatcgacgatcaacaccaacccccagtcttcaaacttcgtgtaagttctcaggacactttagactcgtctactgtttgtttgtattgcatgtttagagtatctgggttgaatgttgaatttctgggaaataattttgcctgagtttgttgtgtgatgcgtagaatctctcttatttgcgccctagttgtttctttttactgcgttttcttttgggtatagtctcttgtgtcgtaataacgcctttagggcatagagtgactcgcgttttctcagtatttttcttctttcccctttctttttctttttccactgtcgctgcctttgggattttgcacccgatgcttgtcaaggaaaatcttttgtggtttctttatttggccagcatccggagggggcctccttctagcggttaggggacccccattccctttttaaactctagggtttggtttggggcctagctgctggatttcttctttttaca

SEQ ID NO: 211196 - DNA, 726 bp, Cannabis indica
attattaattaaaaaaaaaaatctaaacgttacatttcacctcttttgttactattattatgttaaatttaactacaacaaaacaaattgacacatgtcaacatgttaatgattcacatcatattttcaattaagagatttattaaataattttaaaactaataaaaaagaactaaatattaaaaagttaaaactatttttgttgatgtctttctctctctccttcatcttcttttctttgatataagaaaaaaaatatgaaaccaatcttaatcttatggtttaatcttctcgattgcttcattagtgcactgtacagattctggtcctaagtatttcttctcccctatctcatcccagttgatgggagatctacgttttctgttatacaacaaattcatagggagccatccctattgtactttgataactgttattatacgagaactttatcaggggtaggtacttactccaagagccctcaaaataccataacacaggctcataacaaatacttccacgtatctgaatagtcctttctagactgtccatcagtctggggagtggaaggcgtatactgaatttctagtttgggttacccactagcccactgcaactactctaagatttaagaggtaaattcggtatctctctaccgaacctaatagtacttggttacgacctatgtaagtacttactaatctccttcgtacgtacaaactctgc

SEQ ID NO: 211197 - DNA, 852 bp, Cannabis indica
ttcagatgaagaattattagagaacattaattgtttgtttcaatttatcaaaaatatatgattgcttgtttgctttctcttttgggtattttttttacccattccacatcaattgatataccctttaaacactctctacaacagaaattccaatcgcgggtccgggtggtgttggtggtgatgcttcgtctatgtatagattacctccaaattcaggtggagggccttcaggtgggtatccagagagtggtcattatgggttatcatcatcttcaaggtcttatccaggtcaacaccatcaccagtcgggaacttctcctttgccaaggggtcctccaggaggaatgtacccaccaccagcttattattaaggttttgttaatgtttaatttgctctgggtgattgaaagttttgcattttgtgggttgctactctatcggtagtttacatttttacatgtgatttgcattttgcattcttagttatcaagatccgtaataaaacaaccttctgtctgcctttactgtttgttttttttgacactctgtactgtgcagcatggatgaacgatagtattgtgttggttttgcttttcattttctaaaccccaattagctagaagacatgtttgtatcaactcatctctggtttcctactcttttgaataccattaatattataaacttgcagctaatacaagcacaaacactatgatagaaattaaatttatctgcatgttcgactttgtgatttagtgtaatcctaacttcttaattcctatctttccaatataatatatatatttatataatgcatttgactgcgtgcgtttagcttatggttaccatttt

SEQ ID NO: 211198 - DNA, 806 bp, Cannabis indica
atatatgatggattttggaaaaataatgaagaaatgagtacatgtttatatagtttatgctcaaaattctatatggttgagttttgaaggatggcttatgcaaatttcatttacccttgtacagggtcggttctgagttgaaataggctataggcaaaaaaaaaaaaaaattagccctttctataaagataaatagtatttttaaaaattatttaaaaaatacgtatattttttaaaaatcaatgaaattatgtaaaatatggacttttttcttaaagtttgataaatatggagaaattatgattttacttaatctatggcttttttctaatttaagttagttgtgtggaattatatttccatatgtttaagtttttatgaaataaagccatattttatttgttaatttatttttgtagatatttgtattattttttaagaaattttattatttattttagttattaatattaaatttgtaatttaatatatatatatatatttatatatatttgtgtttcattataaacgaaggatcttcatttgaattaattattactaataaaattaaaactaaaagtaccaagttactttctgaagcaaaaaataatatctaaaatttaacaaccaggttattttttcaaattaacacgttactttgtgcaaccatagcacaacacatactacagatacaatgttacttttttaaaaaaattaaagctaaaaattcaactactaggttactttttcaaaataacaaggttatttattaaaaaataaagtcacaattcaacacactcaactat

SEQ ID NO: 211199 - DNA, 613 bp, Cannabis indica
taatgtgacttagggccattactcactgacagatatttctattcaagttgaacgatacacttgaatttagaattgaggtaagaaagaattaagattaagatgcacgtatgcacatatttaactatacatgttttatgataccgtttacctagtatactagaaatagtagtatggatttacatagagttgtacttagatactgatagggtatcagataatatggattaatgctaccaacatcagtatagctagagtactggcattaggtttgtatgatggttataatcatactatatgtatgaacgttcaaatctcagttacatgtcaggtcatgtatgttgtatttatatgtattctttttttactgagtctattgactcacatatattactaagtatacgttaaggaaaagttaaagttgaacaatagtaagtagtgaattgggagcttggtgaagattgaacatgtctggttgtctaaacctaaaggatgctcttctcgggacaaccactagcatacttttgtaaatatcgttagacgacacttttagtatcttatgatgtaaaatacttatagctagattttcagtatcccaaattaacttttttttttt

SEQ ID NO: 211200 - DNA, 1045 bp, Cannabis indica
tcgatcgtgtgatcaacttgcatacgccggccaggaaatatgagttggaaattttagagatgaatatcgttatttccaagcttacatgtcacgaaaataatctctacatttgtgggataaattcaaagaatgaaggcaataagcttagatttcccaatctctgcattgtagttatagaaataaattagtttcctattttatttgttatagattaaagtaaaccattcttcatgtaatgagtccctataaatagtggtttaatctcactattcagggacacgaaattgatttagaaaaaacactcaagagagaaataacgatctaagagagaattactcagagatctattgtaagagctttagatagagaatactttgttatttgtctcataagtcaatacaactaaaagggcaataggctattaccattatcacggaaccgaacctctaaaaattctggtgctctctttatatactgtttttacttttcattatttattttatctaattattttatttagactcactgtcgttggctgttggctagaagtgaagttaacaatatcaatcatctccaaactcattcaatggaatacaaaactttgtgaaaaacaacaacattgaagacatgatgaagaatttgcaactttcggaggtaaaaaaatcctcaataacatattatatttgcaatatttttgagaagtccaatatgcaagtcagacgagcccatcattaatggatccaataatagtgggcccaataagacagatagacggactcactaagccttgaaatagacaaacaagtgagcctatgggccataagtcggatcaccccgcaaccgggtccgagtttggccagtcagccaaatgggtggatattgtaaaggtaaaaatttgctcaatatttgcaacattttttgagaagtccaatatgcaagtcaaatgagcccatcaataatggatccaataatattgggcctaataagacagtcagacggactcactaggccttgaaatagacaaacgagtgagcctatgggccat

SEQ ID NO: 211201 - DNA, 1070 bp, Cannabis indica
cgacaagtagtttaatacgagtggaatatagtaaagaagataaagacacaagaattttatagaggttcagccctgagcggtttggtaatagcctaatccttgttatttgaattgactcaagaacaaggagaatggttccttttcttaaagctcttacaatagtatctctgaatatgaattcttagacaaaatctctcgaccttttacccaataagtatgaatcactatttatagggctataagcttggagaggaagtattttccttctagttacaattgatataagtagaaagattgcatagtaaatacagaatacactaatcgtgggatttggatagcttgccatatgtctgtaatctaatcccaaagttataggaatttattttgatgactcatgatgcgaaagctgaatttgctacatgttggcatgctgtgcggattgctcactgccccggtctagaggacttcatctgagcagatgtatgaggtgccctgttcggcctgtgtttagtgagcagatacccatagttgattccacgtgtcaccatcatgtgatgccacgtcagagtgcacaaattgggacaacatttgccccccaagtctgtacgggacttccaaagttgcgggtagacttcatctgagctgtccttgcgttgggatgggtaacgtgttaggtgcgtctgttcgcgactcgatgtgaggctgactagacgtctcttcagttttggctaataaatgcttttatgcaattaatgcttcgaaatctgactttctctcaccacatatgacggttgcacttgattgcttttgatttccaatattcgcttttgggggaaccgaggtgtctgaggtttttaaaatgattacccgttttcgctatttttcctataaatacgattgaacattgttcacaaactcattttcaccaaccttctttattaagcaagctcagagcaaaaagagatgtttttagcttcaagtttgctgaaaaattttcacaagaactgttcgtttagctttgcgtaaaatgaatccagacatcgatcattgagtaagttctcaatttcttt

SEQ ID NO: 211202 - DNA, 599 bp, Cannabis indica
gtggagaaacttgaagaggtaatataattgtgttttgctccaagccatggcaaaattatttcccagttaatttctattttatccccatgatcttgtcgtcttatcaaagtggctttctgtttacgtgtttagtgatacaagtaaagttttttttttctcaatgttagattgaagacaaagtagctttttttttctggtaaagaaacttttttgtgtcaatataataaagacaagagaagagattagaattactctgaaagatagccttaaacagctacactggatatttttggttggggttggtggtaatcaaaaggaatccatttttattctattccttttgttttgttttgttgtagttttaagtaatggactgcctttaccattattttggcggaatgatttttccttcaggtttattttgatattttacattgtgttttgtctgctcattttattcatagtggaagccaattaaatcattatctatggatatttctgaacagaaattccttgtgtctgtctcagaaatggtaggctctgaaaagacagttgttagtttcctttcggaaagtggtaaagcatattatgctaattca

SEQ ID NO: 211203 - DNA, 710 bp, Cannabis indica
cctctcaaaattcaaaagcttttccttatcatctttattaagaagaccaagtttacttttaattatttttgtaatttcccaacgttgcattaaaataactaaaaattaaagcactaacatgtgaatcatgccattataaatttataataaaaaaaataatttaattttaacttttgattgtagaaatttatttttagaacttcattatatatttaatatttaaataaattattattaacgtattacttttttattaatatatttaaattaatttttaattaaagtataaaaatttaatatcacagaagagttaaaactcttaattaaagattaaattaagatatttaaagtacacaaattaacaaagctagatgacaatatagtaattttattgttaataacttttaggtaaataataactgttatctgtggaccatatgatgaaaacatcttaaaataaaaagaaatatatataaataataagttgtctgttgtcctaattaaataatatttccctctccctcaactgctttttaaatataatatatatattttttttataaaaaaaagtacttgttattaaaaaaagtttagactaatcatcaccagtcaccaccaccatcctttcttcctaaaaaaacctccctactactagtcatattcacttccaaacgccctaccccctcgatcttctaactctctctctctct

SEQ ID NO: 211204 - DNA, 578 bp, Cannabis indica
cgattacacagatatgagtgtgtacgactacttactgttagtcgtgtgtacgtatataatatatatatatataggacagttttcaggctaccaccaaaaaagtacttattataattaacttagctcaaagtgtataatgcacttagaagtacatagaacacttttatcactttgtttgccttaaaatatatacatccttaatttattttttttcaaatatactatgtgaattgctaaataaattttggtaaaaatacaaaaaaaaaaaaatactttgaaatataaaaataaaaaatactctattatatttacatatatttttatataaaaaaatattaaaatttacaatagttaataaaataatatatttagagaaataaatatataatattttataaatataggatatgaacattaaatttgaatatatacggcaaaaccacccgaattttaaattttttaacagttaacaataaaaatcaaaaataatttccgaaatatatatttttttgttcttctttcttctttattttttttttcttaaactttctgaaaccctaatatctctctctctctct

SEQ ID NO: 211205 - DNA, 824 bp, Cannabis indica
tcctttgattttattgcacagtgagaacactgtttattttaaatttggagatggaaaggcaaaattcatgtttttaattttttatttttttaattattatattagtttttataggtagatttaaggttttatttattattatgttagtttttatgggtagatttaagattttattagatgactgtatgaacattaacttgtgacctatggaactcgatggtgaacttacgcaaaactctttgatattatttagtatcggtgaaaaaacttgtgtattgtgtgtttgacctgttatgcttgcttttgatattattatatgagttatgagttatgtgtcattctatttattcaatatacatattgtaattttatgtgcatatgtagacttggtttgatttggttgatattaaaataactaaaacttgtgtgattaatttattgaggcgaaatcctaaatcttgttgtgtcgagatgattaaatcttaatacattcctttgttgtcttattttgagactaatttttccaatttttttcctttgttaaaaacaaaatgcatatttatccttgattatgagccatgaacttgaataaattatccgtatcctattttgcaccataaacataggtgttgttgtgtactaaatgaaaaatatgatgtaagtgagatggaaaaaatttctgagaattatgtttgaaaaagatttatgcgcatagagagttataatccaagtatattacgttaaaaagatctcttgttattaaaaaaatagctttaaggaaaaaaattcatattgaggaataaaaaataatagcaagagataaa

SEQ ID NO: 211206 - DNA, 811 bp, Cannabis indica
ttcttttttcggttttccattcttatggttgcaaaaaatcataaaattaatgtagtataaattaataattagttaggaataataattattatatgaagtaaatttattacagtttaagaaaatttttaatttttaaattagtgttagttttattataaaatgaacactggatgttatgattaaaaacctaaatataaactatgtaattatactattcaaaaaatgtgtaaataattatttatttagagaaaaaatattcaataactataaaaatgataagcaactgagtgtaaatacttttattttataaatttttacatttaaaaaattgcaattttatcaaaataaataattattaatattgtcatactagtttaacaataaagaataacattgttaattacaataatattactattattttattttatttttttgttaatgaagtcataatataatattatgttaatgtctgccactataactattttctaatttttttttgtttaaatcatcaataaaatttagggaaatttacatgatatactaacttttgtcatttttttataaaaatactatgaggcggtattatttacttttttactgtatttttctataagtttcatactgcagtatactgtgttaagttttcactggtgttctactggtgttttactgttgttttgagttgttctgctttgtgttttattggtgttttataaaaacacggtatttttgaaaagatttctgtgtaatagtatttttataaaaattaactcaaatttcagtatttttgtaagttcccaatcat

SEQ ID NO: 211207 - DNA, 835 bp, Cannabis indica
gttttgataaattataattagattggattctgtattttcttaaatagtacgttgaatttaattttctaggcaaaataaaatttaataataatttgatttacaggtattatgacaaaactggttaagtttactatatctgttcgtattaggaattgtgttcaagttagttaaaattgagtttatagtcctatttataaaaatataaaatttatttattatttaacaaaacaaaaggttcaatcaataacttgtataaagtacggatccaaaaatgttattaacattctaattttttaacacattgtggtccactggaattatgctgcaaggaagatttattgtggttgtcttattcctatagttgggttcccaatatattttgaagaaaatgaaaacaacaataccctcttcatttttttcaattctaaatttctaataaaaactctgtagaaaaccaaaaacaaaattgtcacttctagttgtttttgtatatatgccaattcaattttccataaaagaaaaggtggaacttcttcattttcctctacttggattttgaacaaaataatacatgatatatacattattttaatgtaaagaaattaagtgcatggaataaaaaaaaaagattgagaaaaatgacaaattaagctaggaatatatattttctttatatatattattttatctttgttatagtttctttggttactcaacaaaattcaatccagatagaatagaataggaagatgataaggcattataatgaataataataataatttttgttgaggttgtgcattgtgcccttccaaatggggttttgttttagata

SEQ ID NO: 211208 - DNA, 768 bp, Cannabis indica
cttcaaaataaattgtttatttgagctattgatttccatatctatgattaaaactcccatttaattatattaccgagttctcaactataagaagtcgaacttttataaattctgatattatttttactttatactatttactttttgttattcaattattctcaatcattttaaatctaatttactatcgttgactaaaagaaaagtcaacaataaactttatgtttattatagaagtttttttgttaattacttttgcactaaacccgttaattagtaaatattagcgcaataatttaaaaattactgtagcacgcttaagctaataaggcgttacattttttctgccgagcgtttcatgagatgcaactagttgatgttgctctaaatcatcggcatgtgacaaatgaaccccgatgcttggtctgccaacacaacactgaaataataaaccatgctctgttcttatgttctatcatattttattatctttccacacattaacgatgtgagactatttaacaatagttgaacttaaactttgattatcacttgtcaaaatcaatgagttgcccaaatttttttactcacgtttcagggaaattatcaaaagaattattgagcaatttattgtttttctgtagtgtatatggtttgaacataatgctgagacccattgcaaaactctaaaatcaatcactgttatacttaattatagagcattgctattgagtatcaatggtgcctagcattcttaagacgtgtcgc

SEQ ID NO: 211209 - DNA, 998 bp, Cannabis indica
ttataattgaaattaataaaacaaacaattaattattaaatttcaaaattattaataaaggtaagtttgtggaaaatcaatttttcaaattcaaaggctattaatatctaaaaccaatttaaattaattaaaaaattaataaaattaattttattctgattatcaaatttttatttgaaaatttaaattctacacaagattctaccaaaatttaaattttcttcattgaaaaacaatttctaaaactagaaatatcaaaaaaataaagcaacaagaggtgtatgcattgcatactccccgcacgcgcaaggggcatcatgggcaaggagtcaaggatgcatggtcatgatcgaggtgcttctctcgtccgcgcgcgcatgtagtgccttaggtttagatattttcattcaaacttcttaaaatcataactaattcaataaaaatccaaataaagttctataaaagcctaaattcattaatttttcatctactttgcagaaaaaatacttccagtaccaaactaattcacaaatattcatcaattaagcacataaagtaacatgaacacatccaaatcatcaaagtcatcgttttaaatctatatttcatgaaagtaaatcattaccatggctctcaggccagttgttggaaattattttatcaagatctagatttactaacatgtacattgactatatttataatctaataccctaaacatgaattcttaaaataatgaaaataaacacataaagttaagaaaatcttatattggtagcagaggaataatatatctccttccactcaaatctctaacccttgttcctttctgtcggagggtaataacaagatctgagcctggatctccttcaggtcttggattcttcacaatcttccgcactatgattgagtacttgaattgatatgagtgggcatgtactctatcactaaaatggttcgaaatttatgaagagaaagagaggagaatttgaaattta

SEQ ID NO: 211210 - DNA, 742 bp, Cannabis indica
atatgattaagattatttttttaatttaaaaagagattattaatatttattgagtttatttgttaacgggagatcaaacctaatcgttaaatttaacagaatattcttttttatttttaagtatattctgttaaaccaagaaataccgttagataggtacttttaatatataaagatatgcaaattaatgagccccaagaaaaagagcatcacgtaacgacgtacgtgcgttattatataatgaactcgatgagattaattaaatattacattgttttttttatattaaattgtgattaatctcacgtaatgataattatatatatatatatatatatatatatatatgtgtgtgtgtgttcgtaggatagatggactgactaatcacgggacagtggtaagagtacaatggacaaattcagatgcatataaaaaatgttgataataaataattggggtaagtcaagtacaaatataagtaaagagaaacactattttcttttattcatttacagttaattggattcagtctcgctcagccatacaagagtgaccaataataacaagatccaaaacaagtagggctcaaaaactccgattattgcgtggttgaaaaatgacagtactcgtgtttctctgcttgattgcagtaataattaatgaactaactcatatgtatatataataacaatagaaattaaggagaaagcgaaggaacgattatagggcatatatagtgggg

SEQ ID NO: 211211 - DNA, 824 bp, Cannabis indica
ttcaaccttagctttgcccttagatagacatgtaaacagtaactatgagtcgacagactcagtaagaaaagtataatcatatcataaatataaaccagattacaactaggcgcacgtacacccaatcataaccctatcctgcatcccacgcgtactaagtctagaacattcttacgacagtaatattgaccataatatcatcttatacttagtactctagttgtaccaatgtggtgacatcaatcagtacttaagccaaacatacaatcatcggtatctaatataattctatgtatactgataccgctatctcagtatgttatctaacaagcattcataaacaggcacgctaaacatgtaatcacatatgcatatcattatactaatcttacctcaatcccgagtttagttgtgccagtaaacctgagttgaactggtgcttgacgatttacaggcccctaagtcacaatattcataaaattgatgagtgatacgctaaatcactttttggggacttaaaatcaaaaccaagcaataccctaaatatcactaaaacaagaaaatctagggtgcctaaaattgccataaacggtaaactagctagattacaattaggcgcccatacacccaatcataactctatctcgcgtcgcacgtgagtctagaacgttcgcatgatagtactattgaccataatattagcctatacttggtactctagttgtaccaataacatcatttagtatttaagccaaacacacaagcattagtatccaatataattctatgtatacggatactgctatctcagtatgttatctaac

SEQ ID NO: 211212 - DNA, 940 bp, Cannabis indica
aattacaatcgactgccaaacataaggtacttaattgtaattggatttcaatgttatatcagatattagatgaggtgtctaaaaatccaatacatcccacatctaatagaactaattagtatttttatttagtttgtatgagtaattagattttctatacttatacgtaaaatatatatgtatatataaaaattaacattaaaattttattctctttttttagattagatgaatctaatccaatccaatacaaattgaacgtaaaatattagatggatccaattcgatccaaaaaaatactaggtctgaaatattgaataaaattaaattaaaccaataaatatatacgagatacattcaacgggaactgatccaattaatgttggatcgattggattcatcggatcagatgataaaatctaacattcaatatataattggatcggatctggtaattacacagatttagtaattatactatattttaaaatataaggggtgtttggatatgagatggtaattatatatgaattcataatatcttgtttgacaaaatagttagtaattacattgaaaaataatattttttgtatataatgttaaatatggaaagtttatagtaactacacaatgtaattacattcaattctcatgggcggccatgagaattggagagtgtaattagaatccctcaattacttccaattacacagttacttctaattacacacaaatttaattacattgtgactttccaaactcactcttaggccatcttcaatggagacactaaaacatcaaatatagtgtagtttcatgctacatttacttcaatgggacattaaagctatcctcataaatagctttgtctatcaaatttagtggaacactgtagaccatactattttttaaaaaagagtttttaataattaaataatac

SEQ ID NO: 211213 - DNA, 551 bp, Cannabis indica
ttcatgtgtaggtaagatattggtggaagctgaatagaagtaagatccgagctcaggtgatgattgtacatgtcgagacggcgcgacctggagtattcggtcttgggacatcttgggctatacctagtagtcgttgtataacaagttgtaaaagtattttaagaatgtttatataagtttaaacacggattccaattatgtaatatatgtttatgaagtttaataattttaattaaagttttaatttggcacgattttcataaaaaattctttgattagcaaatgagacacgttaattagaaaatcactgtagccagcctaagtgttagggcattacaaaagatgacctaaaagatctcaaggatgaccccgaagatgaagatccttaggacgaagatcatgaaggtgttggaaaagaaaaagaaaatgagtattactatgggccagatcctgaagtcattcgaatggctaaagaactcgttgaaaccaaaaagaagatagcgaatcaagaagaattctcccaacaaatgggagaaactctagcaagattg

SEQ ID NO: 211214 - DNA, 515 bp, Cannabis indica
tggattcttgcccactgattactgtaaggtaatatttgcccctcttgtcaacatgtgggtctgccattgctaccccacttgcatgtttctgtgactttgtttttatcatactcacatgtatttaatttcatggtggattctttcagaaaataaaataggaacgaatttcattatgcaccaagtgaaatccaagccaatttctcaaggtagcctcttatatacacttataagaaagtgttcctattccacgtgggactctttgtactatcacagcttcacttatctagattcattataatgttatatttcatgatataaattcactcaaacttgtatcctataaacactttgttttccagaaaacaatgatttctttttattgcttatattaaatctttctatatttctatttggattttgaaattcatgttcttgttcttactcaggttgaagatattcccctcctcttctttgatgctgttagccattatgatcataaactaataataaatgga

SEQ ID NO: 211215 - DNA, 982 bp, Cannabis indica
aaaaaaaaaaaaaattacggatttcgttgtttcgatagttgttcaagtagtttttattttagttgttgtgtggattttggttgtaatttaaattactttgttagttgctatatgagtttatatgtggatttccataaaaaatacaaaaataattctttgaaaatataaaaattaaaaaacccctaaatttttttataattatatatctactattataattttcaataaaaaattagagatatttacagtcaaactataatattactccataatataatgtttgattgatttataaataaatgttacaaaattatttactacaaatgagatattatttaatctagttagagaatgttatattattttatataatataatatttaggttaaataattaagtgtgacaaagaattaattttaccaaattgtaacatacattatggagttacaaaatgtgtgtagaatgattacaaaataggagttgtaaatcctttaaattgatgatcacataaatatataactctcacctctttttcactcttaaattagtaaaagatgttactaattgtttatgaatgtgaatgaatgatagttattgaaaatattgttgttgaagacttgatttactcatttataaggtgtataaatggttcaaaattaagtgggaataatttggaacattttggagaagaattggccaaagctgaaaaaatgataactagttactgttttttttttcaacatacacttgcatacgtttttgaaagtttgagagtctttctaacagcccgaaactcctccaaaccacccaattaataccataaatgcccaatttatgattggtaacatccaaggactttatggtggtcattcatgttcatatgagagtaaaaactctataaatagaggccttattgttcacttgtaagagaagtagtttaaatcatttgttgtggttaaaaccttgtgaggatatgttcatc

SEQ ID NO: 211216 - DNA, 882 bp, Cannabis indica
ggaggttttgaagctctctactgcttgcttacacatttttttattattaatcttttattttatttttaagaggttgagttgatttttatttatttatttatttatttttttttttttttatcgggggttgtagaactgtagagaagtagtagtagtaatgtgttgttgggttagggttaggtctaaggaatcggatcgatgatgggtttggttctggtaagacagcgtgcgcatgggcggtgtgtggaccccacacccttcccctttctctctcctttgtctaaccctctcttgaggcctgagggtcccaacaccccatgttctctttctatatgtgtgtgtctatatcaataggattgattaaaaagcctgcatataagatcatcctgtccggttctcttactaaaacatcactttctttctccatttatttcttcctccaatgctacattttccatctttcaactaaattaacttagtactttattatgttttaaaaggaaaaatgtacatataatacggaaaggagaagaaaaaaaaaataggaaccaatttttttaatatgtatagtccctatctcagctattttatgggttaatttaattatgtctgattattttctataataatgttcatttaatccagtaggcaagtagctaggcttatagctatgtacatcactgcaaagcaggtgtactaaattattgaatatgtcatttctgtaactcccgcgcatttatttccgaaatttcaagtatagctagacattaattatcttttttaaaagaaaaaacagtgtcacactacttctcattatcttactaccaaacaccactgacgactcatgcagatgtgaacaaaaagaaaacgtaaaaaaaaaaa

SEQ ID NO: 211217 - DNA, 731 bp, Cannabis indica
attttatacaattattttattacattataacttatcaataaaatacacgtccttgtgggatgttctacacgagctagagcaacatgccttgtgggagttctgtgagcagcagaggcatggattggttccggtggctgctgctacagctggtagaggtttggcaaggtggtgtgctccgcatgtgggtgagtttactctttccacagatgcttcagtgattacggggagggggatttttggggctgggaggcatgattcaaaatggtgctggtgtggtttggccttgctgggctctctgcggtttgggtttgctatttccgtaattgaatgtgattcaaaggttgtggttggttggattaataattgtcatttaaatattattttttagtttattattttttatgttagttctttaatagcagctgtcattggggttcttgtaatgatcttgcgttatgcaaataatacttgttcatgtagtgctatttctgttactggtagtgtaagagagtgtatgatgttctttcacaatttttaaattttttaaatgatttgttttaatgatatgtaatgcttaatatacatgttatttattgaaaaaaaaaaaaaaatacattgtaacatagagcgtattctacatttttcaaaatttactttaaacttttctttaattttgtctaaaattttaattttattctctaaaaaccatgaatcgaattcacgacctctaa

SEQ ID NO: 211218 - DNA, 641 bp, Cannabis indica
gttatggaaaggaccaagcaaacacgccatagggcacccctcacagccctcacattgccatggtgatgacaagagggagggtcagtgttcctgatgaggttgcatagcctcagcatgataaggaaccaggggcgtccaagttaaggaacttgtggttggacagcccttgcctagccaagaagaataggcctcgactagggcagacagtgcatctaaggttaaagaggctatgccaaccaggaagcggcataaaacctgtaccgtatttttgaacaaccctctgggttcttacgatgaggccggtcaggctttgaacaatcttggttatttgtttgaggtcgggatagaccatgttttgaaggaggcttttgacccccaagtccttgagtatggggaccagctgcaacgatggatatctcccccattttctatatccaccaagaaacttgagatcaaggcaggaggactggtgggaggagctcggtgtgataggcccaccagagaccagctagcgcattgcctaacattcaagtggatggcctagtttgatcgtcatattgggtagggagcgatgttgcccctgcacccctactttcaagatatagccaactacttcaggctgtgtccaactcagatcactc

SEQ ID NO: 211219 - DNA, 507 bp, Cannabis indica
gagaactcaacccaggagttgaacctttctggggtgagcttaaagtaccactatttggtcgtctctgacagtgtggctgggaatatgtgacagtgcacatcaccagtgaccttttggaggtcgagttgcatctcgaagtatttgatgtgagccagtgagtcctctcgcccggtgtacatcttcaacacaagaaaattaaacttcagtagaggtagggcatttttatatgctgagaatggtgatccccttgactgatcaagttagaggtatgaaggcttcgggccagctatgccttggatcatgtccctgagttggtccaactgtgcttgcacagaaggatttgttgttgtggggacttgattggctagtgctccttggggaggttgctgattttgaaggaacaggggctagctggccatactctaggtgagtgtatggtgaagatcagccatgctctacggaccctggtgatacgaaccacactaacttgtgatgaaacccgacacc

SEQ ID NO: 211220 - DNA, 525 bp, Cannabis indica
aatttagacttccaccccttctagaatataatattttagggtttgattaagactctttatataagagagcttacactcttcaaatcctttagaaataggtaaaataagctattgtttacatattaaattaataaaatacaaatgactaaaatacccctcaaaaatagatatttttactctatttttaggggctattaaggcctaattcgtggtctggcttactatccacgtatgaaagttgagcaccaaaattctattaggccaaaggttggccgaccatgcacctgcaggatgcatgctggccgaccatgggatgtctagaagttggccggcctatgctagccataggatcggccaggggtggccgaccgacccccttgaggtggttggttcgtcacttcgtcatcacgcatgagtactcagaccctatgttggttgaagtgctaagtaaatgacttggccttcgtgttagtgagctctattgtcatgtggcactgatattggcaacatagagccacgtcaggt

SEQ ID NO: 211221 - DNA, 510 bp, Cannabis indica
aatctccgacgagcttaggacaggaaacaatctcaagtgttttgagcttcccatatgttgttgcctccccagtctgccattgttcccatgatgacatatcgctgaaccttaatgtttccaatgatgaaaatggctttctcgcagaacaattcccgtaaaactcagcacccactgtcactaccgaattgcattctgagatggaaagatgttttagcaaaggaagttttccaaagggtggcaaataggagcagtgcttacatccattaagagttacttcagcaatgttgctaaacgaatcattcccaacccaatttggaaatattttgcctggatagtaattaatctcgagctccttcaacgttctgttgggtgaaagcatttcaagcacaccctctccatgttttggatcaacattgacatcattaacactccattccaaagtcaatttatcaagttgcttcttctccagtacattgacttgatttgctgcttttgtaatattgaccacat

SEQ ID NO: 211222 - DNA, 559 bp, Cannabis indica
tattaattgattttattctttggctgtggtactaatagtgtttagaagaatactgataccacgtataattctcttgtgtcaagttttaaattttacaaaatttattcatgaaactgttttgttataacaagtatgtgttctgtagtaacaagttttcaatttgttacagcaaattgttacagtcacatttgaattatatttattaaaaaaataaattggtatatgcaaaaatacagtttttcatatttagtataccgtataagggtcgtattgtaaataacaagtaactctacgttttggataaaacattgtattgtattaatcattacgactataatttttaataaaatatgaatcgtattatttaatacataacacattattagtattatagcttgtattaatatttacaaagggtttgaaattggggaaatcggcccaaaatttagacccagacctcgaacccagaccccagctccgtctcgagctttggtctctcagtctcggacccaaaccttagacccagatttggtccctgaccacaaccccagaccctaga

SEQ ID NO: 211223 - DNA, 638 bp, Cannabis indica
atctatttatttttgaacaattttttttgacgtttttattattttttttagctataaaggacctatctaatattttggtgcaaatatcctaaggctatttagaggaaaaaaacgttttgatatctatatcacatgccaattttttttttttttttgagtcaatatcacatgcaaatttaattgcataaaaaaatatgatattttttctaaaaaaaaatatgaaataaatctcataaatacaaaaaaatagcataaaaaactttaaaaatcgtatataaatttcaattctatatgatcaaaattagtttattgacgaaaaaatttagtttattgatgaaaaaattaatttcttgatgaagaaaccaatttcttgattaaaaaattagtttcttaatgaaagattttgggtgaatttcgctttgaccgatcatcactgaatgagtaaaatttaaaaactcatatataaattttacttctataaaataaaaactagttttctaatgaaaaaattagtttcttagtaaaaaaatcaatttctcgatgaaaaagtcaatttcttgataaaaaaatttagtaaacaatttatctaaaaattaaatatgagttttagaaattaaattatacacgacataacaaat

SEQ ID NO: 211224 - DNA, 519 bp, Cannabis indica
taagaaattgaaacagtgttaaaaagtatataaataagtaaataatttttaaattattaaatgtttaaatcaattaagtacaagaaacatacctaaattgatctccactaaaacctccttcatttcaagagtaatctttctccaatcaggtatagttactggtactacttccctcacaacttgtccaaaaaatgaagataagctaattgatgcttttccgattggttggcccgatgcattgaatttgaccggtaatcgaccatgtagcaactgttttcattttagtttgaccgtttttttttcttttccataggctcttctaaaggggcagcaacatcaccaagtataggtgacgagcctatggacctccttcttaatgagcccttagtgtttagtgcaggggagtctatggttggcattgctatagaaatttgaggtgttttggacctagtatttactgttggggaatttgacattggagtaagatattggagttggtgttttggaccgagaggcttt

SEQ ID NO: 211225 - DNA, 821 bp, Cannabis indica
taacatctactagatcagataattattaagttttatttaatgaaaaatcaggatcttatttgtacaattttagaaaatacatggtctattttgtcatttaacaaaacaaatagtctaatagatttgcaaaacacaaagtccaaaataatatttatccttttattttagtattataaatttttcaaaattatttttctaaaaatattgtagaatatgtgtctatattatataacatcatacaaaatatataaattataatttctcaaaatagataaaaaaaaaattcaatataaaagaaaaagtgatttgtaactaaaaatctcattaattataatcatattatgacatgaatttgttattataggccttctaactaggttatacttggtcacattatatatagtcagggattgacattgacaatgtcacttactaaaatatacatcaacttgttataaataaatatattcaacttattatttatatattaaattagcaaaataattaattaaggaataataaagttgatttatttaacaaagggtactgcaagtatgcaatctttgtcatcattcttgtctggcttatatcatcatatgcattcatcactgttttgatatcaaaaaaggttaaaaacataaaaacaaaaataaaaaatatattaagaaaaaaaaaagacatcaatagatattttggttaacttgatttgaagtcattttcaatatgagaaaaatctaaaacagtctcattggttgagttgggtatcaaataattataatattttaggatataatatagttgggtatatagatacagcaaaa

SEQ ID NO: 211226 - DNA, 598 bp, Cannabis indica
aaatttgattagtatataaatatctttctttgtaagaatttttcattataaatatattaatgtatttttttaaaaaaaaatacattactaaaaaaataatatatagaataacatctttaagaaataataatgtatttttcttttatagaaaaaaattatttataaaaaaatacattgagaaattgcattatagggttattctttttttttttgtaaacaactattttttttttaattaatgaggtgctagctgattgccacatgctcaatatgtgcttcccaaggagtctaatatatctttcaatttaaaaaaaaaaaaaaaaaaaaaaaaaaaaaaaaaaaaagaacaattaaataaaacaattttaccaatttatataatgtacatgttattccataataaatagtttaaatcttacaaaagtcaacataatcaatggctaataaaatgttactatcttatggggacaaatgaagtgttcctattgtagaattttcatatatctattttatatacaatgtggctatataacgaaattcttagtttaacagtgtattagttttctacgttaactttaacaaaattatctacaattac

SEQ ID NO: 211227 - DNA, 1038 bp, Cannabis indica
agagagagagagtaatagttttggggaccccattattgttgtggcccttcatatcagaattatatatattggagtggtgtttggaattgggggtccgggggtgtcttctgtggttccctctatagaagaagtaatttgtgtatgtgtttcgtacaaactttgtggactttaggttttcttatgtgtacatattttatcttttgaggtttggtttgatgagtcacaaagcttatcttattcttatctactagctactactaccttttttgttccctctctttttgcctactttagtttatttgttactgagcatctttgattcatatccttgactttttatgtatattatatatatatagagcaagattatggtatgacctagcaaaagttctctaccgatagggaattctttttaactattgattttagatcatgtggtcattatgatgtaaggtgtataattttacaataaaactgcttgtatacaattaaaactttatacatattataataatatttaataatatatttattttttttaaaaaaataatattaataattaaaatatttattaatttttaatttgaattattattagtttttctaaaattaatttaaattgtttttaaacaggtatttattttcaaaaaataattttatttgcgaactttattattatttttttttatattaataataaattataacaaaattggttacttaattattttcgccattaatttgtttacatacatagttttatcataattatcttttacttatattggtttaatatttttataaaattatgtattaatatttttatttgaaatattttattaattttttttattgaaaaagaaaatttctattaatcaaactaagtcaattacatccacaaaaggatttctcttcaaaagagaaatttacaaccctttaacaattttaagaacaatttctctatgctaaacaacttcctttttggtacaagattaagtctacttttgaggcgctctttaattctactatctatacaac

SEQ ID NO: 211228 - DNA, 707 bp, Cannabis indica
atctctcaaaggccttttactctccaattattaaatgaaaccggttatcttggttcaaaacctgtttctacacccatggagcccaatctaaaattaagttccactgatggacagctcatttccaatcccactacttatcgaagtctcattggaaaactcctatatctcactatcactcgacccgatctctcctatgcagttaataggctaagtcaatacttagcctctccaagaaaacctcacttactcgctgctcaaaggatacttcagtatctcaaaaccacccctggtcagggcctatttttttcaaacaaatcggattctcacatctctgcatatgcagaaacaagtctcaacatcaaagtcttctctgatgccgattggggcagctgtattgacactaggagatctatctctggctattgtgtgttcataggcaactctctagtatcctggaaatccaagaaacaagccactgtgtctcgctcttcagccgaagctgaatatcgagctatggcacatgctacttgtgaaataacatggatacttgccattttaaaggattttaaaatctgtcacaccacacctgccattctctattgtgacaatgatgctgcactccacatctctgagaatcccgtttttcacgaacgcaccaaacacgtagacattgactgccacatagtaagggaaaaagttcaacaagg

SEQ ID NO: 211229 - DNA, 552 bp, Cannabis indica
ttctaatttatactttattttgtataataattttaaaattgataaactatagttgaggtcattattaatgatgagatgacgattcactaagttaaccttattccttttcatgtatgctctctttcatcgggttcctagtgcaacatcaacaaaataattggctttcttcacaaagcttgattgccatagtttatcaaatggatcatcaaaagaatatatattattaatattatagtgatatttctcttttgaagaaaaagaataggaattgttattaatactatttcttataataattacaaataagaacatgcacttttttttgacacaatatcaactcttatattaagcagttgagatacaaatgaaaaaaataaggtggttaataacatggttctataatagtttctttcagtgaagctcccaaaagctaatatatggaaataacaaaataaagaaaataagttgtttgcaacgtggactaagtcaggtgaaacggtgtctttcttgtaactctcagagagttgcatccctgcctaagccaacacctct

SEQ ID NO: 211230 - DNA, 544 bp, Cannabis indica
taataattagatttgctattagaatctatgtcgtttcattattattattatgtagtgtcgtttatattgtagtttgtacagttcgaattaatttttatttttttctaactttttcgatatgagactttttttcaagactctgagttcttccatactggtggcgagtaattcgcaaggtacttcatttttctttcttttgaacctttttttcccacttacattattgcattatatgtaatttttgctagttctataaaatgggaataaaaagtgataaaaatcgataatgaattttattcctcttctttggttataacatagcagagagtacatagagacttacacacaaaacccaaaagagggaacaattacaaagacaatcataatgtagtccgggaatatagcaactttgatagacaatcataattaatcacataatctttttgttttgcttaaattctatatgaattattattgataacaagggatcatcataacatgtaccaataataattacagggtggaaaacacacgcacatatata

SEQ ID NO: 211231 - DNA, 734 bp, Cannabis indica
attaacgccctaactacataaaaattcttattttttcttcttaaatttatttactttttcttaaacttatttattttagtccaaaaacttcgataaacaagtatctttttttttgaattgggataaacaagtatatttaacttaacttgtaaactaaaaacaaataagaaattaatgacatgaacacaaatgactcttttcctttagctatattattatattatagaattcattggaaaataggcgttaaattaataaaggaaaaaagaaatgcagctgtattcatgatttgggattgggtaatggcttgttttgacatttacacgttcccacttccaaattggaaagagaactgtttaaaccggttgactctgcttagggctagtgggcccaaactctatactatttcattattcctcttattcttttttaatttaatttaatttaataaataaagtatatttattctctcttttttttttccctttttgatttttttttgctggaagagagctgagcaaaatgatgttgttattgttttgttctgtaactcttagacgatacacagattcctcttacatttcagattatgctctctgatcgaaaattaaattagaagaaggacgaaattgaggccttaaggagaatctgagggtccggagccgaagcccggaccccttcgccaacgccgccgttgccgtcgttgatcttagtttttttttattattattatt

SEQ ID NO: 211232 - DNA, 1062 bp, Cannabis indica
tgaagaaaaaatattgacaaaaactgttttttaaaatataaaacaacattttattattctcaaaattcttatttttgtaactttttttattgaaagttactttcaaaaaatatggtcaaatgctcctatttgttctcatcaaaaaacaatttttcaatttttaaaaacaaaaaataattttttaattatgatatcaatgtactaaatctatacataatatatatagttagctctacacatactactcaaaacttacaaataaactcctagtataacaagttaattttaccaaatatactaaaaaaaaaagtgttattaaatgaacaaagtacttatggttcaagatgactaagtgcatgtttgacccatgtgttaaaaaactgttttttataatgtgttacacaaaatttgtgtagagaaacattagttcattatattattaatgttgacactctccaataatataagaacgcgatcattgggaaacacgctctttgagatagtgtttaactctcaaaataaactaaaattttatttctcattagatatccctataatcagacttggttttgggtatacgcaaattaggcctatacttagagttcatctagcttagtgattcaaaaaaaattatgctcttttaaaaaaatatatgtttttttactaattttgaaaataccacaattttttcaaaataaagacccaaaaatattttccttcctatgatgacatactaaatttcagaaaatctctatacaattacatgttttcaaaacattatatatatactatttataaattagtaataaactcttagtgtaacatgactacaacctttgtaattggctacaccatattcatgttccatacttctatatattaaatatggaatgtttataatttataaagagaagaagaatatacctaaagccaattggtttgtgaggtgaatgaaattgaggatgaacaatgaacctaatataattcctccaataatggagttggtttatttggttgtcccctttatcaaaattggtaccataacatattgggtccaaaaca

SEQ ID NO: 211233 - DNA, 691 bp, Cannabis indica
taaggtcttagaatggtttatctcaattttagataccgagtctaaccttgttatgtcttaaccgcataactctttatatcaacatatataatacattattgcattcacattcacatacattctagagtaataaccctaaaccataaaatagctaaacttaaggtaataaccctagtctctgttttctgcataatatataaaataacatacttgagcaccattgcactaatctctatgtgctaactcactgtcttacctgataatcttagtgtgtggaaattctaaatctttgggtgttcctgagctagcgccagtaatcctagtcacagattctcgggatttcataaatagggttaatcttaaattcattgtaatacatatataaaatatgaactccaatcatagactaacacatagaacccgaaatgagttttccaacgataccaagaacatcaaaaatagagtttggagtcaaataaagatagaatctcctattaaattttaaataaggtattttttaatgaataaatgactgatgtcattagataatccttccagtaatgtggaaaagaaattttaaattttaaaaatattatatattaattataaataaaataaggacccagagatgtaaatccaatgactactaatgaaaagtaggctgggtattcgatctaatcaaatttttttt

SEQ ID NO: 211234 - DNA, 795 bp, Cannabis indica
ttcgtttttttagtggctcgattgatctcttattggtgcctgcagctcaggaataaagaagtcgtaatttttttaaaaaaaaataataataaaacaaggaaaaaaaaaaaaaacctgagcaccaccattaattaatggaaagcaaatattaagcactggtaaagtaaataactatactaatgtagtgtagtggtttgaataatgataaattaaatcctttatttatgtcaataagtactcgataattaatccactataatatagaaatcttttaattaattgatttacttcttttatctctctgtgtaaaacaatagtcaattattctgtagcacatgtagctacctatctataaatagaagcatattttattgcaaagaattttcattcctttccttctgaaatttgatatttttctatctatttaaatcatatacaatcttacaaatattcaataatcaaaagatgaagtggattaaattccctcttatcacacttgccatctttagtttggctatttcccttgtctcagcctatgatccaagcccactccaagacttctgtgtagcaataaataatctcaaggatgattgtatgtatatttttttcaaacttatttattattatgggtaatgttctatgaccatcatatgaatatatatctatatacaaaaattgtatgtattttataaactttagctagcatgtgatcaatttaattaataagcctatgtgggtgtaacaatatataatacggaaacatataattcttgcgtcaaaaaaaaaaaaaaaaaa

SEQ ID NO: 211235 - DNA, 830 bp, Cannabis indica
  modified_base (558)..(558): a, c, t, g, unknown or other
ctaatagatgtacttttttctttttcaaaaaaaaaaaaagtacatacaaggtattaaatagacatatttgcttctaaatgggagatatttctttttgtaatttcataattagttaaaggttattttggtaattcaatagtaaaaagcccatgaacattctcatttttattgaggttatagataagtaattattgttagaatgtgaactaatataatatagagaaatttataatattatttacattatatatgtaacttaattacaatatatgtagattatttagtcatacattttggttaataaggaaatataatatcaaataactatacaaattatatatggtaaacttttaaaatttttcatgtaatttacgtcttatatatccttaaataagtaataaaagacacttattataaagttaggttgacatgccatttatctttggtttttttatctaagattgtaaaaattatttcaagaatgtcacttttccagtacagttcgctactgcattggtctaataccacattgatttgccaccccttttgccaacacanctacaagtaaattctattttactagtgcaataccaatttttgccagcacaaaaatgtgctggcaaaagtaacattcttgtagtgaatctcctactttccttgcataatgttaaaatttatcatgttaaatggtctactaacaaagttgcacattgtctggctcgtggctcttgttattggtctgaccgtatcttctctggaagcaatgttctttctgctcttcagactattagtaatagcgaatataactatttaataaaatatctaacttt

SEQ ID NO: 211236 - DNA, 858 bp, Cannabis indica
aatacataatgtgattatacaaagttggttaattattaatagtatgcccctaagtaattttaaagtaaaaagtttatgatcacttgagaactaaaagatataaattccattgatatgaaatatgttacacaatcttatagtttaaaaattacacaaaagaaagttaatcactggtaataaggtcgaaaatgcttcgttttttttttcaagtgttctttactagcaagccatttggccaagccaatttatacacccctggtcctatcactgctactattacataaggaccttcccaatttggattaaacactccaactccagggtcttgtgtattgctttgtaacactaaatccctgacattgaaaagtctctcgcaaactcttttattaaaatgaatcgtgatgttttggtgatatgtcgcattgcatatttgagactctaaatgtttttcttcgagcaggtccaaggattcccttataattcttagtttttatcctgatcgtagaattcatgtctatgagttgtgatgttcatttccaccggtggcattgcctctgagcaaaatgctagcattgtgtttttagttgttcgatgggaccaaagcatgtatggtaactcatctatcaattttccttttctcgcattgagcttcttttaatagtgtctttaagagtttcgttaactgcctctacctggccattagcctgcggccaagacacatatgagaaactttttatgatcttgttcctctcgtaaaactctgcgaatagatcactgtcgaattgagttccattatcggacactatcttaatgggtattttgaactgaaaaatggtgtattttatcacaaagtctaag

SEQ ID NO: 211237 - DNA, 581 bp, Cannabis indica
ttattactttcgattaacttttttctcttggattttataggaaagaaagaaaaataaagctgtttaattaccggctaggggctacccatacacgtcgatatggcccaacactgctttgtttgtttctccacaccatcgtaatactcttttatgatgtaaaagaatgttaaagtatcccattatttaataatttcctacgttctctctctttgagtcatctctttttcaatttaatttttgtacctcatgtaacaaaatatgtttctcaacttttaatccctcaaacaattttcctctaacttttgatttttttttttgagtgtagtctaatagtatttataatttttttttttgaaaagagtatttataattaattaattgcttaatagtttaaagtgttaggttcgaatttatgaccttttttttttccatctatctctcaccactaactagcgttagtgagtcttgtcttctgacatgtatgttttacggtgttttttgcggtaactaagttcgtgggtatcaaaacatcagttacgctaaagattggttctgacggtcttctagcagtcgagacagcg

SEQ ID NO: 211238 - DNA, 585 bp, Cannabis indica
attctgattgtatatttgaccattgaaaacaattaaacttaagttagggtgttcatccaatccaatccgcattattttactcatagtacatccgatccgcactaagtgcgaatttcatattttggatccaattcaatccgtcaaagtacggatcgaatcgattattttggattgattactttttaatattaaactatttaatatttataaaaaatatttttttttcacataattagcaacaaaataaaaattgaatatacatttaatttattaaattttgaaacatagatgtattgtatatattaaatgttaaaattactattttcttgcattaaaattttaattgtatgtataatttttaatttaatttttttaaaaatatgtgaattgaattggattcgatcgattattacatgacatatcaacatcaacatccgaacaagcacgaagttcaaattttaaatctgcaatctgcaaattgtgaattggattggatcggatcgaattggattggatcagctattttatgaacacccctacttaacagaagtaactaattaccctgtgaactactatataaaattt

SEQ ID NO: 211239 - DNA, 518 bp, Cannabis indica
tttcattttgcttgcatataacttttaaaacctaaattttgacgttgaaacccccaaaattcgcattctgttagtatttagtcattttcatccattttatgcagttaactgccatgttagattgtccgcgtacatagaatttatccacatagacacagttaacacatgacacaatttaattggcccacataattaatttaattaaaaataattaatctttttttcttctaccatctttatttttctcatctcatattttcttttttcaatttttgttcattcttcttaaaaaatatcaccaccactactatcaccatcatccaccacaaccgaactgcccaccaccaccaaaaccacatctacacaccataaccatcactgaaacctctttttcagatccaaacaaaacctcacatctcagatccaaacacatcaaagagacctaaacattcgaatttcgattccacaaaaataaacaaatccaaattaaatccacaaggaaaaaaacttcagattaa

SEQ ID NO: 211240 - DNA, 666 bp, Cannabis indica
tccaactcagtgtcctctgtttaatcctgtgtgtgtcagtccaaccattacaccttctcaaccatctgaatctccttcatcactctctctcccaaccaatatcaccaatactcaacaaaacatgtcatctacacctgtcccaaatgcatctgttgagtccactgttgtaccacctactgtttccacttccattccttccacaaacacacataccatgaccaccagggctaaagcagggattcacaaacccaaagtacacttgtctgtagagattcccaagagcttcaaatctgccatgcaatatgaaaaatggggaaagccatgtctgaggagatcttagctctaatcaggaacaagacctacactatagtgccactacctaaaggaagagaacccataggatgtaaatggattctcagaataaaagaaaatccagatggctctctcaacagatacaaagcaagacttgttgcaaaagggtttcaccaacaacttggctttgattacactgagactttcagcccagttgtcaaaccgattaccatcagagttgtcttaacaatggccattacaagaggttggaaaattagacaattggatgtaaacaatgcttttctcaatggggtattagaaaaggaggtacacatgacacaaccacctggtttt

SEQ ID NO: 211241 - DNA, 646 bp, Cannabis indica
gctgatgagatcactgatgtggttaatgggtcagctgaggttgctggagcttttaatgtttctgattttatttggttttgtaagaatttagatttgcagggactaaagaaaaagagtaaagcaattcatgataagtttgataaaatggttgagagtattataaaagatcatcgagcaaataatgttgagaaggaagataattttgttccaagagattttcttgatattttacttcaaatatctgatgatgaaggctcagatgtcaaacttacccaagaaaacatcaagtcattcttcctggtacgtatatcaatgatcatcaatttcaaacatttttctttcttatatattatttaattactctaagtactcaaatgtcaattctacttatatatatatatttagtttactcttaaacttgtattatattttgctttatgacatattttcattaatttatgcaagtatgtttaaaatttaatattttattaaaaatttaaaatttaataattttattattagttaaaacaattaaaaaaataaatataaaaatttctaatttaatacaataataaaatttaataataaaatattaaaaaatatataaactaagataaaagtaataggtgataatggtataaaattt

SEQ ID NO: 211242 - DNA, 590 bp, Cannabis indica
tgtgagggagatcgtcgaagagtcatggaaggacaaccatggcacttcgacagatccctcatgatttttgcaatacctgatggttttgacactatcctcccctctcaactccggtatattcccctatgggtccaggttcaccacatcccttttggctctcgatcatatggtcttgcccagttcgtggccgacaccataggtgaccttattgaggtgcacttaatctccttgtatgactctgtcaccccgttcatgcgggttagggttcttttggatactactaaatccctacaccgtggtatgaacgttcactttaggaagttatcccttactaaatggctgaaatttctctatgagggcattcaaaattattgctaccattgtgggaagctggaccacacttttaacaagtgtggtaaattcctccatcactgtgatcaccatccatttccccccagtctgagctacaaagacgtcctccgtgccccagccaaatcaatctacaagaaaagcatatttgaattgtccacttctatccctttcgaggaacaacctaccctctccaacactgcccatcctactcttcagga

SEQ ID NO: 211243 - DNA, 768 bp, Cannabis indica
ttcacatcatttcactctaatagcactccgaattatgtaccaaattaatgtgcactaattctacactattaatagtgttgaattttaaatatacaccaatttagtgtacaactattttttttgcattgtaacacttattttattttattttaaaatataatcatacattatattcctcaaattaaaatttatcacaaaaataataattacttttttataaaaaaaaaataaaatattttttaaaacactaacatatttaaaaatacaaaataataaaataaatattaatgctaataaaataaaaacaacatcacacaaagttataaaactaaatagaataacataaagtaaaataataatttaataatcaaattgagcacgtatagatcttaaccttgaagaatagcaaattattagctatatgtactttaagtattttgagaatattaatatttttgagatgcttaatattattggtgaactcttttttgtgtaatctttttggctcattttaaaaatggtcgcgtataataagatcaataacttaaataagatttttttaaaaaaaaaaataatgtgttaaaaaaaatatgtgtggtatttaattgatttaataaatatttattttactaaattattttaagattttaaattcttacaagtagtatccatgatacaattcttactaattatttcataaattaattattttaggttattgatgtaaataatataaaatgtaaaatcttttaagtaaaatatatttat

SEQ ID NO: 211244 - DNA, 655 bp, Cannabis indica
ttgaaatacttgagatgggaaagtggatcttcccttccagtatacattttccatgttggaattttaaacttctggggcaacgccaggagattgatctcaggagagaaaggaattccacgtgctcgatccagctcgagatcattctttctctgtccaaccatgccttggaacttatttttcagttcgtctagctgtgcctgtacagctgggctaacctgctcggtattctggtcaatttgaatcacatcagtatctttctgagcgggaatttgagcacaggctccaggctgcacgatcttcgtgacattctgatcgtctactgcgccccttctatttagatcactccttaggtcatgaggcgtccccaacctttcgaatacagaagcgcctcgctgtcttagcgattgatttgcttggttgacaggtggaatggcaccgttaaccttgttggaaccatcaggtatgacctatcctgatgaattactagataaggtttgcccgcctaccgcttggcccacaagtggaactcatgaccggtgatttggcgactgaccatttgtagtctgggaagtattcatcgcttgatcttcgtccatctcacccagggggatgacactcagaggttgctgaccaacagtttggtaggcttttcgta

SEQ ID NO: 211245 - DNA, 716 bp, Cannabis indica
taagctcagctctgtttgctggccgaaaagcattcggttacttctttagcaatgacaaggaagttgtggattatgcaatgaacatggctcctctagtttgtctatctgtcatatttgacagtttacatgctactctttcaggtttagttctttcttccttgttcgatcgatcgatatagtgataacattctcaaatcttgagtcactcatgattaatctcatcttaaaccaggcattgctagagggtgtggatggcaagatttgggggcatttgtgaatcttggagcatactatttggttggaattcctgttgctgcagcattgggttttcggttcgatttaagaggaaaaggcctttggattggaattgttgttggttctttcttacaagcatttttgctttctttgatagcagtatgtaccaattgggatgaaaaggtatgtgtttttactccactttttgatttttttaacacttagatgggagatgtaaaatttacataaaatggactaaaatgttaaacacacatataattcttatatatataaaaaagattagattaggattttaccttttgaactttgatatgtaccaatcatgtctcttgaactttttaaccgttgaaaattccctctgaactattgagattgttggatttaagaacttttgtctaatttcatttcaatttcactaattctgtgattgtccatgtact

SEQ ID NO: 211246 - DNA, 453 bp, Cannabis indica
atatatataaatcaaaaaaatcaaaaccaatcttttttttctctcccttcttctccattggcaaaagtttaaggttttatttctttaatcctctttaaaaagaacaactctcctctcttttctctcatccatgaaatcttcatctctttctctctcactcattcactcactcactcactaacctatatatctatacatatatacatacatatatatatatagctaggacttaaaagttagtttttttttttttttattatataaattttagaaaaaattaaagtattggaataaatatggagttgttcaatcaccacacctcctcatcttatccacaagcattgcaattaaagctttatcaagccttcatattctcaattcctatactctttcctatcatattatttctcttgttttatttgttctatctcaaaagaagagcttcaaataata

SEQ ID NO: 211247 - DNA, 853 bp, Cannabis indica
atcatgggtaatacccataaagaagtattccatatatataaatcaaaaaaatcaaaaccaatcttttttttcctctcccttcttctccattggcaaaagtttaaggttttatttctttaatcctctttaaaaagaacaactctcctctcttttctctcatccatgaaatcttcatctctttctctctcactcattcactcactcactcactaacctatatatctatacatatatacatacatatatatatagctaggacttaaaagttagttttttttttttttttttaatataaatttttgaaaaaattaagatttgaataaatatgggagttgttcaatcaccaacacctcctcatctttatccacaagcattacaattaaagctttatcaagccttcatattctcaattcctatactcttttccatcatattatttctcttgttttattttgttctatctcaaaagaagagcttcaaataatattattaattctaataatattccttcacgtccaataagatcacatcaaactactacaacttatatttcttcggtaattaattaattaatttctttatttattctctctatttatttcatattaattaatatttattatgtgtatataattttttttttgtttattattatttattatatatagccatgtcatcggttggtatttgaagggggaactcaaagatgatcttccaataattttatttgatgaagaattgagggtacatatttagggaccagaccatgtgctcaacattttttggtgttattatacataatttccaccatcaataaaattcctataattttatatatattatataaaattaa

SEQ ID NO: 211248 - DNA, 704 bp, Cannabis indica
tatctgagaaaatgtgacttttgaaaaactcctatgaagttggatttgagttggtattaaaggaagatttgtgctttgtcctttccaaaggccaaattcttgctgatggtcataagggtaagtttaaagcttccttactttataacagtttcattcttcgacaactagtgttatattcaggtgcagtttggaatagcgttaatatgcctaaacatagatttatgttatgacaagctttaaactctcacttgctcattagggatcaactaactcgctttagtatttccttgaagactcttctatgtgttgtttgtgggctctctaatgagagtcatacccatttatttttcgagtgtagcttacctaagaaaattacaaatgagaactttttgtggctgggtttttctgcctggctaagagactatgggagttggaccacttggctggttagcaagacatcagaggcgattgctgctattataattgccacgctgctagcttgtgtttatcacatttggtctaaccgtaagaaatatctttttgaaggcttctcaaaatatgttggtgctatagtcaaagagataaaacatgttttcagattatttcatgtaaataataggaagctattcttattcttagatgaaagaatagaaattttgttgtatgattaaaatgtaattttaatttttttttttttagtcagc

SEQ ID NO: 211249 - DNA, 506 bp, Cannabis indica
tgagatcaaatgtgttagcagcatgttattatgtgaaataaatagaagatttttttttagcataatggcatgtttgatagtgaaagtttgaagtatgatcaataggtaaattgaatattttattaagtttattagtgatcaatatagatgggtgtccaaggtgagagtgtcattggtttttattacaagaaacattgcaaaaagtaaaaggggtatctcgagatggagaacatgcttcctgttgaatgtagtatatgttgtcaattttattagttgtcccaatcctcattgtctaagaaagctcctgaataaaacattgattagaagtaaaaatcatgttagtagagcacctctttaatagtgagctaactaatagcaagttgaatcaaaattgtggaacataaagaacattagtaagagtgacatgcgattaataataatagttctaacttttgtaattttaactggagtgtcatcaggtaaggtaacaaaaatagcatgattat

SEQ ID NO: 211250 - DNA, 543 bp, Cannabis indica
tttgttagctattcggccgctaatgtaggaaagacctcaggaaactaaattactagaaaatttagtaagaaaagtaaaaaaaaaaatggaaaaaacatcggaggcaaaaatagcaacctcagtggtacagtttcactttcagacccgaaaacgacgcaatttctattataaaaaaagaaaataatctaatttccatgagccacattttctcggcaaccaaatgaaacaataacgaaaagagtgggagaagtaaagagagaaacgaaggaagaaaaggtacagagaattgatagaagtggaacttgagaaagagagcagcttgtgagtaacagagaagatgaaggtcagatctgagtcttgggcattggtaggaggagtagggagggaggcattcgatttcgatccttgatagaggagttggtggtgtagtgggagagctgaaatgaaatgaaatcttacatatcaaagagaattgaaaaattattaatatatttaatcatattaaaagtaatgagaattagttataaaaaaaataaataaata

SEQ ID NO: 211251 - DNA, 499 bp, Cannabis indica
gtagtattaaaatcaaattaacagatgatgacacaaattcagtaaagagtactagttcaaaagaaataatataatgtatacatctattttaaaggatccttaaaaatagtttcctacaataccatatcaaatttgtaatcacgacataattagtaaatagtattaattttcgacagtacctacatctttagttggcaaaaacaacaatgaattaaaaggtggctagctatatactaatttcaagtcgcaaagtaacttcatatgatcaattataaaaatagaatctaaaggtaaaaataatacacactgaaaaattattacataaaaatattcgttttgaacgtggtatattttattttattgatacaaattttgaagtcgtatatttctaacttttaaatattaagtgatcatcgtgcctaacagtaattttattacatatatatttaaaaataagtgtaccactaaatatatatatatatatatatatatatttttt

SEQ ID NO: 211252 - DNA, 598 bp, Cannabis indica
catgaaggttatgaatatatttttatgtactttttatcttttgattgttttgtctggtttgtttttagttttgctggtttggtatttgacttgttaggttgtgttttatatgtttttatttttgaacaaagagtttttttttaaaaaaaaaattatagaagtttgacttattttacaaaagttttaataaaaatagtaattctaatcctctttaatcttttgaacttttttttttattactaatcaacaacgtagtattccctaatttatttttaacctttgtctagaatgatagctgattgtaattcaaatacattttccatacagcaaaaatcagagcaggactaattgcatttggctttcactatcaagtaatattttagcattcaaaggttagtcattttattctgcataattacataattttgcattgattatgagacactcattgaatttgcaagctttttcttataattttttctttcttttatttacagtataagattaagattatgtatagtgagtattttgatgattgcacttttttttactgttttggtctttaaagttgtttgttgagctatattgttttgacaaa

SEQ ID NO: 211253 - DNA, 856 bp, Cannabis indica
ctccccaccaaaaacgagcaattgaactttctatatcatggaggatacctttggtaatttgaaagcagctcataacgtagcatggaagagcttgaatcactgctttgataagaatttcctttcccgcttgagagaagagaccaactttccatccttgtaatttagcttctatcttctccctaattttcccaaacacttgctgtttattttttccaataaaagtggacattcccaagtattttgtatggttcttcaccaaggaaacacccaagcttgtagctagatttgttgccaaagagtctccaatcttacatcccacacacatctcagttttatcaagattaatactttgaccggagagagctgcataagtctcaaggattgttttcaaggttaagccctcagttatattggcgtcaaggaagataagactatcgtctgcaaagagaaggtgagataatttttgctccatagacccaaatctaagaccatgaagtctaccagcccgttcagcttcaaagattaaacacgagagaccttcagaacataatagaaaaaggaaaggagataaaggatcaccttggcggagccctctttcgggagaaaatttgcctttgatagaaccatttatgagtatagaaaaagagaccgattggatgcaattcatgatcttcattatccatctttggtcatatcccaagcactccatcataaccgccaagaagtcccattccaccctatcataagccttggacatatataatttgattgccattttttttccattaccatatcgccctttcctcatacaatggagactttcgaacccgagaatggcattgtcttggataattct

SEQ ID NO: 211254 - DNA, 539 bp, Cannabis indica
tttccgacaccggtagctactcccgcgagtattcccgtaccgacagcaaactccagaaaaatcatcaaaattggcattgtcgccggaaaaatcaccaaaaaaatggtttcttcatcattaaactggtttcttcatcattgaaaaaaccaatttcttggtgatttttccagtgacaatgccaatttcgatgacttttccaacgccggcagcaactccgacgactttcctgccgccaacagctacttcggtgaattttccagcatcgacagcaaacttcagcgtttttttcgataccggtgacaactccgacgatcactgtagtttcatttattttattatttttttaaaaaatatatatatatatatatatatatatatatatgaagggaattttaatatttatggtaattcaatcccatatgttaagtttttattttaaataccatattcttttctattagtttttttacctatatttatttaaattagttttatttttttctatatttatgtaaataccactaaaaataattgtaagc

SEQ ID NO: 211255 - DNA, 679 bp, Cannabis indica
tcttggctctttttgcatctgtttgtggtggctgagatgcaaacaacataagttttgagcaagtggtgttgcaactggttgcaattgaccatgccaaacttgttcaatactttctgtaggtaggtagcttgagaaagtattatcatgccaggcttaggtctctttatatctatcctaataattctctttgctttgcctaaatctttcatctcaaacttatcactgagtttccttttcagcttgtcaacctctgactttgctttgctaaagatcaatatatcatcaacatagagtagcaagtaggtttgattattgaaatacacatatgagtcatacttgattttagtgtattcaatattctgcatataggtgtcaaacttcaagttccattgcctaggtgcctacttgaggccataaagagacttcttaagtaggcatacctcatctgggctcccattgtcaaagccctcaggttgttgcatatagatttcttcttctaattccacatgtaagaaagttgtccttacatccatctgttcaatctctaggtccatgcttgctgcctttgccatcatggctctaattgaagcttgcttgaccactggagagaaaatctcattgtaatcgatgccttccttctgagtgaaccctgtggtaactaaccttgccttgaatctgg

SEQ ID NO: 211256 - DNA, 544 bp, Cannabis indica
ttgttattttaagaaactgatatcattggtcagatttctaattagctaataaatgattggattctgtgagatagattcccacgtctaactccaacgatttttttagtgattttttccgatgacgataccgattccgacgacttttctggctctattagcaactccagtgactttccggcaccatcagcaaactccatcgacttttttggcatagcagtaactctgacgaatggctcggttgtcatgtctcaaagtctctaagaaacttgtaaaatttatatgagttttggtatttgtaactgttttttttcattaataaactagtttttgattacatagaattaattagtttattaatttattgtctaaataaaattgttttgctattgcttgagttttgtaaaaaaaaaaaaaactacttcagtttacattattttcttaaaaaagaaaaaaaaaaaagaaaaaaagaaatacaatttcaaagtttttttttttagtatttcacctcatatataatagttttttccatattaaattttttttt

SEQ ID NO: 211257 - DNA, 1228 bp, Cannabis indica
  modified_base (35)..(35): a, c, t, g, unknown or other
gtcagctcgtcggctcggaaggccacgcatttgangtgacgaggaccaggaggaggatagctttatcccaacttcgatctcagaagaggagatcgcacctgcagtgggtatagagcaggtccgatgtcttcttcggacatcgagaaaatggtgcaagagctcgttgaacttggggccattgatattcgagacagtgagtctacggtgtcagcccgcgactatcttattcactcgaggcatgcccctgacgtcgaggtcgaggagatggacgacgactagacggccccaactcgcgagtccgacgaggaggcggaagaggcagaagggagcggtactgactcggtggacgacacccagctaaacgagcctttctcgtgcgaggatttggtttagagagttacaaaatcggacctcaccacctttacgaggcttaacctgttgcggcttgcttctttgcgacctaagccgactcagagggcgcaccttgcttttactaatccagtgattatccccacagaggatgtggtaatatcaatacacattctccgatatggggtatccaaaaagtaggcttaactaacaaatcaaagaacacgaataacactcttgagattgagcctaaccatatcaggatttcgatcatgtgatctaggatcaacttagtgatattgaattgaatagatatttacggtaagtttcataaatctatttcaaagttcaatatcggtccattccaatgcatactccatgcatccaacctgagctttactttaacctatgttctggaaagaacataacatttctccaaatgcaagtaaactctgttgtagattgtcatatcagtaaaacccagtgttctgataaatctaggaatactttattcacatagtcatgtttactttccactgtgttgacaacacaataaacatgatcaagtatgtgaaaggggtttggatgaatttataaatcaaatagacaaacaattgattaagtgaaccaaaacatacacaaatgaatgaaaaatacttctgttactttattgatattgaataatctggattacattgaaatagagttttatttagggcataaaacccaacaaactcccacttgcactaatataaaacaaatcagtacatttcaattaatcctaaattctgacggtgcttttcgaatgaagttactgccaagactttggtgaatggatcagctaagttatcctgcgtgt

SEQ ID NO: 211258 - DNA, 554 bp, Cannabis indica
aggtagctgaagtactgttttcgagcaccaaagtagctagcacggcttattttttcagttagaacagctgaaggactattcagattgtttgccaaggcttcttgagcttctataaacttgtctcgagcttcattgtataggccggtgatatcctctttcttctgaacatagcagcttttcaaagtgtgtttcaccctaaaaagttgctggtgcagcgaattcagatctgtgaccttgtagttcttccacgtagtgagaacattatctttgaaatcctctcggaacacccagtgattgcaaaaccgaaaaggtttaattccacaattaccaaccttgatatgcttgactaggcagtaactgtgatctgagagggccccccatctgaagcttgcttctgtattcgggaaatgatctaaccaactttcattcgtgaaaacacgatccagctttgagtacactcggctttcctcctcgtggttgttggaccaagtaagaaaggaacccgaagtcttcatctcttcaacttgaccattagcaagccaagattgactatc

SEQ ID NO: 211259 - DNA, 542 bp, Cannabis indica
caaaatcaagcagaatatatataagtgaatatataaatagaaaagatgtcctgatccaaaaacaggtcctaaaaaaatattgagggcctcgggacgggccataaaaactatctccccttagaagataataatttaaattgttggaaaggaaagaaaagagactgtaaatgtaaaaagaaaaaaaaaataattgtgaactggttgaattggtcggcctaattaatgcgaggaggaaggcgaggcccacggcgttcttcgagcaaagcgtcaagcctcttcttcttctcccggaacttagcgagggcttcctcaagtttgggataaaaatcaagcttgatgctctggccattcgactgccaggccatatagacgccatcatcaaagcgcttgacgcaatgcttacagacaactggggtcaggagctcatctcttttggcctttttcaagccctgatctttaaaatccctcagctccttcaactccacagtcaggttggccgtcgactgtaaatccgcctaatgcagctcctccaacgactttaa

SEQ ID NO: 211260 - DNA, 658 bp, Cannabis indica
gtttggggactgcgatccaatctcgttatgggtatttgtttgtacccgtgtcaaggttagggtttaggatttagggttttgggtttagtgtttagggatttaggggtatgtgtaaaaattttaggatttaaggtttaaggtttagggtttagggtttaagggaccgcttcaagtctcggcttcaatttcgggtcacatggtatgatttaaggtttgggtgttggtctggtccaagtccttgtctgggtctaggtccgtgtttcggttcaggtccgagtcttggtcacaaatccaatgtccaacctcatgtttagtctagttcgacttcttgtatggattcgggttcttgtccgggtttgggtcttggtccaggtccgattccttgatttacacaccgattatgggttgggtctaagcatcgggtcttgggttctgggtcccaggtccaaatccagatccttgtctagttctagctcatgtcttgggtcatggttcgggtgtcaggtggatgtttgcatctaggtttgggtcttcggtcctgagtcatgggtccaggtcccagatttagggcaggatcctaggtcccgatctgtgttcggtacttgtccttgtcttgcgtcttggcttggtctagatttgggtcatggttcagttctaa

SEQ ID NO: 211261 - DNA, 576 bp, Cannabis indica
ataaatctatataaaaaaaaataatgatatgtataatctcaaaattattgtatcattatcttgtagtcgagattaagtttattgaaaatcgttgtcatcaccatatcttactcatagttgtcattattggcatcatcctatctcactccaccatttataaacaggttacatgggtcgtattcggattttattttttgacacaatataataaataatatgattaaataaatatttattcatatgacaatagagaaaattaaaatagaaaagggttaataacataatacactaataccgtacgtactaatctgatggcggcaatgacttctttgtcttctttggtttcttaatctaaaaaaagaaaaggaaacactaataaattaaatattagagatgaagatgatggagatcatatatcatataagaatgagggagaaataaattaaatttgagagataaagatgatggagatcatacatcatataagaatgagagagaaataggagttaacttaatatttatagtgtttgagacatagttaattacttatagtataaatagttaattagtaagata

SEQ ID NO: 211262 - DNA, 771 bp, Cannabis indica
agatatcaaaataaaaaaaatatttttttttttaaataatgagatttagttttaaagatattcgatctccattgttggtcttacatggttattgtttcaatgaaatctcgagacgctagatttcgtcccccttatggataattattcattaaacctctaataccgtaagatctcgaaagataaaaactttgtaattttttttcttctattaatctcatccctatggtgactatttagaataaaatttacgaatatgaaatgattgtagaagcttataaaataagaataatcttgactctcgcctactgggacaacattggattcttattttgatcgaataagatgaactgactactctattcaattgatgatatccttgactcccgcctaccaaaatattgtatatcatctagttttacatgttaacagaccactatcacgtatacaattaatatttgtaagcgaaagttatttcgccatttgtactaagaggtatggaatcgaagtcctatatatatagtttatttaattatatatattctcatatttatttacattcattcatatgttcatgctttgagttataaatctagtcttttaacttttttattctcttatttatttgtattttgagctttgagttgtatatttagagttatttgcaatataaatatttaagttttatgttaagtagtagacagtgacgaagccagaaattcggttcagtgagggcttgaataatttctttttcaagggcttgaataaaaattg

SEQ ID NO: 211263 - DNA, 511 bp, Cannabis indica
tagtacaatatttaaaaaaagaattaaaaatgataaactttttaaaaaggatagtaaaaatagaaaaagtatagagtgtaattttctactcacatatattgtatctacaacaacaacaacaacaacaacaacaagccctcgtgtctccacggctgcagcaatttttttttattattattatttttatttctatttttattattaggtctactctcttctctaccgatgatttgtcaagccatttttgcgtgcactgattcagattttcactaaacagcactacagtgcttttttaaactttagaatagaaaagttgaaaaaagtaagagagctagagctaacgaggattgacaatttgtaattttgtatctcaaacacacacacacacgcacaaaagattttgtttttggagtgtcatttcgcaaaattaggttgctgaatcagcaccatcatacttctaagagctttcttagaacgaaaggtgttagaaaagtgcaacacattttgaatg

SEQ ID NO: 211264 - DNA, 523 bp, Cannabis indica
gaatggatggattagagaggatgggaagtaggaaggataaagatgatagttactctactttatgtcatttggtattgggtgtgaaattggaagaatggagaaaaaaatattagtaaaattataaaattatctttgtgaatataaatttcagtcactttttagtaagataattattgtgttaatttttttttcttttattcattttttacaattttccaaaagtttgaggaattgaattttcaaagtttggagggtctactctcctctccctctttcacgcccttttgccaaacaaaagatttagagcatcttttgccaaacaaaaaataatttttaaaatttttaaaacataagtcacgtttggttaatattttctaaaaataatattaactaaaagtgaattgtttttcaaaacaaaaatattatttgttgttttcaaaattttatttttggtaattttattttttgtaaaattgtttttaaaaactaaggtcctaattgtttttctaaaaaattattttct

SEQ ID NO: 211265 - DNA, 529 bp, Cannabis indica
aggaaagaatgaatatttgtcgttttcatatagtagcaatgcagatttggcattattcctggttaaatccaggtgtcctcgtgaatgttgcatgttcgtccacgtgggcctaaaccctctcactgccgttatccgataactttgtcttctctcttctcccaccgaagacaaccaccagaaagtggcgcgccatcttatggccacgaatatactattatacccttctaaattcttaatgacagttttggtcttcactgatttcagttacttggtcatgtacagttacaaaatgccgtttacataaatatatacctcaaacgtctaggagagtgtcaaacgaccgacgtggaactggaacttccaactccaaggatggactacttatattattggtacatattatttaatttactctccactattttactcatagtgtgtagatttttttttagatccaatcgaatctgcacaatagctcaaatttaatttaattcagtttataaaaatatagattagatcgattatttta

SEQ ID NO: 211266 - DNA, 712 bp, Cannabis indica
tctttctaatttcttcccctttttacaggcttattaaccaaaaaaaaaaagaataaaactgatgttgatagaattttatgaccccttgttagcaatcttagcttaagaatccaagtcaatatacttgttgtagtgttcctagctccaaatataactccttcttgcttccccatgaaagaccccaaatagtcattgtgttcttcttccttgttctaacttctggttgagagaatttgagccaagatatgtgcaagctctttcctttctttcatggatttatggtaaagtattccaggaaggtttatgggcattgaattgtaatccttttcaagtatgtaataacaccttttctgatcttctctatgcaagattttatcttttccaaatatagacaacacaacaacattgaaagtgaactgaaaatacaaacagagcaaacattaattattgagtttcttaattcaccatgaaagaatgaaattgaagttttttgagagtattgactgttttcatttcttgatatgtattgatcaaatgaccttcccatgactgaaaagagtctttggctaaggtctcaatatcagagacaatgaattcactggcgtatagtgtgaaagcccttaaaacatcctttgtcgattttttgtggtaatcacattggttagagaatatagcttgtttccccaatattttttccttactagctgagaat

SEQ ID NO: 211267 - DNA, 520 bp, Cannabis indica
ccaacatgcttaaatatagagaactccctttcaggcttatctcagaggacatcactctttcaattttgtcggttaaattgagtttcaacttcccggaagtacattgaagaaaagcttaaggcttcattatctgcataagctttacaaatagatccttctagtcgagatcaatttttcacatatttttatacacagacatggctcgttcagttggatatatccacctgatgtgcgctagtccccaagtatctcttttttaggtaaatgcatgaccaagtgaaccattatgtcagaatatgctagtggaaaaatggttttcaatttgcaaagaatgtccaaaatacttttttgcatgatttgcaagtcttgaacattcaatgttttagagcaaaatttttggaaaaaatacacacagttcaattattgtatcctagacttcttatttgaaaaactttctaatgcccactggcatcaagcgttgtaacaatacatgggaatcatgagacttcacgctagaaat

SEQ ID NO: 211268 - DNA, 501 bp, Cannabis indica
attttcttctttaaacaatatctccataatttttgttaaacaatttgcgacggctaattatttaatttgtactgtttattttttttctttttcaaatcatcaattcaatgagaaatttgttcgggttgatctttatactattttgttaacaaatttgtatgtttaattaataatatagcgaactttaggtaaaataaaaaaaactaaaagaaaatttgattttctatacttacatatacttaatattttttctctaaactaatacttttctacattaaaaatatatgaccacttttccaaaacctcaaaaatacccatctcaaaaactcttttttttttttcttcaattttcttggcttttaagggtcgggtctgatgggcccgatgctcgtccgatgcccgcccgatggggcatgttttgggtttttgaaatcgggttcgatgggcccgatgccaaatttttggggcccgatgcctcgtctgatgggcccgatgcccgtc

SEQ ID NO: 211269 - DNA, 843 bp, Cannabis indica
gcagaatatcagtcttcataccatttccaatacaaattcgagcaccagctttaatcaagctttgagtttcaaaaatactacgccaaatgaaactcggattgtttcccaacttagcattaaggaaagtactatgtgggtaataccttgccttgtagatttgacccaccagagaatttttgaaattaagtaacctccaggcttgtttcccaagtaaagaaaggttataatcacggatgcttcgaaagcctagccctccaacacttttatgtttgcataaacgagaccaactaacccaagttactccccgagttttctttggattcgagtgccaccaatacttggccatcatttgctccaaatgactacaagtttttaaaggtaataggaacacagacatagcataactaggaatagcctgagccacagtcttcaataacacttctttccctgcctttgacaaaaatcgaccctcccagctttggatcctcttatgcattttgtcctttaagaaccccagaaccgcatctttgtttctccctatcgtacaaggaagccccaagtacgtgctattttcatttgcctcagtcataccaaggataccacacagtctcgaccgagtggccataggagtgtttgtgctaaaaaagatggacgacttcaagaagttaactttctgtcccgatgccatttcaaagatgttcaacaagctcaacacattagtagcctctctctcgtttgcacggcaatatatgtaactgtcgtctgcaaaaaacatatgtgaaatagtaggagctccatttgctactttgcaccctttcagccggccttgtctttcaaattgtc

SEQ ID NO: 211270 - DNA, 759 bp, Cannabis indica
ataaccaacaatggccaactgagggaagccaattgaaaaaagttacaggtgtgcatgaaattgatgctatagcaaagttgacatcctaagtagaggccatgattaagttgacaacttcttaggtaaaacagactcaagttacttgtgagctatgtggagggcctcacacagatgacacttgcccgataaatgtgaatagccaatggaacaagctaaaggcattaaaaactatcctcataacaactatggttacaaccaaggagggggctgtcgtcagaattttcaagggcagtcttcaaatcagcagtagcaagatttctaccaatagaaaatcatccccaacaaaaccaacaacaaggttctagtggaaggtctaatcttcagacagatttactacttcagttcatgacaaagactagatcttccattaaaaccttagaaactcagatgggacaattgactactcaaatggctaatcgctttcaaggtaacttgcccagtacaacagaggtaaacccaaagaaaaattgtaaggcaattactttgagaagtgggaagaagtatgaagggcctagtaagaaacaaccagtggaagaagtgggtcaggatcaatgggcactagaacaaaaagagaagaagactactgagggtcttacatcaaaataaggttcaccacctattagcattgagcaccttgtaaaaattccttatccgtagaggctctgcaagaacaacatgaacaagcagttttcaaaattt

SEQ ID NO: 211271 - DNA, 540 bp, Cannabis indica
tctgggtccaggtccgggtttggatcccactccgggtccggggtcctggttcgggtcccgagtttgggttcgggttcaagtccgggtcccgagtttgggttcgggtcggagattggtgttgaccccgaatcctttgtaaatattataatacaagctaatacagataatttattatgtattaaataatacaacatacattgtattaaaatttttggctgtaataattaatacaatacattattttatccaaacatagtgttatttattatttaatacaatacgacccttatacggcgtaccaaatgaaccctgatatcatatttaaaaatttctaacttgtgactttttataccgagaaatatatgaaaattttaataaatatcttcacacatataattttaagatggaaaaactagaaattatcaatattaattaaataaataataatcatttacacacactcaaattacatacaacttttacacataattcgaactgtacaatcaaaaaacattgctattggatattaatagtgcctaa

SEQ ID NO: 211272 - DNA, 996 bp, Cannabis indica
gcaaggcgtctctgccccaggagaatagatgagatacaggaaaacttttaactctctttgttgattagctccatcttttgattattttgttgagaaagttttcaccatttcatggtgtcaagggaggagttttcaacctattttcgaatcttttttttttccttgacatttatagtccattggaattcagcttcttcttcaccataagatcttgctggatgtgtttagatctttggtttagtatgttgtttgaacttgacatgtgttttgcatctattaatttccttcttgtagactcgcatttcattattacttttctttgttaagtcatgtctccattgatagaaagtgttacttggagaaactagtgttctggtaaatcatatgctatgctgctgtattaattatggactcaaaaatcatagattttgtgggagcaaactgcatacctggccaccaggtccagagcagaacatcgagaagagaaaaaaggaaaaattctgttatggtagtgatattgaagttgggacaaatactattttttttttctccgtgagttttgttttctgaactttatttttttttttttatggtatacgattttggatcctgtcttttacaaaagttactaattagaccttctgttttattaaataatataatagattttgtatttttcaaaattatacaaatatgattttgaattgattttttgttaaaataaatatgatctagatgaattatgacaaaattgattatattttttgtattgatttgtgttaggaattgtcttaaagttagttatattaaaaaataaaattgttaaaaattaagtttaggttttatttttatcattttagaaaatataagatttattttgtctaattaatagttttaagttcgccatcttaagttagctaaatagattttatattgcaactatacatgttctctcataatggcatcgccaaattatgtacaaattattttaaaaaa

SEQ ID NO: 211273 - DNA, 874 bp, Cannabis indica
tctagttttttttttttttttttgtatttttacggaattctacattgaaacccctattgcaactagtgctgcaacataaactgcaacaaaaaatcgtataaaaacccctattacaactagcgctgcaaccactttagaaacacaaaccattaattttttttttttaaaaaaaaaaaagttaagaaaatagtatatagggtaattgtggaaattttaatccaaagaaattcaagttaaagaaaaaattttatcaactaaatctagtttttttagttagtttgtttaggctgtacaattttttttttttataaatcaagagatttgctaatattagttcacaaaattttttacaacctaatagcaccctagattatcaggcctaagttatgtatctatacaatttgttctgtacaagtaaaataattggctgcattacaatgttaaaaaccactcttttgtcttccctggagaccttttttagccaaaacaattcaactctttgtattactccagccttcaattctttgcaaagtctcgaggtatcccacacttctttatcccagtaacatatatttctcattttccagatgtgatataccaagctaactagagcaccagctagcaccagcttcttaaagctgctaagcttcgctcttccaagccatcgaaccagactagtcaaggatttgcattgagcattctattgcagccaatccttgatgttttgcaaacacggttgggttgaattggacattcaaaaaatagtgtgaagctgactcaggctgtgaattgcatgtagacagtgttgatctacactaattcccatcttagccaatatgtcatttattttgagtctttgtaaatgctagcctag

SEQ ID NO: 211274 - DNA, 653 bp, Cannabis indica
aacaccagaatcgaggaatactcggttccagaaatcgaagctctattgttggcttctgaatctcggatagagaagattgatcttgatcaagaacctgatctaagtgctaatttagcaactatagatcttgatcaatcacctgaagtgaacattgcataccagaactatccaaatcgtggcaccagattcccaaacttcaatcgcacaacccgtggtggaggccgtggatatccaactcgagttgctaccacaggtaacaactatggattctccaacttcactaacaatcgtggtgtttccaatgtcaacagaggaggcaggttttccacaccaaccaatcgagttcagtgccaactttgccacaaaattgggcacacagtcctggattgcttttacaggtttgataaaagcttcacaggggtgtttcccagctcaaactcccccacaaatcaagcaaatcttgctcagacaactcaaacggaggacaccagttggtatccagattcgggtgcaacgaatcattgcactccaaacatgaacaacctgactgtcaacacagaatatgaaggaccagatcagctacatgttggagatggctcaggtctgtcaatcaaacatattggtacatcttttattaattccaattcatctca

SEQ ID NO: 211275 - DNA, 1167 bp, Cannabis indica
gtttcaatgtaaaaagaaataaatcaatataattataaattgtatactaaataagttaaaaaatacaaaaaaaaagagaaaaatattaattgtttgtatttaaatttataataattaacgtggtaatttttttatttaattagataaagtaaataaatataaatagaaaaatataataattagataaactcaacggataaaaatagaaaaattataatataataaaattatgacaattgataaatactcaattgataatgttttagatttttttttaggaaaaacaatataaatagatgacaataaataaatcaaaaagataaataaatttaaaaactacaaaattgagaaaatgagattctgaaaaatgtaataatatttatgtagtatttatatatttaaaaaaaatatatataataaataaaactaatttatatttattaaacaattgattggataaattattagattttatatttaaaaaatatataataaataaactaattatattttatcaaacaattgattggataaattattagatttttttccttttattttttgcttaattgttttttagattcatattacaaaaatgtaaaaaataatatatatgtacttatctcttagtttatattagtaggacatgatttttttaataaataaaataataatcatatatattattgtgactatttattttgctaaataattgtaaacatatgtgttatgattttgttttagagaatttttttatctaatatatattcaggtttaagaccatctccaataacactttaaaaacttatatttagtgtaaattttcccataaaatgtttcaatattctttttttttaattaaatattttacttataaagtaaatatttttattatattaataaaataacattataataaagaatatatattttagtgttgtggttggaattagaaaaataaaatgctaaaatagtactcttttggttatgatttaacactaaatttatgttttagcattggagttgccctaaataaaaaattagtaggataattttattgtgatgacatagttgtaatagggtaataatattatgtctagttattaagtacaaataaagtaatcctaaaggatgacatttgtctctaaattatagagagagtgcaaa

SEQ ID NO: 211276 - DNA, 535 bp, Cannabis indica
ttaagttggtgttcatgaaattgttgatgataggttgttgtaggtttgtgttgctattgttttcgttttctgagatggttttaaggatacttatgtgaatttaagttgaattagaggcttgttgtgaggtttggtaaaggtttgagcttaagagctcaaacttggctcttccatggtgattttcattttagaggttatttcttgagtttattggctagtttatgtttattatggtgtgtttaggtattctggaaagtttggtagcatttaggattgattggaccaagttatgggggttggaagattggaatttttcgtgttgttctgcccggacaaccggaattccggtttgttcagggctgtaccagccggaattccgcttggactgtatcgggtaaggccgattttagtattttggccataacttttcactcgggtgtctgttgtagacgttctatataccgttttgaagcttatgatgagctctacaatatggtatataaattagagtaaaattatgtattttattttaggt

SEQ ID NO: 211277 - DNA, 1074 bp, Cannabis indica
ctgagtcttggttcgagtcttggtctgagtctagatttaggtccagatccaagttttggtctgggttcaggtccaggtccgagtttgggtcccaggtgcgggtccaggtctaggtctgggtcacggtctcggtctggatctaggtcccaagtttcgatcccggtctgggtccgggtttgggttcgagtccaagtgcgtatccagatccctatctagatccgagtctgggtccgggatcgggtcctaggtctaggtctgggtctgggtctcggtcccggtctgggtacaaaaccatgtccgggttaggatccaagtccgagtgcaggtctcggtgcgtgttcggtactggtccttgtctcgcgtcttggccttgtctgggattgggccacggttaggttctcaggtcctatgtctcagtatcaggtccagggtcccggtcccagtcctagtccgagttctagtactaatccaagttcaggcctcggtcctagtctgggtctgggtcccattcctgatctaggtccgagtcggatttcaagtatgagtccgggtctggctctgggtgtgggtttgggtctgggtctagggttcagtccgtgtctaggtccgggtcttggtctgtatctgggtctaggtttaggtccgagttctggtatgagtttgggttctggtcaaggtttcgagtcatgggtcctgggtcacaggtactgggacaagtctgggtccgggttcggttctgggttcgagtttcgatcacgttctaggtttgggtccgtgttcggtttcgcgtctagatcctgttttggttccaggttcaattcctattccaaggtcctgatttcggttcttgttccaatttctgtctcgggtccgagtttttgtttgggtcctggtctggaaatggttctaggtttgggtcttggtatgattccaagatctacacaccgactaacggttgggtccaagcgccgagtcatgggtcaagatccttatcccaatcttttgtcccagtctcgtctcgattcgaatcctgcatctcgttccgtgtccatgtttgggttcgggtctgggatc

SEQ ID NO: 211278 - DNA, 894 bp, Cannabis indica
actatatctgtcatgatgtcgacctaactgaagtgactaacatcgttcgtgtgaatactaaaagttgtgatttagattatttcattattgatgaatatgacacaacaaaataagaaaaataaaggttcttatgtcggaaaaaaaaagtaaagagtgtccaaaatgatgaaaataatgtaatacttaataagtatgatgaggaggaggagttgtagactgaaaatattgtaatatttaactcataattaattatatcaattacatgtttcctttgttacttaactagttccaatgtaataactaattttattattaataaatatatattatgtatagaatgtttggtgtgggtaaagataatagtaagaaaaaaaaagggttggaggagcatacatggggaataatttaggaaagcacttgctgataagcccctaggggcagaatctgttaagttttttcccgtaaataaaatctatttcaatataatcagatttactaattaataaaagattagaaatcattttatgttgcatggttcacatgatttatttcatgattatatatatttaatgtataaattctcttaagtccagaacatatatacttattcataattatagtgtcctcaacacagtggaatataatcatggttatatgttcaaaagtttaagtcccataatttttcagtacactagatttagacttacatgataatcagcgataaggtatacatacaccttggataagtgttatgtccttttcaagtcattgacaaagtttaccagtattggatatatggagtatacattggattggaaaaatattgaacttggataagatatcataaacttaccgttatatctttctaagtcaatatcactagttgatcttagg

SEQ ID NO: 211279 - DNA, 812 bp, Cannabis indica
acattgacacttgacaaaccaaaatgaacggaaaagtggagaccaaaaccgagttgaagtttggagggttttcccgaaaattcagtccaaggaattaccatagcaaaccttaaagttcaaataatttaatcacaaattacctcactttatataaacataaatgtaaatgatgaaataaaaagataaatttttttttaaaaaaaataacatgttaatcatcccaataaataaacatagtggtcgagcaagaaggatttaaagaagaatacacaatgagagtgttatagcatctctaatgaaagttgctcactaaaatgctcatgccacatatacaatattcgttcaattttcaaaaagagagagagagagagaaaaagttgctattattggactgcccatgccatcactttttcaatttttttattattttgatttttaaaaaaaataatttttcacaaaaaaaatataatctattctattctatataaaatgtggttatataacagaattgttagtttatgataaattatttggtgatttttttaaataaaaaataacaaattattagatgttagcacataaagtgttgcaattgataataaatttgttcatattgtttatttttttattaaaaattattttcaaattttgatatttagaattagttaaattttaaatattattttaatttaattttgaatgttttgatagtttaaccagatgaacattttcactatattgaatattattaattttaaaattatgatattaaaaaggaaactaaaaagtataaaaactaaaataaaattaat

SEQ ID NO: 211280 - DNA, 805 bp, Cannabis indica
gttcattactggacattacctttctacgactttcctccacccgaatttcagagaaaacttcacgaattgaaggtaagggtcggcggccaagaattccgcccttaacttcatccatgttttgattaattccagcaagaagcatgaaaactctgccattttcctcacgtttcttgtgctggaggaaatctgcttggctctcccaaacatcgtcattatactggtccagttcttgccaccatgccaccatctcattatagtagttggtaacactccgctgcccttgtttggattgccatagtcgagtttttaactcgaaaatctgagaaaaattttctaggtcagaataagtttcacgaacagaatcccatacctccttagctgtcgtcataaacatatgaggcttggcaattgaggcgtccatggagtttaacaaccatgccatgacaagagagttttctgatcgccactgttcgtatcctgcctcctctgtttttggctgttttttttctccagtcagaaatcccaatttcccacggccatcaatcgcaaatttcacggactgagaccattcgaggtagttctatccattcaatctatgcacagttatttgcatagaagaatggacagtatcgatggcagtagaggtctgtgaaccagaagcggcagcaacatttctttggacagggactgatgtggagtcgtcagccatttagaagaagaagaagacgaaatagaagaaaaaaaaagagcgttcaggtcagggtattaccagctctgataccatgtagttttggtgaatattttt

SEQ ID NO: 211281 - DNA, 531 bp, Cannabis indica
attaaaaaaagtattacaaaatgtaccatcataatatttttactttttaatttctacaagttaaaatagcatagagaaagtctttaaaaatgataaagagatataattagatagatgttttggaagtctactacgaaataaatatttttagaatttaaataaaaacatctatatgtcaaatatttataaagaaaatataagaatatatcatgctaaccgtaactaaaggaaacatgatattatgaagtcatcgtccttgaatgagacctgagccagtcacacttacatagacccaaagtcccacttcacaccaattttgaattcaaatgttatctatttatagtcaaatgtagggtcgtctttgagaaaacaagagtttaattaatgagctcttaatattgttttatttttgaaaagaaaaaaaacgaagtaatataattaattcaaaaataggcatgctaaagtaaaaaaaaaaaaaaaaaaaaaaaaaaaacaaaattaaaataaaaaacaaataataaatataaaatt

SEQ ID NO: 211282 - DNA, 507 bp, Cannabis indica
ccatcgacaactatcaataatatataattctgacataagaacttccttcacaggagtgttacttaaaaggaaacaatgagtgaaatatacaacagtcaatttcaagccaagagattcatcattgccccacctagtgcccaaaattgcatcttcagtagacttatggtcaatagttttagttctaagaaagcatacatcgaccaactggtttgattcctaggtaaataacaatttattgcaatcaccaaaacattccagactagatatcaaataaaacttttgtgcactaaactgtatacaacggtcagaacctttgcccaaaattctttcaaattaggctaattaacctccctcaatagaaggttttgcacaatttggggatggaatacaaactcgagaatgtccaaaaaatgaccgaacagtgtatctcagaatatcttcaacaaattacctgaaattgtgttctttatgttaagaataacaaagtaagtgcatgtagtaacacac

SEQ ID NO: 211283 - DNA, 581 bp, Cannabis indica
tactcgctaggtagtcctttaaaaatagctccaatgtgatcgcgtgctgatagaacttctccaactgaggccaacaagtctacatgttgcttgattcgaagaagatactcattcaatccaagatttcctttcttgatgttctgaagtttggttctgaactctagtatcttggctgaaacttgaagagtaaaatatttttccagtgttctccagatctggccagcagattcgcatcccaccatgcgagttagcaggctttcggacattgaagagagaagccaggacacaagcaactggtcctgaacatcccaatcagtgtaagcaggattcaaggtatttgaagcttgatctgcatcagacaagtattttggtggaggagcagctccttggataaaatgcagtaaacgatttcctctgatggctgccatgacttgttgcttccacagcaaaaagttatggtcattgagctttacagagagactgtgattgaagaacactgttgccgattcattcgattccttccttctgccatttgcagctccaggatctgttgagttctgatgttgattgctcgagttgct

SEQ ID NO: 211284 - DNA, 580 bp, Cannabis indica
ggagaataatttattaaaaatctaaactacgtacacaatcaagttttttttttcttataataaaattatatcattaaatatatcatcattaaatgtcttaaattgttttagataattaaatacaaattttagtaaatataaactaataaactatctccctagtaatttagctgtaaaaatacctaaatattaataaatctcagtatataataatatgacttttttgtgtgtaatatttttgtaagtaacaacatcaaacttaaaagaaattgtatgattatttattaaaattataaataaaaataaaggattaaaattacttgcaattattattcattaaaagaaaaataatagttcttttatcaaaaaatataaattttattaaaataaaatttaattattatttgaaggtacctttctctcattgctcccgggctccatcctcaccaccaagtaaccggggctaatcaagtccggctaacaaagtcaagaactccgtctccgtctacaatagggtgcgccgaatggatcaaaccacccaaagagtcgctatactcaaacttcccaacagtctcaaggg

SEQ ID NO: 211285 - DNA, 594 bp, Cannabis indica
attaaaatttgaaataataaccgactttttagtaactcatcatcaaattgattaatttattaaattttgttaaaatttaaaggttgattattttttagatattttttttggatttttttttatattaattaattagaaaaaaaccttaaaagttatatttattttttatcatcttctctaaaaaggcgaaaaaaatatatacttatcaaagtgatcactttgaagagtatctcgcgatagtataaatttatgagcctaaataattactaatgcgattggagaagttttcttaaagagagaatttgtttaaaaaaaaaattggtttcttataagttattttaaaaattagttggtatttaaaatttatttttttagtaaagaaactaaaatattacttctaagtttaattatctttaccgacaatggtaaaaaatatatgcttcccgcataataaagcgatttccttagaaagtagattgaggtgatataatttttgagcttatataataactttatgttttagatagctaaatctgtcccaaatgaaagcataccccactttctacaaattagatgttttaagatttttacaga

SEQ ID NO: 211286 - DNA, 513 bp, Cannabis indica
aattagagtcaagaaaactctgttgcttttttcttttatttgttctttttgttctaaatttataataataagtctttttatttaattttagtaagcttctttctttattctctttttcaattttttcatatctgagatgcaaaaattatccggatataaaaatccgggtacaagcttggtggcaacgacatcacaattgagaagggagagatctcagtgggctattgcaacgaccttgctagtagatttgggcagcagtaacattgtgaacgaatttgagcgatgaccttagagattaatttagatagtggcgactattaatccttgttatgctattaattttttaaagattaattaattatttttttctctaaaaatattaattatttttaagaaggaatttcattgtagttgtagttgaaaaattaaaatatttatattattttatctaatattttatcattattattatttgtgtgattttaaaattttggattgttaaaattttaaaaa

SEQ ID NO: 211287 - DNA, 881 bp, Cannabis indica
ctttttgcctattcttttgtatcttgattcgttttggcttgatgctattttaatagagtttctctgtttaaactttaaaaaaaaaaaaaaaaaagaaatagaatgtccttattatattttagcagaagtggatttttcgattggaagttcgtaaaaaaaaaaaaaaaacttttaaaactataaatcctatattttgtgactaatatacattataaatgtaaatatattttattagccatatctctaaattttttaggttttagtcacattgaaatatgtaattataattgttataaagagttccaattaaaaaaaaaaattgttatacaaagagtatatcatattaaaatgtataattgttaagctctcatacctattcatggtgttctctatcttttttttttttcatgtcttaatacaacggcaagcgaagcttaatttgtgttgatatgtatagatatatattatataatatatatatacatgaaattaagtataaaatgatgatatgacactttaaaagtttcatatatctctactgtaaataaaatcgttaaataaatagttgtttatttatttatgtttttctatcaaaaggctaatttatttttaaaacataattcaatatatatgcataaaatgttattttacaatttaaaagacaatggtgttcaatagcatatttataaaattagttgagaaaataattgtagtcacgcgtacttgaatataataagatttaattttgaatattatgttttacgctctttttttagttaattaattatagtattatcgtaaaagttttaaatttgagacgatattcaaagttaaaaaaaactactaattaagtttcactagcttgcacatcaagtggtaag

SEQ ID NO: 211288 - DNA, 570 bp, Cannabis indica
ttacattttatcttttcttttcttatctctttttgtgcttgaaaaatgcagaattgagattgaatatgttgacggtcatgagaaatttgaagaggaggatggtatcaagattttgatgatggtaaagttgattccatctatatattatttttattctacatatgttctttattcaagggttatataccttctacatactatgtatatttgtataggatgcaatgtattccaatttcatctttattatatatgtttacgattatgaaaaattgttcaaatttatttataagatgtactcatataaaactaaatgatgcactaactggaagaagataatgaacatgcgtagaaccataaagtttgttgtggctacatttttaagtattaattattgtttttctttgttaaattcaattattttttgaagttttcttatataattttatttttatttaattactattttatgttgacttcataatttttatcttttgtatttttatatatacataatttatgtaaatatattttataatatgtttactctcttctttcaattcttctatatta

SEQ ID NO: 211289 - DNA, 785 bp, Cannabis indica
tatgataaagagattgagagagttgggcacctcgcctgaagcaaaccaacatcttcaaatctcaaaaaattcaaaaccttagtcgattgagaaaagaaattaacaagcgcgagcgaacaataacaacaaaggagacaattttttttaaaaaaaagagatgaattttttgaaggagaggctctacaataagggaaacgaagagaggggatccagatatttttttggtgaatttttataattatgttatttatttttaaaataagttaatataattaaaacatatagtatataagtgtataaaatctaaaatacaaaatatttatactgcacatatctcttgattaaataaacaaagatgactcccttcacatattaaaagtacacgtgtgtgtaaactttatttttaatttatatttcacgtttttctgtaaaatatttcttttactgacttaggttttttttttctttttgatgcaacctttttactgagttgttagtttatgagtaagtagcaacataagtacttaaagttttaagtttataagcgtcataaattcaatttttatttttagtagcataagtaaccaatgtttgtaatagtataattttcttctaatttcgtcaatataaaaattctattttgaatttgttaaaagaacatttagaagtaaccgatactacatgtttatgtctagactcaatgatatctagaatttgggccttatatgtactttgtttaagacaataacagagtcagcagttaagaaattaattagagaaaaatt

SEQ ID NO: 211290 - DNA, 1083 bp, Cannabis indica
attgcaaagatttagagcattacaattcaaatgctcacgcaggtcaggttgtctgtgattaactgctcaagaggtcagggtcgcgacgcctttggtcataattacttactaaccttattcccgaatagctttcggattggtagctttgatagttgctaaaactctcctggtcatctcgataataacatcgtgatcctccttcatcttgcgtttgtctatcccacccatgagttcaagttgatctactttgcccgtgggtcgttgattttgatccacttggatctgtactcgatccagtctcttttggctcttctcgcattggccttccccttcagaagaaatttgacacatgacccctacttaggtaagtatatgatcattcataattgcttacgaaacgtgaacgttccccacatttcatttttgtgcacatgggataattataaataactacttaatcgctctctttatctataagcagttatgctgactatgcttaattatcctctcccttggagtgatatctttcttaaacatctttgtagaaaaaatgtttaagtgttgactcatgatgcatctcgcagctttctttaattgttaagtgaagtataagcgagataattattttgacacgtcaagagtgaggtgaataaatattgaaattatacttgaacatacgagtatgtggatcaatgagttacacactcattatctaactgttccaaatagttttgttctatattttgtttatctcgagatggacttgtttgtctcactagtctcatcggtcaatagttattactcacatctctctattgtctatctgacagctagttcgagtatttctattaactgtttttttccaaggtgagttatttaagtgtatttaataatgcataaatttggggttggttcattttctagattcgatacacgtgttagctttatattactgctcgaaatataagtataacaacaaatatggtatacaatttttctagtaaaactgtaaaaattcctaacccaaatttaccatataattagcaattcacattcatgcacaaaatttaattctatcaattc

SEQ ID NO: 211291 - DNA, 729 bp, Cannabis indica
ccaattagcaatgagtggagtagctcatgttcttatatatggctcaattctctactatttattctatgtgggacaatgtccacaatattccccctcaagatgatggctatgtttttgctcattaatcttgaaccgtatcagagtggacatggtcactatctgtatgggtgcggataagataggatcacttgcccgtgaggaatatggctctaataccatgatgagaatcatggggttccatctcaaaaccaattggtaatgggaggagtagcagtagctcattcctcttatatattctattatctttctacacattagcaatgcgagactctctaacagacacattttttacaccaaaactttacatactacttggcaagagattttagtttgtgtgacccatgtcaaagcaatatggtagatttaaaattcttgacacataactgtgtataatattttagtgtaaaatgtgtgtgggtgtatcattacttttatcctattatccatatagatctaaaataggttagccttttgctatttttcaaaatatatggcaaaaatgttaattctattttacatctaacttttacaatatattctcattaaaaaaaacttccacaatatatcaatatcaatttttctattttattttaaattaatttaaatattatatttaacaaatattttgaatatgaaataatattgataatagaagtatattagattaat

SEQ ID NO: 211292 - DNA, 500 bp, Cannabis indica
acttgattctaatttctaataactcttcttcggtgagataattcaaaaagttatttcaagcaaaagaacatttcaatgaccattttctaggaattaaaacatacaattccaaatacacaatacatatatttattctaacaaacactacgcactaaataaaaatgaatattgaattacatataagataggaaacttaccttattatcaatatacaagttagcacattattaattaggaaatttacacaaagcatctaagaattatacttttttactttcttacagattatttgttttttcgtaaaacaatgttgttttcacattgtcatataaaaaaaaaggtaaaaaaaaactataaatccgtaaaaaagtaaactttttgtcaatttttgagtatttatgaaataatcccttattaattggtatactcaacttttgggcttttattcatatggcccatattacttaatatgggtattatctataatacagaaaattgct

SEQ ID NO: 211293 - DNA, 533 bp, Cannabis indica
atatgtagagaaataactgttagacctttataaattaattttatatcaactaatttagtatattaataaaactaaatatattataatagtttcttgaaagagctttgtattgtattgacaatatgaaacactttatccactcatgtggctcaacatgcaccagcaatcgcacgtcaagatccattagcaactacaattgtcactatggttgttgctcctgaaccaccaacatttaatgcatgtctctctgttccaactaccgctgttttttttttttaccaagcataagagaacacagttcatgttccaggtctgtgtctcctatttcccctgctactacatctggttttgttctaccctcatatcccacaaatcaccaaccatctacactatcctctcctacatcatgtcaagagccacacctttaaactcagcaaccacaaaatcttacctaacaaacacccaacgcaatacccaccattaactctcattcagtgcaaacaagatctaaatttggaatatcaaaaccaaaa

SEQ ID NO: 211294 - DNA, 1061 bp, Cannabis indica
attagatattcaatgtttgatggtcgattataattaaattaatcagttattattaaattgaatcaatttatgcataattggaagcttcaaatcccatttaagacattatttacatcaattcccatacaagccattatttatggctgtttatagattcttttggtgtgaattttcatttgttttaaatcaaactagtcttacgttgtgcaatttaacatatataactgccttaattaaaaaaaaaaacccaaagtattgcatttttaccaaaataaattaattaaatgttcaaaccaatctattaagaaagtagtttgtattttgttattgttattttgtttttgtaattattctttttttatttcaaaatttattgttcccaaatattaatattgcataaaaaattgaaatatttgcggtgaaactcttttaatatttacaattgttatacatatatgaccataattaaaaaagtaggcgggaaaaagtaccttattttattattttgttgcagttataccattttttagcccatcaaatgttaattcataaactacgtattaaataagctaaagaaatatatcgccacttgtttttgaactgacacttaatgaatttaattgacacttatggcatatttgatttgttgtaatcaacattgtaatggaatcatgattacaattccaatgtttggtttgcttttaaactcttgtaatgacattatattgtaatcactattacatcacttgtatgaaaagtgattacactcctatatctcatgaatcctcattacaattactcaaaataactatcttactcttattttatactttttcttactaagataggaataattttgtcaattcactacctattctaatatttattccaataacaaaccaaacataacaatcaattcctattacaattcttattccattacattactattaccattccattccatcaaatcaaacaccaccttaacaactaaaaaatgatacaactgcaacaaaatagtaagataatgtatttttactgccattttttttatttaaggg

SEQ ID NO: 211295 - DNA, 561 bp, Cannabis indica
caacaaagtggaacaactaaaaagtaattgtggaataatagtaaaagcttaacacttaacacaatataaaaaatacacgatatttttaaaaaaaattccgctctacagtaaaaaagaaaaaaattataaaattttagtatgtagtgtgaaaatcctttttcttagctaacatagaagggagaagttgaagaatactttttttatatacattaatcaaatttaccctcaaataaaatttaattcaaatatactttttttttatgagtattgtacccaaattatcctcacacactcacataattaagacataatttcaaacataatagatttgtgttctttgtagatggatgtgtaggtttgtaggaaaattaaggcaaaattttaattagagaagaataaaaattatcgtgaaatgatagggataaaattggtagaataattgaaaaaaaaaaaaaacataataaatttaaaataaaaatataaattaaacgcatcaaattaaaagatgtatgtagtgtaatttccttataaaatttatgaagttgaacaacactagtttgg

SEQ ID NO: 211296 - DNA, 429 bp, Cannabis indica
actcgaatttttcattgcctctgagaatgttgaagaagggtacaaatttgtctgtagagttggacacaaatatgcttaatacagcaatgtgtcctgttaggctctgtacttccttgacaattatgggcgacttcatgtccaaaagggcttggatcttgtctgggtttgcttctattctcctagtgttgactatgaagctaaggaattttccagagcctacaccgaaagagcatttaaagggtttgagcttcatgttatagctgcgaaggattttaaagcatttgtctaagtcctccacatgcccccagccttttcagacttgactagcatgtcgtccacatatacctccatgttgcgactgatgagatctttaaacatcatgttcaccagcctttgatacatggcctcttcattttccagcccaaaggg

SEQ ID NO: 211297 - DNA, 483 bp, Cannabis indica
tgtgttttacaaaaatttactaatattggaccctctgttttaataaatgacaaaatgaaccatatattttccaaaatggtaaaaataggtttctgagctcaatttccaacaatttttttttttaatataactaactttaaaacaattttaacacgaacagatacagaaaatgtaaccagttttgtcataacatctctaggtcagattattattaagttttattttgataacaaaatcagtttagggtcctatttgtactattttagaaaatacaaggttcattttgtcatttaacaaaatagagaatccaattgataacttttacaaaacacagaatctaaaatagtatttacccataaataaaatatatataaaaaatcatatttatatttaatttttacattcattgtacatatacatataatttttagtaaaatcttatataaaaaaatatattgtttattttattatatatattaaatt

SEQ ID NO: 211298 - DNA, 815 bp, Cannabis indica
atatctatgctccatcttgaggggggggggggggtattagaattcgtgtacctattctagtgtctgttagtctgttagttaattgtctgttattacagtttttactgttctttctttcttggtttatatcagctaagttagttaagttcttaactaactctgtactggtttacatcatagtcggttgtacagttgtatataaagtctggttctgcttttgtgtaaattcattcagattaataaaatcactttcattttcttttcgtaacaaacagaaaagaaaagaaagattattattattaggtactagtggtgtctaacactttttatagagaattgttaaaatgcattattagtgcctaacacccttctcggtatcataccactattagtgtaattaagtatcgtgtccatataatttaagaaaatatcttttagggaatattgttaactaatcgcagggcgtcacctatagaaggtacttgacattactaatacctaatagcaatgcttattttcgtaagttatatagcgagtgccagacccaaaatttaaagtgagggaaggtgtatttttttataaagctgggacaaaagtaaacttaaaaataaaaaaaaaaattgttgttagtagaatttgaccatttgatctctaaaatgtttgtaatttaacttaactattatactaaagttaatattatatttataaatattatcttttattacaaatatatgttgtagctaactaaatatttttacatagcaaccgctcctcattttaatgtgaatctacttctgctaacaataacaatataa

SEQ ID NO: 211299 - DNA, 886 bp, Cannabis indica
agtatatatgctctgattaagacgcaaaaagtctagattaaagttcaggattaaaggttgcctagtcagccatgtatctaaacaaaagaaaaataaaactaaatttaaaagcttcttagtcggtcatgatgtcttaaaataaaggcccaaaggccgaacagaaatacataaggataaaaaaggctttttatcaagaatatagattaatccattagagtgatcgggctcaggccttcgatggtcgcaaaaccacagcagattgatcgacctgctttgtcttttcagcagccttggcttcttcttcagatttcatctggtggcatcttccgaacaacatatcaggagcctccggcttcatataatcatagttaccttaaggattagccttccaaaactcgtaagagatctttatgttaatctctgaataagctgtaaaatcttcagcacgagcctcgatctttttgtttaaggcttctttcttggcatctatgtcatttttctccatggccacatcgacagttaaatatttcacttgctgatctaagttttgaagaagtttttgaagagtgtgcctttctccgagcagtccattagcttgcttaaactctgcttccagatcagctttcatcttgtcaactcaaggcatataagttatctgtttttacaacttctcgatattttgagcttcttgttaacttcacccaaggaaatatctttatctttgacttgcccttcgaccttttgcaattcaattttgtctgcagtagattggatggctatggccttagtgccgaagtacaaatatccgagctgaagattcatttaaagcataacagacaagttagaaaaccaacacaacataatccaaactaaaaataagaaagga

SEQ ID NO: 211300 - DNA, 751 bp, Cannabis indica
gttcacgcgttcagcttctcggcggccatgaaagtatatatatatatatataatatatctatatgtatatttatttgtgtatatatatataaatatttattttaattttgttttaagttttttttttttttgaaaggggcaacaccaaaatcagtactggagctaatggatgtgaaagatctaacactagctcatgttaagagtcatttacaggtaaaaataaattaagaaaattgtagtttttttttattttttatttaatattattattttttgaaatgattacataattattatttgatgaggaaagaagaagaagaagaaaaaagtctttgttgttgtggcacgagaaacgagtactttttttatttttagttttttgcagtgagaaaaggatagtgagtgagtgagtgagtgaatgaatagtttgagttattattattattattattattagtatgtgttatgttagttttcgaaacatgacaatttctacttttcaagagagagagaaaaaaaagtagccatcatttctcaataatagaagcaattactcatcttaccaaaccatcaaccttctcttatcatatatatattatagaaaaattcaacaataattcacctctaaaattggtttatctatgcactttttttttatttcgatatttaagatatatcttgtaaaattttaaaaaatttgttatgttgaaaatagggtttaaacggtttattttacacgtgtataaagtaa

SEQ ID NO: 211301 - DNA, 634 bp, Cannabis indica
aagtttagaaaggacgactgtctacttgagtgagtagtgtgagtatcgaatgttcgatgccctgcgtctaccgtatggtttcttttaacatgtgtcttcagtactgttgccctccgtccacgtcacccattggactcattcaagttggttgcgtccctaatttttagggagtagtatccgtctttctgactggtttaatatttacttggttccacccgtttggctgactggctgggctcgaactcggttgcggggtgatccggctaatggcccataggctcactcgttagtctatttgaaggcctcgtgaatccgtctaactgccttattggacccagtattattggattcattattgatgggctcgtctgacttgcatattggacttttcaaaaatgtcgcaaatatcaagcaaatttttacctctaaagtttgtccgtcactctctagctagaatttattttagctggagagttattaataccaaattagctgctagccaagaggtctgtctaagtaagcggtgtacgtgtgtcttgctgtttgagacaagaaaatggcctgaatggttcgagcatggtggttgaataatccttgtcgcatgcgtatacgtggctaccttagttgagtaatg

SEQ ID NO: 211302 - DNA, 620 bp, Cannabis indica
ctatcttgtaacaatacatcttcatccctcaaccacttcaacaatttctcaacaaactcaacattttgagctcctacagcgacgtgaagaatagtttcctctaatttcgtaatagcagctgttttgactcgagtgtccgcgcttatgattttctcagctgctttccaatcgttgtttagagcagcattgtatagggctacacaaatggaatgatttttctcttgagcttcttctgaaaatgtaataaatgaaattactaattaagatcgcgcaatcatcatttatttttaattattattaattagtcgcacaataaatttattcgggtggaagaaattagtttatttatttattttttgtaattttaagatcatagtctttctaacaaattaaacaaaaaaaaaaaaataccatttataccaaaactcataaattataaagaataaaaaatatatatgtacttactagaatctggtgatattagataattcaatggcctcatcctcttatattagctcccatttccaatgtgtatctttattaatattagctatagcttaattatgttatggcttttataagctagaattgtatgaatagatctctcatggaatccattg

SEQ ID NO: 211303 - DNA, 511 bp, Cannabis indica
aaaattgaaaagtaaaagcaaatttatagaacatgtttttagaaaatatttttattttttttaattaaaaaaaatattaacaaaggaatgctaaataattttaatcttaaaatgagaaaaaaaaaaaaaaagtgtacgaataagaaaaatggtgtcaccattgagtaagagagggtaataagcacacaaacgccacctaactttcaaaatggtgtatcttaagattgctaaatactcaattactaatcatttttaaaaaaaaatacactaattcttttttattaattaatcttagatttctttttcatcctaaatttaccaccaaaacacaaacaactaaataacaaataataatcttggttcccttttcgcaagatttttaaaagttaaagtgacgttaagtaatatttttttatataattttttaatcacaaaaatgaaagtagattttttatttttaaagatattatttctaagaaacaaaaatctgttttataatcacttttatttt

SEQ ID NO: 211304 - DNA, 717 bp, Cannabis indica
ttttttttttcattataacttgattagactatggaactgttaagcatgaaagtgaaagatattacaaaacaattttggaggaatttatttccttttcaaaagtttaagcttgcatgctttgagttggttcgtggcataacttgatcgggaattcaagtgatggctagctagtttgcttcaaagatttctgatttcgatgagtttttaaagctaacgaggtgttatattagaacttttgaacaccgctttcattagcatgtttgtgtatatatacacaaaaagctgtgtgtatagatttttttcaaatacacaaaaaatcttacacatagataaacccttgataagcggagctgaccttaataagtaataatattctaagaattaacataaattttctctgttatgggaaaagagaaatatgaagtgatgatgtatttgattcataatataccttaatattgaatgcatgttatatattatgattattaatttattaatttatattttaactttttgggtagatgtcactactacaaaaacttttttaatgtctttttttcttatccaataaaattagtgttgaaaataaaaatattttgaggaattttttagtttaacattgttgaactaggaaaatggtagtgagggcgatatatattttttatttttatttttaaatttggtctattttctagtccaactttattaaaaagtttt

SEQ ID NO: 211305 - DNA, 517 bp, Cannabis indica
tacttacccaaataacccacacaaaaatgcctgaaaaagaatcgcccaactcagttttggcctatctctcctgtaaaattaattcattttatcaccacaattttacatattgtatcacaaatattttgtttttttttttctttttgaaaaattgtgtaacacaaactttatataatatacataaaacaaattaaatagcaaagactaattggagtacagaagtcaaaagatttacataaattatccaaaaaaaaaaaaaaaaaccagtgtataactgtatttagatgattaaattaataatggtacctttcaatgaagaaagcaagaggaagaatgaaaacagtggagaaaacgaagcgataagctataatgattttcaagttcattccatcgttggctgccaatttgtagaacacattgactccagcatatgcaatctgaacaaccaccatcatcagagctggcttcacctcatccaaaccctctcttatacccatctctctctatatatataaat

SEQ ID NO: 211306 - DNA, 1231 bp, Cannabis indica
tccaaggcttcttaacttgaggatgaggtctcttatctagtttttgaccatttcgagttcaatggtcgcatcaattttggcatttgagcaattgaaggcagcatcctaggttgattgtcaacttaggcgatgggccctatttctagggactcaggattgttgttttctctccaagtttgcttgaatcttcgttatttctaatgatggaaaaaattcctgtaacaatttctactgaacttgatcagagacagctcaggttgacaatatgacaacctgggcgttgggtcccccttttgcccctccaaaatttattttggtccctagaaatagttgaatctcaatattttctgaaacagagaagatgctcgaaagaattcttgaaaaactccatttgaaatggcctaggttgtcaaaatgtcaacctgggcgttgggctctattttttgtacggaggaattattgtttttccttcgaaagggcctatttccccatttttgatgaagactaagaagatgtaaaagttaaatctctgatttgatacttggaaggtgcccagattgacagattatcaacctgggcgctaggtgttagggcccccggggcccccggtgctcataacttaacttgctctgattttgattctaatgcctcgaatatgtctgtggtatgtctagttgatgtcccaatgcaacttttgacccttttgcactaagatggtcctgaaaactgaaaccctagttgaggatgttaacctaggtgttgagtgaaaccctaggtgcccaggttggctttcaggttgtaggttcatgtaattttagctcctggtgcttagattaggttgctccatgtcttcatggtatagaatactgaaagatagtgggttgaattcaagttattgaagtctcagcttccatcccagagatcctgaagctaacttaggcacagggctagggtcctctcccaggtcaactgctatcactcgggtctactcaactttgtgattccatccttcatgccacgtgtcaaacattgatgtccacatcaccagggaaagtttctaggttaacattttccctcaagtcaactttacacttgtgtgaagttgacttgataacgtgaaccgagcccgttttgcttgaaactacctgatgggcatcaatttcgacattcttaggcacttgtatatgttcttcaagtaataccaattaaaatgggactttgatcacttttt

SEQ ID NO: 211307 - DNA, 671 bp, Cannabis indica
ttatttttttttcttcttttattcttttgcattttctttatatttttcttctaatgtttaggggtagaaacaactgaattagagatgttgtttgggccatcaatcgtttattctggggtagataattatgtgaagataaactgatataacattgctattcaagggcatatattgcttagatccccaaacaatgttgtgattttctacgatagcaaaattgttaaatatatcatcatcattaatactatgatgaagcatgaatgtacaattttttataagacacactgacacattaattgaaaaaatatacaaatgtctcgtgataataaattgatttcagcattatgtaattaacttttttaatttgttttttcaatagagtttataaatagttttgttgcgtttggatggagttaatgaaattgaatgaaatagaaaggaaacaattttcattacattgctttgtttagttgtattttaaagtattggaatgacattccaatggaatgctttttctatcattttagtggaatgactattccattttaaaaaggaaggaaaaaccattccaatataataagagaaaaaatttaatgttttttttattaattttttatgcattttaaattttattctattccttttcttattctcagtcctatttctatatt

SEQ ID NO: 211308 - DNA, 1059 bp, Cannabis indica
atattaccaacttatcgtaaaaggtaacttctaattgatactaaaaacactaaagtccaataacaatgtaaaaaagatattgataaataaaagaaatgaaaaggaaaaaacagctcatgaagtatttatttggagtttaagaaaccaccaaccaatctttttagccatatcagaagatttgacaaacctagccaaccatactatattttaatgtaaatgactgttttgggatgctctctaaatattgtttcaacattagggtttagggcggctctttaaatgtttcaacatattttgaagagttttctcagttttagttttttttttttttgtttagttataattgtataagttgtagttatttaagagtaattataatttttttaaattttttaaataatttataatgttaaaataaacactatatgggttttatttttgaaagggactgaagatgtatctcccgctgaaaaatgtattcgaagtatgtttgactttccattttccaacatacagaagaatttaagggatttgttctggatcatataacataagataaaaacacatgcagattaaacaagttaaaaaatattatattatacatggatagatttattacaaaatagaaaataaataaattaatgatatcgtaagtaataaaacttccttttctagatggatcccatccgatatgattttgtttaattttttttttcagagttcaatatatgcatgtgttttcacccttttgaaaaaaaatgtcttcaccgtataaaaaacaagagaattactatatatactgttattttaatttttttttaaatttatgtttgaatttttaaagtgattgtagcactagttgcaataggggtttctataaaattttttgttgcaatttaagttacaacactagttggaatagatatttttatgtagaattccgtaaaaatgcaaaaataaactatttgaaaatgcaaaaataaaaaaacccataaaaaataacataacaatctttttttaatatataattttagaaattttttttttttgagtaaaata

SEQ ID NO: 211309 - DNA, 670 bp, Cannabis indica
aagtgacatttcttgtagtgttacccgacttcgccggtgcctggatctcgtgataatcgtgacggttcaagacttggctctaatgtagatgattttatggaatttagtgatctgaacaatgataattagatttttaattaaaaaaaatatatattttaaagttttttaagtacaattttataattttatttaagacaatagtagtgtgtattgttatagataaattaatattataaataattattattaatatttgatttcttaaatttaaatacataaattcattaataatatatttttaaaaataattattatatataatattacaattatttttattatataaatattaaaaattgaaaatattttttttatataaaaaatattaatactgacagaatactttggtgggtacgctggtattattatgtcagcatgtaaaggacagaatttaatatcgacagaacctaccgctattaatctatcggtatcaatattattactggggaaaacatattttggtcgctaataatagtattagcaacctattattaccggcggataccgccaataatactaaatactggcggtttttataaatagtaccagcgaaggtgtccacagtacaactcttaaatgttgtagtgaaaattttataaaaatataaaaa

SEQ ID NO: 211310 - DNA, 616 bp, Cannabis indica
tttccatcttatctcacactgatcgcttgaaaggaatcatttttattggtgcccaatggccattgcaaaaaaaaaaaagaacaaattgcaaaatttccaaatacaaaaccgatgaaaatttcaaagttgtactgtggtaatcaatacccagaactgctatgcgaatcaataaaaaacttgaagaaatcaataccgaaaattggaatgtcgaactgtacggatgttgtgcatataaaaattgtatgaacacctacgaaaaacttttgggactttgccccgaaccccgggcagggggcgcgctgccccttgcgacccctagccaactcatcgtagggttggatccacgaaagctgtgattacgcttaagaaattcactctcataaaccttgctctgataccatgataattatttgtgaagagaaataacaaataaagaaaaataccaaaaaaaaaattagagtttcattcaattgccaaaagtcaaaaataaaagaatacaactaataagaaagccttatataagaaactagcataaaagactaaaataaccttaaataactatttaacagtcattggtcttcatcattgtcattcatgtaccaagcttgaagaactt

SEQ ID NO: 211311 - DNA, 788 bp, Cannabis indica
tcctgaactaaacttgtatgaaaatattgcactaaaaaattagcaataataataataatatgcaattctcttgagttttcagcttttttatggaacaaaaagaaagacaacaacattatgtacataaagtcaaagaaaaaaaaaaaaaaaaaatcaagcaccattgagaatacatacttaattgacacaaaccccttataaaaattttcttagaaataaaattgatcgaagcaagaattttagtaaaaacatatgttatttgtttgcgtgtttcaccatattccgagacaagagatttattttctacaagctctctagtttaagtctaagaaatgtgtgatttagataataacaattatcgaaaattctataaccttttaacacacaattcttacccttgtcaagcacatttgttaggttttataccctaaataaaattctatttcaatgtaatctattttattcaacatcaataaagaaacagaagtatttttcattcctttacgtatgttttggttcactttatcaattgcttgtctatttgatttataaattcatcttaaacccttttcacatacttgatcatgtttattgtgctgtcatcacattggaaagtaaacatgactatgtgaataaagtttcctagatttatcagacacagggttttactgatatgataatctacaacaagagtttacttgtatttggagaaatactatgttctttccagaacattggttaaagtaaagctcaggttggatgcatggagtatgcatcggaagggaccg

SEQ ID NO: 211312 - DNA, 646 bp, Cannabis indica
tatctattataactataatatacgttattgtttttaaagaaaaacctaaaatataattcgaaaacatcctttggaaagaagtaaaaatagtgtccctacctaaatttttcaagatatatatatttatatatattatatcaacttacaaatccaaagcctccaactttatatgttggtggaatcatagtgaagcccttgttgcaatgtttggcaaggaagagtttggccaaagaaatctcaagaaaaacaccagcaacttgtttggttcttagggcttgagcatactcatcttgtgtgtcgaatttcctaatttgatttggatggtatttcaaaacttttactaagtacctttggagataagaacctctgcaatagccaaacatggccttactactctgcagtgatccaatgtccggttccaactgttgtacagttagcatgcttgcaaggttggctgtgtatgtttgtgttatcaccaatgctacaaatagccatactaacattgtcattcttgacaaattgctatgtaacctatcacctataaaaacatttttatatacataattaagtcaattatttgtatgatataaataaattaatgatatatgaacacaaaatatataaaagtggacctacaattaaaaaa

SEQ ID NO: 211313 - DNA, 613 bp, Cannabis indica
tctttataataagattatgtattacaatatatatttgagttaatcgtaaagttagcaaaaagtatgaagaaaataatgtgagagtgatggttcaactacattgtgcgtaaaagagattttgtctagacatatgatgtgagaataaaaatactcaataatcttaaaaaaaataaaaaaattcaaagtaatataatttcaaactgtaaaagatttagtaagaataacatctaactagggagataaggctaaattaccgaatagattaaccattaatgataaactaggcaatgaatgtatgtattaaatttaaaaggagaaaaaggagatgttagaaaattaaaattatatccatatatagatatataaatatatagatagatagatatacaaattttgttatcaattgactagcttgagacattatacttagtttatctaattgtaataaaataattaaatattatttaaaaataattaattatttaaaaatttattataagaagaagattttaatttgtgtaaaaagaagttttaattttgtaataaataaaattttattataaatattataattatatagtttaactgtcaaaataattataataagaattta

SEQ ID NO: 211314 - DNA, 629 bp, Cannabis indica
catatgtaatctttgaggtgaattggtttggaaatatggcgacctgtttttgtgacagtaggtaagttgttaggagctgctggtgtagatgtgagattttcagaggaagaagaggttgctgtggggattggaaggccaggaggaggtgctgcagatgaagttagagtgtttgcaggtttgctggctgcaataatagtgttatctgcaagattttgtgctggtttaatattgacagcagaaggaatatttggtttatttgtaacagcagtagaagactggtctttatttatagatttagtgggaaaaaggatgtcgaattgagaattttgaatggagcctttgaggggaaatatggtttcataaaatataacatctcgagagtgaaagatgttattggtggcaagagcaaggagtgtgtaagctttcattccttgaggatagccaataaagatgcaagcatgtgctcttggagagttagaggcattaccagaaatattcgaggcaaagactggtgcttcagtaggtgtttgttgtagcttctgactgaggagagaaatgagagattgaatatcttcattcttagtcagattagacaaaaatttttctgatggggcagtggcattatgagc

SEQ ID NO: 211315 - DNA, 635 bp, Cannabis indica
atgtctttgaatagaaaaaattatcataataaaaacaataatcatgccctgaacagtaaaaactaccgtttacctgttaaacttgtattttatgtattacacatcttaaattttaaaaagcaagtttaaaaaaagaaacaaaagggatatgggccagtgattgctattatgttgttgattagaggatcatccctaataatttcatgcacaagtttaaaaagtttttttgatcccctaaaataactataatcaactaaaaaaagaaaaaaactaacctcaaggcagttatgtaagaaaacataattaacaattataaaaccaaaaaaaaaaaaaacgaataagaagaaagcataggtgtcggaaattaccggccagaaatggtgatatccagatgcatctgactgccataagaaattcacagctctaaataaaaagctggattcagagctatcagttccattagactttaaaacctccattttcatacctctttccgccgaagcaaacacgaaagctaataagaaattaagcatcatcatcaacactggatttcgacatcgatctcaaaccacgcttcactccagccacgtccattttgatctgaatctcgattaactaacaaaaaaacaaacctc

SEQ ID NO: 211316 - DNA, 788 bp, Cannabis indica
tttttcttttatttctaacaatcaagaaaattattttttgttttcaatagaaggagaacaatcaagatgatgaaccaagacttggtgagattggaccgctttgatggcaccaatttcactaagtggcaagacaaggtgaggttcctccaaaccacactcaagattgcctatattcttgagtccactttggagcccttacccgcacctaccgacaaggataccgataaggtcaaggcacaaaggaagaagatagaagatgataatcttcaatgtagaggacacatcctcaactcactctcggataggctttatgatctatacactgacactaaagatgccaaaaaaatttaggatcaccttgaaaagaaattcaaggccgaggaggaaggtaccaagaaatttttaatttctcaatattttgatttaaaatttcttgatggtaaatctcttttacctcaaattcacgagatgcaagtaattattaataaattgaaagtactcaaaattgaacttcccaaggtattccaagtttgtgcaatagtggcaaaattgccaccatcttagaagaattatagggagagaatatttcataaaaatgaggattactctttggaagaaatccaaaaacatattccaatagaggaggaattgatatgtagggataagcttgtggatgggtctaatgaagagacttccaaagttcctaataagaacaaggataagaccaaaaagagtaataccttgggtccaaaaccaattcaaaggggaaaaggtccatgttttgtgtg

SEQ ID NO: 211317 - DNA, 1023 bp, Cannabis indica
aaaatattatcttttaattaaatacattaccaaataatatatttaattcaaaaattaaaacttaattaattaatttgatttattttaataataaaataatcaaataaaattagcatgagctttatatgtcaccatacacgtatgaactatattttaaggtacaaaattaatttctcaatcttaccaaaaataagatttattatttatttttccaataaataataattagttaatttcttattaatattttattacaataggactaatataaatattattttcactaaaataatatagttctctctttaatattatttaagaataatattatatttaactaattaatatagttttatcaaataaaactaaatagttaaatattatttaattatacaattcataattgttataattattcaaaataataatttcctacaaattactattttttccttgtagagttatttttcaatagaaattaattctcactcaaattttctcatcaaattaaaccttcacttgtacagtgttgtatataggtgacttgggatcatggagctatatttcgaagctccaataaacatttaactattattgatctcatccatagaataacccggtttattaattctaggggaattaccacatatactattttttttttctaaatttacggtttgggattctaaagtggttgcagcgctagttgtaataggggtttctatacaattttttgttgcaatttaggttgcagcgctagttgcaataggagtttctatgtagaatttcgtaaaaataacaaaaaaaactagatttgaagtgtaaaaatgaaaaagccccttaaatctattcattaatccactataaatatataattggactctttaaaaatataaaattatacttacaaaattcttactagtagttcattaatataatcaatataagtagtttgccctctccaattatagagttggtcaaagttacccttctaattatctcttgattccttttgtaccattt

SEQ ID NO: 211318 - DNA, 599 bp, Cannabis indica
tgagaatgtataggatatgcctttgaaaatgtctaactcgcattctctactcgactcatgcaagctgctctcatgctggaagctggtcaggtgtcctcgcgcgtcctggttgaatgttctagcctctgatgactttgagtacctaatctccttgcacaattcattaagggtagaatcttctgtgcaggtgatgaagtctgccacgtgtcacccaagtagatgccacatcactttgtgtagaaatttgaataattctagcgcgaacatctcaatctcatacctagctagcccttggacccaaggaatcagaaccctagcccttggatcgggcatctcaatcacggacctagcccttggacccaaggatcccaatcttggcccaaccaactttctcttacatgtcttttttagtcctcaaataaatgaaaaaaaaatacaattgacctttatataaaaataaaattctacttttttctataatataaaaaaaaataatattacacacggcaccttaatcttacttgaaaaaaaaaaaaaccaaacaaaacaaaaatcgtatatgcagccggggaacatgaagagcactaacaattttataa

SEQ ID NO: 211319 - DNA, 705 bp, Cannabis indica
ttagccttcccaaccaagataaggtcattcgtgaagaaaatatgagaaatacttgggccattccgactaattctaatacccttgatcttgccttttttcacagattcctcaaaaagtctagataaaatctccgcaacctagatgaaaagatacggggaaagtgggtcccatgcctcagaccacaagagggtttaatttttccaacctgacccccattcaaactaacattgagagaagtggtagaaatgcattggtcaatccaagacatgatcaacaaactgccagttaagcttgtcataggctttcataagatcaattttgattgcaaagaaaccctttatgctcttttccctgttaaaagagtggatgatttcttggataataacattgttgtcttgtatatccctttcaagaacgaaggcagcttgagtggggtaaataattttaggtaggatgggcttaattttatttgcaatgatcttggaaataactttataagaaacattgcaaagagatataggcctaaaatggtttgtcctttttgggttttgtgtttttgggatgagaactaagtttgtagcattgatccccaagtgcatagagttggtgtgaaaaaaatctttaatcatttcacaaaaaatcaccaccaacaattttccaatagtgcttaaaaaagagaatagacataccgtctggggaaggcgc

SEQ ID NO: 211320 - DNA, 642 bp, Cannabis indica
tttttatatatttttagtttattcatgataattttttttttgtatgtgtgttgctttatatgtaaatataatatatttaatttatttttttgtacacattttttttttaaaattacaatgatataagattttttattttaattgacatgatttgtagtaatagatattaatatattaattatagattatctattatattatatacctattttgaaatcataaaattttattatttctattattaatgtaatatttaattaacttttttaaaaaaaatatatatcattttaacggtctctaactcaaaaagaaaagaaaaaaaagaagttaaaagtatgaaattgtaatgataaatttcataaaaaataatgtaatagtaaaaaaaaactaaatcaaattgtaaaaactaagtaaaaaacgaaattcgtagtacaaaatacattgagaagttgatagtgttttgcatatttcattgaagttaatgttttgtatttttcagttactttgtcagttatttttgttttaatgttgtttgttaaattatattttttttttttacttgtaatatatattttgtatttaaactactacacatatttattaaattcgtatgtaaatatatatatatataaaaaaataact

SEQ ID NO: 211321 - DNA, 1043 bp, Cannabis indica
ccctattttaactatgaatttcaatttactaattatctccatttatcctataatttgtagtttcaagaatccgaatggaacctattaacctctctcgagcgatgatagatttaacttagaataactaacacgatatctctattcaatgttaatcaaataagcactcataaagcaatatgattctttttaaatgaaactcatagaattagtagaatctctcaacctcacacttttcctatgtcatacaattctaagtccgattttagattacctctctcaagcgtaaaatctaaaatctctatgctaattaatggtgatcaagcattaagaagatgataattagcacaaaattgcataaacaaataacaagaacaaatatgagaataatctaaaaacttaaattcataatctaaaatagttccatcaacactctagaatgagtgtttagttcataatcacaaacataataaccataatagtcatgttcataattaaataactaaacaaagaataaagaagaagaagaagaaaagaactcttaatgatgatagttgatgatgattgcttgaagtttcttctctcttgctcttcaatgtgttttttaatctcaaagttgcttgtttttatctctctagtcgttctttcatatgatttacatgcttctttatataggccaataaagatagatcatgcctcttagaattaggatattttttagaaaaatgatgaatgctgcgctatagcgcccataccccgtgctatagcgcctaagaggaaaaatctcgaacccacgctctaattatctttttttcgtaaaaaatcatttttatccagccgggcgctatagcatagaccccctgtgctatagcgcacaacaccaaatttttctacttcgaccttgctcagtaaatcatgcataacttttgcattcggactccaaattagatgatttagcatgttttggaaagatgggaacgagctctatcattttgggtcgtataagctctacgagaaaatgaagaaatcattgtcgaaaatgggct

SEQ ID NO: 211322 - DNA, 862 bp, Cannabis indica
caaaaatatcatggcaaggttaaagctgtggttgattcagtgaaggatgcaggagtaaagctgctctaaacataggtaaggaccaagaaaaatgaaatctacttttcttttttttatggtttagtgtgggaaaatcattttggtcaaatgttgtggggaatgtagttgtgtttgatgaaaatagttgttgtaattgatctactgtgcttgatgagaaattgtactctacaactcctttaaattggaaatgaaaataagcaaacgaacaaggtgaaatcattttctttattggcaaatgaaaatcaatttgatgtaattttatcttactacagtaaaaaaaactgtatagatggaagtttatgtgataactacaggtgatctagtctataatttaaaaaacttcatcaaaatagtatctattttactttatatttttagattaaagtaatttacggcgtaaatacctaagtttaacacccggttacaaataatacttaactttaatgtgtgtggtaataatacataaattatatttttggaatgattgcaagacagtctttaattggtccaagttgttagatttttattttttatttaaaatataattgaaggatataaataagaaaatgacatgtggataatgatttgaatacttaatagttaagtacttatcgaagtttcaaattagttattttttttttattttttttttttttgaaaattaacatttcatagattaaaaaattagacctcatggtcattacataaaatattttttggaattgttgacacctcgatcaaaccagatagtttgttggcatacgtctaattagcctcgatatgggctacaaaattacaacac

SEQ ID NO: 211323 - DNA, 506 bp, Cannabis indica
ttatatcacactgaaaaaatctatgataattaaaaaactgtctccaatccgcactattactattcctaatttttgcatttaaattagtctccaacattcatgtgtgtgtgttttttaaggaatatacatgtgttttggtgcaaattaaaagagaaatgctaaaaggtaccagtggtgctaagcactcacttacgtgtgaatatcgctattggtctaatttattatcgggtccaatatagtttaatataatagattttaagaaatatcgctagccaatcgcaaggcgacacgtcttaagggtgttaggcaccactagtacccaatagcaatactcaaattaaaaatgtctttaatttgaatgattctttcaaaagaaaaaaaaaagaattgcactaattgtactaactatgaaggactatcgctaccaaaatattaaaattgaggaactattcatattaatgaataattgtatggtatatatttttatgggaaatttgacattttat

SEQ ID NO: 211324 - DNA, 690 bp, Cannabis indica
cgtgtatactgtgtccacgtggataacctaacatgacagttaacaactaaatttggatggaaattataatttgctaacagtattatagttttagaaattttaccgacaaaattcgggttttaaaaattaattgcaaacaaagtaaaactattagaagttttactgcaattaaccctttaaattattttaggtaaaaaaaaataaagagtaacatgatagatgcccctatatgtaagaaggtttccgaactaggctaattaggatttttgttctctgaactttgacatgtaccaaatcatgcctcctgaactttaaagaccattaaaaattttccctgaattattgagattgttggatttaaggacttttgtctaattttagtaagaaaagtccaacaaggatgaaaattcagaaaacatgatttgacacatgtcaaagttcgaggtacataatagggagcatgatttagtacatggataattaccgaattagtaaaagtcaatgaaattggacaaaagtccttaaagccaacaattccaataattcaaggggagtttttaaatgccaaaaaagtttagaaaatatgatttgatacatgtgaaaattctggggcaaaaaatcctaattaacctccaaactatatataagttgaaacgttttgccactgaaaacacttatggcatgtttact

SEQ ID NO: 211325 - DNA, 680 bp, Cannabis indica
atcaatgaaccgtgtcattaataatttatcacccaaacactaagcgatttttctgcctctaccaagcactactagtatcatatatataatttaatagaaataaatattacttatcgttttttttgggttcaaaaaaaagtaattatttaactttcaatatatattaaatattcaagtgaggattaccaaattataattcagattaaatttacattatttttggtaaaacttatgatttaatggaaattataattaagattattaatcaatttagtgttaatttacattagttatgacaaaaagtcactacaagaaagaagacttttgcttgcgtcgataaaactagacacaacgtttctagtgattttttgtcggtgcattcattagcagacataatgcactagtaaccttttaccagtgcatttataaatacgttggcaattcttaccgccaatattttttttggttaaagatgattttgctggcgtaaattgtaattatggtagcaaaattgctttacaacgtcacatttcttcactcgcaaaagtagctcgccattactaagtgttggctaataatcactgaaaagttgcatcagtgcaattatgcatcggtgaaagttggcaaggttttttattggtgagttatggttaactggcgcatctgtaatattcagacat

SEQ ID NO: 211326 - DNA, 850 bp, Cannabis indica
tgtacaccaaatcgatgttaaaattaatttgttgaatggtgaattaaaagaagaaaatttacatgaatcaacttgaaagttttgttgtttctggttaagaacataaagtatgtaaagtagataaatttttgtatggtttaaaataggcaccaaagcaatgactagagaaattttataatcttgtcatctcacatggttttaaagtaaataaaagtgacaaatgcatatttattataaatctaaaaatagtgtttgcactattatatgtttatatgtagatgacttgctgatttttggatcaaatattcatttcgtgaacaatatgaaaatttgacatgaaagatctaggtgaagtgagtgtgatccttggtatacaaatcactaggtctgaaaagggaatttctttggatcaatctcattacaatgagaagatcttaaggaaatataaataatttaattgtaaacttgcatgaacaccatataatcccagtgtaaaattattgaagaacactagtgatggtgtaagataatctaaatatgcgagcatcattgacagtcttcgatatgacactgattcgagacctgacattgcctatgtcatggtattattatgcatgtttactggtatacctagtttaaagcattggcatgctattgaaaggatggtgagataccttacaagaaccatgaaccttgaattacattatcaaaagtttctaactattcttgaagggtacaatgatgctaactggaaactttatcaaatgactccaaggcaacttgtggctatatttttaccatagctggtgtgactattttattaaagtctaagaaacaaactacggtggct

SEQ ID NO: 211327 - DNA, 914 bp, Cannabis indica
tttaatttgtgtttttatattctgacagatagattgtttctgaatgtcttaacaatagagtatttgaggttttcttggcttatctctaaaaggatgcaaatcatgcttactggaaaatcagcttgatagttgaagatgttcaaggaaagaatgttctcacaaacttctgggtaagattataaacctcattattttaatttcaaaattatttatgtttacactatttatttttcgtcaatgttttatgtatttaactataactatatccttaccaaaaaaaactagaatcatgcaaaattatatgaaattgacatcaccattaaccacagataagttgaggtctcttgtcttaaagagagagaaggcttatgtgcaagtggcatacactaattaaggctcatatggatgtcaagaccactgacattgctttcactcttgggatgtctgcattgctttcattatatagcaggtcctcttgacctggattcattgaataatgttttctttcagttattcattctaaaaatttcatttaataattcatcccctttaatgtttttctttcattcaaagtggtatatgtctttttaattttaacttcgtactttttctctttaatcaaaacttaagatatagattttattttaaaaaaaatatcagcacctaactcatttttattaactttcaaattcaaaaattcattattgctttttaaaatattacttaatttttgttttatcaaaattatcatgctttctatcattatcaatactcaatgaaaataagtttatttattttaaaattacatatgataattttctaaaaaaaagaaaataaaaaacaaaacttaaaactatgcatacgtggcttggcacctaacatctatgtaattagggtgccaagccaccatagct

SEQ ID NO: 211328 - DNA, 681 bp, Cannabis indica
aaaaacaaaacaccatttgagtgtttattcaacaaacaaccaaattatgaacatctaagaactataggatgccttgcatttgcctccactctctctgctcacagaaccaagtttgcacctcgcgctcgtacatgtattttcatgggatatccccacggaataaaaggatacaagttatttgatattaacaccaatcaatttttcatttctcgcaatgtggtttttcatgagaatgtttttccttttcacaggctcaataccgacagcaacaccattgatcatttctctcaaattgtacttcctagcaataatattcacgacactcatgtatctgactatcccacagaacaacatgccactacttcccttcctgaaccagttcatacagaagagaacaacaccaattcaaacacgcatgtggcttctgatatagcagatagtactactggtttgacaacaccaaatcctacttcaaatcctccacgaagatctactcgaaccaccaaacttccatcatatctcagggactttgaatgttactcgacaattcaggataaatcgtccacacctcataatatttctaattttctttcttattctcaaatatcagacacttacaaagcctttatatttgcagttgctaccatgagggaacctaaaacataccaagaagccattcaa

SEQ ID NO: 211329 - DNA, 752 bp, Cannabis indica
tgacaattgagcacagaggacggtgaggctaatctgtacattcgctgggaaacctctaactcaagattgatccactttcccttttcccttatatgcaccacaaatgtaatgaccacatgattaaaatatagattagtaaggcaattagcactaattatttttattttatgattttatatggatatatatgttgtgggcccatttttagaagatgggcattagagttaaaaaatttcaattctaataattttattaaactctaagtgtattatttttgctatgtgtgaaatttgtgattttaatgacttttgctcgttaacgatagaaaatgcgatggatgtccattagagtcacatgggtgagtttagaacctttagttaggggaacaattgaatgttagattttgtatattgggattaggcagggtttggatattggactattttacccctaagccattttgttatttaagcacttaagtacggttaattttgactttttattttagtgataagtggattgttacactaagcctacaactggccataggataagcctaatgttgatattcattcatcaaaaattaattaagtaatttaacctagtataagacaaaaatcaaaaacatttctagctctttctctctttctttcctacggctgaagcaaccagggaagaatcaaagatgttggttcatccaatctcagttgattaataaaattttaaggggaattggaagctagaaactagag

SEQ ID NO: 211330 - DNA, 677 bp, Cannabis indica
gagtgcagtaaaacaaagcaatgcttaatggaaatttcacattggcttggatggggagggcaagccacgactgagctgaatcgtgtctccaagtggattaatcgaaccaaaacctgtaggttttcaaggaaagtgatggttgctggtttagctagccttgtttaccatgtgtggaaaacgaggaatgagttaatttggcaagcaaaggagcctaattgggtaaatcttactgccaggatcaaagaaaatgtaaaacaaagggtagtttttgtatggcctaagaaagttagtcaaaaggatgagatttggtttaacaatttgtaaatttatgcatagatagacatatcaaggccttagcaaactttgttagggtgcttatagtttgtacaaacattgttgtgagcaataaaaattatactgattcaataaaaataaaaaaaaaattaaaaaaaaaaaaagcaaattattgcaactgtcaaaacttattatttggaatgaggcaccaatttcaaataaggaagcaattgaagctttaaaatacatattgaaagaaataaataatcctagtgtcccttttgttggtaaagtaatagtttttggaggtgatttatgcaagatattacctgttgttcttaaaggtacaagacaacaaatgattaatgcaagttcagtgaaat

SEQ ID NO: 211331 - DNA, 576 bp, Cannabis indica
ggactcagacacttaagtatgtccaaactatggttcatggggccgtacgagcgttttcaccctaaagacctcaatccgccaaggaaaccaacaaggacttgactcatttgagcatgaaaatgcttaaatttgtgcataaagtcaaaatgacataaaactcccatggaatagagcccatgcgccgcccactgccatatggagatggcagtgctctccaatttttggagaacactgccacaaggagatggcaatggtcgtcacctacaaagcactaaggggaaattgtcaaaacgtattccctaaacaccaaggagtgcaacacaagtgaaagaaaccatttctcaccaaggaacaaacatagacgatcactcccatctttgtggcacaatgagtggcagtggtcagccataaggaaggaggatgagatttcttgccaaaagtatgttttcaccaataatatatcaaaactaagtgaaagaaaccatcaagtagcataaaaatatatatacacaaaattaatcaattataccatataaaaattaaaacaaatagatatttaaaataaaaatttacata

SEQ ID NO: 211332 - DNA, 595 bp, Cannabis indica
tgaacctcatcgatattttgtaaaacgagtcgatgtgcttcgtctctatcacctcgactcacctcacaaataacaagacccccaccccctttacttatttcattatcaaatcgaggaggacacgatccaatgctgacaacatttgccaaataatctacacaaaattctattgattcttcaacgatatatgattcaacaatggaaccctcaggcctgtttctatttcttacgtaaccctttaaaattttcatgtatcgttcaaatgggtacatccatctcaagtacacaggcccgcataactttagctctctcaccaaatgaacagttaagtgaaccattatgtcaaaaaaggaaggtggaaaatattgttccaagtaacacaatacttcaatgatttctaatcggagcttctctagcttggtcacgtcaaccactttacaacaaagacacttgaagaataaacataaccttgtgataacatgtcgaactttttttggcaaaacatttcgaatgctcacaggtaaaatatgttgaatcagtgtatgatgatcgtgagacttcaggccggtcaaaataagtttctcaatattaacca

SEQ ID NO: 211333 - DNA, 645 bp, Cannabis indica
aaatataattcatagcgatatgtcaccaccttatatttcaacttatatagatatgtagatgataatgaaacttcttcgttataaaataagttagagtttacaagtaaaattatatcgtcttccaatcaaagaaagccttctagtaaagtatatatttatttaatatgaataacatataattacataattttaagaattaaagacattaattattactttactagtaactagtaactagtaactagtaatgcatcttttgcctttgtagcaaggataaaatccacctcaagaacaatctcttgatttattattttattaaagaaatatcttaataataaactgattactgatttaagtccttcagtacatgtaaataattaagcttaattacaatttcataaaatcaagataagattttccattaggttcattggaaaatgtattcttcacatattctttatttgtaactgttttgtatttgggaggattttgtggagtgatcaagcttgaggctgggcctatatcatattctaaatttggattaagaaatgtagcaattgagagcctttcctccttagggtttactacaactctgtgctcaatgctagggtatagtccatttgttaaaatctgcaagcaccatac

SEQ ID NO: 211334 - DNA, 535 bp, Cannabis indica
gtgtttcccatgaagaacacaaaaccagtagtgctctttctatcgtccaagtctccactccaatcgctatcactatatccaactatctcataattgttagaagatgaataaaataggccataattggtcgtacctttgatgtaccgaagtattctctttgtagtttttaaatgaattgttgttggagcttccataaagcgactaacgattccaacagcaaagagaatatccggccttgtacaagttaggtagcgaaaacttccaacaaggcttttgaaaagagttggatccacttttcctccttcgtcatgctttgacaatattgttccacattctaatggtgtgctaactggattagaatcatccatcttgaacttcttaagtacttccttagcatagccttcttgagtgatgaaaatgccttcgtcttcttgcttcacctcaataccaaggtaataagacatgagcccaatatctgtcatctcgaactcttttgccatatatttcttaagctcctcaaacatacttgagttgc

SEQ ID NO: 211335 - DNA, 584 bp, Cannabis indica
agtgactttttccggcgacactaactttttcagtggctttttcaagatcggtgactttttcggcaaccttttattgttttataaatatgaaatttccatctttttttacaaaaatatgacatgtaaaaactcatataaatgtaaaaaaattaagaaaaaacccgcaaccccatgatattatttatttatgacataaaatagtaaattcttataattttttcatatattttgtaatttctactatctgattctattagatcggttgagatttgatcaatcaattgtaattagatcagatgactttctgcacactcttaccctacgacaacgttttcttttctaaataaaatttatttcctattacacttattattttatataaagaaccgaacaaaatttatttagggataatttaaaaaaaacaaacacaaaaattataaaaatgcagtttatataaaatttttaatatttttacgattttaaattttatttatataatatacggtttttttatgttgtattctcattatttgttgttgatttttttatatttgtatattattttttatgttgttttcgtgtta

SEQ ID NO: 211336 - DNA, 738 bp, Cannabis indica
aaaaaaaaataatataaatttggacatcaacaaaatgctccaggagacatgccgcctaggcctagaaaacatgttgcctagacctttaggtggtgtttggttggaatgaacaaaaatataagaataggaatggacataatgagaataagaataagaatggaattgaataaaatttaaaatgcataaaaaattgataagaaaattatgaaattttttctcatgttacattagaatagtctttcattccatttcaaaatagaatcgtcaatctaccaaaatggcagaaagggcattacattagaataacattctaatattttaaaatgaaaccaaacaaatgaatagaattgaaattatttcctttccattctattctattttattacctctaactaaacgccacctttggcgtttggttggaaggaatgaaaaaataggaatatgaatgggaactgatataggaataagaatggaataaaatttgaaatgcataaaaaaattattaaattttttcttactatgcattggaatggtatttccttccatttaaaaatagaatagtcattccaccaaaatggtggaaaggccattctattggaatgacattctaacactttaatatgcaaccaaacaaataaatggaatgaagaatattttctttctttttcattccatttcattacctccaaccaagcgccacctactcatcccttttcttaaagtttcataaaatattat

SEQ ID NO: 211337 - DNA, 554 bp, Cannabis indica
gttagttttttttttttgatagaatactaactttgaagttaaaactagaaaagaagataaaatacttttaccaaaagaagaaaaagaaggtgttgtgatgtgttgtgtctaatatagagggaaaaaaaagagaatccaaagtccttaaaggaatttaaattaatttaatgactagtctactttataaaaattttccttacccttaaaactttttatctaatcactttttctcaacttaaataattaataatttacttaattattgtcaaaattgaaactatttcaaaaatgaaaattagaattcttgtattagataaatttaatcataaaaaacttaatatatttacccaattattaaaatttattatggggttaagatttgataacaactaagtgtaatagagtagaatatttatctaagaatatacttaggattaagcaaattatattctcattgaggagttataattaaatagaattacactagaaaaaaaattaaaataccaaaaaatattaatataacaatattaataaacggtcattaatactatatc

SEQ ID NO: 211338 - DNA, 579 bp, Cannabis indica
aaagccatcaatgaccagaggcataccaaaccaccaaaggctccttccccctttatattagtcttgaagatgttatgttagttggttcctaaagcttatgtcaataaagtcaattgttatgttcaacatattctcaaaaaatatgttgaagaagccaacgaggacgtggccaaagatagtgatacgagtcattggagcagagtcatcaattcgaccagtccccatcgctgctaaacccatatacatatatatctctctctctctctctctcacccactcactctcagtctccactcacttatgaatgaataccaataataaacccctgttctttgttttaattttttaatctataatatttccctttcctttactccatttctaaacaaacaaaacaagtaaatatatttgtaatttctaataataataataataacagaaaaattaaatgccatcaaacacattgaataaaacaatgtagttcttagagccgcttactgtacaatcgtggccccaccctaatcatcctccctcctttcctacatgttaccatctctactcttaagtttatataactgg

SEQ ID NO: 211339 - DNA, 1087 bp, Cannabis indica
atcatcatgttcctcgcatttgttctgattctgggctcctatcatccttttctcttgctcttcttttgtacaaacttttatctgcatttttaaaatttctagaaggtatagttgaagactacttgaagtcgctcccatttatcgattacgagcttcaatcatggctttccactcactctttgaattagcatttacgtttaagtagttcaaatgctagtttgagtagttatgcataacaatattggctttcaagtctctggaaaataaatttgtgttcgtacaattttatttcatattttaattgaataattgatgggtttatacatatctatatataatattaaaaatatgaattaagttcattcatttgtatctttcttctcctaggtatgacttttagattatatagacaatagttattaaaattgcaataatgaatgtattttatattatgaatcactataggtttgttaaattgccttagtgaaccttaatcatatgtgttcaataatattcatttagaattgaagattgtttgtgtcaaggattataagatacgtttaaatttttttttatcaaagatacatttaaactttgcatagaacaaattacttgatgagtatggagatattagtgcttgtagtgtacttgctcaagataaccggttgctcaagataactagctagccatatttgagattgttgggacataaatataagaacttttgatctcttgctattttattatgctagtgatatggtttggtttttagtgttgatattctttataaatcagtatgactttatattatcatatataaacacatatttttatattgaataatcattaagatcgattatattaatgaaagtatttgataagtaaggttgcatgtgctcataatcactacactatctaatgtggaaacatgtataaaattaatgtgtattcctctaaaggccattattacttgatattagaaatccttataacaataatgttagctactcaagcttacacgacaaatatgttagcaactcttacaacccttataacaatcaatctcatgcaacaacccttacaacaa

SEQ ID NO: 211340 - DNA, 773 bp, Cannabis indica
accttcatggtacgagctgtctattcacattctcgcatgagcttacaggctcaagatgcatagaacactaattaagtttaagatgtctgcgtcctgtttgagtcacaaatacggacatcctgtaacaggtcgataatttaggacacgcgagtccttatcgggttatcgaggttgtttaggtcatctagaccagctcgctaagtaaagaatcgatctttactacttcgtaggaagacctttatagtccttgcatatatctcggtatatgtgtgtcttaaacctgatcttccgtcctacttcgtgcgagctataagaatgtaactacactctgttaaggtcacatcatcctgctaagtctggttcaggtgagatttacactcaagaggtctcctgctaatatctcagcactcctcgagtagagtgagttcgcgtgtcacttttatgggagcctggtctcgagtttctaggtgaaaaattctcattataataattttatttttattttatatatattgagaaaatcaaaaaatgtgtattgcatcaaatcatttttacagcctaaagaacacttttagaaacaaaagcttcatgtgtaaaactacacaacgtacacatcttatatttacaaatgaaccaaccaatctttatttaaaacattaaacttccatggaaaaactgcttcaattcgtaacttaaccactttctcaattcgcaaaattacaattggtattgtagtgatctttttactccatacaactgttagaaattatttt

SEQ ID NO: 211341 - DNA, 515 bp, Cannabis indica
tatatttgcagccaattaggtctatattaatagatatattttgatttttctcactaattgacatacacttattagttaatgttcatatgttgattcctttgttcttttcatatattcatgatttttaggaatcttaatgagtatgtgcaagctttttgcaatgctgccattgaagttgctaccaaaaattgatccaaaattcttgaaggccatgcatctctccctctacttgctccctatttgacagattggcttgaatactttatttgtatgacttcttgtccaaactgtttaattttagtagtcctttctcgttgaaatgttctaaatgcatccctttcataatgctttgtgacaattcaggtatgacatccttgtatattttgagcaactgatttttgtctagctaaagtttttctttgttttagacatttaatttatattggttgatcgaaatatatttatataaatgattaatactatgctacttgtgtttgatttatttcgtcacaagt

SEQ ID NO: 211342 - DNA, 631 bp, Cannabis indica
aatgttcacttgaaaaatttactgcatgatcactttgtatatattcggagcttaacaagttatgtcatgtaataatgagaaatgttaaatgatataatactcaacattacaaatatctatcgtatcattaattgttcaattcaatatgaaatcctatatatatttcatcaaaaaataaataatgttattcaagctagaaactctaaacatccgaaaataaataaggaacttcatctattatagagcccttttcaaaagaaaatgcaatatatttttgagaaaattactgaaaaatgtatgtatttttaaaatgatttttataagggcaccatccctaagacttgcctaatctgccttagtccaaactcgaccttgatagctcaacaaattgttcatctactctaaaacaatcggacgctcatatataataaatataataaataatttatagtaaatattattttagaacttgtattttgcaaaaattattaaggatactctgttttgttaaataacaaaatagaccttgtatttctaaaattgcacaaatgaactaatttttttagttcaaataaatttaataataattcgatgtgtgataaactatttacattttctgtatctgttcgtg

SEQ ID NO: 211343 - DNA, 942 bp, Cannabis indica
aataaacaacgagaaattaaccttgcaacaattataaataataaaatgattataaaaataatctcatgacaactataatacaactacaaataaactataagacaacttaaagaaaatatttattagttttacggaagaagtatttttttaaataaaaaaaatttaaataaaaaaatgaaaaaatttctgtgttggagcatttttttaaatttttgttaaatttttcaaaagtttattctattattgtaattttacttgagtaagaaaaatattctttattatattgttgcatttgaaaattatctctatttttattctaacattgtgctttcttacattgtacttttgagacacaaatgaaaaaaataaggattttttgagaaatacttaaagggcaaaatttggttgaatgtacaagcttgtataagcatagattggattttggagtgacaaaatggatatatatgtaactctttggtagtgtgtgccatgaaatattgtttttatttaaaattgtattctcacctaattattattaaattattaatagcataaactattattgctattattgagcataaataattaaaacattaaattttacttaatagagattagagaatagagaataatccatcattatctggaattgataggaggaccttttcattttgttatgacctcacttatgacttgtagaataattactagctattgtttatagtttattgtactggttttttttttttttttttaataatgtggctataaatataaagtattttttaaaaaaacgttgtaatttaaatttaaattagctatattttaaaaatatctttctattgttatttattttttatattttaaaaaaatatttctattattattattattatttagggaaattttcactttttgtcccttaatatatacctacatatc

SEQ ID NO: 211344 - DNA, 632 bp, Cannabis indica
ctcacacattatatacaactgatcgatagacatatatatatagaagaaggatgatgatatgagcattgaggtcgttgcctttgccccaagggctgcctttgtatgtgatagcaacaagtgaacaccaaatacgacacatatatggtcctcacatcataatcatcacccccatatgggaccctatacacaattaaagaaaaagacaagtggcttttggcacctatctatatttttgcacaccattgtagatcttgttattagaacacaactccaatgaaatcctataaacaaccatgaatatgtttttaattatagatgtttattattcgagtgaaaaaaattaccaaataataatgattaacaaatgaaattcttactattttctctttttctttttttgtttattattattatgttcaaatatttgcaccaaaatggacacaactcagatgttacaaaataataactattttttttttttatgtggaagagtatgtattgcagaatattagattttgtagacatgattgaatattgaaagaaatgaaagagaagaaagattgagaaagacgaagagaaaggaagagaatgaaagactgactgaatctcttatatatcaaatttaatagaat

SEQ ID NO: 211345 - DNA, 1176 bp, Cannabis indica
atctaattactcattcaaactaagtaaaaataccaaattatttgattagatgttggatgtattgaatttttggacaccttatccaacatgcgattcgattcaattagatattcaaaaataacaccaaatctgatctgatcacgattggatattcactatttgtaactggatcaatcaattactattgaattagatcgatttatatacacctctaatgacaatcatgtaactacttgtggtatctatttaaaaaagtaaattaatgtaggatctcttaggcttacctaaactcccacacaggtattcttacctattcttcaaatgtggtattcggatttataccccaacaattctcctctctagcaaaactatcttgtagcgtcgtatgaccattaacaatattgtttggaagactttcgatacaaggcaagacaccaaacacaaatctccatctcaaggtcacatagaaggccctctcacactcacatgaaacacgctcttgaatctttggctctaatactgcttatttgggacttattcatccaacttattgggttgtaaaaaactcacctaaactacaacatacatatattgtcagctggctcgtaccgatttactttttgtaagcaccatcctaaaagattttatacgaatagagtaggttatatttaagacaattcttatatataattttttcaatgtgaaacttgagttaatacttcaacaattaatataataaaataaataaatagtttacataattttctttcgtttcaattcttttttagccttaatatttttttttaaaactactttgactaaaattatatgtaaaattacatatgattaaaattatatgtaaggttatcagttttatctagttgttagttgttacatttttctatactggttttctctgtctttgtaaaactcatcctccataaataagagttctctctctaaggcttgtatcttttacaagcttagttttctttctctcggtttgtattgataagatcattcatggtatcagagccatatctgtagtgggctttcgatccacacctattcagatggttagccagtcgcacgaaatctagatggtgcaaagatgcttgagatccgaataaaaaataaagcgagcaaatggcatggcctgtgataaggcgattcaag

SEQ ID NO: 211346 - DNA, 546 bp, Cannabis indica
tatatatatctttcattttattttaggttagattaaagtgctttatataatgaatttgatagtagtgatggcagaaggagagattgaaggcgggattggtgttctaatttttctatcttcatcactattcagtcaacaagtggacaaaacctttggtaccagaaaaaagaaaaaaggtcaaagcaaaagttagcacattagcaaaaagagtactccatcaaggcaaagtaaacccaatttaaaggaaactaagtgaagtaatttgtagataaagacaaccctatttaaaatatggtgtaatttaaccagctaaaactatctaaagtgaaattataatattggttagtatgtaatgtaagtacttaccaacattttatggaaagaaataaacaattttatgtgaagagactgaaagatagttctctcaatgaaataaaatagtaaaaaaaaatgcaatgcaaagatacaaagaacaaagtaatttacacaactttttatgttcaggaagttaaggcgtagtaatagtagctttcttttgtgtaagaa

SEQ ID NO: 211347 - DNA, 503 bp, Cannabis indica
atttgatcgatttatgcacacccagttcaaattataataatagtatttttctttaaaaaaaaaggataaatattttttatcaatagaatgaaatgccaattattaagaaaatattgatgcactttttattggaaaattgaagtgaaattaattttaattatatattttctagtattattatttttcaaataatggaagactttaattaattaaatcatctagacatctaccaccattcctaattttccaaattgacagactggttggctttgaattctaattatgactcagatggtcaaaatatatatactcaattaactcactcatcacacatagacatagatttatatattgctacctagttttgactgcaatttttcatttctttctaaaacaaaacaatttatatatttcattttattataatttatatcaactaactaatatacatacatatatatatatatgagtagtatatatatggcaacatatgcaaggaaatc

SEQ ID NO: 211348 - DNA, 489 bp, Cannabis indica
aagttgttattactccggctttctactaaaagtgttggaatattgtggggagtgatgtcatcaattgtgtacgtaagttctttgaaaatggtacttttgagaatgattgtgatgctgctaatgtcattttgatcccgaagaaaaagaatccagaccgtatgactgatcttcagcccatagctttatgtagtgtcatgtataaaatcatcactaaagttatggtgaatagaatgaagcctttcatggatactattgtttcagccaatcaaagtacttttattcctggccgtctaatctcagataacattcttgtttcatttgagatattacattatcttaagaggaaaagaaagggttaaagatggctacatggctttgaagttagacatgagcaaggcttataaccgggtagagtggggctttctcgaagctatgctacgaaaatggggtttgctagtattggatccacttgattctaaggtgtgtgtc

SEQ ID NO: 211349 - DNA, 655 bp, Cannabis indica
gagcattgtaaaggaatggggcacaaaacgattgactgtaggaaaaagacatgtggtacacaagaatgaattatgaagaaaagggttgaagaaccaactgggaagggcaaagctcagactaatgtagtagattctgatggtttttagccagttcgaaagggttggagaccaaaagaaactagagaaactgagctgactgtaacagacaattcatattagatcttggaagaggcagagatggagagtatagatgagggtaatactttcggaaagagaaagaaagataacataggaggagggggagatcctcatctttccaatgaatagaattctaagttggaacgtctggggaatcaacaaccaacaaaagcaacacatagttagacagtttatcagcagtaataaggttgatttggttggtatcctcaacacgagagttaaggctcctaaactaggagacttgtacttaaatgtttttcaaggatgatgctttacaacaaatatatcgtggcataaagggggtagaattgtgattgcgtggaattcaagcagttataatgtaagtattctaaagtattcaagtcaactcatgcatgtgggggttgaaataatcgataggaagcattggtttttactcagttttgtgtatgcttat

SEQ ID NO: 211350 - DNA, 552 bp, Cannabis indica
ctcaagggtctcacaaaagagttaaggtttaactcagatgatgtcactgtatactgcgacaaccaaagtgctctgcacttagtaagaaatcccatgttccatgagagatccaaacacatagacatcaagctacactttatcagagatgttgttacaaggaaagaagtgaccatgaagaaaattaacgctgcacacaacccagctgacatgctaaccaagtgtgttacccaggccaagttcagacattgtctaaacttgctgaatgtcaatggttgttgaataccagttctttgaagtcattaccactgctgagactcatcttctcctacttctcaaagtgatcaaaataaggtggaattgttggtgttttaaccactttgaattactaactgcattaacagtcttttgatagctctgcttatggttgtgacttgtcctaactgtcataactataaataccttcactctcaaactcgatgaagacacaataagagaacaactcccatctcaagtctaagttagtagtgtctaagattgagagagagagagaga

SEQ ID NO: 211351 - DNA, 1230 bp, Cannabis indica
gtcgcgactcttgcaaaaaaaaaagggattttctcaaattttgtctataaaacgagttggaactagatttcctaaatcattcaaacttggagaccaatttttggcattggtggattttggaaaatctttctaattgtgtatttaaagaggctgagagcttagatctaatactatttaaaagttgagagaaattctgagtgtttaaggagggcaatgagaagaagacgccattagaggactccaaacaatgttctatatgtccatctctatcttttatatttttaattgaatatctattgttttagaatgccttctagtagctaattttcttgtacggattattatatgaaccacttgaatttattttatggattaatgtgatttttcaatttcaccttcttctaatttaattcactttcatacaatttgttttaattttgtaattatttactggtcatctataattgtcatctatgaattcaaatcaaaattttggaaggtaagatttgaatatactctgattgttatggatatttattgtaaattgatttaggataaaagtacctaggctatttgtataattttatttgttgctatacttattgctatctttatgattaaactgaccatagaaatatcgggagttttcacatagattggatttgtaattcttaactatattataaatttcttaatttaacttatcaattgaatagaaaaaaaaaaagaaattgggtaatttcattatgaagtaaaataaaggatggttagggaccataataatccttattttatcatttttatttctttaaattttaattattgtttgttttacttaattttttccaaaattattattgatcaagtaagactatagatttaatttaacagtacttgataatcaattctcgtgggaacgatactttatttatcattaaattatttgattcgattgcatataattgtgtattaattttatcaaacaattcttgtcatggaatacttgtctagaattataaaagaggttggctcttggaaaggcttcaaattccataaccaatgtgcaaatttgaagctaaatcgcatgtgttttgtagattatttgctactatttttccatggtgattttgtttttgttatgctaatgctaattagggcttaaaactcttttcttaaacattaaggctgctaccaaataaatataaacttgatgtatattgtagtggtatg

SEQ ID NO: 211352 - DNA, 644 bp, Cannabis indica
agactacaagttgaagatgttaattgccctttgtgtagggtggaggaagaatctttggagcacctatttctcaaatgtgatccaactttctatttgtggggatcttctccgtggggtatatttctagtgtttgattcaggcatccgtatgtgagaataggtcaagtttatttggagtcttaataataggggcatcaatgtttgatgaggtctttatatatgcttctattgtaattgatactatatgacgagtccgaaacaaaaaggtttataatcttaagttgcttagtatgaatcattgtcttgactatattcgttattcttatgcagatttgagagctactcttatttccaccccctctcctttccaagtggaggtttgacgccctcctcctcaaaattggatcaaactgaattgcgatgttaaagattcgaaagctcgtgtatagcggttgttgcttgaaactatttgggtgagatgatctgggttagcacagtagacttggctttttcagatgctctttgtggagatgcggcaacgtattgtttggcgattgagttggtaaagctcaaagattacaagtttatctttgtggagaacaattctagagtagtcatcaattctcacttgcagatttgcgggag

SEQ ID NO: 211353 - DNA, 881 bp, Cannabis indica
aaggtcatatttagggtgttaatcaacatacttgtgagtagatctaagatcctagtaaaataatttccaacaaaaatcactagctcatagtaattttaacagacgagaataaggaatgcgagaaggaagacatggatcctaggatccaagatgagtacaaccaactctaggcgcaattgaagagttggaagaagtgaatttagacccaaatagcccgactaaatgtgctaacattgggaaggatttgggagaagagctaaaatagcaattaatcacatttctaaaggcaaaccaagaccaaatttcttagagccatttagacatggtcgggatcgacctaaatgttatttgccacgcaccatctcaacattgatacatcttacccatcaaagcgcctaaaaaggcatcctttaaatctcgagcgacaaaatgctttgaaagaagaggttgacaaattattaaccaacaacttcataagagaagcattttacccctcgtggatctcgaatcctattctcgttcctaaattaaacgggacatggagaacctgcatagactttttcgacttgaataaagcatgtctgaaagactgtgtccagttgccaagaatcgaccagctagctgatccgtcagcaagatatgggttgatgacctttatggacacatattctagatacaacgagattaaaatgcatgtgccatatcaagaacacacaaagcttcgttacaaatatgaggttgtattgttataaggtcatgtcattcggactcaaaaaatgttagagcaacatatcaaacgtcttatgaatggtatgttaggaaaacaaaagtaaggtcggaacaagtgaaaagtataatgtagatgatatactagtaaagtc

SEQ ID NO: 211354 - DNA, 746 bp, Cannabis indica
agggtagttaaataccgttttttttaaaaaaaacttttaaagtaagtagttgggcatgatcatatcatagtatgatacaaatatataataacagaaataaaaattaattacaattacatataagttataatataacttataagccttaagatgccaagatggggctacacctcataattcccttacatgcaaaagtgttaaacataatgattttgtctagtcagcagtcaccgaaggtgaactatgtacataatactatataaatattcataaatatatggtagtcgtttaccttttgtttttatcaataggaaataggagtgtctttgttttcataggtaagagagattataattattgtatagtattaaggccttctccaattttcgtaaattgaacacaagttttttttttttttttatacacaataaaatttataaataaaattaaaaaaaatataactaattataaatagggtaaatagcggcaaaactcccaaaatttttattttggtttcacttaaccccaaaacccaaatttgggcggtaaaaccctcaatactcgtattctgttagtaatttaccctttccgtccattttaggtgttaagtgccatattggactggacacagtgttcacgtggcacaattttactggtccacgtaaaaaattatttaaaaaaaataaaaaataaaaaatcacattctattgtgacaaaatgtgcctttagtcacaatacttattgtg

SEQ ID NO: 211355 - DNA, 641 bp, Cannabis indica
tacatataataatggactaaaatgattggttgttaaggtctttgtgtttctagacagagcagaagaagatgaagaaggaaaaatccataggtgattgttactcatttatatctttgaaattatattaataacattctaatgtgtgtgagttgtacgcatgtttcataattggtggtctaaattttgtcgttatggagagaagagcatagaaaggcgccgctcattgttatgattagagtatgttttttctatttaattgatatctttcagagaaaaaacaatccacattctgcatatatgcttatagttcttcaatatatttctttttttaattataaataacgctatatatatatattggtaggtaatgctgggcactgaaagttgacaataacctgaattatccaaatgtgaaattagatcataatatatatatatatatatatatatctataaccttaataataacctttaattaattatgaaattacaaaaagaaatatctctcatttagaaacaaatatgtctatttaatacctatgtacttttttttttgagaaaagaaaaagtcatctattttagtatctttgaattaatattttctaattttgattcttattattttcttaacttaatagtta

SEQ ID NO: 211356 - DNA, 681 bp, Cannabis indica
attctcttctttaatgtacactgcatacacccatttgacccaaaggttatcctccttatttgccaaagctcaaacatacttgaagagcgttgctgaattccattcagcagttctcttaatacccgagccccctacaatcttggcttggcaaacattctcccatgccactagtcctgctccctgcatcatatattggcctttccaaaggaaggctctacaaatagattcaagctcacgaattacctgctttggtagtctgaggaattggcaagaataaggatgtattgtggtaagaacggaattgatgagtacagcccttcccgcaaatgagatattcctggtgctccaagatcaaattcttgcagtcatcttttttgtcaacactgtacattcttgctttgaaattctcttgctacatacatgtatgccaagatatctgaatggtgtctgttgtttcgagaatcccgaagcctccaaaactctagtgatatcagattcaggcatattgctgcaataaattacagactttgccttgttgggttgcaatctggatgaggctgaaaaagagtttcaagccttgtattaataggatgatgcttttgtaatcacctcgacagaaaagtagaacatcatcagcaagctcaagtgattgagcttaaaggcatcacatctatcatggaa

SEQ ID NO: 211357 - DNA, 528 bp, Cannabis indica
gtaacaaccagggcattctctgaactatgaacgacatccttccccctattttgagaaacatctccttgattgacacgtggaccatgggaaaatgattgagccataaccacgcctccaccattaacatgacttggcattgggccaacgcctacattcacagcatccccaccgaccaaaggtcctcccccattgacagtcggggactccatcccctcgggtccaacaccgccaatctccgtcgggggactccatcccctggttctaagccaacgagaaccaatattcttgtaagatttttgaggaagggccctcatgaactcaccataaggcttcactatttgctctattggctgatgaaacaacttatgacaaaacctttccgagtgcccaattatgccacaaatgaaacaaaaagtcaggggcctttcgtacttaaaattaatccaaaaccagctcccatcatccttagtgagcttcattcgcgggcgtaatggtttatcaatactcaaagtaactctgatgcgaagg

SEQ ID NO: 211358 - DNA, 555 bp, Cannabis indica
cttctctttttttcttcttaatttattagtcctatgcttttaagctgtttagccacctatacatcactgccttttgatccaaagctgtacaactttagaaaataaatattgagttgataagatggatttcccaactattagattaggtattgataggatgaactgctagcttttttctgttttgcaataatggcgatgcaaatgctgccacttttttagtacatttcattaactgccatttctttttcctcaattaaatgattataaccagcaaccgctgttacattattgttatttatgatatttatcccttctttttctattttaaggtgaaaaagcactctaaagcaatattattgagaaatactaaaaatatatcctttatgatactttgatgtttgatgtttgagattttatcaatgaaaatgtttttattttttgaaaaaaaaaatattcacactagatcctttaataattaagaatttttcaattttttttttttaaaaaattaagtaaaatcacattacattgtatattttaaattacttttttttt

SEQ ID NO: 211359 - DNA, 675 bp, Cannabis indica
aaagaaaaagaacttaccaatactagtcttgtctctgtcttgtaatgaaacgctttcaattttccattctcaaatgatgcttgaagagaagagagtttgggactttaatggaaaatcgagagactagagaagagagtcgtgagcctgagccgtgagagtgacgagtgagattggagctttagctttgattgagtgaagagtgagctttgagttttgaatttggggttttgtgtttaaagccctagcagcacgaccgaccataatggtgtgcaatgtgggctactgcacagggtcaaaaaaaaaataaagggcctaatatattttttaatgcccaatagatttttaatgaacctaacttttgaaagggctaacaatttgtcactagtcacttcaatcccaatccccaaagcccattttaaattctattaatgcttttaagcaaaaaattaaaaatctattactactatatatttattattttttcaaactttttgtattctttttttcttatcattttttttgttctattggaatcaataacaatttttataaatagttggagttttttggtgttttgtaaaatatataactgaatgataatatttaaaaatattatttataaattgcattttttttgtaggggccccaattttaaattagaacatggcctccaaa

SEQ ID NO: 211360 - DNA, 2604 bp, Cannabis indica
tgactcatgaatggctgccgagaggcccttggtatcgagtggctcttgctgtccagtggtcgttggtgtcgagtggcctttggtgctgagttgcccttggtgctgagtggcccttcgtgtcgagtagctcttggtattgagtggaccttggtgttgagtggctgtggaaacccatacctcttagtgcttcaagagggtttgttgggtgttcgtaaattaaatttactatcttgctctaacatcagctattttttttgcacggaaagtgttatgcttgatgcttaaattctttgctctagaggaactttagacataacttgaaggtaaggaacttaccatccatctctttgttatcattgtttctgcattgtgcctataagtatttcacaaagcaattccttgagtgtctcctttgtctaccttgccatcggtgtgttaccttgagtgtaattttttatgacatataccactttgcatttaactcagtaaacttaagacctttcttttgcctcttaggttgttgagttgtatttttgtgtttcattggcattgtccaccccattttatttctatgggagaacctgacgaggcacttttttgagcccccattattgacatatcgacctcttattctgagagccaaaagaaccctcgcgagaagtatgttaggttgttgtccaagacaagaggtcatctaaagcatattattaattaaaaaaaattgtcgggaaagggtccaaaatgagatccatttggtcttgagtggtgatcaggatgacatgattggtgatttggatatatacttgtatagacttaggatgtctcttgatcaaactcagagtcagatattgtacctagagggtacttttcaatctgagcctactcttccttcatcttctaaagttcatgacccgagtttagatgaggagctcggagtttcctgcttctcattcacatcttcctcaacatcctagatgtaaggcttgggtgtgtaagatttctagaagaaataagaaatatgaggttgtttcatattatcgcttttatgtgtctgaggtatggctccccaaagaataattcatgtgtttgtccatttttgcatcgatatcatttgctcatgcaaacagagagtgtaccatgaccatcgagaagatctgtactatgttaaacacatacatcatcccgaccgatggagagctacgagtatttcccgctagaatggataagcgggctaccaaaccttgcaagggaatttttgcatatagtgggcatattatgagggctagcacggtctttaccccatcacccattttttgtggacattctaagttacttcaaaatttccccacttcagcttcatgcaaatagctatgtcatcctcacctattttgctattgctttcatggaggtaaatgctcgcttccctacgatcacaaaatttcacactgtttacaacctcacacagagtaatgcggtgcctgagacttatcatctaaagaagtaagtttcaatcaaggttaagggtgtcatcggaatgccgaccaaaatttgcttttgagaatttgactttttcatgatcgataagatgcttgagggccttctttcaaaattcaatgcccttggccttctccttgttgtgctttaacattctaggtgtgatatcatatatgatcttttttagaggcctaggaagctcccatacttgacaatgactctttagtctccatgcaaagtttctatgaactcccaaattagaagaggtcaacctcaaggcttctcacgcctagtatcttgaaaagttcaaggttgactagtatcatgcttccagagtttgctatttccatgatctcaggcacatcaacccaacacgataatgaaccaacctacatccgagccacagacccaacatcaggtcagctttgttagggccaagaccataaggacgatgaagtaatagaagtggtgactcctaccgcggttgcagaagctttttatgagggggttcttcacacgacaagtttaagtcaggattgctccactggggcgagagagaatgttaaccttgctttttttgctcgaatggaaggggaagacacattggtggttactaaatctaagaaggtgttatcccaagcaggcaagctattctagaactaccaatgcaaacataaaaaagtttcagctcgcctagggttttttggccaggctaccttcgagattccctttagtacattgttgcaagacttgcctcttccaacctcccttgtttctcatcctacggagggggtccatgaagaagagtatccagatttttttattccaaacgactagatggatggcatcgaatgcagtgcccaggagtgttggaacttactttaccataaacttatttactattcatgtatgttgattataaacaataatctaacatcctaaaatatgcatttttcaaaacaatgatttaaacacataaaagtttggatccttacattgagaatgcaacgaaatatattgtctcgttctgttcaatcactctaacctttgaatcatttatgtaacaaggtattatcaagtgatgaatctgttgttgggttttgtgcccta

SEQ ID NO: 211361 - DNA, 707 bp, Cannabis indica
aaggaaacaaaataaaaaggaatgttgagaaaagtttccaaaatccaaaagcaacgatcattaaaacgtgatcaacccaaaaatactcctaaattgagtctaaattgagtctaatttaatgagaagcatacatttatgttctccttcagtgttgaccacggtctcctcttattttaaaattctgtggactaggatgttaagttcctctttgaatcttttggctcgcgcccttatcactggaccaactggaacttgacttgtatctttagctttagtgtcctcatcattcatattatttggtatcagagcttaggatcatgtgatttggcctatctttcttttgtgtttttctgttcatttcatgttttataatcttgtttaactttgtgctctatattcatgtcaattcgtgtttcaaattctttgtttctctttgtgaaatccgaaactgttagaagcaccaattgattttgataattctcttgtatcaaaatcgtgtctttattgtcatcagtttcccttatttttattctccttcaaaatccaaaatttaaaaaaaaaaatcaaaattacaaattttagagccacaatttttttgttaatttcttgttttcaaatttttctttgtcattagtttccctttttttattgaaattcaaaattcattgcctagagcccaatttaatattgctgaattatttgttccc

SEQ ID NO: 211362 - DNA, 608 bp, Cannabis indica
tttaccgaaattagcttaaattttcaatttaccccctcttggacacatatcttgagttaacaattggtatcagaacttgtgctcatttatttgattagatttcacaatctagagcatggtgattctaagtaataattcacaaaataatatgttagaatgtttgatcacaaatagagcaccatacttcaatggagtaaattttccaataagaaaaattagaatgaaaacttaccttaaatctatggattatgatttgtggcatatagtgtctaatggtccttacattgccaaacatattataaatggtatagaagttgttaagacttatgaggcatgtgatgtgaatgataagaaaatgctttctaagaatgcaagagctaaatatatacttatatgtggtttggtagagacgtgtttaaaattattgaacaagcctctactgtttgatatgtgaaaactgtttgaagttactcatcaaggaactagtgctataaaaaagactaaaatttaaatttattccactcaacatgagaactttaagataaaagcagatgaaaccattgctaacatatatactcattttattacaattactaatagtttgaact

SEQ ID NO: 211363 - DNA, 618 bp, Cannabis indica
ataatcccccaatttcaatcctaagctatcaaaacttagcaataacataaataggattactagggttttaccttcactcaactaacttcaaaacttggctgaatcctcaaagaaaattattgaaattagctgctccactgatttcccttggagccgaaagtagggaagaaagagacaaggaaaaggtttattcttagttttcttcaattttctattttggagaaaggaatctatacattaatattataattatcatttcatgcttaattagataaggccagctgccaacacaaccaaatgccacctttccttatagttaaatgaccaaaatggccttaccttaaatgtctagctcactaaatggcttaggggtaaaatagtccaagaccataaccctgcctaaactcgatagttcaaatatcacctatgaatactctcctaaataaaaaggttccaactaacccatgtgactaatttcgccacacgtctcattttccatcgtcgtcgggcaaaaagataaaaactgtaaaattttgcatataacataaatattacatttaaaagtttagtaaaatctccagaatttgagaaatgataactctaatgcccatttctaat

SEQ ID NO: 211364 - DNA, 565 bp, Cannabis indica
aaaattattataaggtgcaattaaattggtatcttaattattatagaatttctaagaacatattgaaataatacatcaaatagtattaaacgtttagtttcaagggtaattcaaaataatcatagaattttaaaagacatatttaaagacaaaaaaaataattattagtcaccaataacaataactttatattattattataaacttgttaaatcatattaataacatggtaaggtgaagagattctaacttaaccacaaatgagttcatgccttgctcatccttacaataattacaaaaatgataaacttcagaatctcctggcttattataagcaatccttcccttgctttttaccttctcacagaatggatgcagccaataaaagaaacatggaatcaataacatagacaccaactaatattcataaagctactatcttctaccacatgaaagaatattcatatccacctaaagtatttaaaattgaactaaataacataaaatatggatcaattcacataccttacatgcgcctctctttgctattgaataattatttacc

SEQ ID NO: 211365 - DNA, 537 bp, Cannabis indica
atattcaatttttttttatttgtagcggtacacaggttatatatagagatttttacattatatacggaaattttacattttttttactatgagacagaatttttttcaaaaatactatatttttttcaaaagtactgtataagttttatactgtatactgtgttaagttttcatggttgttttacggttatttattagttgttctactgtttttttaatgttatgttattttacggttgttttatattgttttataaaaagataatatttttgtaaaaaaaatcatgtggcaataaaattgtaaatttttatctaaaattcaatatttttataaaaatcccttatatataaccagatttgatatcatgcttgcagacttaagtaacaaaaaataaattgaatttaaacggttattaaatgccaatcgagcacctgttcctccattgcaatttggctttccatttatggcgttcttctccctggggtattttctccgtgtcaggaactggaattcgaatgtgggattgggtgaaattc

SEQ ID NO: 211366 - DNA, 646 bp, Cannabis indica
tgcaatctttctagggttaatgtgttattaggattataattattgtattgtgggttttcaatgtgaatgaagcttttggaaatgttctgattagaatcaagagttgttgtacattgattttatgggttatgagttgaaattgaaatactccgattcggatttacagagttggaaactgatcaatcaatgtatttcatcttgtattactatagtttagtttgttaatcttcaattttctatcccatggtttttggtcaattaaaaaaatcaaaatttagaatttaagttaaaggactttagatcaaattggttgagttgtattcttctgattgttatatttaataatgattatcattgaatatacaatgtttaagcctaagaaatttgagataaagaggttgttgaattttataggatacgagggacaatacaagattttgtctggttgcctcttcttgccaattttgatacaaaagtagtgagaagcttgcttctatgaaaattatataaacctcttgcattcttctacataattgttctcttattaacatcattaatctagattgaatgtgataagataaagtaaatataaaggaaatgaagatatagacaagccacaataatgcaagcttagctttagttttaa

SEQ ID NO: 211367 - DNA, 871 bp, Cannabis indica
ccaactaatgcttataacctagtttatattctgtcagacaactatagttttgagaactccatttcttctttttcttctatttttgaaatctcatatagtgttcttcataaatattcgagtcattagtgagtgagtgcatgcccacccataggaagtctagtactcaatcatagtgtgtaagattatgaagaatccaaacacctgaaggagaatctagctcagatcttgataatacctgtgacagaaaggaacaagagttagagatttgagaaggaggagtcattatattccgctgcaatcaatgtaagattaaactttatatgtttttaaattctatttttttagaaatttatatttaggatgttaataaacatacttgctagtaaatctagatccaggtaaaatacattccaacaactagcctcaaagccatggtaatgatttactttcaagaaatatagatttaaaacaatgtatgtgtgatatggatgtgattcatgttaatctgtgtgtttattgatgattgcttgatgtttacgaaattttgatataaaataattagattcttcatctagaattattttatttggatagcatggaaaaatttacgcaattcattttttgtagaacttaattttgattttattttgaattagttatgatttttttgaaaaatttgaaaaaaaaaaaggaaggggacgatcaccccatgtgtgcggacaccacgtgacactcgggtgtcacacgtgttcagacaacatctgtctgagaaaacacgcacatggggttgtctgaaacccacttccgcacgtggtagaggctgcttgcagcctcctgcatagaggttcctcggcgtttgtcccgttccccc

SEQ ID NO: 211368 - DNA, 646 bp, Cannabis indica
gaaatcggtttgaaacaaagaggatatttatgcaaaacccaagaaactctaattgtgaccacaaaaccttttacgatctaaaactatgatgatgtgatccttattaattgaaagttgagttgagttgtgcctcaaaaactgaacaaattaaattaatttatgatcaaatgtactgaagtggtcatctcataatataaacgccaaaaacaaatacgagaacgaaaaagatgaagacattagaattttcttctattaataaggagcgcttagtgatattttagacattatattcaaaaagtctagtttcagtatttaacaattagttactctactcttttgattgttttgaattcaggttgagatttttttatttttatttttttatctttttaggatcaattcaggttggatttaatttgttttacttttttttttttttttttttttttacttttaaattaaagttttacctcttgtttaatttttttttctattgttttattttgacaataaaataacttagttgatacaataaatatatattcggctactattgatacttgattggtctatatatacaaggcattccagacaaaagttaaaacattgaaatgactacatgacattcacgttttttactcattaa

SEQ ID NO: 211369 - DNA, 567 bp, Cannabis indica
aagttcttttttagtaaaaaagtgctttttaataattacagagagcatttctgtcaaaatccctttttggaaaaacgcgtcctttgattttggcggttgtacggtttcaagggtcatcatgaatcgtctcttcatattctgccccactcctgaccgttagatctcctaatccttggccttcttgtcactggactttgtgtataaaagggcaacttagcttgtcatatttcacaaacttctgtctttttggtgagatccatcttgagaatggattgtctctttcttgccagaatgtcccatttgagttttgaagttcatcctcccaaattcattacaccaggatgcaccaaccatttttcttctccattcgttcccaaagacttcaaaccaccattggagccggaaatgatggatccaaggctgaggagctttcgaccaatccaaactaggggaacccgttagatcattacggacgatcttcacaagtgattcttgagggtaagtattatcccttgtgaatggtggtttgagttggattagacatattattaatttatatgttttttt

SEQ ID NO: 211370 - DNA, 669 bp, Cannabis indica
ttactattagatattagtctttttgttgaccttttatatttcatattttacatttttttatgtcaattttaataattttctagaaatatagtgtacattaatgtatattttttttttctgaagtatatatatttaattaatttaattaaaaaattaaatatatattttatttatatatatttttaaatatgcaaaaaaaaaatgagcatatacatatgttaaaaataaatcttaaaatacaatttattaagataatatatcgtcatagaaaaaaaaaattagatatatgtattttttctccctttttaaaattttttatttggcatatcataaaaaaaaatacacacaaataaaattaattttaatatttatataaaatttgttaagtaaataaagaattaaattaaaaaattattaaaaatatttgaaattaatacaaaacaaaaccaacattatttagtagttcaagaaattaaaaattcagagaccagtttgctaaaataataagttcaatgacttatttacaatttatttattgttagaccaatttgtaaataataataataataatgaaatgattaacttgctaaaatttatatagtggtttaaataaatttatttttataagaccacaaagatgactatcctgattaattaaaaaaaaaaacg

SEQ ID NO: 211371 - DNA, 254 bp, Cannabis indica
acattgggattgcatttgaggtccgaagctcgagctcaggtccaaggtggggccagggcccatgatctggtcaataacagggtcgaggtgaagggttcaatgctgaggtcgggggcattagggtcggggtttaccaccgagattcagggtccggggcaaaggcttggggatcagggatcagggcccatggtccaatgttgaggccaagccaagatttggggccggggttcaaggtttgatgtcttgggttggag

SEQ ID NO: 211372 - DNA, 961 bp, Cannabis indica
cgaacagatgattagcaaaatctcaatctttctatttttcttaaaacagttattttcataatgtacatgtaccttgtcttagaaaaatgtaactctattggttgggttgggtggataagttgtgtgatacattattcaaattcttgtttgttctctcatccttaaaaaatgaaacttggaaatctgaatactggaactcttcatctggttaggtcttcgagttcttccggaggtatttctttcttattatgatcttcattgaagagtttttgatcttccatgtaatggtaattagtacaatttatcatatataatttttgttaaaataaaaaatgcagagttaatacaattttatatttgagttgatacaatttttttttttaattattaattgtatcacttttaaataaagtaagaaatacctagcataaaatttactatacgtgcctcgcacgtaattttttactagtatatatatatagcaataaattcatatatttgatctaaccaataggcttggttgtgggcaccaacgaaaaagagcaagaaagtacttcaaatggtgttcaacaatgtcaagcacatccaacacaatccaattcatccaatatatataataagagcttaagcaagtgtcaagtgggtggggagcttcttacaaagtctttgaattggatgaagaaaatagatatgtcattttttgattcacatttatatgctctcttattgttttggttaatttggagtaaaaacttaccaattaatgtaatttttgggtaccgacttatgtgtatgatgaagcatttaactattatattcttgtaattctttgctcatttatcttaaaatataatgtgttttacataatggttgattagtgcatagtttaatgagaaattttatcataaatttataggtgatagaaaagtgattcaaggagctctaaccgagtggaccacct

SEQ ID NO: 211373 - DNA, 859 bp, Cannabis indica
aagctgtattaagtcaggaatgaagtgattcacatcacaacaagtgtgaaattaaactattcagaaataatgacaatttcaatgcattatatagcttaccgctacattgaaggtttttgcaaggttcatcaactttagggccattccattaagtaatcgagtcctgagagctaagtcctcaaaatcttggcggaaatggaaagtaacactgtcaacaatgactatcttaacctagaaagtttgtcaagatagaattagtatcaatgtaccattattagtttaatagcacaacagtaaaatagatcccaagtaagaaaatgacaacaaaccaaagtgttataacaagatattaatttcaatctttccaacagaaagcctaaaacacctacatctttatggtctgagatgaacttttccaagtgatttatcagagccatttgctcagtgtaactgcagactcggaaataaaaaatgttttccaagatatctgaaggcttaaatttgacttggcacacacgattttgtttagctaaatgattgttgtattccaccatgtcagaaattgaagcttcagcaatttgtgtagccctctctaccatgaagctgccttccgtatctaaaagaatcatgcaagcataatactcaaaatatgaagtggaactcaaaatcttagcaataaaaaaaaaagaacagatcaatgacacttgacctatatatactgcctttccaccaaggccacctaaacccaatggaatttgaacgttaactgcaagctgaatcctgtaaatcaaagcatgtgttcaactccctatagcaaacattgaaaactaaccaagaataaaaacaaaaaaacaaaaaa

SEQ ID NO: 211374 - DNA, 621 bp, Cannabis indica
tccctttcatgatccccctcctctgcacaggtggatcctcttcggtgctgggccacatgagggtcagacgcgttgactttacgcattgtctgtttagtgtgagccatcatcctgtggctgaatgggaagattgaattaaaatctccgtcgcttgaagagggtggactagaacaaagacgagggtgatccttgtgcaagagttgaagtaaatcctgaccgattcggtgttcgcttccccaaaactcacctgggttcatctacaaaagacaacatgcgagatgagtgtttggttgggatatcaaacattacacaggcaaatatgccgaccaagagtactcaacagattaaagaatagaaatattcgacgaaaagtcaaaactcaaaagtttgaaatttttgagagttacggcaaaaatttcacaaagctttgaataagcaagatgaaagatagacattgtgcattcaaaaagcaagcatcatgaatggtgaagtggcatgaatcattacaaaggaaaatcgcagagtttttgaacctagggttttctacatatcttctacagcaaagttaagatcgcattcagaaagtaaatgtggaaagtaaaagtaaaagaaattgagaac

SEQ ID NO: 211375 - DNA, 996 bp, Cannabis indica
tggattgggatagggagacagggaaaaattgggacagatgatttggctccggtagttacaacctccttagatttttaattaaaattataaataataattaataagaaaaataaacagcactagtttttaatcaataaaaactcccccaaagatcatgcagagagaaaagttgagggtacatattatcataaataataataataataataataagaacagaatcaaacgcgttgtgtaaccagaaaagagagtcgttatagaaaatagcggttttgcggttcatgccaacgaccctctactccaatatttttataagttagttcataattaatcgaatgcaagtactacttgtactaatatatatatacaaattaaaaaaccacttacctcccaatatgtaagaagaagaagaagaaaaaaaagaacactagtgatttaagttttgttattattattattattttgtgatgtttttatatctaattatttaagaagagtgttggtatatgaagggtggggatcgaattaagggttcgtggagcccacaagaagatgagactctgaaaaagctagtggaacaacatggcccacgaaactggtccgtaataagcacaggcataattggtcgctccggtaaatcttgccgattgaggtggtgtaatcagctgtgcccgagtgtacagcaccgtccttttacgccagaagaagattccatgatcatccaggcccacgcagcccacggaaacaagtgggccaccatagccagactcctcccaggccgtacagacaacgccatcaagaaccactggaattccactctccgccgaggccgccgcgccggagataagttctcctcctcctcctttacgtctgattctgattccgttttcccgaagcccctgtcagttggaggatcggaatcttctgagtcggaacctgagccggcgatgaagcggcagtgcttgttgcgatcttcgccgttggagagcaataatg

SEQ ID NO: 211376 - DNA, 544 bp, Cannabis indica
tccacatcattgaattactcctagcattctaaattatatgaaactttttatcttggtattttataaatttctaacagtaaaaacatattttgtgtagtcgctatattggatcacatccaatgtttttaggtctatctagatttgatccaattatatattggatgatatagattttaccatccaatctgatccaattaatttcagtcatccaatcgatccaacatttaatggatgttggattggatcgactctatccattggatatattttatgtatatctcactacaagaaatgtcacttttgccagcatatgtgctggcaaaagtttggtattgtgctggtaaaatagaatttactctattggcttaatttgaatttatctaatattttagacctaatatttactggaccggatcagatccatctaatattttaaatccagtatctactgaattgaattggacccattcaatccaaaaaaaaaagagtaaaatttatacaaatatttttttcaagtataaaacataaaatctaattactcatc

SEQ ID NO: 211377 - DNA, 1170 bp, Cannabis indica
aatagtgattttacaatccacacacttaaaagaggtgtattgatgtacctctacttgtttcggcatctagaaaaaaaaattaagtctaattttttttctatattcatgtacgttatagctatttaagatatccaacaaaattttgaaaaatttgtaataatttacaatatataaagtaatgttcaaacagtctattttacacgtgtgtaaaataaaatagtcacgtgtgcaacacactacttgaatgtaattttcggcgtgttaaacttttccgaatttcttaaaattttacagaatatcttaaataactataatttacatgatcataagaaaaaatttgcctaaaaaattatttaagatactaaaacaaaaaagaatgtatcgatgtatcttttttaagagaatgcattataaaattttcctataaatttttactttttttaatatgtattaacccttgttatatattgctttaaaaaaaaaacccttgttatatcctttgcaaaggataggattatgatatgattggaatcttaataaccatacacatattagcattttgtttatgtgaaccgaactttggaatgagtaaagttttgatgtgattaatgatttatttatttattgacatgaaatttacaagggtgtggtgtggcatgaccacattattatcctgggcagtgcgtcacgagagtgccctacaaaatccaaaagacagcaaagcataactttgggtgggtaggacttaggaggtaacccatttgtttgtgtctgcttttagggtttttgatccaattggaaaccaccaaactaatctattatatcatataactctcctattttatatttgggaatttctagtaaaacaacttgtcctcagcaatgatataaaaacttttcaatattattattattattattattataattttattcagatcattagtttattattattataattttattcagatcattagtttattattattataaaatataattactttactgtccctactttccatataggatatatggctatttagcattatggtattccagaaaaaaaaaaaaaaaaaacttaaataagtgaggtttaatttaattcaatggagtcactttttattttattctttattgacaggatcgaatgggagtacatataat

SEQ ID NO: 211378 - DNA, 338 bp, Cannabis indica
ataaatatatatatatatcttttaacacatgttaaaaatacaatatatatagatatatataaatcgtttcatttcgacacatgtgtaaacatatatatctatatatatatatatatatatatatatactttgtcacaagatcgatcgagctaggaaaaacattttcatatgaattcatcagattcgagcagtgaatccgtccatctttttatttttttttttttttttttagagaaaatccgtccatctattcattcaatcatttcgacattaatatatagtaatttgtgttaataattgaatacgataattggacgtgaaatgcttttttttttttt

SEQ ID NO: 211379 - DNA, 879 bp, Cannabis indica
caatactttctttacttttcacattaaaattatttagatgaatatataatttaatgggggatatgtgtatattttcaagagcacttcccgcccgtctctcttatttcccagatatatctttgtctcttttcttttaaaatttatttatttatatttaattttgttttctctcagtgaatctattttgtagtcattttaatgctttaggatatttggatacgaaatatgatttgtctgtagtgtagtttcttgattctattaaataaaaatatatttttaattctataaatatttttctaatttttttttaatattgttaaggtctctactatctcaaccactattggccgaaaccaaaagtgcacaactgatgcatattttttagtaggtcagttttttcatctcttttttttttttcttacaacttataattttttgttaacaaaatagttatatatttgattatttttagtgtgaacgtttaaaatatatatagtttagttaagtgtgtatatatgacgactaaaaaatttgaaaaaattagtatttttctatattatatctttatatattaaaagtgcctatctaacgacatttcttggtttaacagaatatacttaaaaataaaagaatattctgttaaatttaacgattaagtttgatctcccgttaacaaataaacccaataattaaacccaaaaaattaaacaatcttttaaatattaataatctctttttaaattaaaaaaatcatcttagccacatatctctctaacaaccctatcttgagagaatattaataatttttttttatttattttttaaaaaagaaaaatatagataaaatgtctaagaaaaaatataaatataaaaatgtgt

SEQ ID NO: 211380 - DNA, 549 bp, Cannabis indica
tccaagatgggagtaaaggatttttatactccatcttgagggggcctattagatattagttcatttggttatttattcggttattactgttatcatatatgtcggttatgttataacaaactcagctatatatatagctgttctatttctgtacttaatcaatcaactcaattcaataaaggcaattatttcctctgctttctttgttttagcctttgcccactattatggtatcagatgttctaatccaagaaccctacaacaaacacagcttcctctgccttcaacaatggtgcgcacgagagcaaattcgtctgctacttccactaatcctcccgtggacgatgcacttctgaatcacgttcctccagcatcccagaattctgcagatcctccccctcgtgttccaattccagctgcatcatccaatcatgtcaatggagatgaaccggcttatgaggatgtatgcagcccttactacctcagcaccgcagatcatcccggaatcgctcttgtcaccccggtattgacagataggaacttccagcc

SEQ ID NO: 211381 - DNA, 836 bp, Cannabis indica
ttctttgtcacattttggtagttaggcttacaggatttagatcaaaagtctaacacaataaacatttaggtgatttttggtaataatttgttaaattttttagaaaatagaagtaaattttgttttaaaatttattttaaaataaaatatgttctgcaattgttttaaattttagaaaataaaaattaaaatgtattctttaaatttatttgttaatttaatttaacttaagtttgggctggaggccagggtttaggtctggggctgggacggggtttgggtttaggtcatagtcttgggttccatatatgggactagggccaaggacagggttcgacgttcgagttcgtggtcggggtccaaatttgcagtcggggtttgagttcaggttagatctaggtctgggttcgggtttggatctagggcggggtccaagtccagattcgggtctgggtctcaagatccatgttagggtagtccaaaatattaattaagagaaacaaaaattatttaaaagattttgagtgtgattttttttttttcaaaatttttaaaagtttgattctcaattaaaaaattaaaaagtaaaaagaattttataaaatatggttttagaaaatatttttaattttctaattaaaaaaagaaaaaattgattaaaagtagtttaaccaaatgcacccttagaaaataggaaaacaaaaatacatggtataatttaatattaaatctataaattttaattttataattaatataaaaaattgttaacttcttatgaagaattatttttaagtggtgatgaaaatatacaaaagttacctaataacaataat

SEQ ID NO: 211382 - DNA, 746 bp, Cannabis indica
aactgttaactttaacgaaaaaagtagaaaaaaaactattaaaccaacgatttccgttaaacaaccacatttaatatacgagtgctatattttgtggccacattcaaaaatattaagataaagaaaattaaaagagaaatatatactaaattttatttaagtaaaaaaaatacattatttaaaaaaattatgataattagataaatgtttattaaaattaattgaggttgtaaaaagaatattttgaaaaatattgtttaattttttaaaattaatttagtttaggtttaagtaattttaaaatgattttcttcttaaagaaaaaggatttttcattttttacactttaaaacagtttttttttatgcatttttactaaattctacatagaaatccctattacaaataacactgcaacttaaattgcaacaaaaaattgtataaaaatccttattacaactagcgagcgttgtaaccactttataaaaaaaaaaaaaattaaaagaaatagtatatgaaataattttttaaaaaatatatatataaatatactaaattgatttaaaagaacaaaataaaataaaaaatattgcggtgtccaccataaattatgttgggttagaaacattgggtcaaataaagccatattataaatccgattggggtttcgattattcgaaggaaaggaaaacttttcttcaacaaattcttcctgcgattattggagaaagagaagaagaagaaga

SEQ ID NO: 211383 - DNA, 639 bp, Cannabis indica
gtaaaacatttttggtcaaaactgattctccttttatttcaagcataatttttttgaaattgtacgcagatcagctatgctgcctacaagaccttttaatcttttgttttctttttcattgctagctaagtaatgaattttcaatgctagatacttaggtatatgtatatcaaatatcttcttttattcttctgattaactcattttaactattgttgcaggctaagtgcgcctttcgtaatgttcctcaaaaccatatagttcatgaactaacaatgacaaatatattccgccaaataatcatgcaattacttgaaaatgtacgcgtccattttttagtttcaacataataaccatatagaaatggcatgtactttacaaattctattatttttatctataatactttgttgttgaatcaattttttttttctcttttccatcttataatattctttattataaagggcaataataacatttcaaaaaaattagacttttattgtactaatttgctgtccactaagagctttatcattgctctcttccttgctatttttttttactcattattgtcttttgggttacggttgaaaatacattccttgagtgactttactgatatgacaactatttcta

SEQ ID NO: 211384 - DNA, 774 bp, Cannabis indica
tcattcagacaccacgacattacgatcacacctagcctttcaaaatgagcattagcaaaaattcaaggattataaattgaaaataatatcttgttacctttggtgtgcctaacaaactctctaactggtgacattatatttcacatatcccaaagctttttaaaagtaaagcaatatagtaagtgtgtatgaatgtgtgtgtgtgttgagagattatatttatcttaaaagagactacaaagtcaatacccttaaagttggtgaaccatccctatctgatgcaacaacaagctgagtagcaacatcaagattccattgtaaaacagaggagcggtgtttaactgaatcggagaagctgccagttgacagagatttcaaattatagaaggcactctattacataaaaagacaaataataatatgtaaataaatccacataataaaagaagagttacctaatcacaggtctttgcttctttaagccattatacattgtctaatggctccattactactactatttagtctaaatctattttcagtgaagttctagataaaggagaggttgttgaagtgttttgtgtttcatatttttatggaaggggttatcgaagagtacctgttggataaactcaaaaggagccttgatggaaaggagagtagtaacagttctaaaatcccgatgcatagcaaattttgacacatacataattctcttgaaaaaacttctcagccttagctcaacccaacttgtgagacaacagggtcagtctt

SEQ ID NO: 211385 - DNA, 867 bp, Cannabis indica
tttttatagttaaatttagttaaattttatattcagtaaattgttcattaattttttaaaaagttgtaagtgatcataaataactataagtaaaaaaaaaaaaaacagactaaattttttttcataaataccaaaatagataactaaacactttttttaaaatgtttactactcatgatttgtgggtaaattttagaatcaaaattataactttttttttttcgtatacttaaatatcaaaaaatatcaaaaacctttgaatatttaaaaaaaaaaaatatcaaaacctgacatggataatattaatagtctttttttttttattcaaaaaaaagatattgtcttttttggaaacctccacaaactattgttgtgtcaattagtgtttttattgaaaagagttttatctcttaacatagaaaagagtgttagatagataggcatttttgtaggcactgacaattaataattcatcaattatttgcctatttttagaatcacatatataggtaagtatttaataattacaataatgaattatttgttttatgacatattaataggtaaaaattttatttttaaatttaaattaattttttttttttgaatgaaatagaaaacttcattaaaacatttaataaaattttttcaaaaattaatatttataattcttttattataaagaaataaataaaatcaaattaatatcatattacagataatttattaattattttttataaatttttaaattaatgacaactgtttattagtgatccaaagataaaaataaatataactatcatagttacatatttgacgtaattattaaaattcctaaatatatatgtatataatttttttttt

SEQ ID NO: 211386 - DNA, 563 bp, Cannabis indica
ctaacaatagcattatagatttactgcgctttgcgcagtttaaatagttttgtaaaattaatatacaatagctttaatgtttctttaattaaaaaaaaaaatcacctctctaatatttttttatgaataatatgaagaattatacataatatatatgtataaaaaaaatgtctctatataatgaaaacacaaataaatcataatacaataaaaataaaacgacttataatgatataattttttacataattaagaagcatcatttttttatttcatttattataataaaattcaaactttaatatagtaaaatatacattttcaacatgatttcattatttgaagccttttataataactgaaaactgtatatataaacaatttttataatttgtttggatattaattgtataagaaaaatattaatttgagtgtaagattttttttttttttttttggttaaaaagtaatgttagaaatttatacgtaataattaatttcataattttcctaaagaagatatgaacattttattaaatgataggtacatcattcttttttta

SEQ ID NO: 211387 - DNA, 801 bp, Cannabis indica
aaggatttatgttgcgataccattagtgtcttccctaactgcccaagatctactcggagtaaaaagtttataacaacaactaaaattcttcttttcatcatcatcatcatttcaatattcttcttttttactgggtttggtttaattttgaaacatcgcctgaaaacaagaaatgttcagcctggagcaaaatcaagtacaagaaatggcgatatattttcaatttggaattatgatggaaaaattgcatttgaagatatcatcaaagcaacggaagaatttgacattaagtattgcatcggaacaggtgggtatggtagtgtgtatagagcacaactaccaagtgggaaagtaatcgcattaaagaagctccatggttcagagattgaaaagccagctttaaaagaaagttttctcaacgaagtagagactttgacaaaaatacgtcacaaaagcattgtgcaactccacggatattgtttacacaaaagaagtatgtttttgatttacgagtacatggaaagaggaagcttgttttatgtgttgaacaatgataaagaggctgttgatttgagttggagcaaaagggttaatgtcatcaaaagcttagctcatgcattatcttacatgcatcatgattgcactccttccattgttcatcgtgatgtaactaccaccaacatcttgttaaactcgcaactagaagctttcttatctgatttcggtacagcaagattagttgatcctgatttttcgtatcaaaccatgattgccggtacatacggttatattgctccaggt

SEQ ID NO: 211388 - DNA, 2009 bp, Cannabis indica
tccagaaaaacaggactaggaactggtatatatactttcaataattactcgttgactcttaaacaagaaaaagaaagttggacgtttaaaattacatacattttacattttttgtcagtttttgagtgatgctgtaaatatcgagctggattttttttgatatgacatgaaattgacacccgaccaccaggagaaagatatgggtttgggcacgacatagtataatactatgatacgaaaaaaattaacttaagtacgacacgacaagcctgaaagtatagtacataagcatgaattaacttgtctaaaagtacaacatgttaaaaattcttataatttaataatattatttactaataaatattcaaaatccaatcattttaattaattttttatataattatgtgaactattgttgaaaaattatgaaaaatacatataatttagtggttaacttattaatgatagaaaaataatagaaaaatagagttaaattcgagcctatagaaaaaaatagactaatccatttataaaaaatgagttagtttgaacaaagtacagtatgaaaatgcgagtttacggatagtgctaaccttaccttttaaaatattggcaggatttatgttattgtgctgcaaccattttagaaatttaaaccgtaaatttgaaaaaaataaaaataaaaacagtatatgggatgattttttttcctttttcttagtgactttttttttagtcacgttggctgatttatcttttatttctttctttttcttaacttttgttttcttttctctctctctttatttttctttttcattttttttctcgatcatctctctatctctattttttttcttatttttttttatctttttatacatataatatataataaatatacatttttatatcttatttttcattactttttttactttcacaaaattttattttataattttttttaaaatacaaatttattatatttcttgttttttttttttacattattttatcatttacactcaaattatttcatagtttttttaattaattataaaatatacaaaaaaaattaacatttactaaaacttttatactttttctcatatttttttgatactcctctctcttacaatccttctatatctttctctcttttacattaataattttttttttttggttattttgtagtttatttggagttgatttgtgaatgatttgcatattttaataaattgatgtcttgttatttctctattgatttattgttgtcgttttgttattttatagtaatttttatgttgttatttatgtgttttataattattttatagttatttttatgtgtttttttttgtaaacttgttaatttttgtgtattttttatggtgtatatttttagtttattatacaatttttgttgtatatatgtatattagttttgttgttttcaattgtttttaagtagtttttaaaatatttttttattcaataaatattttttagttatttttaccgaatatgattattttaatttcatacttttttcatttttttaacattattttcctctcttacaaaacaaattaagagcactcttattttttttttcttttacgtgattaataaaaatagtattttttttatttttatattttatagtttattcagaatttatttatgaatgatttgtatattttaataagattgttgttttattatttttctattggttcatagttgtctttttgttattttatagttgattttaagcaagtatggagttttgcactaaaacttgggttttatgggtgatatgttgtttttgcttgctgtagctgctgtggttattgttgttgtgttctgcagtttagatatgagtttttatgtggtttaatacatgagttaggggttgtttgaagggttagtcaagtttgagttttgaactcgatctgaactcaatggtgaactcgttctgtgattaaagcttggtttattgc

SEQ ID NO: 211389 - DNA, 1037 bp, Cannabis indica
gtagaaacagttctaaaccgattagttatgtaattcatatagacacttattttattatataaacgagtgatctaaattaaataaactaagtgaaaattattacaaaaaatggactataagtaaaccaagctctctgattgaattacaataattctcttgtctcttctttatttctgcttttatttttgtctattttgcaacttgtatcttgagtgctcgctatttgaggtgagtactcgaacatctgtatttaagtgttctaattttatttgaatactcgtatattttagtgttgtttcttcaataacaatgcacatatatataaaataagcttcaaaacatgttttcgtggtttgacacatgaatagattacaaacatatctttttacatgatcatgtgtatattttagttatttagaacctttaataaaattttaagaaattctgaataattataatttacagtatcgaaaacataaaataagttatttcgaagtttgttttcgatcagcacgataaattatattaaatttcaacaaaattagtatgtttttgtacttaataactacaatgtatagagtgtaaaaaaaaaatatttaaattataatttttctaattacataccaaaactattattgatagggaacaaaaaaacacacaccccaccatataaatgccctaaacactcaatatataatgtatattaatgctaatttattacacaatattgaatttatttttcttaaaaatccacgttagacatgacgattacatatcataaattcattaattaataataaataattaatttgttaacatattggtaataataatttaacctgtcttgtatgtgcctaccttagccctagggttccctaattaatattatgctataaattaataatatattaattaaaaattaaggtgatttggttgtggtgtggctgaagtcaaattcaaaaggtctaaaacaggcaagtaatttttctcatcagattttattttgggcatctaatccatgtgatcaaccactaatt

SEQ ID NO: 211390 - DNA, 534 bp, Cannabis indica
tccatatatggtttaaaacagtcatcacgacaatggtacacaaaattgtctgatgctttgttggaagagggatttgtccaatcccaagccgattacactctctttaccaaaggatcacaagacacttttattgctatattagtgtatgtcgacgacatcattataacaggcccaaactttatccctgttgcatcaacttcagtccacactacatgagaaattttctctcaaagctcttggcaccctcaaatattttttaggatttgagattgctcgtgccaaagaaggtttggtgttatctcaaaggaaatacacgctccaacttctcgaagacaacggctatgtagggagtaagcccaccaaaactcccatggaccctcgcatcaaattagatgatcaacaaggagaacctcttgaagatccttcaccttatcgacaacttgtgggaaaactcctatatcttacactttccaggcctgatatcacatttgcagtaaatcttctcagccaattcgtgtcttctccacgcacacc

SEQ ID NO: 211391 - DNA, 360 bp, Cannabis indica
cactatagttttcttttagtaaatattattttatcacaaacaaatagcataaagaacaaatcagattatacgagaaaaaaaaaactgagatgttgagatgtagacctgagtagtgagctataacacttgacgacgatggtgacgaagacctgagcaaagaaatctgacgacgaactgagtttttttcaccgagccaaaagaaaaagaggaaaagcaaaaagaagacttgtgctacatcctatcagacggagtaatcggagccagagggaagaacacgggacaacacagttaggagacctgggagtgggcgattcgcatctgttagggttttatcaacttcaaaaatagtgtggctgctct

SEQ ID NO: 211392 - DNA, 742 bp, Cannabis indica
ttttttgtatatgttcgtgctaaaaataatcttcaagtttttttttttttgtaaaactcttcaagttagttatattaaaaaaattatcaaaaaatgagtttatggtactattttgtattattttgaaaatacatggtgtaatttgttattttgtaaataaagggtccaatcggttacttttataaaatacaaagtccaaaataatattaacctaaactttttatagaaatttaaataaaaagaattgagacttcaattttatgtaatttttgttgtattaatgagaacttactatctagaaaaaattcttagaaatgaaaatagaagaaataaaaattttgatgagtttttatattttttatgcaaaaatatagttttttctaaagttattttgttgaaaaattaaaaaataatgggaaaatcatataagagtaaccagttaccataagggtaactaagtacctttttttttcataattttaattttttttctaaatttttttttcacaaaataactttttcttttcaagaaaaattgatatttttgtataattatactttaaaaatcataaaaataaaaattcctcgaaaaaaaataatacctgctctggaaaatcaccattttccagttgagaattgataatgagcttcgcagcatgatgaagaggtgttgggtctctttcagcttgtccagcatgaatcaaagccatcatagcccatgaagtttgtactaaatttgatc

SEQ ID NO: 211393 - DNA, 579 bp, Cannabis indica
tctcccttttccttttctttttccttgctctctgcagacgtaggctttcgactattctggtacggttgaagtttgctgagcacttgaaggaagcagtcacatacattgagcaggggcatatacgagtcggtccagacactatcactgatccagcattccttgtgacaaggaatatggaagacttcattacatgggtggattcatctaagataaggagaaaggtgcttgaatacaatgacaagttggatgactacgatgcaatgaactgaagatagcacctgcggatataatataacatgtcaaaaaaaaatgacatgtggagccagattaggcgtagcgaccccatttagcttcaccgggcatggagttttaaagaagcagatgaacttccattctgaaatttctcaatcgcatcaagttcatttgcattcccttccctagaacatggttttggggaagttactattaaagagaatgttgtgggaattgttctgcagttttgttttcccatgtgcatgtgtttttttgactggtgctggatattcttactattaaactgaaattctttcatatatatat

SEQ ID NO: 211394 - DNA, 688 bp, Cannabis indica
ttgagtaatggattgtatttcctcgatggaaaggcaataacaggtagtgcaacacctattattaactcaattaaacacagtcaagcaaggctatgacacctcagattaggacatgtaagtcagaggagacttaaggaaatgaatagtcaaagattattcaaagagaagctaacaaaaagacttgaattatgtgatgaatgtgttttggggaaggcttgcagattgaagttcaacaaggcagaacacaccaccacagaaatattagcttatgtccattttgacctttgggggccatctaggatttcaaccaaaggtggagcacattattttatgagtataattgatgattacagcaggaaagtctaggtttatttgttgaaaaccaaaatgaggctctagaaatctttgataaatggaagaggctgctagaaaactagtatggaaacaaactcaaggtcctaagaattgacaatggccttgagtactgctcaaatgagttcaagggattgtgtgccaaaatggaaatccagagacatagaactgtgattaaaacccctaaccaaaatggtgttgctaaaatgatgaatataacactgattgagagggttaggtgcatgttactaggagctggtttagacataacttaataaatagatcaccatctgtgtcaaacaacttcaagacccca

SEQ ID NO: 211395 - DNA, 805 bp, Cannabis indica
ataaattcccccttattatattataccatttttataccaatattattaaccatatactaaaagtacatctacccttagaaatctctcaaacaatttcttaaacattaagaaaaatatatagttcatttccaatagattatatggttgttgtttgtattggttttgttttgctgttttttttttctttttcttttaaatggtgagatttgattttctggtataatctgggtatttattaaatttcgataaattttcaatatgttatcgatgacttctcgatgtatagcgtaccaaagtcaaggtgtccatttttgacactttctcaattatttttaaataggttttcgatggtctgcctttttttttaattttttttttacttgatttttgtattgtgatttttggtttacttttttcgtacatgtttttgtatgccttttcgtacgatttcttgatagttcactgaaaattattttatgacagattttcaataggttctcgatagtccactaaaagttgtattgtaatagattttcgataggttctcgatattttttggttagttttttgtatggtttttcaataggttcacgatacttcactgaacattgtgttgtaatatattttgtataagttctcgataggctggatcttctctggatcgtcttcttgtttaggagatgatgcaagcaggggattcctacttgggctctgacagattttttgctcgtcgagctgctgcgatcgagcaaaatagattttatgggtttagatggtgaggacgatggggttcggtgtagatgca

SEQ ID NO: 211396 - DNA, 1395 bp, Cannabis indica
acaatttcaacaagaaataatacagaataacataataatataatactaagaacttgttggactcaagttcttcacataacaaagaaaaaaagtctctaactttgaaagtaatttaggaaatgatacaccaggagtgctaaccaaaaccagcgacctaagggtgtgttaataaactttaaaaaccatctaggtcgtggtcgaacaaccaagaaacaatcaagtcaataaatgaaaaacgtcccacataggaaagtcaaaatctgtataaacaaatagccagtccgttcaaactggtataatgaacctggacagtttttcagcaaagtttctataagcaaataaggcaactttgactatattaacacacatagctgtacacggtttcttgattaagaaatcagataaaaaaagaataaaatatgattaagaatttccttaaaaaacaaagataaaatcaaatattctaaataaagaaaactcatatttaattcacacaaagtgaatagggaataaaatttgatttcgaaagccttttcacactaagaaaataaaactatatttttaaaaataatgaataaacaaataaaaatatttttcaaaaataccacaaatattattttttatctattttatcaaatatgccaataaagaattatacaatctccccctttggtaatttgatagacaaaaataaaacaaaaacatgcaaacacatatgttagaaataagtaaagagaagaactccccctgcaagcatgcataagttataacaaacattccatacttatatggtgtgcatggactctttatattccacattacaaaaatacccttcccattcaaactctcactctaactttccatctcacaaagtatctctcgctccttctcactctaaccccctcactgtctttggcgctccaccatcaccaaccaccgcctccaccacgacttatgggcctctccgtatttcacactctttctctgttcttgaatcgaaacccatgagaactgcccccaaaaccaatgataacagcccctgaaacccaagaccaccgtcccaaagccctaaaatcgagaccaaattgctattttacctacattttgacatagtcaatgtagattggaagacccgagacaccaatctctattaaactccattattcgataagttttttatttttttttttgtgatttttctttgattaggttttgcaaatcgaatcatgggtttgttttgttgtttatgcttgagtttaaggaaactagtttgatttttatgttaaatttgtgtgtttgggtttgatttttgttgctggtcgttctacttctaggtttttctataattattattgatgtttctcgacatagttggggacatctaacgatatcaac

SEQ ID NO: 211397 - DNA, 772 bp, Cannabis indica
actataatctgcaagtaatttgcttctatttctagaaaaaaaaatatatatatatataataaaaaaaaagaatattgatttttttatatgctaaaagataatataaataataaataaatttttttaaaaaaaagatcatttaactacaagttttaaattggaaatatttactaacatagtctttgatgccatttactataattcttctttcaattattttttttaatttgtatcaaattcctcagactctaagaataaaagcgaggaataaaatgattaattctttatatgttacaaagttctatatcaatttttaaagtatctctccaatggtgtctaattcattaaaatactattattattacagaaatacttttgaatatatcatactataattttatttattttttgaaaagttatttatttaaagcaaaaaaaataatgaatattctgttaaataataatattattagataaggaatatatattttttttaataataagaatttatttggttcatatatacttttgacagtaaatataaataaatatattacaaatggttctttttttatttttattttttgaaatatacatgggttttcattttagatgagtgtattagtcacaaatcaattaatctatatatattttagggtgcgtttggtaatatttttttaatcagtttttttatttttaaaattagaaaaataaaatattttttaaaaaaatcatgttctataaactgttttcactttttaatttcttaatt

SEQ ID NO: 211398 - DNA, 492 bp, Cannabis indica
gaaaaaacttagtgtttttatcaccagcattaagccaactaacatgagctcactgtctccaatacacttcttctttatataagaaagcatccaactgagactgtaagaccttaatcttagccacattactttcttctaaaggaaaagtattatgaagttcagcaatagttttattatgggttgcaattttattcttaaacaagttacgggtagatacattccaagacttaagagaagatataaaggactcctgtttggcaaggaaactagagaaagcagagccaatatgagtaaaagaattaagccaagaattttgaacagttcgaaagaactcctcattttctaaccagatattctcaaactgaaactgtttcttagaaattacaggagtagaaacattatctaagctagtgacaacctttaagactctgtgatccgaaccaaaataagctaagtgatctaacatagaatcagggaaaagatcaaaccaag

SEQ ID NO: 211399 - DNA, 557 bp, Cannabis indica
ctaatttgagaaatcagaactctccttttgacatatatattttcaaaatatagagagaaaaagaaagaaagaatttttctctcaattattctttctcatgtgttgagaactcaacaagaacaaacctatacactttatcctaatagcccacactatttcttgtgtatgggggatcgatttggaagatattaatctgagtttaattgcatcatcctcatcaactagattaagggatacgacatacgagaagttttgaggataccctgatagtattcaagaggtatatattttctaaactagtattttatattttgatttaatgtacacacatatggatatctattgggaaatctacaattataataaaataataagaaacttttccattgcgtatctgatttagtaccataaaaccaacaatacgttgtacggagacttcacgtccaccactatgaatgtggctatgatggtcgtcgaccttgggatagtgtcgactatggtagtttggtcttaccacatggagctatacccactccgctgaagccatccattaattg

SEQ ID NO: 211400 - DNA, 1155 bp, Cannabis indica
tttaaaatgcaataaaaaaaattgaataaaaaatttaaatcttacattgaaatagtcttttcttccattttaaaaaatatatggaaaagtcattcaatcaaaataataaaaaaattattctattgaaatttaaaaaaaaaaaaaaaaacaaccaaataaaataataaaataaaaattactttatttccattctatttcatttcaatatcttcaaccaaatgtcacctaaatgatcaaaatgccttattaaacatttcatcatcatcatatatatatatatatatatttgagcaaaataaaaaaaaaaaaaatgtccgcattttgataatttagcgacatattttggctaagtatcacgtatatgactcgtttggtacgttgtattgtagtattgtattgtacgttggattgttgtatcatgttgtatagcattagtattattaatataatgttatgtttggtattgacttgtattaataggttgtgtagataatatattttttaataaacttgatcccaacaccgactacaagtctagtccagaatcggagtccgtgagcgatccagttcccaagttgggtctagagtttgaatttgggtattggtctgggtctgaattctttgtaaatattataatacaagataatacagactattggttatgtattaaataatacaatttacattgtattaaaattttttgtcgtaataattaatacaatacattactttatgtaaacatagtgttatttattatttaatacaatacaatctttatacgccctaccaaacgaaccatattttttaattttttaaaatttcaaaatatataaatatatatgttggattctacaatgcatttcctaagaggggtgtagatgtacccttatttatttcgacatttaggagaattttttagtttaatttttttttataatcgtttacattaattatagttatttaggatatcttctaaattttttagaaaattaatttacaatataaaaagcagtgttcaaatagtttatttcgcgctcgtataaaataatttttttttgcgtacaacagactgtttgaatcttgttttcgacgtgtgaaattttttaaaattttagagatgtctcaaataactacaacatattaccatgaaaaaaa

SEQ ID NO: 211401 - DNA, 500 bp, Cannabis indica
tcattccaaaccatattaataaaaacccagtctaaacgttcctgtaaagcttgaggatctcgtctgtttttgcaccaggtgaagtctggaccagcaaaaggaatttcaaggagagcgcaaaggtctaaagtagtacggaatgccatcatatgattgtcagatcgtaaaggacccgagtttttgtgcgaatgtgaaaaaatttcattcaaatctcctactagtagccacggatccaaaggagaaacatcagcaagtctctctaaaagtgtccaagtgtgttttttattgattgcttcaggaaaaccatatacagccgaaaagtgccatcgagggccatcattgtacgagatgtaacaatcaaaataattagaattcattgataaaagagttacatttacatcatcatgccataatagcattaagccacccttcagaccagagcgagggacttccagaccattattaaactttaaacattgcttaaaacgagtaatacaacc

SEQ ID NO: 211402 - DNA, 989 bp, Cannabis indica
tttttttttacattttttagtgtcattttaaaacaaccaacaaacaacaagaaaactatataaaagtaacaggaaaatagcaacaaaacatcatcaaaacaacaaaaaaaatttatgaggtatcatgtgttattcgttttttacttattttgttgtgaaactagttttgtttttaatttatgtttcagtattttaagaactgattttctctttattttttaattgtgtaaccgatttgagttattgcgtgttacttatttttattcattatgatataaaactagttttattttaataataattagtttgtgtcatttcatgttatttatttttattcattataacattgttatagaaacagatctatttttattataactgggttgggttatttatttttattcattatgttatagaaattgttctactttaatttataactgagacatctaactctggtgactcactacaaaaaatagctacttttagtgataactttagtcacaatataaatttttttgtgactaaatatgatttttagtcacaacaaaaagttacttgtgactaaaacataatatttagacacaagttgtcattaatttagttttagtcacaacaagtattatgaccaaaaacacatttagtcacaataatttgtgatttttgtaactaatacttttagttacgaattttttagttacaacataagaatagtgatttgttattagtcacaactattttacttttagctacaagttttgttgtgtctaaaagtaaaaaatttcgtattgacttttctgatgacgatgataattctgatgacttttccgacaattttcgacgactttttcagcactggtgactcttctgatgacctttccaacaccaatgacttttctaacaccaatgtctgctcccgtaatttttccgacgataattattataaattttaccaactttatgtatgatattttatttattttctcatt

SEQ ID NO: 211403 - DNA, 1025 bp, Cannabis indica
ttattaattattaaattataaacaaataaatatgaattctcagatttacccttcccttaaatcctgcaaatattctccaaatcttcatccaaatttgtccgaatagcaaaattaatttgaagaggaagaaaacaaattaggcaaatttggttaataataatagaagagagtttataatgtcgtaagatttgattggagatatgtttggttaaaaaacattgaacaatgaaaaataaatgttatgatccttaaatcctaacaagtagggtactaatttctaatgtaaaggattgggggggatgtaccccattttccataacatgcacgtggacccctttggctctaaccccatattgaccaaactagatttgttttaattttaagttatggatttctttaatgtgtgataatcggataatgagcttactttactaccacgtgtcgatcttcaacttgatctcccgaataagaaaaaattaatatgaatattaatagggtgaggtgagatgctcatcgagctcaaatatgggaaagaaagtaattaggcaggagacattttggctgtttgttttggccatttttataattagtaaataaaagaaaaagggaagatggggtatccttgcacatggctatggtcatatttggagaatccaaaatccctgcctttggaagggttcaattatatttatacatttatattgtataaggttccaaatatgtaaataaataatggctataatttttgttcttctttttcaaagggggtcatcttcaactactagttttagagaaaatcaaatagtgtgtttgttttttaaaatgtttctcacccaacccaaccatatttatggtattaatgattattatgagtttcaatcttcaacttcgtgtgcctaaaaggcaactctcaccgcacgaacaccacaaaatgctctcttggtctttcaaatttcctaattattttgtcatattttatatattagtatatttgttattaactcatatcacataaatatataata

SEQ ID NO: 211404 - DNA, 1042 bp, Cannabis indica
taccatgctcagatgtaggagacaagatttgattcattagaaaagcataatcgtcactttagtgacctggcatgtgggaaaagtccacattcgggatacccagtgaaggtcgacatttgctttaggtcctccgggtacttgcttggaggtaaatcaaataatcttccctagtaggtccttacagggtctgagagagacgcttttttttctgcctttgggaagtaaggctggcataagtaggcttccgcgtgtcccttcgtcctggatgattctttgttcgtggagacctttcagcgatacgcaattttaaagtacttcaagcaatggaggattaatttgaccttcttcaacaaatgtcacttgtcatgtcttgcaaaaaaactcagataacatttactattatagcacttttgagtctcaacctctatttttcttttaaaagaaaatatcaaagcccttaattttggttacagtgagaaaataagagagaagtgagaagaaatttttttttgacaaataattatatataaaaaataaataaaaaataatattaaatattgatataaaatataacaattactcatattacaaaaaataaatctacataaaattatttttaatatatctattagggctgtatatcggtcggtttagtcgatttatactacatatttttcaacccaacataaaaatcgggttgtaaaattctgcatgcaaacttcccaatttaaaaaaaaaaaaatttgtacccgaccgacggtttgggttgggccgaattaagatttttttttttttttagattcaactaaaataaaaattaataacatataatatgtatacataaataatttggcaattcaatcaacctcaccagtcaaagatttatccacaaattataaaaaaaaaaaattcactgtgccgaactagcttatatatctcataaacaaaatgaatgaaaagggtttaacctttggaaatagatgtctgtcttaatccagggcaacaagcatgtaataatacaagtaattggcacataaaaaaa

SEQ ID NO: 211405 - DNA, 904 bp, Cannabis indica
ctacaagaaaaataagaattaggggtggttagtttaccggcggagcatttgcgccactaataatgagagtattaccggcgaaatatgcttcctgctggtaataatcaaagaaaataataaaattaattttttttagtattaccggcagacttttggttattatcggtggagcgccgctaataagaaaataggaatgagcggaaaatttatcgctcttttagtttgaaaccatattctcggtagactattagcagcacgagtccgatggtaattaattattttattacttttatatttattaccggcgtttcccattaataacggtgggatcccgtcggtaataaatttctatatataaaataaaaacctcagaataccctacagtctcttctcatttcgtctcttcatctcttctcttcttctccgcctcttctcttctattgatcttgctccacttctgcaccgagcaagcaccaccaggtaagatttgttttgtttttttcattctataattagtttattttaattatatatatttcgtttacccacctattttttgccagctttggacgtcagaccaccattaattttttgagctattttcgcatgccagaggtttagtgatgggtcagtttctttttttctgatatgttgttgtttctgcaactaagagaaatgaaaaaaaaaattatatgagtgaataagttggcgactgattgcagtgaaaggtttattaatatgtgagtgaatgaaaaaattctaaattaaatgggttggtccacaaacttttattataacatttaactttatgggccaaactatttttttttcttctctactttcccaaatttaagatatatatttttattctcaaaaaaatatataaaatctataatttttgctt

SEQ ID NO: 211406 - DNA, 847 bp, Cannabis indica
ctattttgtaaatgacaagcagacaagaaagcttcaccccaaaggttattaggtgcacaagaactaataagcattgcattcatcatttcttttaagttctattttttcgttctgcaattccatttgattcaggagaatacagaggagttacttcatgaattatgccttctttttcacataaatcatttatcgaaagatattctccttcacgatcagatctaactctcttaatctttttatttaattggttttctacttttgctttataagataaaaacatattaaatgtttcatctttatgtctaagtaaatataccttaacatatctagaaaagtcatctataaaaatcacataatattttttagggtaaatagtggtataagtacccaaagttttaagtttgtaagtgccataatctcaatgtttatttttagcggcagaagtacccaatgtttgtaaaactgtaaattttactctaattttgtcagtacaatttctattattttcttaaacaggccacatataaggtcaagattcttgatcactgagtctagacataaacatgtagtatcagttacttctaaatgttcctttaatatattcaaaacagagtctgtactgataaaactagaggaaaattacagttttacaaacattgggtacttatgccgctaaaaataacattgagtttatgccgctcacaaacttaaaactttggatacttatggcgctatttaccatattttttaccacctcttgtcatagtttgttttaaatctcctaagtgagtgtaaattaaacttaacaatttagattctctttaaacagatttacaagatttcttag

SEQ ID NO: 211407 - DNA, 641 bp, Cannabis indica
ctttgcaagccaaaggataaaggtggaatggggttcaaagatctagagaagttcaatcaatctttattagctaagcaagggtggaagatcatcaataatcctagttcattgctggctcgggttcttaaggcttgctatttcaccaactctactttcatggatgctaaacttggaggattttgctccttcatgtggagaagcattttatggggaaggaaaatagtggaaaggggagctagatggagggtccaatcgggtagagaagtgcgcataaacgaagacaaatggctgccccacccatccaccttcactcttcccacccctgcaaaagttaacaatgggacaactatggatcacttaaaggatgaagaaggagagtggaatcaagacatgataactcaaacttttcacccggatgatgtgccaattgtgctaggtatggctccttgttataataatgctattgatgatttagtttggcactacacaccgaatggtatgtatacggtgagtagtggctataaagtggccaccaccaacgaattaaatgcagggccttcatcggaggagcatacaaagaaatggtggactgaaatttggaagttggaagtccctcctaaggttcgaaattttgcttggcg

SEQ ID NO: 211408 - DNA, 730 bp, Cannabis indica
ggtccactactgggtgattatcattaatatagtaatttacattaaaatattatttagacttggaattggaacatggttaatgttttacatctcagatcaaattcatagaactttaatcctttagatttgttaaattttatcaataaaagagtcaaatggcagcagcaattggggttgttttactggcttcattgctgtatatatacccatcaaaagcttgtcactttcctgccatttataactttggcgactccaactccgacaccggcactgtctcggcggtgtttggccggcttcctccaccttatggtgagaccttttttggtaaaccttctggtcggtattctgatgggcgtctcatcattgattttataggtatgttggtccatcttttaagacccttttgggatttttctccaaaggagccatatttctgggctagcatagcataacagcatgttttttgtactacgtagttcagttcaagtgtatggtactagtgatgagtattaaatggtatttctttgttgaaattgacactgtttttgcttttctttttcagctgaacatttgggattaccatctttgaatgcataccttgattcaattggatcgaatttcagccatggatccaactttgctgcaagtgggtctacactacaggcagtaaatgccaagttatatgaagctggttttaaccctttttctctcaatttgcagcttttgcagt

SEQ ID NO: 211409 - DNA, 1023 bp, Cannabis indica
atgtgatgcctttaaccaattctaagtgcaaattagagcatccaccatttttggactcaaagaacttctaaataagtctaaaatgtgaccacttgtactaaaagcatattcagatgccatagtagaaataggaatagcaaggacatctcttgcaatcaatgacaaaatattgtatctcttagcattatcattccaccatataagaatatcaaatgaaaaagtcattggattaacaacttcgtctcccaaatacgtatcattcttctcattcaaaaaattcacctcttcttgttgcaaatataaagttagtaagtttcttttttgaattttcttgatctcactctttggtggtgatgcactactatttttatttacaacctcagtctcacctttgttttttatactatagcaagcatacaaacgatgaagggtttgctcaactttgagcataatctttgtaacagtttcagtataataaacactctcaaaacaatatttaagatacttcaacttttacctaggatcaagcacaacagcaacaaacaacataacattgatgttttttacatccccccaatatttgtcatacttttttttcatactggcagccataacagataatagatgtttatcacttgaagccaaataagataattgtgtgtgaatttcacaaatttcatgataaaatgtgtttgatataacatgcaaggtaccgctaaactttagtgtgacttcgtaaaaagtgcgtaaaaacttgacaaatatcttagcactctcccaatcactagtagtaggcggtccaactctcttctccccactttcattttcattgaaataactcaagaatctatcatcttcctcctcataccttgcaaatgccttctcaaagataataacaacatctaacatcataaaagttcactctcctcctaccaagactaacagctacatcattggctgatgcattgtccacagtcacggcaaataccttctctattctccaaccaagcaaacaagattcaa

SEQ ID NO: 211410 - DNA, 482 bp, Cannabis indica
aaataccaaattttttggagacgaaatccatgcgccagctatccctctccaatccatcaccaccccttggccttttcacacttgggctatggacctcataggtccaatatcgccaccctcttagggaagaatttggattttagccgcaacagactgtttcacaaaatggtcagaagcaatcccattgaaaaaggcctctacagaagctgtggccactttcatcttggaacacatcatttgttgtttttgcattccaaaaagaatcttgtcagagaatggcacaccattcaccggcaaagcaacaaaaagttactagaagattatcaaattttccatgggaaatcaaccaggtactaccgcaaggaaatggcatagcagaagcacttaatgaactattgctgtgggtattaagtcgtatggtacatgacagtcccacaattgggcatgaattcattcctttggctttatgggcctatcgtacc

SEQ ID NO: 211411 - DNA, 999 bp, Cannabis indica
atttactaattaatttatttttcaatttgatttcacgaattaattattaaaatattttgacaattaatgtggcaaagatactatttgatggactttagtacgcttttgctaatctttaattctattgttagaattctcataaattaattagggctaaattcacaatacatcatttttatcaaaactgtaacaagtatctcttagagctaaaatagaagagaaaatatgatctacttgttcttgaagctaatttagtggaagatgataatttatggaatgttgattttggagccactactatatttgttcttctatgtagatacttgattaattaagggagttggctgatggagaggtgaccatgaggattaggagtagagcataagtgtctgccaattgtgtatgcaaagtccgtttaaaattaaataataagtttttatttgaacaatatttattttattcttatttgtaccagaaatataatttatttatctcttttgcatgaacaatattttaacattggttttattaataatgagattattatttccaagtttaaaatgcctatttgtagtgcaaaacaaagtaatagactttatgtactctgacctagtgagcaattaattttaaataatgaattgtttagagtagttttacctcaacaaaataagaggaaaaggtttctaacgattatgaaatatatctgtggcatctacatttaggccatattggcctagacagaataaaccgattaacaaaggatggtcttaagaaagtaatgaaggtatgtataataaaataacaaacaaatgatttttacgtggttcaggtgttaattatccttagtcaacgtgtccattttattaggctcatcgatcggtggttgtttatacaaatacaaaaaggatgtacttttaccccaatcccttgtgttcctcttgaagaaaaagaagcttaataggaatattttgaagctagtaatggggttacagtaggatg

SEQ ID NO: 211412 - DNA, 512 bp, Cannabis indica
tattagagtatgcaaactttaggggtttcaatactataaaataatacagttaatggtattcttttaaaaattattatatataattatgtaagattcagtaattaatcacattaatagtgatataatattttttacattgctattagacaccagtggtgcctagtattttcttgacatgttgcgttgcgattcgctaacgatactccttaaaaattattatattaaattatataaactcgatacttagttggaccaataacgatattgacacataggaatgtgtgataaaactagttgttttgttagttagcttcttgtgtatagttgttaggttcttgtacataactgactttctgttacaaggttgttagttgttttttacagtttttccttatgtacctgtaaatcttttctcctataaataaaggattgcatcactaaagccttgtatcttttgcaagcttagtttttcttcagcttgtattgatagggtgccctttaacatttctcaa

SEQ ID NO: 211413 - DNA, 961 bp, Cannabis indica
cactttaagatcaataaaatgaccttattacgcactaatcaactgcccatctagaagatctatgttgacggagcgtcaaacgagaaaggagtcagagcaaggatcattttgatctctctgcaagggcacgagctctagattgccctacgcttcaatttttgcgcctccaacaatgaagctgaacatgaagctatgctggcaggcttaaagctggctaaggaggtgggagcccaacacattgaagtacatagcgattcccagctaatggtgaatcaaatatctggcgagtaccaaataaaaggtgaaaaaatggttgcttaagtcatgatatcccgggagctgctacaagggttcaagggttacaacatctgccaagtcctaagggaccaaaattcactcgcggatatgctcgccaaacttgcaatggatctcgagatcattcaacacaaagtagtcccaatttgtcacctaaaaaagttaaacattgaggcccagggggtaaatgctatagtcaacaactctcattcttggatgacacccatttacaaattttagagttcgggaaagcttcctttgtataaagccgcctccaggaaagtctagtatcaggctccccattatgtgatcatggatgaaaagctttacagccagagattgtcaatgccatagttgaggagcattgctggaactgaaatcagtgatgtaatccacgaggttcatggtggcttctgtggagatcacacatccagaaccagcttatcaaagaaagtctttgtcaagggtatttttggctcacaatgaagaaggattgcataaagcatgtccaaaaatgtgaacaatgtcacaggtatgctaaggctctacgtgcacaaccaactaaaatcacacccatgagtagcccatggccttttgcagtttggagtatcgatttagtaggctccctccccacaggaagaggaat

SEQ ID NO: 211414 - DNA, 703 bp, Cannabis indica
gtagacaatctaccaccaatagaagaatcaacaactcaaaaataaacaatccaaggcataatgttggaaaatggtgaaacaatatttgacttcatggactatgcaaaactggtggctgaggaaatagttgcacaactagaaacaacccagacagagaggcaaaaatcattgattatgacaaactaataatcatagatcttcattatcatgaaatagaagaagcacaaatatacaaggacaaagaaacattacaaagtgtgtttagtttctacgcaataagaaacaacttctcatacaaggtcaaaaagtcttgcacaaaaacatacaaaatttgttgcttggatccaaaatacaaatggacactaatggcatcaagaaatggaccaaccaagtgtttcataatccgtaaatatgatagaaaggtgatacacacttataatctcaccataagatttgtagacaagcgacatgctacaacaaaaattgattggaaactacatcaagcctaagttcaccaacctaaaaataattcaaacgccacaagacatcagagaagaattgaatgataagtatggcataaaaatgaactgtatgaaagcatggagaggtaaaaagcatgcacaataagaatgtcagcaaactcaataaaccattttcgcagcagcaaaagtatagcactggatgattcaataaaaggatggaa

SEQ ID NO: 211415 - DNA, 911 bp, Cannabis indica
ctcatgagcatttgatgaagaagcactcataaaatcaggttgaccaaaagacttggagacacctttaactttaaatttaataacgtccggagtagtgtcaccagaaaagtagtcatcaagattcaaactcactctctcaacagatgttggcgagatgtttcttagtttaaactgcaacaatgagaaccaacaaattatatacaaacatctaaaaaatgaattaaaataaaaatgaaaacatataataaaacatacatataggaaaataactgtaaaacaacaatagaaaaagtgtaaaaaaccaaacaagtacctctttcaatgaccgattgaatacgaggctactcatgatatccatcttcatctgaggatccttttcctttggtaatttaggccaattcagaagccttagagtgtcaatatttgaatacaaagataatttcccaataacatatggacaacactcgaaaaaccagaatcgcaacgccaatggaaaatccaataacctatagtacacaccatcttcatcactctgtataaccttcttatgaccagaatcaatcttaccattcaaagattgaattatcatatcaaaacactcattacccacccatattcattgtaacgatcactattaataacatctaattcctcaatctgaaaaactttaccagggggaccacccaacaaataacactgaacaaaatataacacagccaacttgattgcaagatcattattacccttaagattgtcagcaataaaagcagtttgtatagcactcttggttatttttttatagccctttaaacactattttacaagcatattatcatcttacttgaactgaaaaatgtcagaatcaatatgataatccaaaccggtaaataaagaaaactcctcaacactaa

SEQ ID NO: 211416 - DNA, 551 bp, Cannabis indica
gaaatcttcttctcagcagcgaaaagcttcttgttggcctgacccaactccaactgaacagctccgatttatgccctggctttctcagcttccttcctggccaagtccgcctccgccttcaaggtgttggacagagccgcgttcttggaagcaagagacttagcccaggagtaagtgtaggccaaattcaaaccggcctgtacagaagaaaaaactttagcatattgagctaagtgtggaaagttaaagggaagtatcaaaaaagacttaccctggtgaactccttcaagactgcacccaccaacacatccaaagatgagtgattatgagcaccagctagttgctcactgacctcaggaaccagccggttcatgtaatgggccagcatctccttgccctttttggcctctagaagcactggcaaaggtggagttggtgcctggaccaactcaggatcactcctgacccgttcagacctagccgttggtggtccagactccttggacttggcagactcggggcactaccacaatctggccttttagtgacac

SEQ ID NO: 211417 - DNA, 700 bp, Cannabis indica
ttaggatcaatttggcacaattggtttgataacataataaatgagtattttccgggtagatatggtatgggtgtaattagttggtgggttggagcatgttgaatggatatttttgtttgagttattttatttaactagtttctttgtgtgagtttttatcttagttgctttacgggagtaatttttttgtcacaaatttttaactagttgataaatataacccgtttctttattttatatttaagttattgtgtggtattatttgtatttatttattttgttatgaaaccggttcttttcatatttatgcctcaatattttttagaattgatccctatttttttaaaaaaaaaattataatcgattttatgagatattatgtggtatgatgtattttgttatggaactagttttgtttttaatttatgtttcagtattttagaaactaatttcctctttattttttacttgtaatcagtttgagttattaagtgttacttgtttgtattcattatattatataaccggttctattttagtgataaccggtttgagttatttcgtgttatttatttttattcattataacactgttatagaactggttctattttaattataactgatttgagttattttgtgttatttgtttttatttattatgttacgaaaccagttatatttcaattataatcggttt

SEQ ID NO: 211418 - DNA, 534 bp, Cannabis indica
attccagtgggaagaggctttggattttttacatttattgcgaatgacaactaaggacatagatcatgttactattgggttggtattgaatatttgtgctggtctttcagacgttcaaacaggcaaacaggttcatggatttgtctatcgacatggtttgttttccaagctcaatgttagcaatgcccttcttgacatgtatggtaaatgtgggaatttgacaagtgcgagggttttgtttttccaaatgagtcaattgcgggataatgtttcttggaatactttattgactagctatgcttgtcatggccaaagcgaacaagctttgacaatcttctgggagatgcaatgggagacacaaccaagtaaatttacttttgcaacccttttggctgcttgtgcaaatatccttgcttttgagcaaggcagacaaagtcacgctttcattatcaggaatggttacgagatagatattgtgcttgcaggagctttggttgacatgtactccaagtgtcgttgtcttgattatgccct

SEQ ID NO: 211419 - DNA, 542 bp, Cannabis indica
aggtaaaaatattaatttttaacgataaaagaaatagaacttactataaggattattattatgtaactgttattttataaaaattttttaatttttcatatatattttaaggataaaatgtgtagaaaattcaagtgataaaaatattaattattgtatgttagaggagaaaaggggacctgaaaagtacaaatgatatattcactctttgactgccacaataacatatatggtcaagccacttgttataaattagttgtggttgacctttggaacttggaaaggcttgaataatgatacatatctatagtttcattaataatattattttggatatgcacatcactacaattgtgatcacaagtgtatcccttcattagacaactggtttaaaaagttatatatatataatatattattgttagagatattgatgataatattaaggaactatatatatattttgtggtaaaacttttcaaattgtatttttgttttggtatttactttctatatcaaaaattatgtgggaaatttacatg

SEQ ID NO: 211420 - DNA, 932 bp, Cannabis indica
aattaagtttttatgccatatatatcaaaacttattctttattttcccattattttttgtaaattagccttttttttttttttactttaacttactttatattaatttatatttttattaattaaaaataaaaaaagacaaatatgaccccttaaaaatatataaaataaaaaataattacatgttctaataataacaatttagtcaaattaagtcatttcgattacatttcttgatattgtaaacaaaataaaatgattttgattttctttccggccagtttagtaaataacaaaataaaatattgtttccgattattttatatttttaacccgattcatttcttccattaattattctgattccaattacagtttagtaaacgtgccagtgtaattttttttgtaaccaagatgtataatgtctaccatttgctattttgttatagtgtcccactatatatatatatatatatatagtgttatactatacattaggacatttctatttttttttccaataatattaaaattatataattattttacataataacgttaaaattaatattttattttactaatatcaatataataataagaaaaataaattttagtgtggcttttagtgttattgaaatttggaatgaaagaattttattttactaatatcaatataataataagaaaaataatattagtgtagctgttagtgttatgattggaatgaaacaatgagattatttcacaaacacaaaaataccgatgcacgaaattttaaatatttttacaatttttataattttatttactaaaaatatactcttttgatgtatttttatgttataatcttattcatttgttttatgttattttttgttattttgatattgttcgaatgctatttttacgttacttttatgtaattttttt

SEQ ID NO: 211421 - DNA, 529 bp, Cannabis indica
cgtgaaggagaagaagaagaagacgaagtcgaatcgagctgatggtactgagcaggagaaatagctaattcaactcaagcctgaggctaagttgaagggagacgacaggaccaagcagtatgctcaagaatattcagagcaggagcagtatgctcaagaatattcagagcaagagaagtcgagcaagaagaaaaagaaagctcccccgatcgagcaaccacaattggaacatgctattaggattagggaacctgatatgcctgctcggccatctacctctatagagggaaaaggaaaagtcatcctagtggaataggaagactcttcaaatgatgatgtcccatctgtacttgttcgggaaaatgcccctgcctgcgtgcagggtactttaacttgcacttgcttctcttatattatgctttcacatatattatatctgcttttaattacatcgttttatctgtgcagaaatatctcaaaagatgctccaagccttaaataatgggacttctacaataagagctcattt

SEQ ID NO: 211422 - DNA, 1544 bp, Cannabis indica
aaaaaaaaaaaaaaattatatgtcatgatattttaaatgtgattgagatcttaaatcatactttgcacttgaacagaattgtctcttgctgcgacttgacaataacaaataattcgtcaatcaagtttgacattattatgtcattattactattaataataataataataatatataccacttggttgaaaacaatgacatcacattatcttaatcccaatggtttgaaccaaccccaaagttaaataaggaaatacataacttacaatacagagtaaaatagacccacaaaatcaaacactttgaaagatacttgaactgtagccatttttgtcatcataatacttggaccacagcattacacctccatagttagccgaattctttatcacaggaagaatttgagaagtaacaacattaggtgggatgtaccctgttccggtggaggctgctgcaggtgatgcaggcaagcccaagaaaatcttcccacccttaatcgaattactccatccattccacgaactcaaaagagtattaacattaccagaactcgagtattgacaagaaggattattgtaaaactgaatccaaacatagtcaaaaagcccagtgttaagagcatttccaagaaaatgatcaggatatggacactgaggagctgcacttaagtaaactggtcttcctactctgctataaccctttaagtttgtggctaaatcttcccaatacttggttgagccgagttcaatgtcgaaatctataccatccaaaaccgcatcgcctaaggggcgagaagttgacgtaccacccaagaaattgttccacaaataatcagctacgttctttgcatcagcaggagatgaaagagagtatgttcctagaccacctccgagagagagcattactttgatccctttgctttgacaacttcttatgccttggctagcaatggcgcatcgggtcgggttgcagtgaccggagaggttgatctgaggggtttggccattgccaaacttgtttagaaatgctatgattacgtaggaatatcttcctgtggcgcaagtttgagctaaggttccttcgttaacgttttggccccagtagattgctattccaccagcatgagtgaattggattaaggctaaaatttggagtagtagtagtggtaggacaagttttgtagccatgattttgagaaatttggttttgtttatgagttggagtgtgaatgtgtgatctgataatggggtttgcttgcttcttctttctatttaagctgttgttagtgcctacaaaaactgaccaattaataaagtttgttggggaaaatacaatagagttgactataaagtccaagtcaagctaatttgttccattatatataatagacaagattgatggtcccactagggtttaacttcttttggcatgcttattgggtgagtagggagggaggactacaactagaggattcattttatttttataatttctagaatattgtccaaagcatctcaatccaatcatgtttttttttttttttt

SEQ ID NO: 211423 - DNA, 674 bp, Cannabis indica
cactcttgagattgaacctaatcatatcaggattaagatcatttgatctaggatcaacaggtgatattgaattgaatagatattacggtaaattctaatatatctaatcaaagttcaatatcggtcccttccgatgtatactccatacatccgatgctggtaaactttgccaatgtcctggaaaggacataacacttatccaaggtgtaagaatacctatcgctgattataccatgtcagtctaaatccagtgttctgacaaatcagggaataaactttcgaacatataattaagattatattccactgtgttgacaacactataatcattaacaaattgatatgttctggacttaaatagaattcatacattatgtacatataatcatgaaataaatcatgtgaaccatgcaacattaaatgttatttctgatctatattaataagtaaatctgattatattgaaatgagttttatttagggcataaaacccaacagttcattgtataattaaaatgatagggcaccagaaggagttcactgccacttttatctatggtgctaactatatagaggctagattggagttgtggtccaccttatctaggattaaggtgaaaacagcttggaagggggaaagctcatttcggcttcagagcttgctgactctacag

SEQ ID NO: 211424 - DNA, 534 bp, Cannabis indica
atttagactaataatttgtcaacacgtaacaattttaaaatgaacaaacgaatcactttacttgaagattaatgaacttacaagaaacatgatcttggggcgccatttttcaaaattagagacttatctgtatcaaagtgaactttttgggacttatgccacaattttttaataatgttaccacacaccttattaacaaaaaaatttataataattgtttgaaaaagaatacggtaatttaaaacaccccttaaccccttaaaagagttgttttggtacactcctgtttatttcgacatataaaaaagctttatagttttttttatttctatcattttgtatattgtaattatttaagattacttataaattttcaaaaaaatgagaatagtactttgcaatatcaaaagcaagatttaaattttgttgtacacatgtattttttcttatacgagtgataaataactgtttgaagtatttattcataattttatgtccctaaaaactaggacgcatatgcaattgtgaaaaaaa

SEQ ID NO: 211425 - DNA, 777 bp, Cannabis indica
aatttacccttatttttatataacgtgtatattattgtaatagactatagaatagatgtaaatactatttggaccatgtattttgcaaaagttattgattgaaccttttattttgttaaatgataaaatgaaccctatatttttcaaaataataaaaataggaccctcagcttaatttttgacaatttttttaatataaccaacttaaacacaattcctaacacgaacagatatagaaaatgtaaacagttttatcgtagcacttttagattggattacaattaaattttattttgataaaaaattaatttagggtcctatttgtaccattttacaaaatacaggatccattttgtcatttaacaaaacaaatggtccaattggtaacttttgtaaaatacagggtccaaaatagtatttacccaaaattataactaattaaatgaataaattaatttaatcaattagtcaaggagaaatatacatattttggaacacattaaaaaaaattataactaattaattgaataaaactaatttaatcaattagccaaggaagaaaatacatattttaggacaaattaaaatattatgagaaaagatttatttctagtgtatatataatgttctactatactttctaaataatgtgggattattacaaaaaataaacttagttgataattattttcttagtacattactatggtactcttaaaaaattagaaaaatatgaagaaacaattataaaatatgtgttttcctttatattaatat

SEQ ID NO: 211426 - DNA, 569 bp, Cannabis indica
tctctctctctctctctctgcctatttttatatatattcactgtgaatcgtgggagtgactacattacattataggatattccttctttctttgttctcagtaacgtggccttgtaattagatcaaaatattcatcatgtaaggaagtcatggaataaataatggcctactattgcccttggagcttgagttatgagttgtcacacacaacttttcatgtttttgaagtttcggacataattgaggatgttacttttattctgtggtttagaaatgtaaatttcccaaattgaaacaatatagtagttgaaaatgttaagtgataagtctctattaagatgtgacatatattgatgcaatttagtattagatttatttatagaaaaatgccctttaacattttttggtggttctataatcttaattgctacattttgaaaattccagtcactcgttttgattaagctttagttagacgtgcatggtcaatcaaagttttcatttaatgtattccattccattagtgaaatgataatcaagtgttgtgatgtgttattataacagatact

SEQ ID NO: 211427 - DNA, 710 bp, Cannabis indica
tttttttttagatccatcttgagaatggatcgtctcttacttgctagaatgttccttctgagtttagaagttcaccctcccaaactcataataccaggatgcactaaccattttccatttattcccaaggacttccagcctcaattggaaccggaaacgatggattctaagggtgaggagtttccgaccaatcaaaactaggggaaccccgtagcccgccatgggcgatcctcataagtaattcttgagggtaagtgttattcctggtgaatggtggtttgagccggattattactttttgttgctccactgaccttttttctttgtctccacaagaatagacatagattctttgaacgatcttaaaggttctcctcaggctgacaaggaattttggaggaaagttggcgtggtttctgatgaatttgggagggaagttggcctgatttctatcagagaattcagccaacccaagacccaaacctgcactggaagacctttgcgccaacctctttctggtatcgaggaatttcctaaggctgggaatagagtctcggctgcaggaaatgggatcttttgatgaggagaatgaggtctgtgtagagactaaggctctctacatgtagccagtctttcttgagctacgtgtagtcggtctttctccaagctacgtgcagatggtctatcccaagctatatgaagacggtctt

SEQ ID NO: 211428 - DNA, 686 bp, Cannabis indica
aatgagtcatttactcaaaaaaaaatcaaactagaataaaacaaaattaagctcccctagaaaacaaagcaacctcaaactcaaatagaaaagctcatacttggctcttctagttataaaaaaaataatttaatattatttaaaaatttattatacaagaagagaattctaatttatgtaaaaagaagtttaatttttgtaaaaataaaaataaagtttcattgtaaatattataattaaatgatttaactgttaaagtaattatagtagagatttatataaaaaacttatttataattattaattgctaaaagaagtcttgttaaatatttcattaattaattttagaaaataattaattgattctaaaaaaaatgaaattttacctgttggtaacctattattacaggtaagaaaaaatataactatgatggttacatcgttttcgttatgagaacgcttgatctcgagaacccatttgtgcacaaattgtaaaagattgctgggatatgcacaagcacctatcccgctttgataaaataaaaatttgtggggataatttgacaaagtggggttcggatctcactggtaatttcaagagtcgtatttcttcctgtaaaaagaaaatggcacaactgaagcagcaccataattttctcctatatgtcgagtttgttaatgaacaa

SEQ ID NO: 211429 - DNA, 523 bp, Cannabis indica
aagcccttccaaactcccagagcgtagcttcttaagacacgatcctcacatttttaaaaaatcatccagccttccaagagatggtgcaaacgaggtcctttagacaatcaacaaggcacaccgaggtagtaaagctcacaaggtgcatctagaaacccttataaggtgacgtgggtacccgctgacacctagtcacctagtcctactaaatatgatcttgtcccctatgtcaggacatggtagtgcgtgtactacaaaaagggatatatcgccttttatccaaaagtgtaccctcgagtgacacctgtccagatcgcttaggcctccttccgtacgaacatttctgccccacaagccaaaatcctatcgcgagcctcaaagccatgtattatatgtatttaccccaatagttgactcattttgtacagaaatcctagcgggtcatgggtatgcccgaatttgaatctaaacttataaaacccactttatcccttcatgtacagggacaaagaacaaacaaagg

SEQ ID NO: 211430 - DNA, 653 bp, Cannabis indica
catattttttaacttatttaaattggatctaattatatagtagatattaaattttacaatttgacatgttctaattactttcaatttctaatcgatacaacatccattgaatattggattgaattagttttattcatcaaatatatttcatatatatctattaattttaattcctgtttattaaatattttttagattgaatcgaattcattcaatattagatccattctattaaaaaaaaattagagtaaaattttaatattaattttaatatatacatatatactttatgtataacaacataaaatttaattactcatctaaactaaataaaaatattaagtttgattggatacgatcatctaaactaaatttaattactttatgtattaaatttttgaacacctcatctaacattcgatacgatccaattgaatattaaaaaataacatccaatctgattggatcacaattggatatccaatgtgtagtgatcgattataattagatcagttaatttttattagattgaatccatttatgcacacctctatttacgacctccttagttttgtatcaaggttgcttaccatccaaaaaaaaaaagctacttaggtattacatataaagggaggtgattttgtcccgttatg

SEQ ID NO: 211431 - DNA, 935 bp, Cannabis indica
ataaaattttaacttttatttgtagttgcaagtataatataactaaaaattttagttgtaagtataagaaaatataagatataattgtgactttcagcaacacaaatcaaattatagcttttacatcatagaattaagtctaaattgtctaatgagattttattgaactcttcatatatttaatattaattaactttctttttttttttccttttattattttgtagatgttttattagtgagaggagaaattataagttacggtgcgtttggaaagccacaatgtcattgaatttgtgtgtaattagacgtaattatacaatttgacatgttcatctaaccatgtaattataatgtaactgtataattagaagtaattgaggggttctaattacactttccaattctcatgaccccatgagaattgaatgtaattacactgttactaaaaatttttcatattaaacattagctactaaaaaatatttttttcctatgtaattagtaattattttgccaaacaagatattaggaattcaatgtaattaccacctcatatccaaacacacattgtattttaaaatattgtgtaattactaaactgtataattaccacccatttttttaaaattttattgctcaattttcttggagtatctacccctccacttattgcttaattgtagaatcaagaactcatagaaattaagtcaaataaaattactatacggtgtaattggtaacaattatttaaaaaaacaattttaattcgaaaagttgaatattttataacgtttggtattttttttttaataaaaatcaatatttgaaaattttctaaaattaaaacaaataattttctctctttttactttatttttcttcacttttatcaatttttcactctccttgctgaaataaaaaggtaaaaaatt

SEQ ID NO: 211432 - DNA, 540 bp, Cannabis indica
catgcctcacttcacaagattatcgtatcactactacaaaaactacttttagagacggtttttaaggcctttcagcgtcaattttcacaatattcgctaccgatgatgtagggttgaaaacaaccgacgccatatatacccctataaacgcaattcggcgataaattgcgacaaaaatctgaccacctatagcacacacacaatataatatttataaaataaaaaaatcctaaaaaaaattacaaaagcaaaataatattaatgtacattaataaaataaatagaaatcatatttataccttaatggaagttgagattcaacgttttctccgctaaaatcggtggccggagttataccaccatcttttttttaaaataggttcgggtacagtgcaaatgggtaaaaaaataaaacttttttaacgtatgggattagatattgaaaatagaaaattttaaaacaaaaataggatgaaatggtgaagaattgagggagatatgagatttttagtggtggttggcgagggttttgtgggtttt

SEQ ID NO: 211433 - DNA, 1412 bp, Cannabis indica
ccaaaatttacaagcgccacgaaagaaacttttaaaatattgacatctaagaaaaagaatttgcagttccacacttttaagattcaacaagcaatttcgaaaactaaaaagtctaaaggcatcaagctttggccattggaaccaagatgcttcaaaaattcaaaggcaacctactaagggcccgtttggcacagcttttggaaaagctaaaagctattttttaaaaaagctgtgataaaaatgtgtttggtaataagtagtaaaaaaataactttttaaagaatttttagagaagctacagctaaattaaagctaaagttactccaactcaacttttagaaaagctgttttgattaaaatactataatcatttttttttttgtactaaaatcatatttaattatttattatacattaaaaaattaaaatatttaaaataaattaattatagtaaaataaatgattattaaatcttttattttttaaaaaataataatttatatattatttaatattaataaacgacattaacttaaaatttttattatatacttgagtttctaaattttttaagatttgataaaacataatataaaaatactataaattattaaggaactttttgttaagtagcttttgactaacttgaataatgatcaacttcctcttatgcttgttatttgctggatgatggtgtggaaccaaagaaacaattgtgtcttcaataagcctaccctaaacctttgtggatgtggagcattttttatcttaatctttgtcaagaatacagggagtttcagaaccaaggctttcaacaaaatccattgagtccctctagctcccctagtttgatgttcaccggcaagagcttggcatggctagattaccttctcttgggatgtttaagctgaaagtggatgcttcccttgatgtctaagttttgaaaacaggtgttggagctattgtcattgatagtaatggagctattgtagcagggttgtgttctcattttacaggtgcctcaactcccatctatggttaagccaaagcgttacaagcagccttctcttggtgtgtagttgtacactttccaataaaagcaatggaattagtttgtcaaaattttagttaacaagatcaagcataaatggaaagaacagttcggatcatattcaattggtgcatgacaaattctttattttatttcttaatgtttccttaaactacatttcaaggaatgataatatattagcacataatctagttaagaaatcattaggcttaaatagagagattatttggaatgatctattttcaaattttctagttttttttttttttttttttttagttgtaacgtaatagtattttacaatcatatattaacttaatacttaaaggtcctgggttcg

SEQ ID NO: 211434 - DNA, 627 bp, Cannabis indica
aaagtcatttagcatataaattatacgtgaaaaaattatatgtaattaatatatgaacaaatcataaatgattccttatattagtaacattctttcaaaattaagatcgttaaataatatgtaccctattccattaaaaaaaatcaagaaaaaaaatcataataggccactaactttattatttattatagtgttttgtggtaggtccaaaaatatatattatagaaactatatgacaatttgtgtttttgtggtgtgtgatataagacacgatatatcatgagcaccaacgccatccgaagtagtaacgcatatgatttcttaataggtcatacatcatgaccccatatgctcaattaatgtgtcatgtgacacaactccgaaactaacacacaaattaatatatatatatatatatatgttaggaaacagctagcataaaattgccataatcagcataactatataaataaacataaacatactcatagattttcatggctttaatttctctctctatatatagaatgagaagagatgaagttttatatgatgtttgataatgttaatgttaattgtaatatgaatggtaatataatgaaataattgtgactaactataaattat

SEQ ID NO: 211435 - DNA, 1013 bp, Cannabis indica
aaacttattggaccaaatatccaccgtcacattcgttcagttaatgccaagtaaaattgttgctcgacatatcaacacgaagtaaagtttaaccaagggaagcccccaatacaaagggggcactacctcagagaaaaccaagagggtctcacacctcggcaaggcagatccctcaacttattcagtcgacaagagcacttaaaagaattgttgtagactgggggcaactgttaaccccaaaaatcgatagagttgatttttgagattagtcaatgattagtcccaacagttgagagacatcaactgtaagagtcgctcgaagaatgactgagtcaatgcatatgacatgagtattgttaatcttggaaatccatgcttgcaagtttcgaggtataaccctgcaactcggagtttaaccccgtaacaactcatgagtggggttagtaagatcaacttactaagtttcaattgttggaggattttcgtagtgatatgttaaaaattagatctttccatgaacataagattcaaaggtctctttctcatctttccaacgcatcttgaataatccaattccaatttatatcgacagagttatggccaaaataccaagacttctgaattgtgacaacttggtatgcgagcccatagctattgtgcgaccccatggctattgttcgagcccatgggatgttgtgcaagcccatgggctgttgggcgagttggggcatttgggtgagtcatggaacctttgtgcaagtgatcgagcatccgttcgactcccggtgaagtactcgtgttattcgatgtttagtcccttagtgatgcaatgaccagagcaagggtgaaagaaggctatacatgtgtggagaggtgtcatgcgcatgggtgagtggggaaatgttagatcgtggtatgaaggctcgcgtgtgagcctatgaggggggtcgcatgcgagccataaggggtagtaaggtgtgcgacctgcggatatgggggaagagggagtgtga

SEQ ID NO: 211436 - DNA, 519 bp, Cannabis indica
catgaaatgccacacgtccaccttaattaaaattaaataacaaactagataatgttcaattttcaatctacttcatcatactcggtcaataccgattcttaagctagtcgtcatataaatcatagctagaatttaaatttaaatttcaaataatatattctcaatcttaattccattaaaactcttaactacatcaacttatgactcccacactagtagcccacgtgcaagataatcaaaattcaaaaccccttttaaatctcaacaagccatgtgtatatggctggtcaaggcttggactatacacattgggagttgataacttaccctttctagtctcctcatgtaagccttataatgattaagccttaaatttaaattctggaaatacattaaaacatgattccatgcacagtgccacttggtcttataactattatggtacacatccccttaattaaaccatgctttataaatactatatactatatatataatatatatcaacatatatcattc

SEQ ID NO: 211437 - DNA, 1132 bp, Cannabis indica
gtggtttttcttctacttgacctgatttattatggaggattgctattgactaccagtagtgtttagcacctctacatgtcacattgctattggctagcgatactctctaaaaattattacattaaagtatatgcaacctgatagttagaaaatgttagacaccactggtgcattttagcattttcctttattatctacaaaaaaattaattacaaacatttaaaatgctccaattttattttattttttttcttttaaatttattttgagaaaattatatggaacatagggttttttttttcaatatatttgaaaattataaaaattttaattttatgtatttttcaaggatatttgaagtgaaaccctttaatatatgtatcatataagcctaataaaaaaaaagtggcaactatgccattttgtgactgttttgttgtaacaatgtcattttgtttgttaattgccattttaagtttattcttagggcccatcttgaaatttaaaaatattttcaagttcttatttagaaaaaaaaatatatagtattttttaaaattaataaaaaaatatgtaattttaaaaagataaaatttttttgagcctctaagtaagttctaaacacaggtctatacatcataacattttcaaaaaaaaaaaaataataataataataaacagtgttatactacacatcataacatttttttagaaaaaaaataattacaatcacacttttcgaatcagtgccaaactttaaatatattctttaagataataccaatttccaattaaaccagagtcttattttctcattctataaattactaataataaataatacactatgtagttgtatatctcattagaatgatctaagtagaagagacattaaagagaagaagttgactatggacatgaccatcttccattctaatccaagattttatagagaaaggatgttgagtgatttgtagtattcttgaccctttttgccactcacctccataccccaccactaaccactatgcctaccaaaacaaagccatagtttgttatagggacaacaccaatccaaaccatggttgtgtcctgaaaatattgcctgtcatcatgtataaacaacaacatt

SEQ ID NO: 211438 - DNA, 740 bp, Cannabis indica
aggtgaaatgctaaagggtagtgttgcttaacacttttttatgtgtcagtattgttattggtccaattaaatatcaggtctcacataatttaatataatagtttttaaggagtatcgctagtcaatcgcaacgtgacatgtcgagaaggtgttagataccactggtgcctagggatgcacatttcctccacggggatggggccctaatggggcggaaattccccgtctaaatggggaacggggcggggacggggatcactttttgtccccgaatgttaaacggggcggggacggagatcacactccccgtcccgacggggacccgtttagtattttatcttatatttttaataatattttataatttataatttatgtttgcatttttttagtatattagtatcttttttatgaattttaagttatattttggataataattagtttattgaataataattaatgtgtaatattttaatttttatgtagtttaatatttttgtatattcaaaatttcattataaattttattttattattaggggattcccgccccctccccgccctattaggggattccccgccccatttccgatggggaataagcgaggatggggattaaaattcttaacagagatgggaatgggggagcactccccgccaatttcctgccccgtgtacatccctactggtacctaatagcaatactcttgttaggagccactaaaatattatgcaat

SEQ ID NO: 211439 - DNA, 627 bp, Cannabis indica
taaatactcaaaattttaaatttataagtggtattatttcaatatttatttttagcagcctaagtatccaatgtttataaaactgtaatttttctctaatttcgtccgtacaaattctgttattttcttaaacatgccacatataaggtctagattcttgatcattggatctaagcagaaacatgtagtatcagttacttccaaatattcttttaataaatttaaaacggagtctgtactgacaaaaaacttgagaaaaattacagttttacaaacattaggtacttatgtcgctaaaaataaacattgcgtttatgccgcttacaaacttaaaactttgggtacttatgccgctatttacccttattaaaatatattactagttaaaagtgttaattagtcattaaaaatatattttattagatgtgcaattttttttttatatatatattactctaaataataaactagttacgtactaaaattataaagtaattaattaattgttttagtgtgactaaaaataataggtaatttttttatttatacaatttgaatataaattgtcattaatttagttttaattacaacaaatattatgattaaaacacatttcgtcacaacaaa

SEQ ID NO: 211440 - DNA, 568 bp, Cannabis indica
gagtaatttgcggctaaaccctctcagctatgattttacaaactgctaaaatgttagcaaatttaatgtgtcctccacttatctcagttaactgctcacatggactgcctatgtgtaccattatgtacatgtggcacatttatgttggtccacctaatataattatttaaaaattataaaaaagtatttttcaaaatttattttaaaattaaaaaaaataatttaaatttataaaattattaataaataaataaataatttttttatctaaatttttttctctagctttttctttctctctttctcatcgatctctctttttcactctctctccccgaatcgtcttacactaaaaaattcaaatgtaagaacaagctaggtcattttaagacaatcatatcatttatgataaagagaataagcttcaacacaatgtttcagggccggctctagacataagcggattaagcctgcgcctaggaccactcattttagggtcctaagtaaaaaaaaaatatttttttaattatctttatagtaaagtcctatttcaactcaagaccgaccc

SEQ ID NO: 211441 - DNA, 789 bp, Cannabis indica
atgaggagaagagtggtgaggttttggagacttttggccatggttgtgaaaattgcttgtgatgaaattgtctaatatttatgagatatatatatagccaaatgtttatgctgttcttttattttttaattgatttgagtataattggaatatatatttattagaaaaataaggttgttgtaatctactctacttaatttataaaagagtatatggggctatttaagggtaggagttaaatgttattaattattattattattatatcataagggtaggatttattattaaattttaatatggtcaaaaacattatatttttttaacagatatattatgatatattatgatattgtctttaatgtaatttaatttataatattacgaaaatcctttttttttacaaaaaaaaggtattatgaaaatatttttggtatgcatttaaaatgtatgatttgattttatgatatgattattccagcctacgaattggcatgatatttgactgtatttggtaagtgtttatgatattagataggatagagaaatttaatttattaatttaattttaatgatatcaatagtttgtttttaaaaagtattattaagtattctaatgagcaaatcataaatgcccattaaaggtctgtttgactagttaagttttttttactagtcgaaaccaaaacgtaataagcaaaatatatatatgtatactttatcaacttatggtagtatattgtattctttaattcagtaggtgtttaagttatataaaaataaaaaaaa

SEQ ID NO: 211442 - DNA, 525 bp, Cannabis indica
gtaaagtttgtccaattgaggggagtattgctacgaggtaccgtgatgcttagtatgtaataaaaagtggtaaatactattttagatcttgtgttttacaaaagttatcaattggattatttattttgttaaatgacaaaatggaccgtgtattttttaaaatagtataaatatgacccttaatttaatttttgacaattttttttaatataaccaacttgaaaatacgaacagatacagaaaatgtaaacaattttgtcataacacttttagatcggattattattaaattttattttgacaaaaaatcagtttagggtcctatttttaccattttgaaaaatacagggtctattttgtcatttaacaaaacagatggtccaatcggtaacttttacaaaacacaaggttcaaaataatatttactctaataaactatcattttataattgattaggaattttttataatgtttattaaaataaaacaaatattataacttgatgcagggccggcccaagcatt

SEQ ID NO: 211443 - DNA, 954 bp, Cannabis indica
caaataacccctttgagaaaatttcaacaaccatagatttcttgccgctattcctccgtcgttgcaagtctaaattctaccgtcagacgacatcaacttccagctcattagctttgtgtaagttgtctgggtacatttcgcttttattattcatttgcatgttagggcaaagtttagggtagtgcttttagtcgtatttgatttctacggtgagacagtcatggtgaaggccgtcgtgcatcgtagtttcttgtctgtgctccgttgtttcctttctttcttttgttttttttttttattttgaaagcaacttcttcacttagggactgccgagagtatgaaacgattttcatacttgcattcctctctactttctttcttgcttttctctgctttcactgcctttgggatatttgcacccgatgtttgcctaggagaatcccttgatttctcatttctggcagacatccagagggggcctccttccagcggttaggggacccccattccctccttgtatgttagggtttggtttgggggctaactgctggatttctctttcagatgagtgaggttctccgcgacctccacgaacatggcttctttagctttgatcaagaaatttaagagttttatcaatcctaaggcatgtctgcccctgcaatcggaacgaaatcctcaggcaaagagtccaagaccttagccaccctagaggaggtgatgaaaggacccgttatctaggagaaatacacttgccgatccaccggctgggaggcggatgtattgtgctcaactctgacttgtgtccaccaactggagaagattgttacagtttgtgggatcaagccttctgcatttggagtctttcatcgtcttcctagagatgaagaaatgcccaactgtaactacggcggctttagggcctggagtcaaacacacctcatgtccggggcc

SEQ ID NO: 211444 - DNA, 617 bp, Cannabis indica
tgtaaagtaggctaattatcgaatcacgtacgtatttttgtatgttttatttttacttctttaatatatcatataccactatttattgttatttattgtttctaagcacaataaattagtatcagagctaaatatagtgatattatatgtcaaatcgaagctctcgacaagacaaatccaatgccaaaagaatcacctcaatcggaggttcgacgtgcctacagtagccatcggagtatttctgccaacaattgagttaacttagccatacaatgatttttggactgagtcaacccattttcaacctagttggacgtgttccaaactaattggatcgctctgaattcaaccgtaatatttgcttctaaaatacgatattgaaatttgggtaaatattattttaagtcataagctcaaaagttctgttattctgctagcacttatggctggcgatagggttgtacatcggttggtttggacggtttatcctatatattttctaacccaatctaaagttcgggttgctaaaatttaagtgcaacccgcctaatttttttaaaaaaaatctacaaacggaccaacggtttggccggttttggtcgggttaacccgcccaa

SEQ ID NO: 211445 - DNA, 749 bp, Cannabis indica
aatatattaaagttataaatctgtaatcaacgatttctagtacggttcactaatacccattcttcggtgcaagtaatcttagttcagattatgaatgtagtatgagatctaagtgaagatactgtatataatagagattatatatgacaaggaccgatatgattaaagctgtctttattaacatatagtttgctataaagacctaattcatatcataacgatgatcaatagtagatcgacctaaagtttgagttatcatgagctctttttcatgttattaatttctttgatttactcgttaaagtttttaagagaagatgattcttacaatttctattttagaaatctaataatatggatgtctaagagcatgatgtacaattatagaatcttgactttcttaacagattgaatgttagttccctttatgtgttaattctagtattggaaagttgcacgcaaattcagatagaatcttaaattatacttctactagtgaattaatgtaactaaaagataaagaagtaattagaagggtaaaacggtgatttgaccaaaactaattacgaaccaacacatggagggctaatcactgtaattaattatatcaatggacactacagttaaattcagtaaatataattctataattactaagagtgcaattccatatttataatggagtaatcacaaaattaataaacaagagttctttggtttatgggacaataaataatctaatttattgg

SEQ ID NO: 211446 - DNA, 515 bp, Cannabis indica
ttactcactcgtttggccaaaaactcttttatctcggccattcctagtcttaaaaaccgtgaacttcctcatccaactccactaattataggagagtcctccattgcaacttatttatctcctgttgttactacatcatcgatctcagttcctgctgaagtttcaactcaacgcaacatagtcattgggatgcaacatattggtactggtagtggtctaggaatgtctctcccagcggcactaacctctacaccagcaacaactctcgcaccagcaacaactctcacaccagcaaccgtttccaatgttaaaaataacacgaatctcccactgcctagtgctacaaacctttccatgccacggtcatcacaaagtgaattggttactgacttatctggggtgtttacaccttttgctgtcataaataaagcaccaaacacttatgctacatatcccccacaaggccctgcctttccagcagcaagcacatttcaaattcacactccattaccatc

SEQ ID NO: 211447 - DNA, 1009 bp, Cannabis indica
caaaattttagaactaccaattatttcagaatctccaagttccatcatatatgaccaaagaccatgttcaatgtcattgtgtaccaaatcactctctgtagactcccgaaagagatttgtaaattgatttgttcgatgcactaactctgtgcattacacccatatgtcacctgcataccatcattaacataatgagtttaagtagctaggaactgaataaagtaaaccagaaaatatgaaccaaaaaataataaaatttgaatatataaattttttaggattgtgtttaatatatatcagtttacacgatgagatctagaaggatttcaatgcatggtggagttggtttcgaaaagagaatttggactggtggttagaacttttcttgaggaattttaggggtcttcgtttattttaattttattaaatatttttatttgttattttgttggtagataacgtgaggttaattttaggggtaaataaataaaaaaaattattaatattctcccaaaataggtttgttagagaaatatggagctaggatgatttttttaatttaaaaagagattattaatatttaaaagattgtttaattttttgggtttagttactaggtttatttgttaacgggagatcaaaccgaattgttaaatttaacagaatattgttaactatattctgttaaaccaagaaatgctgttagataggcacttttaatatataaggatatatatataaaataaaaaaaaaattgtgtataacaaattttgtattaagcattactcctgtcatagcgaccccgtcttattaatcatgtgaaatacctcttacattcccacattataataacatggttgaaggtatctatccaagtgatttcttattacaaaaaaaaaaccaatacaaaccagaggagtactagagagagagaggtggaataagtaagttattaactagagtgaaactacatctgatataacttctgatagagtagatgcatatggga

SEQ ID NO: 211448 - DNA, 418 bp, Cannabis indica
attgtacatgtcgagacggtgtgacctggagagcttggggatgattgtacatgtcgagacggtgcaacttggagagttcggtcttgggatgacttggactttattttgtggtcgttgtgggacatgtccataaacactatcttgaatgtaaagtttaaaaataacatcccagttttgtatctaaatatatgtatatgtctataaaattttaaagattaaagttttaaattattacaattttcaagaaaatcatttgattagcaaaggtgtgcactgtaattagaaagtcactacagcgtgtctaagcattagggcgttacaaaactcttttaacatttgtaattgttacacatataaccctaataaataatggacattattaacttacgatttagttctagctgtatccttttggttg

SEQ ID NO: 211449 - DNA, 670 bp, Cannabis indica
tgaagttgtgaatggacaacaactactgttaccccacaaaatggatgaataccaccgagccttcaattttacaaaagtctggaagaagaatacaaagattgcccaagcatacttagtgaaagcctcacaaagaatgaagaagtgggcagataaaaaatgtcgaccgctggagttcaaagcaggtgacttaatgttgttcaaactgcagccagaacaattgagattctgaggggacaaggacatcagactcgtacgcaaatatgagggccctgttccaatcatctccaaagttggcctagcatcctacgaagtcgaattaccttattggatgaagatacacccagtccttcacgtcagcaatctcaagccgtatcatgaagacccagaagatccaacgcgcaaccagtttaccagggacaacatcagcattcaacgatgcaggagcagagaaccagaagaaatccttgctgaaagaactgttcgtgtgaagagaaagaagaaaaaagagtacttggtcaaatggaagggcctcgctggtgacgagatcagctgggagaaggcgaaggacttacagcagtttatgcaaaagactgaagatcgtacaacaggtttgtcgaggacgccgaacaattaagtggggtagaatatggtgtgttgccccatggcacac

SEQ ID NO: 211450 - DNA, 570 bp, Cannabis indica
aacattaatggctaacttttggtagaagacaacatctagtaaaggtaatgggataatttggatgtcatgggataggatggcggttcacaaagatcttgccttggctttcgtcgtctacatgattttaatcttgcaatgttagctaagtaaggttggcggctatttatctcaccaaactctcttgtcagccaagtttataaagcaaggtactttcctcgatctaattttcttgatgctgaacttggtaacaacccaagctttgtctagagagtatatggcaagcaaaagacattattcagattggtgccagacgcattataggatcagggactaccacaagtatcctctctcatccttggtttcctgacaactccaatctgtttgtcacaacaactcacccgagcttacataataagatggtaaactccctctttaaaattgataacttttcttgggaccgagagattgtttctgatatattcaatatgcacgatgcatctttgatttttgggctgccattatgtgcctctgctggtcatggataggggaaagcaatggcactttctcggt

SEQ ID NO: 211451 - DNA, 820 bp, Cannabis indica
atatatagatgtatttagaattttaattaaaaacccaattcataaatatatatatatatgtatgtatatagagagatttcaaatggttactaaggaaaaattaaaatgggtttttgttggtttgttttattttagggatttgaagtaaatgcaaggccaactcagcaattggatggaagatcagtgtggatgtatactccaaaacaaggcacttgagtgtacattttcccacatgtatataaataaatatatttatgttattattttgagtatatatatcatcaataaatatgtttgatactattatccactatacaattattttacaatacaattaaaatataatattaaagacatagtttatgacattatttataaatttcaaacctcaaagtttatgctataattatgtgctatggtaaaagagtttaggcaaaccttagaaaaggactattgtatccatcatagacttgattaaaataagctttgggtgaaacataccatttctcttatgctacaaattaccacatatattatcctaaagttttctttttctttctttttttttttttttttttgtatgttttagggaaaaatgttaaaaaaacaccagtattattatattattattgaagtaattaagtatcaaattttacataattaaatttaataacaattataaaatattactaagaacactttcaacaacttcttttttttatcttttaaaatacattatcaaaatcttattttatttatgtcacaacaaacttttttattacaccatctatcaatttttctatttttttatttattatat

SEQ ID NO: 211452 - DNA, 758 bp, Cannabis indica
gtataattaatctcaaggaaataatcaaaaataatttagctcctaggtttataatataataattatagcagaattttttttcctttgtaagaatatatagtaaaaattaattaagtacatattttgtaggtaaaaaatgtgtacaatttttgtgtgccactaacatcactcataattaaaatgaagaatttaataatttaattatcatgaattgatggtggagatttagctaaaatcttcaagctctataatttttacaagtttacaaagtggtcctcctatgtttttttttttttttatatatatatttatatatttgttttcattttgatttggataataattttttttttttttgaaacaaggtttcgatggtgattgttatcactcaattatcaacgtggatagcaaaataaccttgagagttttttatttaatctaaaatttagaaaataataaatatcattttactatttcttgaaattaagttattgattaattgtactttcataattcattggctctttggtatattggtaaagaagattattaatgtagttatcaagtgcattatttgggaaaaaagaatctcattctttgaaaacaattgattgttaattgatttttttttttgagatatatatattatctattttcttgagaaatggataacaataagcaattatataaggcactattttttgtaaaatatttacattttttacgttctaaagtaatatttttttacatttttacag

SEQ ID NO: 211453 - DNA, 1135 bp, Cannabis indica
ggaaactctttcctccaaacttacctataaatagtgatctaatatcactgggcaaggggttagaagatttatctaagaattcatattcagagatattattgtaacaggtctaagaagaggaatcattgtattctttgttcttaagttaattaaaactaaggggagtaggctactatcgaactgctcagggccgaacctctataaaaactcttgtgtctttatttatttcattacatcacatatatatatatatatatattatactacttttcgcttacaatttagactcactgtcgttggctaaaagtgaggtcaacaaaggataaaacacattaaggggtagaacagtaaatttgtcgctactcgatgtaaatcatctataaaggatctttgattatttggattgaaacaatggataattcataatatatctatatttggaacatatagaatgttctatgtaattaaaagtttaatttcgaatctatagttgactcaaaaagaattaataagttaggaaatttacttggtaaattttggatctacttattgggagcatagttatgtaggcccatagtccttacattgtctaggataatattgtcttgtagactcaattaattatttttaattaaccaattaggattcaaaataagaatatgtcttgtttataaattttcactaagcaagggcttatttgagaagaaagagaagattgagggtttatttggtaattaagagactttgtaaggtctaattaatatacaaattaaatgaaaaatttatttgataattaattataattattgaagagatagatttgacatttatagagttagaattaaaatatggcatttgtgaaagaaaagataagttgttaaataaaagggcaaaattgaaatcatataaggcccactatatgttcggccacttaagggtttattaagccattattttaactttttttaattcaatataattctaaacctaaccttagatgaaatcctataaatcgaatgagatgctcttattttcttaacctaatctatcaaactactttatcaaacaaaaattagaacataaagagagagcctcttgaatttgaaatcatcctattttcttcttcatatttttg

SEQ ID NO: 211454 - DNA, 810 bp, Cannabis indica
agaatgatctctttaagccatgttaaagacaagttttggatcgacttccgctatgagaggcttcctgaatattgtatggaatgtgggattattggacatccttacaacaaatgctctgtttttcttgaaaaacttgataatggtgaagagcctgcccttgaataccagtccttcataaagggatctgctttgcctacctcttcctacgatcggtatagaaccgattttgccaagggtgatgtttggccattgttaactagacttgctaagaaaagtctatcttcggcgattcctcaattgcatctccgtggtccaccacaacctcgaagattatttgctggcgagtcctctcatatcaatgacttagaaaatcctactactaatgttccacataacactatgccaaatccttcagtatccaagtcagttttatcctagccaccttcggttatttttcaaccttctgctactcatgattctgccatgtctcattctcatcatgtgggaaataccaaaatgaaagggcctgctgcttcacttcctcaagattctcctaccaactacactgatctcacatccatttatatgcccatttcatcttctccattggtctccaacatttacgccacataccctcccccacctccagccattatttcccattctaatcaaacattggctatccctgtcaccaaccattttaattctattattgcaccagccactgttaccattggaaaggaaaattcaaacccaaatgtgcagttcaaaaggcagagtgaaggcttttcactaaggcaaactcttaag

SEQ ID NO: 211455 - DNA, 527 bp, Cannabis indica
tatcggtttattcggtttagtttttggcggtttattccggttaggcggtttataaattttgttgaacacccctataagttagtcccttccttcacgtgacctctcttattcttacatacatctcttagtttgggccctattagtattagttcttcttcttcttcttctttcagcccacagtttcttaatcccttttcattattccaatccaaccttaccttgggataagttgaaaattatctttttttttatccgttaattaaaaattttcttatattatattttattaaaatatatcaattttttttgagtgaattgttcaatataccttcactttctatttaagtcttgcatataatttacattaattaacttaaggggtctaatgagaatatcatctataaaagtgagtatatattaaagaatatgaaaataaaagtaaaaatcaaaataaataaaataaagtggatatacaatgtaatttggttagttctttcttctctcttaaaataaataaaataaagtgg

SEQ ID NO: 211456 - DNA, 506 bp, Cannabis indica
agggcctgtaatgctgcatcccaaaagctcaacaagatttttgtgtcgaattccgcttatcaaattcacttcgttgaagaaataatccgcccattgtcttgtattgaagaaaagcctttttactgcaacaaccttgccatctggtaaaataccctaaaagaaagtaagatagtgtcattccattgagtgaaagacataaaaaatggtactttggaaaatcaaatatttaccttataaaccgaaccggaacctccttgtccaagcttgttggaatcatgaaagtaattggtggcctcttcaagaacttcataagaaatattcagtttggatttgttcacagtatccaaaagagcacctagttgcttcttctctgatgaaataagcatagtttttcaatgtacaatgaaaggagctcagctcttataatatcataattgaaaaatagcaaaccaaatcaattacctcgcctctttctcattactattttccttatgaagaaaataact

SEQ ID NO: 211457 - DNA, 719 bp, Cannabis indica
ataaaatgtctaaatacaatacaattttttttaaaagaattgacatcgtatatattattttgcccaacttttctaaagccaattatctgaggacgatatcattgactctgttttatctggcatcactgagcgcctaactgaggatgaagttggactccttcaggccactttttctgcccatgaaattaagaaagttgcattccaacttgcaaatgataaagcaccagggttagatggattcaatggttgtttctttcaaaagaactgcatttgttgggggtgaatgtcattaatgctgcccaaagcttcttgaatggagatgcggacattgccgcgatcaacaatacactcatcgttcttatccctataaaaagccaaatcctgagcagattacggactaccgtcctattagcctttgctccacaatttacaaaatcatatctcgggtcctggtcagccgtctcaaacccattctaagtcgcataatctcccctctcaaagtactttccttccaaaccgattaatctctgataacattatcattggccaagaggttatgcattccctttctcaccgcaaaatgggccgccttggatggatggcactaaagcttgatgtggccaaggcttttgatcgtgttgaatgggttttcatccgtcgagtaatggagaaattttcttttcctcaccgattcattcaccttgtcatggcttgtgtct

SEQ ID NO: 211458 - DNA, 746 bp, Cannabis indica
ttctcttacggatcatagaattactgactatcacactttatagtggaccaatactgtattcattggattatatagggtaatactacatacatactcaaattacacacactaattatacacaatgatgtgtattaaatattagtcatttttatatttttaagtaagaaccacatcacttttaattatatggttaagattaaatacacattattgtgtgtaattagtgtgtgcaataagtgtatttctagcattactctattttgtaaatacataaaaagataaaacatttacaaattttaaggatttacaatttttttttttgggaaattatcccatatactatgtttttaacttttttttttttccaaatttacggtttagatttctaaagtggttgcagcgttagttgcaataggagtttctgtataattttttgttgtaattgagattgtagcgctaattgcaataggggtttctacgtaaaatgaagatgaagtctccaacatctgaaaatgaaatgacattattttctttatattaagatgataaaagcttcagcaaaaagcaaatcagagtcagtatctgtatctgtatcagtactatattaattaaatggtttttttttttttttttaaatttgtaatttcagagctatatacatttatagctaatcttatagatatgctgtagttgaaatgatgcaagctatgggccttaagcctaattaaggcctatggcagtttttt

SEQ ID NO: 211459 - DNA, 765 bp, Cannabis indica
cttttccagcgactatgactttttctggcaacttttttgacgacttttctggcgcaataacttcttcggcaagttttccagcaccaacttttccaataaattttttagtaccggtgacttttttggcaaaacatattattgttttacaaatatgagattttggcataaaaaagttcatataaatagtaaaaaaaaaaaaaaaatccataactcgatggtattatttatttatgccataaaaaaaataaactcttataattttgtcatatatagtgtaatttctaccatttaagtaattttttaaaatccattgagagtaaattatgtaattttattaggaatatatatattctatataaaatgtggctatgtaacagaaatttttagtttaacgatgcttttttaaatttctacgttaactttaacagaatatcctattaattaacagaatatttttttttttaattttataatattattatatatatttaaaattaaaaattatatagatatttcaaataaaaaaaaattattttaaatttaaaatacttaaaatattatagatatttttaatcatatttttaaatttattagtttaactttaaattaaaataaaaaaaaattatgtaaatattttataaaaagaaatttcaatttaaaatattattgttatcccaaatttggcactatgacgtgacatcacaagaatggtgacacgtggtctccacttggagaatctacccggaacgatatgccgagtaggat

SEQ ID NO: 211460 - DNA, 527 bp, Cannabis indica
catttagagctccaaaaggatttctatggctggttggttaattattagagagtctcatattgataaggtattgaaagataatagaatatataagaggaatgagctactccttccatgaccaattaagtttgagatggaactttattcatcttatctcgaattctaacatggtatcagaacaaaaaaaaaaaaaaatctccagcgactatccgaaaaaaagagcccaaaaaaaaaaaaaaaaaagatccaatagccaaaagtcaaaaaatgctacttatgattcggggatagtgggctaaaaaaaggagccactaaaatctaaaaatactgattccaaaagtaagtaaaagagctacttgtgatcagggatagtaagccaaaaagagccacttatgatcgagttgtctaagatggtgtgcaaataaaatagctaccatcttgagaggatattagagagtctcacattacaaatgcgtggaaaaatatagaatatatagaggaatgagctactcctcctatagccaatt

SEQ ID NO: 211461 - DNA, 959 bp, Cannabis indica
atttacatattaaattttagcaaaaaaaaaacaaaatgtttatttatttgtaataaatattgataaatatataaatatctaaatcttttattatattaccattaattataatttatattctattttttaaagtttcttaatctttgaccctcatatgtgtataaatagaaaattactcattagaataagatactaaaaaaatcatcttttcttctctatttttttctctaaattataacattttacaatacgttatcagcacgagtctttaacaaaggtataataatgtttattatatttgatgccgaattgtttcaaagttataatacggtaaacatattgttatcccaaatattgtccacctaacgtgacatgtccacataagccaaagatagagtacaggtgaagtacaatcccgccaatactagaatagagcctccatgcaagatattgcaaaaccgtgaagcagcaactgaagggagtgaagcaagacctcaaggagctataccaacatctctagccagccaagaggagccaatacgccagtaaggatgagcctataggtctgccaagatctgtgcacaagctagccggccaagaagggagttcttgacacaaggagcctccgttcaaccaagggaacctaacctcctcaaggaaacaatgtacaagttgtcctcaacttgcaaaaggctgacctccacactcaaaggatggcctcctcttagtggagctatactgacttgtcagatcctgcaggccttgtcttgccaaatcctacaggccttgtcctcccaggtcctagcaggaccatggccggccagacttccttgtaggtctatgggcggcttggattgacatggcaggactctatgtacagcccaaaatgtaaacacaaggcatgggctgcaaattaggccctaaaagcctaagagaatagctgaacaatatctaaattc

SEQ ID NO: 211462 - DNA, 649 bp, Cannabis indica
atctaaaatagaaaaaatcccaattaataattacagcgggagcgctctaagttttggcgactaaaattattcagtcattaaaaatcctaaatttgtgacaaaatatttattcggtaaaagttaacaattttatttttcttttctttctctctaagtcaaaaaactcaaacaccattatcctttatctgtccttcctctctctcaaacccgagctcctttatctctcctctaattttatttccatttttcttaccactcacatcacaagaaagatccatctccatagtcgctacactacaaaaaaaaaaaacatttacaataacactcaaaaagtgtaattaaatgcattttataacactttagcaactattaactattaagacaactcatataattaaaagtattgatatttaattacatttttttttgtatgttattaaataacatattataatattattttggtgttatatattataaattaattaatattaatttagagctatggttctttatgttacattcattaataatattttaaaaatgtaatcgtgtagagtttaattacattattattatgttatatataaaaaaatattacattttaatggtatagtaacatctatttttctaatattatgattcctta

SEQ ID NO: 211463 - DNA, 643 bp, Cannabis indica
ttgttgtcgatagagatactgttctctttggtatcccactcttgatgttgctgaaagttactggctgcattgtccatagttcctttcttctcctcctgcttattcttttcctacaattgctgtttttttgtcttcgttcccatgatttcatcatgtttgcaagttgctttggtgtgaccatacttagagcaatgagcacacttagcaggtaaccattcatattccacattctaattttgtaattgcccatactcattaaaataaggaatgaatcggggtggagcatctgtgacttccatttctacaagaattctagcaaattgtaattgagttctatccttggtgtgttggtccaccattataggctttccaattgtactaacaagagcacttagacttttagtaccccaatattgaagccctaggtcatgtaatcttatccacaatggaacagtgcgaaccagattcattgtgtttaaatctgctaaccaaggacaaactataaccgattttcaatcgaattgcaccactcctatctccactacctgatctcgagttgcttcatcattaaaccgcaccatgattaaccccatagacatcttactaacctgaacaacactaagatggccccagacccttttta

SEQ ID NO: 211464 - DNA, 527 bp, Cannabis indica
gtgctttccataattggctcctagtcctaagtaatagtgttaatttgttttgcggggacattccaactaattcttgttgttctgattgtgatggcagtaagctactgagctagaagggtaggaaaaaggaagagaacataaattacaattcaagactctaaattattagtaagtaagtgatactactgctctacactaaaaaaatgtaatggtggtagtgtaaaaaaaaatattcaacaagctccacgaaagtgcaaatttgctatgaaaacttagaagtatgcattggttttgttgagcttagtatcaagagaagaattgaactagacacaatttctttattgttagagaagattttgatttctttgtaccgttgtttcttcataagtgtgttaactaacaattttgttgtgccaactttagcaaaaaaaaaacaatattgttgtgccaaggagaggtattgtgtccaaaaccaatttatattatatgaaagaccttctaggcaagaaatgaatcattagagtcct

SEQ ID NO: 211465 - DNA, 673 bp, Cannabis indica
tttttttttaaaaaaaacaatatgattatttcaatattataaataaaaaaagtgcattggtacaccattttgagtgtggtgcactataaaagaattcattgtatgtacactgtataaaatttttgaagagaaaaactcaaatttaatcatccatatagaatttgtattttttttttcttttttcttttttacattcctaatagtttaaaaccgtcacctataacagggtataggtgatgattttaaacagtcaagaagtccacattagtaacagtttttaactgatgcctattttgcccgttttgcgacggtcgtataggtgacagttatagaaaccgacgggaatactttaaacgactgtttaaaacgtcaggaaaaaccatttttataatagtgtctggcaacgattctccagccaatgtctggccccacgcgctggaccattcgagtccccacgtaccggcgacctcaacccccaagcggcaccgcctcttttgccgccattagcttgggatcgaaagtcaaagtttggaggtttaaactttgaacgaattttttggccacctctggtgtccgtctgacaagtcatcttcaccactagactcaacttgctgaggagaacaacctacactaagccatttcacataacctgctactttttttggtgatgttt

SEQ ID NO: 211466 - DNA, 943 bp, Cannabis indica
cagaagagggttcaaaaatacattaattttgaagaggctcaaatagtggcttacggaggatactatccaaccagagtggcgggatatgcacccggagttcagctctcaagagccctgcctccggttaatccaccaatgagcggcatacagttcttcgctaccccaggatacaaccagagcccaaccttggctcccgcatcttcgcattacgggaacccctcagggatgagtggacaagtcccgcctcactctgctcctgctgcgagcctaactagacctcctcaaagctcccaaagtaaaaggtccttaaaaagcagcaaccggagagaggacaagcgccaaaaaagggggtatactccccaatacgcccagtacacagagttgacggacacgctctagcgagtgtattttgccacgaggcaaaatacgcactaccgaaggcctcctcctctgtacaaggatagttctcgaagagatcccagaaagatatgcgaataccacaacgacattggacacaataccagcgagtgcaagaatctgaaggatgagatcgaaaactttatccaattgggtcacctgtatgagtggatgaaaaaccagctgcctcatctcaaccggttccagcagggggtccggtgcctcaagggacgccaggaggtacgcccggagcattggcaccagctgtaccctttgggggatcgatccctcagtagacccttggcctgccacctagacccaatggaagagtggccatgatctatggtgggccccatattgggggaaccacacgaaaataattaaaacgctacgccggggccatcaaacatgatgaagtatgggaagtcacccagcttccagctcaaaggccccaactcatggataggccaattactttcatggaagaagacgagaaactggtacgtttccctcatcatgacctcct

SEQ ID NO: 211467 - DNA, 1420 bp, Cannabis indica
caactgactacctcccttagtaactgattacccatctaattattcttacttgattttatcacaattttaacttaatttctcttcaatttttcccataaaataacttaaaaaaaatcatattcttacacataaagtattaaaaactcatcaaattaataattttctttttttatataatatttaaataattaaaattatataatctaataaaatataccacgtgtatgttagtgtacacattagtagtataccttgacatttaacaatagaaatttaacagaataataaaaaataaaatagaataagagtgttttttttaaaaaaaaaaaagtagaaacttcattaattcaaatcatccgaaactaaagaagaaattacaaaaggtaaagataaactattaaaaatacgatcagcctcaagaagagaggaccgcgccaaacaatgcgcaaccctattagcagatcgcttaacaaaactcaaagagatattgccaatctcggcacataaagccagcctcaagaagagaggatcgcgccaaacaatgtgcaactctattagcagattgcttaacaaaactcaaagagatattgtcaatctcgacacataaaccttacactctaaaataatatggccataaggagagactatactttattactttgaatatcagaaatcactcttaaacaatcccacacccccacataagtgttacaaataaataaaccggtttttgctgaaaccacaaataaataaatagttgacatggcctgatccatatatattttgttagtgatataaatggtaagtacaaaattaattaccattacaaaaaaataagtacaacctcttaaaaaaaacaataagtacaacaactttattagattgtcaatttagtttttggcgattcactaaatttaaaattgatctatattagtgagaagacaactacatatatatagtttatacagtaacggatccaaaatttaattgaatggtggatgtaaagtttttttatatataaaaatatttcaaaaaaataagtaaatataaagaaaaatacaatttaatatttcatttacctaactaaaaagatattaaatatcaagcactaaaaatgtaacgaccgccttaataaattggattagaaaaggcaattagcactaatttctattattttattattatttatgaatttaattattttggaccccaatattttaaaaataaatattagagttgtaatttctcaatttcggagattttattaaactctaggggtattgtttgattaatatgtgaaatatgcaatttttgtaatttttgctcggcgacaacggaaaatgcgatggatggctagattgatcacatgggtaagtttagaactttatttcttagcggggaatattttagagaaaataag

SEQ ID NO: 211468 - DNA, 899 bp, Cannabis indica
ttgtgaaataatccctttattttacattaggttgatattttgtaataaaacctttttattttacttcattttacaaaaaaaaagaaaaagaagaactctctttctctctcaaaatccctaggcagctagggtttgatgtgttttttttaatcaattcaagtattttactgcaaggtttaagtgatctcaagctctaggtaagttcttggcttcaccctctttagtttcttgaactttaagtaagagtttgttttgcatgatttgtgtttttgagttctgtagctgctgctattagttggtgttgttttctgagtttgaatagtattgtcgtatgaatgttctagagtcagtactgtgtgggacacagggatagggttatggttgggtgtatgggtgtctgattataacccgtgatattattatgttttatgttatgctcttcttactgagtctattgactcacagttgctattttcatgtgcaggtaaggtaaggctaagtctgaacagccgtgagagtgagcagatggaagttgtacatgtcggggcggttaggcctggagcgtacgatctttaggacatcagggctttttctatatagtcgctaggcgacagacttttgtatatgtacagttaaacttttataaatgtttttgtaaactggatctcagaatttattatacatgtaactttatgattttaattaaataagcaaaattttaattaatcataatttttcgataacctcgttgattagcaacgagctgcacattcgtaaaaatcacgctaacatgcctaagtgttaaggtgttacaatttggtatcagagctgccaggttgtctttccaaaagatcgtcacgacatttacaatcatcatcagtgatcagctcatttcacgg

SEQ ID NO: 211469 - DNA, 996 bp, Cannabis indica
tacaaaatccctaaattatgaatggaaaataataatatctgttttctagttacaaggacaaaaattcatgatattgcgaagagttcaaacctacttttataaaagtttggtgtcacaaaccctatcaaaagaaagattccacctgtatagtttattatcatactttgagcagaaaatatatatatatatatatagaatgcaaattgagcaaaataaaataaaaatataatccctccgaactctttagagcccaccattcattcgtgtgtggtaccaaaaagacaaaactagtacaataatttgaagagttgtttgatttaagttttatgtgtatataatttatatatataattggtaatggaataatagaggagaaaatatttaataagaaatttatttgcaccaaataactaaaatacacaaagatattgcattacaaagatcatagttccgttacatattatgagaacacagaaatctctactaacaatattgtcaaacttgattaggcacaatcaaagtctaatacatgcgcacgtgaagacctatataaccctcctctatgtaacccaaaagtgaaaatataataaaaatttgaagtaaaagaaagaaaaggggcaaaagaaagaaagtgctgtagtgggacccttatggaaattggacacgtattttctgagtaaataaaaaatttcccgggaaaaatacaatcgaaaggtacaaaaaaggaaaataaaccaaaggtggaggaggcttgaatgggtttggtaatacaatcctaaaggccaatccaaacgacaagtcagcagaaatacatatatatacaatacaaacataccaaacgccacctttcacacaccccaaatgacaataataagtactatttttttttgcacgggaattttctcggattccaaacacttaaatatatatattatattttatttgttttcgtttggtgggtatttccttttctttctttgcgaaggaaaacgtcaa

SEQ ID NO: 211470 - DNA, 711 bp, Cannabis indica
agctgttaagtattaagtaaattaccacatgtcaatttctaattagtgcaagtcatcaaatttttattttttttttaaaaaaataacttaaatataccaataaaaaaatgacacgtggataatcacttaaaatttaacaatcagctacctacaaagttccaaaaatataacttaggtattattaccgtaaaaaattaaatttaagtatttatttacaattgagagttaagcttaaagatttatgccgcaaattacttaaaagaaaattatataattttgacatattgattaaactatcttacacatattttagaagacaataattcaaatcttagtaaaattatctatacttttaatatttagtttactttttacctttctaccgtttctcaactttaattttgggtcccccactacaccatattataaaaatattattatgtaaaacaatgacttgtttgtattgtttgatatgtgatgtaggttctagttctagagcatcattagtaccaaacacttcaactccaacattgtttggtacaaatgatactactaatactactcaatcaaattcaactccaacattatttggtacaaatgatagtactcctttctcctcaaaatcctttgttgctactaatactactcaatcaaattcaactccaacattgtttggtacaaataacactactcctttctcctcaaaatcct

SEQ ID NO: 211471 - DNA, 883 bp, Cannabis indica
cacaactttaaaatttctcaatctcttacagtgaactactgttataaagtgaattgatgtaacctacgcgatagaggcaacattgctcataccaggtatccataactaaactggaaatacccctttcccgaattctcaactaataacaattaatcaaagatcattccttgatcttgaagtttcttttttgtgtttgttagaaatcttgataatcttttcaagcacatccagaaatatacatacctcaagtatattctttatttcattgataacccctcagtacaaattaccatactaacttatagtgagtctcccgctgatgatgctgattcatcaacatctgagactctcgtgttctttttccatcattaccactaaggtttcactccctgcttcattgcaatcatcactatcttcatacttggttaaccactttaaaacttattttacactcaattatatagtttgttgtataataaacaacctactttgtgatccaacatctaccgatcactcaattacatgtctgttaaattgcatctcaattcataagtttttccccattcttggtgagtatgcctttctataattgcttaataaagtaatcctttcttagaatttcaatggtctctgtatacaccacattgactatccatggtcaattataaagtactctccatcattaccgtatcacgttaagtaattttggtaatcttctttactttagtgataccattactcttcctgacgttcttttatatgttacctcagtaatgtctccacttcaagcctctattgttccaacgggatgatgactcttatacacgagtgcatcgctctagctgtttcccggactacgactggcccccacagccaatccaaa

SEQ ID NO: 211472 - DNA, 933 bp, Cannabis indica
taagtttaccccaattaaatattatttttgtaatcacatcccatcacatttactaaatgaatatttttcagaataccccaagacttaaaaaaaaagaaagaagaaatttctcaaagaacgggagaagaagttaggcttcaacataattgacgtcttctcctgagtcaagacttcgcaccgaatccaccagtactccattgccgctagggctgaacatcggataggcttaccgagtttcgagttcgcgggtttcaagttcacgggtttcgagttcaaaaaaatgaaaccaaatctggacccgaatagggcacgggttggcaagttttggttggccgagttgaccggatcaacgggttgacccgatcaactcggtcaactctttaaaaaaattaatattttattcaaataattatttcttttattttttgtttattaaattaaacatatataatataacaatttgttcatcatgatcattgtagcatagctctgtagcgggctaggcctgtgcctagggcccacccagcccaggggcccaaaatttttttttcctcttttaaaattatacattttttttttaccgattttgaaaaacaccacattttttctaatataagggcccaattttttttttcctatggcccactttgtttcagggccggccctgtagctaagtaccaaagaagaaggctctcagcatgtgagaatagtagagagatgaaacagagtaaatgtagaggagaaatgatagaatggctcaactcaacatgaggagcagctactgatatttatagtgaatccaatattaggaaagtagttacacaggctggcaaaagctcagcataagatcaagaatgtaaaaaagttacaacagaaaacgaaaataattaacataactgtctatgtaacaaacttatcctaataccccccgtc

SEQ ID NO: 211473 - DNA, 725 bp, Cannabis indica
ctctctctctaaatatatatataaacacgcacacgaaagagcacacaatcgaaccatccacatggacctacgactcacggaccacctcgacctcacaaccacaccaccgaacgctgacaatgtcttcgtcaaaggtaatccctaattttttcattgaattttttaactataatcatttttttttttcatgatttagggttaaagcaattagatttagggttaggtctgtgtttttaagtagaaaatatgtgatttttgaggtttttaagctcaagtctgtgttttgggggagaatctgtgattcttgcctggctcgatacaagtttgatgttgccctgatatagggcgcgatggtaggttaatgttgaaggggctgaaggttgaagaagatagcctgataagtctgatattgggcccgatagtaggcccggcggtcctcataattttcacaataaaacttaaaattatgaggaccatcaggcctactatcggtccctatatcggacctatcgagttatcttcttcaaccttcaaccccttcgacattaacctaccatcaagccctatatcaggcctacatcaaacatgcatcgggctaggcaaaaatcgtatatttcctccaaaagacagatccttgcctaaaaacctcaataatcacatattatccactaaaaacatagacttaaccctaaatctaattttttttaaccctaaatcatgaaaaa

SEQ ID NO: 211474 - DNA, 1119 bp, Cannabis indica
  modified_base (823)..(823): a, c, t, g, unknown or other
gatgatgacacattttgtagatcttctccatgcatgtcagatgattgtcttagccatcactcagaacagtgggaatgtggggaaactatggaaggcaaggaagaagatcatggtgtatattatgccttacatggaatatcatcagtggagcatatttcaggttctcttgattttgatgaaataaccaatggtgaaatctgctatgatggtggatttaaacgttcaaactctggcaatgggttggaactctctctctgtgatcctatacttgatcttccaagttttaatgatgagaaatcttgtatggaacaagaaacaaaaaatgattctgatccgaagtttctccttgattcaagatgtcatgctgattcttccccaatgcctccacctcttcctcctgcacaatggcgggtttcgaaacctcacatggatggggcagaagacagaacaagtattacatctgaggattttaaaaaatgaattgggtgcaaaattgttgccttctgtgacttcccggcaaccagaagaagttccatcaggccaacagaattatgaacaactcactgtcaaaccaaaaaactaaggtattatggttgtcgaacttttttttttccttctttctttcttttctttttttttaataaaaaatagctataaaattggataactggaattctaaagtgaaactttccaactatggaataattctgttcggcaggaccagcagagttaaacagccagaaagaaattaagcaagccccaaatagcaatggagtggatgaaagggaggacttcttacacaaatcagacaaaggtgagtaanattttcaggattctcattgtgatttttattttccaaaatcccgaagatattaaactacggacttagttacatatttttggctgtaatttatttcaaattaatgacatgagactgcagataacatgaacaacgaaaaagaaacagagctcagattcttaaattgatgtatacgataaacacagttgctcttttttatgttttcttcatttttgctttgtctctatactgaatgtttgcactcttttaaaaagataattgaaacaagtttttctggtatcataatctctgtctagtca

SEQ ID NO: 211475 - DNA, 1159 bp, Cannabis indica
aaaaaaaattctaaaattaaaagttgggtcaagattctcttttcacttactcttagtagccaaaccaggaggaatactaatactattgaccttcacataatttcacatggttttatactaatctacattggaatttttctacaatagatgacaagtatgtgaattctcaactatacccttctctcaagtcactttactgtactaactaccctcattgttctaaggaagctctgtctcccctttggtctccttttaagctagcaaagttttgtcgttttgtgctcaaaatgaagactttaattatttactcttttaaatataatattatcttcattttatcctaaacattttttgctttccaaggctcatttcactatgtcagatcaagaaactgtcatttagtcttaagtgggtactttgaatgttgccccaaaagtctttttgttaatcttttttatttctttctaagattaattactacttggccagttatttagcaagtttgatgggttaaaaatcttgtttatttgggacacataattgaatacaaacaaagtagttttctcatattatctgtcagtattggtctcatttgaacattggattaaaatagttaaaagtatgatcttaacaaatatggaaatagtattattggtttcttgatcctagagtagggtggtcaaaagagaggactagagaccattgaggtgtcactagagtccaatattgacaacaatgagtaccattattaactggtagtatttgttacagaatcaaaataacaacaaagaaaaagacagaaaaagagtcattggttattcgtacagaaacatactctttgaaatcattaaatatgttagctccaattttcaaggctaaattcatcgtattgctttgttactactctcagtgttaaataaaataaaatgagaatatatctgtctgtaattctacagtaaacaaaaacgtcctcaaaatttatagtactgagtatatagtattaaaattaaaatcagaataagttcataaatagatctactgatcatatagaagtggagacaatgaatgcagcctcagtaatcacccgtgaaatgttaataaagaataaaataagaccaccaaataaaatagaatcattcttgtgaattgccatcctctc

SEQ ID NO: 211476 - DNA, 630 bp, Cannabis indica
tagtttcgtaacgaaatcactaaatgcagtcgaactagggttctactgagtggtgccgatgcacaatggcagtagtgaccctagacctaactttattacaaactttgtgtctcagaatactattgtattcagaacattaaacttttgttattaaatatctatatttgtataatattcaaaaaattattataatctttattcgaatgaaaaatatttgaatgtaatcttaaaaacttatttaataaaaataattagtttcattattagtaaatatcataatttaatttattattaaataaaattacataaaataatgaaagataaatattaatatgaataataattatttcaataataaattttttcgattacaaaaaataaacataaagacacataatatgtaagagatcttcttagagagaaaaaaattgtatagtgtgtttattcatttgggcagacatgtttatttggacataatatttggatatttgttgctacatgtgagaagtttatgtggatatttgttgtttttttagggaaaaaaatttaacttatttaaattttgaatttttctaatcaaagtgaaccaaaccctaaccaaaccgctcatttggtttgttcaaattacgt

SEQ ID NO: 211477 - DNA, 1498 bp, Cannabis indica
ggtatagtacatggaacatgattatcgaattgaagtgtttaatatcatgtgaaaatttgtaatgagtaattacggtttttttttaaacagtagcatttagtttttgatgttaagaatattaaagtttttaaaataaaataaaaataaatgtaatgcatctgaacccttcacgtatccatatttatgagttaacggagtattggtaagaaaattgtaacattaggtatttttgaccactaaaaataaacattaaatatataaatgtataaaatcagaaacattaggtatttatgttgcaatttaccctaaatttaaaattgatacaaattagtcttaattttaaaaaattagtgataatctttcaactttcaagtcaggttttctgtaaatttattgatctctttccctaaatttgaataaaaataaataaattgaagcaaacagaaataattatatataatttgtttaatttttataataaaaagaatcgctaaaacaacttattaattgaaaataaattatgaataattttctaaaaagaaaatgatattgtctcactaaacaaaagattgagataaaaaacagtagaacctcaaaataaaaattattttttataaaaattaaagaaaaaataaaaataaaattcccctaaatcctaatctaaatgtgtgatatgtcttaacaatgagatgacacattactcaaatattataccaaaaaaaaaaaatatacttaaattatcaagtgtgttggcattttattaattacttttacaaacatattattaacttttacactaccaacatgcaatgaacaaactcaaaagtttacaaacacaaaaagatttaagagaaaaaaaaaaaaaaaaaaccttaagaccataaaatagatcaagcactaaattaaagaaaattataaagaaaattaaaaaaaaaaaaaaaactactagtaatcttcaggagccaaaggctgatgagtagtgtggagatgtggtggttcggatggtatgaccatatattcatatatgagtccagctaaagcacctccaattaaaggaccaatccaaaagatccaatggctcttccatcgccacccgactagggctggcccgaacgcccgagcggggttcattgccgccccatcgaacggtccacccaccaagatgttcgcccccactatgagccctatcgccaacggccctaatgtccctacatttccccgtttagggtcgatcaccgtcgcgtagacggtgtaaaccaacccgaatgtcatgatgatttcgagtactagcccgtgcgcgtcgctcacaccggatcccaagtggaaccctactggcctctgcatgattaagacacaaaattttaaaaattattaaaaaaatatgtatttttttaaaaaaaataaaaattttaagcctaacttggcgtaagactagcccgtcttaacctgagatctgatcctgattataataatgcaataatataaatctgactcccag

SEQ ID NO: 211478 - DNA, 540 bp, Cannabis indica
ttgcatatgagatgttctcaattgcttttcttttcaagtcgttcttaagacattgttgtttagtaaattcatcctctttcagaataggaacataaatatccttacacgaattcatattgaactttctgagcacacgatcaatgtaagcttcttgaaataagcttagaatattttttgattcttgtcatgatgaatctcaatcccctaaacaaaatatacctctcgaagatattttatatcaaaattggtagacataattttttttgtcgcatttagtaatgaaaaatcactactggcaagtaaaatgtcatccacataaaggacaagaaaaatataacgactcccacaaatcttcatataaatatactggttaaacttgttctctataaaaaccaaacgatatcacaatcttatcaaacttcaagtaccattggcgagatgctgtttgagaccataaatggataatttcaatttgtaaactaaattttcgtttccattttccttaacgtcttcaggttgtgacatatagactttctctcc

SEQ ID NO: 211479 - DNA, 1227 bp, Cannabis indica
aagggtataattgtaaaagtgtaataggataggatttttttttctgttattgttttttctaaagcattaattaacaaattcttgtgattatttgatgtttaaaatttgaggtgagttttgtattacttttttaattaacttttttaatgtggtaaatagagttatatatgattaataatgtagcaaatatgaattgggtcccaaactcagcttataaaatcaataaataaaaataaaaataaaatagtgccttatcatatttattaaatcaaaagtaaagtacaccttatcatattttaaagaaaactgtcaactcagttaaaaaagattgattcttaaaacttattaatgccttagagcattactagcaagtagcaacactaaaagtttcaaaatattcctcatcaattaaaaatataattttttatttttctttctcatccacatcattttagcaacttttttttttctaaaaataactccaatactaagtaaagttgtatattcgggcagcccggcccggcccatttttataaaaacctaatttttatgtagacccaatctaacccatattataaaacgagttagactggacttgacccatatttttaaagtaagtccagcctgacccataaacatatattatttatattgggccaaacctgtggacctaaacgggccaacccattattttttttatgaaatagttgacccatatttatcaaatagtccctaaacactgttgtgtacaattgccatttttgtacttatcaaattagtttctaattttaaaacacaaataaatttttttaattaaaattagcttcaaaatcaccgaaaataaactataattacaattacatgtttaataatcaacattatatcaccataatagtagtccattaataaattttcacataaaattgtaaataatattcaacataatatctttcaacaaaaaaaaatgtttaagatatcaaaatgtgctaactattgtcgctgattacgtaattcttcatatatatagttaaaaacaatagtacatatattaaaataatttaatttcaaaaatatatatagttttaaaatatataaataaagtacttttatacgaaatagtagataaattattaaataaaaataattttatgaattttaattcgtgttttagaaatttgtattttcgtgttgtgtgtcgtatttaatactaagcaactctaaaaatac

SEQ ID NO: 211480 - DNA, 575 bp, Cannabis indica
tttgtagttcatttaattgatcagctcattaattaaaattaaagcacaacagagatttttcacttgctgaaaattaaaacataatctatatattgttttcttttgatttcaactcggtgataagagcctcatttctaattgggtagggcaaagagaaagaattgtatatgttaatactgactccaagcatatggcttccctcaataaaactcaaaaatattgtcaacccttttcttaatatcactactatgtgagattgtgtttcttcaattaaatattggatgtttttctggtctcattttgtttttgtttttatttaatcccctcactctcttctctatacaattgaaaatgaaaataggtatcactaatagatagctagaacatgagatttgtctcccaattatattacatatagtttaattatcccaaatcgatcttatcataagctactcatcatcaactatattacttatatattgtttaattataagctcacaaagttgttctatcaatgtggtatttaatttttttgggaggaaacaaaggtaatatatatgattgaatgattcctt

SEQ ID NO: 211481 - DNA, 800 bp, Cannabis indica
attgtaaaatgtgacaaactctatctcatgtattatttgttttttttttaaatgttaaaaatgtcttaacatttaagttttaaccatcgcaaggataaatagaagaaaaaattattttaatgcaacacaggatgaaaaaaaatattaattaattatttatatatatatatattttgagaatatagtcatttaattgtgtttttgaacatatttaatattctttgtttttaataatatttaattgggttagctcgttcttctggttcatgtcctgaccgtctttttcgtagggggtttgtctctatagcagattcgcattaataaagttgcaatctttgtttcaaaaaaaaataatatttaattggtatctcatatttttaaattgtacatatttagtatttcaaagtaaaatttaatcaatttaattaaacaaatctcaattatatgtaattaaataattaaatttgaaacattcataaaattttagacagtttgattgtattgataaaattttattgaaaaagtttaaatttaaaatatctgtatcattttaaaatacaaaataccaaaatggcaaccaccggtggtaggctgctacaaattaaacttggatgcagcttgtgataatgaaggagcaattcttggatttggagctatcatccgagatcatactggtgctgttattgttggtttatcagccattcagagggtgttttccccccaaagagatggagacagcaacaatgtttcatagtgtgcaatgggctattgagcttcaattccaatccattttatagaga

SEQ ID NO: 211482 - DNA, 917 bp, Cannabis indica
gtcaataaatattactaacagttctgtcagttagtaatataaacggtaatgatccacaatttgcagtatcgtatcttttcattttcttgaaatcccatcatcaagagacaaaggttacagaaaaagatttcaatgcaaaattagaagatcatacccttttcaagcgattcaatggactctactacgcttctgctaatctataattctattgtttaattctcatgaattaattagggctaaattaatatttacagtgtttataacatatggtatcaagaacatccctaaattaattcttgagaatttatgtagtatttgtagtcttgcatttagttacttttgcaatttggtgaatgtcaaaatatatatttcattattgtttatggtgtcgacaagattatgtttcctgtcttttccctccgacggttacggtggcttctccagcttggacccctccgcatgaagattggatcaaaataaactgtgatgtcagggttggtggagattccatgtgtatggcggccctggctaggaatcactctggtactgttgtgtgggcagttgttaacatgctcaatttcagagatcccctgattggggaagcggcgacgtgtagacttgcattggactcggccagactcaagaatcacaactatgtcttggtggagagtgattccgaaatagttatcaaagcacttaaaggacttcactctatttggaatattgataattatatttctttatgtaatcaactctctaaaaactttgtatcttgtaatttttcgtttatttcgccttgttgtaattttgctgctcataatgtggctaattgggcgttcgcctagaacatatcaagttttgtgaaaccctcttcaatacttgataatatctgtaaggtctaattttattatctatct

SEQ ID NO: 211483 - DNA, 602 bp, Cannabis indica
actaaggaaaagaggaatgttgattacaattcatggtaataaataaaagatttggacatctacataattattaatatttataacatatatatatttatcgatctttctcttttaaattaataataataatctcttctctttctttttttttaccttttttattgtttcttttttccaactttttattatttaataaaacaactatatatataatctatcaatttatatcaatatcaatcaatatatataggaaagtataaacatgataaattgacagtatatttgagtttctttttcatttttcttcatttgcattaattttttaattttctctcaaattagtaatcataggatttctgaaatattagtaatcatacataccgatatatgtagtccaaatatggactcacatgatcaaaaatatttcatctccttcatagatgattactcacactacatgtttctctatttagttcataacaaaagtgaaccattaggtagcagaagtggaaaaacatacaacaagtaaatcaagataagtgagatacagatagaggtggagagaattatggttgacacaaaagatggactaagcactcggt

SEQ ID NO: 211484 - DNA, 2037 bp, Cannabis indica
tagttagggtgttacagtgggagacttggataggttttcttcttcttcctctgcctcaacctcttcctcctctttcctggacttctcgcagaaagccagagtttcctcttccttctcctccaagaagctcgtgtccatgttgggattcgccatccaggatcgatatacagtacgaaggccaaccttgttgcatttttctatggttttgacctccttctcaacttgcttcttcttaaattcatcagcttgggccttgatggccttctcgacttcttcttttaacttctcagcttcttgtttgaggcaactgatttcttgttaggcgttgtcccgttgcttaatcacaaccccgcattgggatagtaatttttggacctcaccctccagatatttgagccgctctgagagtcgtcgattggaagcaaaagagaggaaagaagcgtggagaattacaaacaaatgaatatgagaaaaaaagagaaaaaataataataataatacggccaacttaccatgaagttgttgtccaagttcctcaaaagcatctcttttggactcccaatgttgattagatccaaattagggggaaagagagccttgagtttgtgccagcaagcaatcccgtacgcctgggcgaattcagatccagcctcttctgctgcggccgacaaggtctcaatggcctggctcgaggaggcagaagaatgagctttctcaggaggaggagcgttggtgttaggagcgattggaggaggaacttgttcttgagtctgggtatcagtgacctcgaggtcaataagctcggacaatgaattcttttggtgggcagtggttttcctttgccttatgggaggtcccacctcggcatttatggggattcctgggttagttcccctcttcttccctttccaatccatatcttcaaaacctcccatgtctgcaaaacaaaataaagtgttacaaggtagataagaaaaaggaaagggggagtataattttccacctaagggaattatcgaaatcactagaaggcgagctatcactaggagagagggtagaaacctaatatccactaaaatccctacagcccgtaatcttgactatatcaaagggcttgattggttctaaatcccagctcgcgtctatatgacttaccctatctgccatagtgccatattgctcagctataccataatatgactcatgacagttaatatggaggtggaatctaaggtaccaactatcaaacttatgagcaactcggtctacgagaagggaatcctaaatataaaaattaaagccggagtctcagaaggtgactaatgtgttatgttcagccctgagtactgtgggagaccaaccacattgattacctcggaatgctccttcaccggcttctggaggggcagtttttgaagacactgtgcttaagccacgcgatcccaggccttatcctcctctggaacggtaacctgctgccaagaagaatacttaggaaacttataattacaagtatactccttgtcagcaagaaggcccaccgatctcagattggcctcgttcaaaaggaagtgacatgacctaaggccatagggaagagtcattaggcacctgtgtcgactgaccatctcaggggtagggatgggtctcgtcgagaaagctgtaaaaaaacaaacaaaatatcggtaagaaatctaacaaataaggattaacgtaactgagcatgagaaaaacaatcacttatgaattttgtgaaaggtggttgtgccgattggggaaagaccagatgtccaaaggaagttgactttgaaatcactttgtttggcaagtccaaaatgattttaggctctctagaatgagtaccaagataatagaatccccatggggtattcttcctccctggaacgaccttaaccgaatagagatactcgttttctactggtgtggggcaatccccagttcaattgtttatacaaaactttcaaagtagcgagaatcttgtaagagacaggaatcagctggaatggggcaacccca

SEQ ID NO: 211485 - DNA, 523 bp, Cannabis indica
atcagagctcttaacctcacaatcaaaaaattgtttacccttaaggtacttagatttgagaacattacagcacaacgactgttcctcagtaagtagagcccaaccccacttggcgagcaatgcctggttcatctccacagtctttctaaagccaagccccccacgggacttgggaaggcacaattggtcccaggctttaagacaggtgcctctattacccccaccaaaattccctcaccataccatcaatcctatatgccagcttcttagaaagctttgtcgtctgcatcgtgtaaacatgcaaagcaagccccaccgatttgatcaacgtagcacgaccagcctttgataacgattttaatttccacccatggagttttgacaccaggttatcgaggatgaagttaaaattcgcatccttttggcgggatctaaaagcgggaggcctaaatagtttatgctacccattttacaattcaataccagagcctgcctgatagctcgtttcataccatcacttgtg

SEQ ID NO: 211486 - DNA, 582 bp, Cannabis indica
ctagatgtcgcgaagcatcatggtcttcagtttattattgtcgagagtgattcgagggtagtgatcaacgctctcaatagggaggttactcgatggaagattgagaactgtgtctcattttgtattagatcctctctttattttgtttttttttaaccaaaaaattaacttttattcaatcaaatcagctaccaagatagcttctaaactagcagggacaaaatgcctgcgggaaacacaaccaggatagaactagaagaatgagttaagaagttagccgcctggttcttggactattttacaaaattaataatactaatgtaattaagtgggcgtttacccatcagaggttcagttgtatccctattttctctatcccgaaatatttcttttgtaatgaccgcgaggtctaactacgtttgattattatataagtacacttttcttttaaaaaaaacagaaatatcattgttttttactttttttttaaatattttatataatatattagaaaatatgaattaataacttcaaatagaaataaaacgtgagtggtgctttaataaaagtgtcagaaaattt

SEQ ID NO: 211487 - DNA, 604 bp, Cannabis indica
ggtcattattcttttttttttcttttcaaagaaaagttctacaaatagtattgatttgcttgaggatcttctttggtaataacatgatgtgtgcctaataagaatgaatagatactaagattgaattgatcaaaatgttccttgaaaattaaaatttaaataattatttacatatatatatatatataaagttaaatttaaaattgataattaagagatgttatataaaatatatgattagtacaatgtcattttttcggcagcttatgttgaaaaaaagaattatatattagcttattaatttttatatcaaaatatatttttatatatacatgtgtccacttatatatatataaaaaaaaatataataaaacgttaatggaagttaaactgtattacgcgtattttttacatcaatcaacaaccctttaaagggttaattaatttatatataaataaattaatataaatactttttaattatatctcactttacatgtaatgttggaaaattttgcagggtacctttaaagttatttatttggtcattttttaaaaaaaatactttaattaattctttttatgatcgtgtatgtcatatagg

SEQ ID NO: 211488 - DNA, 588 bp, Cannabis indica
ccccgacgctggacccggttcccagaccaacactcagacccctgataagacccgggccctagacccaagaactgaaaccagaccccaactcggaaccaagcctaaactccgaacgacctgaaatcgaatccccataccaaacccgaacctcataccaaactcgagccctagaactggaccaagactggactttgacccagaacctagacccgggattctgaatcctagaccttgaaccctagacgccaaacatgaactctttctcaaacccagagcccggacccagacctcgacccaaactagaccctggatctggaccacgacgtcggtcttggactcgacctcggctcccatcctggcctcggagcctagccctggacctgacttaaataaaatcaacaaatgaaaataaaaataaaatttacataacacatttttattttttgttttgaaaattgaaaaacaaagtaaatgtagaacatatttttatttttaaaaaaaaattagtttttatttttatgattaaaaaattttaaaaacaaaagtgttaccaactgttatttcattagaataatttaattataatat

SEQ ID NO: 211489 - DNA, 847 bp, Cannabis indica
taaaaattaataatttacaaaatagcttaattattaggaattattatgtataaatattataattttttctttattattattattataaagattttttctttaatttttaaaaagccttagaggatttacttattacttatatattatattatttgatgagaaaaaacaacttatatttttataactcattttttattcatttatacggtcatatgaaatttaattcacaaatacattttttttgcaattatacgcttattcctctacttccgcccctgacagccaccaccgccacaagcgctactttctcttttctcttctttcttattgtgtgcttccataagatcacttgcaagagaattgagaagaagaaaaagaagagtaataggaagcaattggattggtgatacaaatggatgaagaaaagagtgccaaaatgttgaataaaaaggaaaagagaaggtatgtgatggattggtggaagaaagagactatgaagagctagctaagaaaaaagaagaaaagaatgaagcaacaacagaagggaacaacgagtttggtagataatggcgacgattggtgattacatgatgaggaattgtacataaaggggaaaagagaaacaatggtaggagtaagggtagtttagattggtggttagatgggcttagtggtgaactgtggcgaggttggcgaagtggtagtcatgactctggtagtggagaaatcccagagagcgggggctatagtagtactcctagtatgaggggaactatatgtgttatgttgccccataaacaagttttggtagaaatttatttgagaagtgtgatgtcgatagttttag

SEQ ID NO: 211490 - DNA, 663 bp, Cannabis indica
ttgataatgataatagtgtaaaatgcttaaatcttacaatattttttatataattttttcaagttttaaatctggctgtacaattgctgtttaagaaattaaaaaaactatatatgtgatttggtttaaaaaataaatcacaccaacacaaacacacttaactccctccttagtccataggatacttttcctcctaacactttttattaaaattacaaaaatagcctcaagtaacgtaatatttaaacatacaacacatgaacacaccacctccctcacttagctatatagacttcttgattattttatttatattaataattataattataatactaataataaactcaactctgtagtctgtattcgttaaattcaattgtatatttaatggcagaagaaactgaattattcaagatccgatgaactgaagggagtcgaaaagtagaagaagaagaaaatggtgatcaagaagaacaacaaccaatatcctcatcttgatcatcatcatcatcatcatcatataatgtatttcaccaaaaggctttcaagtctcgattatcgttactttctcatactaatcccaccactctccttaatcatcttcttcttcctcccatatttttcatcacccctcacaaatccattctcctctttcgctcc

SEQ ID NO: 211491 - DNA, 549 bp, Cannabis indica
atttttagtgttgtcgctttctccttcacgcagtgaggttgaggcctcttcatgaacgtgtgcattcacatggtttctcatcaatacataattaagcagttagcatgttgctgtctcgcagaaggctattcagccacccaagttataaacatactctacgaattatatttctaacgagttgttccatgctaataagcatacttgtcgtttgcgtgtttgagtttttcccagctcaacacactactactaaattaggctttagaggcagtttttaaggccattcagcataggttttggcaaaattcgctaccgacgttgttccaggtgacgctaaaagggttaaaaacaaccgacgatgtagggaccctacggcatcggttattatgaaacaactgcctccgtagggtccctacggtgtcagttattatgaaataactgacctcgtagggactttacaaatgcggttattatgaaataactgactccgtaggggttacctataattttttttttgagctatgaaattttgtattttaatatatttttttt

SEQ ID NO: 211492 - DNA, 1149 bp, Cannabis indica
gaggtaaataaagtactataaaatttaagaaaatgttgactaatatcttggtgagaatcaatacgctccccagaatcaaggacaatctcacgaataaaattattcctacgtctagaattggctttagaatgaaaatattttatatttttatcaccagccttaagccaatttattctagaacgctgcttctagaaaacctcttctttaaaaagaagagagtcaagttgagattgaagctctttagcctgattactattaaaatcagaaggggattgacaagagtgcaaagtttcaagacgatcctgtaaagacttaattcgacggctaaagttttgtctagtatagctccaagactgaacagtcttaatacaggagtcctgcttgagcaggaaggtggaaagaggatcagcatagggaagattagaagaattgttctcccagccttccttaacaacagtgagaaaatcaggttcagaaaaccagaaattctcacacataaacctctttctcccagacgcgttactaagattatcctcaaggataacttttaaagccctatgatcagaaccaaaaaaacctaagtgatagagagagaccttacgaaacagatttaaccaagagttattaacaatacactaatcaagccttttcaaaagaattaccatgtttctaagtaaacttgttccctatacacggcaaaggaagcagactatatttattaagaaaatgttgaaaattagtcatagcatacacaggaggattagaaacattagatctatcatttaaagtgaggtaatcattaaaatcaccaaatataaaccaaggcatactaagagcaatatcatacaaccgatgtaaaagagtccaagtatccattttatttgaaacataaggagagccataaaaacaagatagatgccatttagtattaatattatcattcataaatacaaaacaattaacatgattagaggagtaattatttatatatacatcaacagcagcagtccaaaaaagaagcaaacctccccctaaaccccttctatgaatttccaaaacatgatcaaaagataacctagaactagacccaccccctaacttagtttcaataataaaaagcaaacagggtttatgctgcttcactaaaag

SEQ ID NO: 211493 - DNA, 569 bp, Cannabis indica
tgatttcattctaattatgtatacatttatagccacaaaggagctggtgctctattacaattagggatgcacaccggggagtgctcttccggttctcatccccattaaagattttaattcccatccttacttattcttcatcggggatgggtgaaaaatcccctaatggggcgggacagggacgggacgggacgggacgggaatctcttaataaaaatataaagtttataataaaaatttaaatatataaaaatattaaactacataaaaattaaaatattaaaaattaattattatttattaaattaattattatctaaaatacagtttaaaatttataaaaatgatactaatatactaaaaaatacaaacatatataaattataaaatataaaatattattagatatataagataaaatactaaacggatcccgtgatcagaacatagactcccatttaacattcggagacaaaaaataatctcccttcccatcccgttccccacttagacaggaaattctcgccccattaaagggcgggtcctgcggagccatccgaatgagagaa

SEQ ID NO: 211494 - DNA, 1153 bp, Cannabis indica
aaatccaaacctagactcgaaccctgacctaaatcggatcgaactcaaactcggacctagactccagacctgtaccctagaccctagactccggactcggactcaaacccaaacccgaacctcggacccaatacccgaatcagacccagatccagacccaaaccggatcctaaacccctgatccaaactcgaatctggacctagaaccacgacccaaaccccggtccctgtccaggttcaagtccaggatttaagtttgggtttgggttcgacttcagctttagttttagctccatttttctgggtctgggtctaggtccgggtttaaatccggagtctcggtcgtggttcgagtccgagtccgagtcttgggcatgttctgggtgtgggtttacataacctatcattacaagttagtaccaaatacagtattgtattaaataatactaatgcaatacaatacaatatcacggtgtaccaaacgagtctataagtacgtaaaagatcaccgcaatagacccaggaataccaaacttggtgcgcggaggaagtttctccattcaatttttcgttgcaataataagttttctttctaatttagtttttagtttattttcttgtagtgtattgtgagaataatgaagcagaagaaggctttaattaatttattctatttgccttggtgaatagtatttttccctttacgtctcctattaaataattctttccttcattagtgataaaagcattaactaccaaaagaaaagaaaaagtaaaaagtcgatgtacgtacacaaagaaccaaaacccaaattactagtttggttttaagtagcctaaactaaacacgtactcttctatatattaccaatttgtacatacataattacaaaaattactctcaaattgaagattagttttgattttctttcttagaaacaaattcaaattagtgtttacgtacattaacatgataccaaactttgtcacgaattcagcacatgcactatatatatacccattatatttatatgtacatacactaaacacatttatagaagattattattattattagcatcatgataaaagagaaaatagaaaaccaccccttccatccaaaccactcattgatcctcatagatgataatga

SEQ ID NO: 211495 - DNA, 856 bp, Cannabis indica
tgtattgaactctttgaatcaattcaattatattttcacttttgagaaatctcttttctttctgctttctcaactctcacttcctatgagaatctttggaactaaaacaactcatggattgttaccattggaaagaaaataagaattcgatagatcattagcattcgtcgatcttgagttctcaccgagaatagagaactgcttcgaatcaccatcttcacgagagcttcgaatttgcactcttcctcgtgcgccatggaagaacagataagcagcagatagagaatgatagcaacgaaagagcacactttaatggaggctctgataccatatcagtttggaatccattagaggaaaaacataaagaaagagtagaggaataaatcaaagacaaaatctcattatcatcattgaacagtacacgagtatagcattttatataagctgaggttagttacaatcacaactaactctaactaacaacaatgacagctcatactcttgcaactaactaactcctaactctaattaatctaacaaattacagacttgatgtatttagcttcagattttttattaagaaaaaaaaaacgaagttatagtatatatctattttttatgagttttggcttgtcgatcaatgaaaattaacgtatatttagtttgtattataaaaagcgaagctatcgaatgttaattgtctagggtctatagttattgaagtatcaaatggaatggtaaagcttctaaataatgtcagacatatgcataagaaatgtaatttcaataggaaattttgttgatgagggttatcatgaatacaagttaattattgggataagtaaattactatagg

SEQ ID NO: 211496 - DNA, 596 bp, Cannabis indica
aatatacatcaagttaccattgaattagactgaatgtgagtagtttggattgaatcggttctttaaagaaaatttcaaaatctaattaaaaatcgatctaatctaattacatgtaatacatatgaaaaatatattgcctttattcatatataataataataatatctaaattttgtttttatttgttgtttattaattttcgatacacatattacccctaactaaagaaatccctaaaaactctaagaactcatgtatagtttagtttttatgtatttttttagttaatattaaaactcaaacgttgaatagaaataatatttaagatgcccatccatagtctaaattatcttttttttactaagatgtcaaacagccaaataaattaaattacaataataattctagtttaaaataatttatatacctaagatttgtgattttgatattttttttagctaattatgaaaattattattcttatttaaatcattataatattttatatcacaaatttatttattataatttattatgtgtaattctagttttaatcaattttgtataataaaatttgatatttttttaactaatca

SEQ ID NO: 211497 - DNA, 668 bp, Cannabis indica
actacaaattcaaagataggcatgaacaaaatagctaagaaaaaggactacaaacccatatatgagcatgaccaaaacaacaaaaatcagaaaagaaaattaatcccaaatattttcaacctcttcaatggcaaccacaagtccaagaagcatcgtcgaccactaatcgccatcaaaaagtaactgtcatcaactccgaacagccaccaacctcggtgaaccgcgaaccgctatgggaaccccaaacaaccactatcttcgtcgatcaggaaaggactagggaagctgctgcacgaaaaaattactggtagtgttgcttaagtcttcagacggcaaagaaagaaacgagagagaacatatataaaaagtttaagaatgtttaagcaaatattcataaaagctgcaaacaatatcttttgtcaataaaaacaaagatgtactgcgtaagttagcaaattcagtacagaaaaaatgtttcatgatctttttaaccaatcttgtaaaggcctatcatcataaataaaaggttccccatagaagaagttagagacaacttgggttgtgtggccttccttgttctaagttgataatgttgtaaggaattccactaggtgtatcccatgctgtcaacctgtctgcaatgtatttagcctaaagtaaaagaatga

SEQ ID NO: 211498 - DNA, 537 bp, Cannabis indica
aataaaaataaataatctaaacataaatttctataacgatttaataaaaacttaaagaaaaattaaactaatagctaaataattaataaaaattatttttcaatacctaaacaattaatatattcgaaactaaatattttttattgcctaacaacaaataatctaaataattttttttattacataacaacaaataatctatactaaatatttttcaaaatgcctaaatctaaaactaaataattaaacttaactaaatatttttattaatacctaaatctaaaataaattaaacaattaatttacattaaatttaaaactatgtattaaataaataagtatatatgtatataaaatagtatacataaaatatttataaattaattttaatcaataattaaatatatatctaaaggagatggtgggcgtcggtaaccacgaggaggacgacaactgtggttgagaatggtcggtggttgagcaaacagatcgagagagagaaagtatcaccggtggtggagctcgaatgggggtttc

SEQ ID NO: 211499 - DNA, 567 bp, Cannabis indica
aaatatattctgtattttatttcacaaatttttccttgtaaaaaccaaagatttgaacaaagccttttaacaccaaaaatgataaagaatagtaaacgggtagagaagttaaaacctttgctatcacaatagcattgctcttgacgtgcttggcgcacaaccatgcaaactctgcatcgcgaagctcactttcttctggagccttctcagacatgactttaaattgtatgtcttcaggggttaaatcatcagtgtcctgagctaaccacccaccaccaacctgtctaagggaaagctttcctttcttattgtttctcgcctcaaggatcctcaaagtctttgattttcctcggaggatctcaagccctttctttgtatacttaggcgcaaccacaatctcatagaacatcctggtttcaccacctgttgggcttctaaattctctgatttccttagcaagagcctgaaacccaaaataaataatagagcacaacaaataaaccaaagatattgacaagtaatcaccagtgatggcttctcaaagaatgcgggttagactctagtcta

SEQ ID NO: 211500 - DNA, 650 bp, Cannabis indica
ctgtcataactgacagttaggattgggtctaaacaacaaggctatatatagccatttgctgcaacatttcagtagcaatccagagggagtttttgagagctagttcagttgtaaaataaagagagttttgcgagaagagttgttttgtaattgaagctgagcttcattagtgattgtgtcaagtacacattgaatgtcaactttgtaattctctattctagctcaataaagattcaagcatttggggttgttctagctgaggagtaggcaagtgattcatcatcacttgttcgaacctcataattctggttgtgtttatttctttctccctacattcttgtctataattgctcattaatctttgttcatttttctggttcttggttgttggtttactggtttattcattgttgttcactgttgtttaattcaattcgaattactttttaaactgtttgcattgttcttgatcaatctcttgttttgttttgtgtgtgaggtgtatgatcaagcattgatcacatcatatatatatatatatatatatgtcacgactctaggttgtttctatttgattttgatggaatggttaacaacttttaacaacaacattgtacttttgaatgattttgtctagaaactaaattatt

SEQ ID NO: 211501 - DNA, 781 bp, Cannabis indica
gttgaaagattgaactaacctcatcaacttctatgttgaaggcaacaataccaccaaatgcactcactggatctgccttcacagctagtctataagcttcaaggatatcatcacgagaagctacaccacaaggatttgtgtgctttacaactacacatgtaggtttcttaaactctgccacacaattccaggctgcatcagcatctaagtagttattgtatgacatttcctgcacccaaaagataatagctagtaagcaatcgtggtttaactgattcacatttgtaaataatgcaagaaaattgttgcctgcatgccttttaactatgatttaacagcaagaaagaaaaaaaaaagtctaaacacaaaatgttactgcgtagagtcacattaggaaacacaaattcatagcttggttcacatggcaacagctttgctgccaaactgaaggggtcaaaaaagcagtttggtgaaccaggaaagatggctccgcagagaagccaagaccacaagtgatccaaacatgcacataggtaccccaattattgttacttgtgaaggaaatattcaataattttaccttcataatttattctgtacccaattagttccaataggagtttcaaatttacattaaattgtaacggagagcattatttcagcagggtgatcatcagattagtaaatcgaaatggacttcaaagtatataatattgatataatatatttggtgctttcattgtcatataagacacaacttctaattaaatatccacaagct

SEQ ID NO: 211502 - DNA, 584 bp, Cannabis indica
aattagtactatttataaaataaaaaaataaaaaaaaaaaaaactttatttttatatcatgtaatttgagatattgttttggttactctttaaaaaaaaattgtatacattttagtaactaattagttatttttaagttatattatggtagattataatttaaaatacatttaggtaaccttaaaaatattttcgaaactaatgaattgtcattaatataacaatctattatttttatatactaattattttatatctttttgttattttgaaagttaattagttatcatataatataatgtaattcaattaataaaattctaaaatgaatgttaactaagatttaagaaagaattataaaacagtaattaatttctttattactaactaaatggtttattttttaaaaatagcaaaaaaaaaaaaacatatgtttcttacatcttaaaatgtttacgttgaagagtaaatcacaataatatttttagaaactcatctgagtcacgatgtgacgagaaattatttttaaagtttgaaaaaagagagagagaaataagaaaaagaaaaacaataaagagagaaaa

SEQ ID NO: 211503 - DNA, 737 bp, Cannabis indica
ctaatcacggaggcattcttggagtactataaagggttgcttgggtcaaaaatggagcagagaaggaaagtagatcctagaataatggccaggggtccagtactatcaaaggagcatataaaaggccttactcaaagatttactactgaggaagtgaagaaggcagccttcagcatacctggaaataaatcacccggaccagatgggttctcaagtagcttcttccaagataattgggagctcattggagaagatatcagtggtgcagtgatagcatttttggaatcaggtaacattcttaaagagataaactctacgatcattactctggttcctaaatgcaaatatcccatctctgttaaagattttaggccaattgcttgttgcaatgttatttataagattgcaacaaagctcttgagctctagaatcagtaacattcttcctgaaataatttcccagtcactagggggatttattaaaggaagattcataggacataatatcatgatttgccaagatttggtgagacactactgcaggatagccaataagctaagttgtatgattaaacttgacctccaaaaagcctatgacacagttgagtgggatttcctggaggaggttctgattgggctcaacttccccaacacatttatccaactcataatgaattgtgtaaccactccaaagttctctcttacgttaaatgggaccttgcatggtttctttgaatc

SEQ ID NO: 211504 - DNA, 792 bp, Cannabis indica
ataattctgcggctcataatgtggtcaagtgagcttttgcccataatataatgagtatggtcgatccgtcctccataccagataacttattctataatgaccatgaagtctaacttatcatactatattaccataaagtgtaacttattccttaatataactatgcttttattcaaaagaaaattgtttgaaaataatttgtctcataaatatgtatatacataccatactatattactctgttctatttatatagtaattacaaatttaaaaacaaaaaacaaaacatataattattaatttgaataatgattttcttagaagttatgttaaataaaatttttataattaatggttaataataacattattattaagcaatcgattgcatatgtgtaatggcaaagtcagtataataaataagaactaaacaaattacattttttgttttgttttttttttttttttatattgttagtcaatattacacttttatttaaacaaaaacgtgcattgataaaattagacctcacggtcattacaaaaaatattgcttgggagcgaagatacacacaatcgaccatactgattgttaatgaaaatctacttgactacattatggatcataaagttataacttctctttataaaagaaaaattacaaatattaaaaaattgagaaagttgtttacaaaatttagcatagttattaatttaccatcgaatattcaggtcgttgagcgaattgataactaccctagagtcactctctaaaataatttacttccaact

SEQ ID NO: 211505 - DNA, 999 bp, Cannabis indica
tttgaaactaaattttattatttttgggatcagttagtcttagtggcttttgataaaacacttgactatgtaactcattcttaatgatgttgtacaggtggattttcttacctcatcaagttccaatactatatgctaattaaattggattctttcctcaggttttgtaccatgaattcaacaaggatgagcagctggctgcagtggatgaagagaaaagaatcttggaagaaagaaagaaacttaaagcagagggagttataggaagcacaatggatgctcttgatggagcggcatcactggttgggtctggtgttgggatggttggtactggcattggcactggcgttgggatggttggaagtggcattggcactggagttgggatggtgggaagtggaattggtactggtgttggaatggtcgggagtgggctcggggctgtgggaagtggccttagcaaagcagggaagttcatgggaaggaccatcacaggacaatccagcaatcggaaaagtggctccacaactcctgtgagcagcatccaagaaaatggcggtgtaaaacctagaaaggactaaacacagctgctgctggagtgtgcaaatggatcattgtttatgtcttgtttaaatatcagattgaattcagttttaagctggtttttatgttcatagatttttcactgtcttgccaatttgaaatgtcatggctatgaatagttaaaagtatgtatcattttgttattgtttatgttcatctttcattgtgtaataaaactttagaagttgtaaaaatagctattattgattttcttttatttgtcactctttttttgtatgtatttttggactcaaaatccaataagtaatttgaacaaaacgaagcgactcagttttatttttttctaattattatttgtagaactattttaatttctataaatttggtaacacagtgcattatctacacggaacgaaacgtgagtctaagagactt

SEQ ID NO: 211506 - DNA, 559 bp, Cannabis indica
ttttcttttttttacattttatagatttatattaaatgtgtaaatattatattattatataaatattaattgaataattaaatcagtataaaataattttaaatttattttaatgtataattttttaaaagtatatacatgtttattaaaagaaataataagtttatgtagaaaagtttaaagaattctaaaaagaaaaaaaaaattaaccacacaattttttatataaataaaaaaatatagatgggtcttttttatttttacatttctaaacattttttttttatttttacggaattttatatagaaacccctattacaattagcactgcaacctaaatcacaacaaaaaatcgtatagaaacccttattgcaactagtgttgcaaccactttagaaacccaaaccgtaaaatttaaaaaaaaaaaagtaaaaaaaataatatatgaagtaattcttattttttttaaatgtacagtaaaaaaaattaaaaactgaacaatttttatacaacatagagatctaaaacagaaaactaatgtctatgattgggatatgg

SEQ ID NO: 211507 - DNA, 577 bp, Cannabis indica
gggaaagatagagacaacaagttttgaaggaaccgaggatgaggatgagaacatgcaacaaccgattgtccatgttggtaacacctagttgcacaaggttggcagtaaacccttgtgccaccaaggtggagaaaactccatgggatcttggtcatgtgttaagtgtcttatacaatacgcttcttcataactttatcaagtcctaatgatctcatgacagggaaagacataaggccaaaaataagcagaaagagagccaaaatctgtgaccaccaagcattggtgacagcaggccctgcaccatcaagagttgtgccactaggccctgcaccactaggagcctggtcacctagaggtctttgcacttcttgttgtaccactcgcctaactaattttattcatgtggttcccatggtttccttgggatttacctccatgagtaaattgatatgaatcttatgagaatgaaggctaccctcattcaaatgagtaacttctaacccttagtaattgccgaagaaatatatgaaggtttgagtaggaaaaaataaatggttatgggaaatagtaaggggac

SEQ ID NO: 211508 - DNA, 698 bp, Cannabis indica
actgaacattattacaagaaatgcttgaaagagagtgagttacaggaacagaagcctgttgagacttgactgtgggtagaagagggggaaacacatatagaccagcttcaagagtagcctccagcaacacttgctgtgtctcccgatcctttgacaagacaaaagtcagggtgaaactcaaaaaagacgttattatcagaagcaaattttgagacactgataagatttttggttatctttggaacatacaaaagattattgagagttaaaatcttggatttatcaatagatagaaagagtttcttaccaatgttctcaatgtttaaccctgcaccattgcccatgtaaacttgatcttgaccattaaagtcagatttttgagagagattgctgtcatttcaagtacagtgatgtgttgctcctgagtcaggatatcaggcattatcacagacagtttcagcagtggcaaccatagccgtaggagaattttgagtgttgttacttgatccagcaccaaaaccaggaaatcctggattaaacctttgatagcacttagatgcatagtgtccttgtcgagagcaaagctgacaggtgggtttgtttgtattagttcctcttgctgagttgttattttgagtagttccaaagttgcctcttcctccagaagttggaggacgagatgagaagccatttccact

SEQ ID NO: 211509 - DNA, 526 bp, Cannabis indica
aaactcgtcctcctctgctgtaaccagtagtaccacggccattagaattagagaaagatgagggaataggaaagttacctccattgttggcacttcgattggtaaaggcacgactatttcctcgagctaaaccagcagcagatgcagtgaaaaccgattttggctaggaaatctgctggtgcgattttgataaggctgaaatgcgatattagcttcaggatacgaatcgatttcagtcgtggccaaattgacactcagatcattttcttgatcagaatcaactttttcaattcgagactcggatgctaatagaagtgcttctatttcagcaactgagtattcctcaactctggtgttggtagatatgatgaatgtatcatattcggatggtaatcccttgaatatagcagcaatgtggtcccttgagctcagaacctctcctactgaggcaagaaggtccacatgttgttttactttgagcagatactcattcagagacatatttccctttcgaagtttctgcagt

SEQ ID NO: 211510 - DNA, 532 bp, Cannabis indica
tccctgagagatttggaattgtttaatttcatttttattatcatgcaactattgtttataatacatatggagccattcaatgctatttaaaaaaaattaaaagtttgaatctccaacatcgtcacccacaatagctagtaaaatgaataacatttgatttagaatagtttattatacattgctacatttgtaattttcaagttcatttgaatgtgtttaatttttgattataggggtgagaaaaaggtatagacttttgtgccagcttgtaatttttctgcacttcatttaattgtgttttcatcaaatctagtttcattgttcaccagagttcttaagaatgaacaatgagatgcaaatattcaaattaattgtatatactgttgagtgttgaataagaggttactaaagttttggggcagcactgagaatagatttgtaaacttgataatgagacatccaaagctgtttcatgatgatttgcaagtcttgtttgaatttcatgtagcgaactacatattttatttttagt

SEQ ID NO: 211511 - DNA, 549 bp, Cannabis indica
ctgattttcatctcttggtaatgtacaagttcatcttcccaatttataatggtcatttgtttataaccctgttgttgctttatcctattatgctaaggtggtatgtgttactgattttttcttcgttttcatcttttagagtacgattcagatgataacccactagaagaaacagtcaaacctatggtagatggcggcacagaaggatttaaaggccacgcaagggtcattatgccagggctcacaccatgctttgagtgtaccatctggcttttcccacctcaagtgaagtttcctttatgcacccttgcagaaacccctagaactgccgcacattgtattgaatatgcccacttaatcaaatgggatgaggtgatgtttactgttggtttatgttcaattttctttttggtattattttcattatctttccagataatttgatctaaaattgattgctttgaggtgaggtttactagtggatttatctttaacttgtatcgttgttattttcattacagtaaaatttatctaaaattaattgttgtg

SEQ ID NO: 211512 - DNA, 624 bp, Cannabis indica
aaaattaaaaaaaaaaataccagttaaacgactttccctatggccacatggttttgagggtttttattaattactattttgaatttaatatttcatatgaagtagtctgactctctgacctaactagctaccatataccagctgaaaattaatgaatatggtgtatatttcttggcgcattttagcttggatagagcttcagtgctaaaatgcgcatctgtaaacatgtacaatacaagacaaggatttgagaagatagaatggcttcataattaattccatatagttgttctatcagatattaccacgtgtggaagagaatcaacacgtgcgacaggattcgataatatcacagtaaaaggtcagtttaattcttaagttataaacagtactaaattatataatttagtgattaattttgctaatcattatatatatgctttaaaaaaaacaaacttgggttttgcttcttttaaataattaattatatctatacataatatgtatgcaaatatatataaatatatatagtactgacctccattgagccaaagaacaagaggttttcgatgaggagaggaagtagcttgagtaagccaataaaagagtgctctaccatttttt

SEQ ID NO: 211513 - DNA, 644 bp, Cannabis indica
cagaatggagtagctgagaggaaaaattgccatcttgcaaaacatgtcgaagcatggtacatgtgaagaatgttccaggttgattttgggctgaaggtatatatgaagacagcccctcatgtaatcaataggcttttccaagctaagttagggtttgtttcaccctttgaaaaactgtggagttgtaaacctatagtaagtcactttcgagtatttggctgtgtgtgctacgtattcgtgccaagccacttacgtagaaaatttgacaagaaggcgatatgatatatttttgtgggatacgacatgcaaacggaaatggtggagatgttgcgaccctacaactggaaagtgttatacatcaaggaatgtggtcttcgatgaggcatcatcatggtggtcagcgcaaaaggaagcattaccagattctaaagaaatggaagacgaattgtagaagaaaatgggggagcaaattgttgagttacctccaactaaagatacagttgaagaagaaaacactgaggacgaggcacctcagaatccatggcaaacaggggtgcatccaagagaagtacatgatgatagtcaaccagagcttcggagatcaacaagagcgcggaagccaaatccaaaaatatgctaatgct

SEQ ID NO: 211514 - DNA, 1213 bp, Cannabis indica
ctgcagaggtggcaagagtggccacatttgtcgggtttgtggagattctagttgtgactgaaacacgaatatctgaattagtcgccatcgaatcttaggaagacctgaggaggcaaatgtcgtagctgaagttcttattgtgttaactatgacatttgattagataaattaacaacttgctctcaatgaaagcaacaaactgttgacttcagatttggccaactaatagcagagtcatatttattactaatgcttgccacatgttacacaatatgaatagaacagtaaataagataagagattttatagaggttcggcccccttagttagcaagtaatgatctactccccttttggttgtattatactagagataatactcctcagaccacaagtgttgtggaatctgcggtagctctcttaagattacaatattagaatggaattggcaaatcacaagtgatggagaaagcctatgcttgtgtgagagagagaagagatgactgtcagacttagagcttgagagttaaaagtgagagcttaagacttggagagttagggtttgactaattccctttatatagtagagcttacatccctaatatcccttaaaaataggcaaataaagttatatttacataattaattaataaagttcaaatgactaaattgtctctcgaaaatatagaagttgctgatattttttctctattttcgtgggctattaaggtttaatttgctgcttgacttactgtccatagatgaaagttgtgcactaaaagcctgccaggcaaaagctgggcggccatgcacctgccagggtgcatgctggctggccacacaatacttaaaagttggctgacctgtgttggccatagggtcggccagctcccttgaggtgcctggttcgtcatttcattgtctctcctaagtactcggacccttcgttagttgaagtgcatagtagatggcttgactttcttgttggtgagttgaactctcacgtggcattgatattggccatgtagacatgccgcattaagtgtgcaaaattcaggataatagtaagctaaagaaaaaaaaagaaagtcaatgaaaaaaatacaaagagatataagaaagaaagaaaaaaacttaatagaaatttaaatacaaaaataaaaaataaaaataaaaaagtgtaaaaaaaaagtaataaaaatgtaataaattac

SEQ ID NO: 211515 - DNA, 723 bp, Cannabis indica
aatccggtccctaaaaatatatagtagaaaaatagagagtttgagaagaatagacagtgatgaatagagatgatagtaactctgtttatatttgtttagtattaagataagtataaaattgaaatataaaattattatgttactaattataaaatgtatctttattttctttaagggatatatgtaaattgattgatatatatatttttttttgattttatctctcatcttctcacttttattaaattatatttatttagttaataatatttttaaaaatatatatgatatgagatttatgcactattaattcttaaatttttcttttttttttaaaaaaaaaatacctttgtggaaataattttttttatatatatattatatatatatataatatttctaatattgttttaattgttatatgaaaaagaattagaatataatagcatcagtacctttgtctttttttttcttttattatttatgtttcaattaagctgaatattaattattacaaaaaagtaataatatttgtgattaacatatatatttttaattccaatgaatattttctttgaatcatatgagattggcaatttgttagtggaattctaaagtcaagtaagattaaagagaaaaaaaaactttgtaaagaaaaaaacaacatagataagtataaaaggttatgaatctaaatggcattgatataagagagaaaaatta

SEQ ID NO: 211516 - DNA, 546 bp, Cannabis indica
tcaaaccttaattctaagctaaatatccattaaaaacagttcctaaactagccaatatatcccaaaccaaaaatcatcaaacatccttataaaacttaactttgagccattaaaattacaaagaagatgaagaaaacttacccccctaattctaggcttgactacaagcaagaatttgggtagaaaagatgatgaagaacttggtttttcttctattatttgactttaagaaatttcctacagcttctactatctaacttatctaaccaaattaggaactcaaataaaacaaaacacgaaaaaaaaaaaactcatttatttaaaatttggcaaattaccattttccctcacaacaagcacaacattaaactaagtcctatgtgtaattcggtcattaataaataacctgcttaaccccataatttccaaccattacatatatctcctgataccactaaaatacatactaataccgttgtaatatttctcgccaattaatcgaatttctaatgttgtcggacttgaaaatattttaattcacatata

SEQ ID NO: 211517 - DNA, 778 bp, Cannabis indica
ataataagaaatcaaaagatagatgtatggtaagaaatataagattttgtttaaaaaatttatggataatatgtggagtagctaatactattatatatgtattaagtttcgtttaagggattaatggtaaatatggtactttttttaagggtgagactttctaacacttatactagttaggtatcaaaaaattcaaattgtgactgcaaactactaacgttttgtaggttattcatttaggctacctccaaatggtttagacgtaaaaaagttataaagtatctaaataaaagtttaaactttgaccacaaactaactagaatagcttattaccatgatttaaaatggctcaactaaaatcagtataaatacttgttcggtcctttttttggggcttacattaatttttattggtttttattttaactttgagttgattggatagttctctgttgtgttagctcatattcttggtgatcatagttgatggacttagcatctgtgtgtgtaaagtctaggtgaagcagaagtgtggatttttttaattgactgaagccttgatgagcagtccagtccaactaggggttatgtagctaactctataaatacaaattatcacatcacaattatatatctttgataatcagataaataaaactatttcttatttagagacttagggaggtaagacttattgatagtattgcattatcaaattgcggtaattactataaatcaatacatatataattattatatattattatagtgttttatt

SEQ ID NO: 211518 - DNA, 1266 bp, Cannabis indica
ctatatgtcaacttgggtgcccagatgccatttcatgtaggctcatctcctaagtctgaaacttagttgggtcatgtctctcatttatcttagaataatggctacgaagaatgcccataagaagtttatgggaaccaaaactgatgcgagacggtgcacatgatttcaacctgggcgctaacactgatactggaccagattgagccttgggatgtccacatggcatccttagcttaatgattcatcattttaaggtcactaggacatgttcacttgaactttgtcgaaagatggtagctagaaacttcttcgcaagatcatagtgcctacctaggtgcctactagtgttaactagggcaccaacacagtttttagtgcccaagctaaccaccattagtctcggtggctggggcccaggtttttttcttcttgtcacgtgtcaaaagtgttgtccatgtcatcgagtcaaatttctaggtaaatacacatattctatttcatccactactcagaagatacaatagtagaagctgttgtagcaagttcattcaatctcgtagcttgagcactcaactattgtgtaaggtatgtaattacactactaacagccccttcaattgcaaagaacttgttatttccaaccactaataacaatttgatggcaagccatcgaataataaaaaagaatcaacaacgaaataaaacaaaataaaataaaatcatgtactgtagcaagttcattcaatctcgtagcttgagcactcaactattgtgtaaggtatgtaactacactactaacaacccctttaattgcaaagaacttgttattcctaaccactaataacaatttgatggcaagtcatcgaagaataaaaaagaatcaacaacgaaaaaaaacaaaacaaaataaaatcatgtcatacagacaagactcaaacacttaaaattatgtcacagaaacaagataaaaatgctcaaaactatgtcatagagacaagactaaaatactcaaaatcatatcacagagataagattaattacaacagtcaaaattaaattgtagtatcaaaatacaatcctaaccaagccatacctaagcccaaggaaggccggcaggcctggccagagaaaaaagacaacctccaatagctataaatttaggaacaaaaaactttgatttttccactgttatttacccttgagagtttatttatctaagttgatttatatatataatgtttttttatggatataatatgccaccat

SEQ ID NO: 211519 - DNA, 990 bp, Cannabis indica
aagctactggttgagaatgaaattgctatcattacctgtccgattcctcatatccaagaaagttagcttttcactatcttcaagatttgcaaaaagagtttcagaagttcgattctaatctcattgagaaaattacaaggccttatagctttattggatttggtaaactctttaattatattccaagtgtttataagctctacaaaaaattaaaagcacatatattaactatatctatgtctttactagctatcccaaatgtttgtttgtttgaacaattaatgcaaggttttgcagatagtgtcattgtgaatattagaaagcaatacattgatacaagaacacaagccaacctatccaagcttaatgctaatagaaaacaagatttagacattgttacagaaaatttgacagaaatcttagaaagaaggagaaattcaggtgcatattaacatatgaatcttaaaactaaattaatcacaaagcttctatctccattaataatgataattaaacttacacataatacttattgatagagttacatgaaataaaatcatcaccactatcaactcctagagctgtctcctcaatatggggctcatcacaacttgaggtaaattttatggccttggatataatgatgtatatgttaaaattaatattgttctgcctaatttattttaaattaattttgcttaaataggtgattgcactgaaatggactcctattacgatcatacttgttgttttggttgtcgtttcctgggctggattgatcataaccgacagcattttaatttccagttcttactagcatatgttttttttttctaggaaaatatatcaaaatacaaattctgtattttatattgttaataatacttatttgctgccttaatttataaaatttctgtatttaaattatctttttataaactaggccatagccgcacgaatttggttgtttttttactataataataaaaa

SEQ ID NO: 211520 - DNA, 589 bp, Cannabis indica
catggtcacttggggggtacccatacaatacaaggcatcgaactagcaaaaagaacttatgtagagaaattttaacgtttagaataagctactaaacctgcctctaagtcgtgtaggcatacttcagcttggcaaagtaaatctagacccttacttgtcaaggccataagaagatagctaggattaaagacaacctcgacggtcacacaatccatgataaaaaagcaacaaggccaaacaatagtattgtctcaaaatagagggcatattggccaaagataagaacatgaaggccctggggctaaaaataaagtagtgttctaaaaaggccacaagccacatggaacatgaaagtaagcagtgttctaaaattaaaaggccaccgaccataaaaggccacagactatacgaaacatgaaaatattttctatgttatacaaacataatgttgaatgctactaatgaaaatactatcaaaatgtgtataggggtaggaggagatgaatatgaagccacaagatcaggatcgctagcgtctgggctggccccaggatcagcatgctggtcggcctggtgttcagtatcctgg

SEQ ID NO: 211521 - DNA, 690 bp, Cannabis indica
tgaacataggaatggttgtgatgtagatctttatcatacattgggacttgacaagtgctgtttataaatgtcgtctgacaaagatagcacaacttgtttccacataaaataatacatttttattattattttgggtgtgctacttttatgtgaacaacactgccgtacaaagttgtataaactgatttgaacacatttttgttatgtccatatataaataaacaacacactccatagttatctatctatctagatacataataatggctttcactgagtgccacatataaaaaggctatgacaactctcttacgtctctcttccttttattttatttgctttctacattaatttttgtctgcaagtgatttgttttctcagaaaacactgttcacgtttaataaatatatatataagaaaatcaaccaaattgcatgactcacgtttaaacaaatgaatcaaaatagatcgggtttaggtggcacaatatgatttgcggacctaagaataggaggggcaaactcaggtaaaagagtaatagctgctttgaaattagggttgttaatctaatacaatgtgcactttttttggtcaaacaacatccaatccgcactaagtgcggattttattttttagattcaatccgtacaatagctcaaatttaattcaatccaatccgtaaaagtgcag

SEQ ID NO: 211522 - DNA, 689 bp, Cannabis indica
aggcagattataactgccataacaaggaagaactgacaactgctcgaaaatcaaaaactttggtagatgaataactacttaaacaggaagattacaagtaatggaagaagccaaagtactttacatttgattaaaatatagttgtttacattgtgaataaaaacgcaagcaaacacaattatattaggttcgaatgaaaagagtacaaggcatttaagataagagaaaatccaaattgggttacaaacttgtctttacaaaaatgcaactaggggaaaaccattatgtcatcttcctaaaataaagaatgaggggtcggtaaactcgagaaagaccgtctccatatagttcggagaaagaccgtctacagatagcttggagagagaccgccacatagctcgagaaagaccgtcaacatgtagaaggtctcgacctctgcatagacctcattcccaacctcaggaaatttcttgataccagagagatgttggcacgaaggtcttcttaggcaagcttgggtcttaggttggttggattctttaatagaatccaaaaccacaccaactttcctcctggattcacccaaaatcatgccaactttcctcctggattccttgtcagcctgaggaggacctctaagattgctcacaagatctataatcatttctgtggagacagagataaaagat

SEQ ID NO: 211523 - DNA, 776 bp, Cannabis indica
aaacaattaagtcatcttcctaatcaaagaatgtatggggagggtttgtaaactcgagaaagaccgtctacacgtagcttggagaaagaccgactccacgtagctcgagaaagactgcctacatgtagaaggtctcagcctctgcttagacttcattcccctcatcagaagatctcatttcctgtagtcgagaccttatacccagccacaggaaattcctcgacaccagagaaaggttggcacaaaggtcttctggtgcaggtttgggtcttgggtttgttggattctctgatagaaaccacaccaacttccttcaagattcgtccgaaaccatgctaactttcctctaggattccttgtcagtctgaggaggacctcttagatcgctcacaagatctatgtatattcctgaggagacataaaaaaaaggggttaatggagcaacaaaaaataataatatgtataatccgactcaaaccaccattcacaaaggataatacttaccctcaagaatcacttgtaaagatcgctcataacaatctacggggttccgttggtttggattggtcaaaagctcctcaaccttggaatctgtcatttctggttcaaattgaggtttgaagtccttgggaacaaacggagaagaaaaatggttggtgcatgttatgaattggggggtgaactttcgaactcagatggaacattttagcaagaaagagaaatccattctcaagatggatctcaccgaaaaagtagaagtttgtgaaatatggcaa

SEQ ID NO: 211524 - DNA, 607 bp, Cannabis indica
actgtctacatgtagaaggtctcaacctctgcatagacctcattcccctcatcaaaagatcccatttcctgcagccgagaacttattccccagccactaaaaattccttgataccagagagaagttggcgcaaaggtcttctggtgcaggtttgggtcttgggttggttggattctctgatagaaaccacgccaactttcctcccaaattcatccaaaaccacaccaactttcctctaggattccttgtcagcttgaggaggacctttaagatcgttcacaagatctatgtctatttctgcggagacagaaaaaaaacaagagggggtcagtggagaaacaaaaaaaataataataaatatgatccgtctcaaaccaccattcacaagggataatacttaccctcaagaatcacttgtgaagatcgcctataacgatcaacgggcttcccctggtttggattggtcaaaagctcctcagccttggaatctgtcatttttggttccaattgaggtttgaagtccttgggaacaaagggagaagaaaattggttggtgcatcttggtgttatgaatttgggagggcgaacctctgaactcagatgggac

SEQ ID NO: 211525 - DNA, 919 bp, Cannabis indica
acaaatttaaaaaaataaaaaataacatacaaaatagcataacaaataataataaattaacaacctcatagacaataaaaatacatacaaaaaattactatttttgtacaataaattaataaaattagttaaaaatatttaaaattcctaactaattgttatttttattaattttttattggttttttgtgtgcttgtgaaataattacctaaaaaataactataattacacctcaattttagaaatattaattttaaattttagataattcaataaccaataataaagaaaaattagagtttttatacttaattttactattaattaaaaaatatcacttttttacattaaataaaaaaatatatttacattattacttttattcttctttctaatttaaactttaatttttttttttaatctttatgggccagatagaaccaccacaaccatataatacgaaattaaaagatttattttaaataaatagcaaaattaattgtaaaaatttaaaatttctaataataccaattcataagtattatataaataaaagttaaaaattcatactggttatatttaaaattcttaaatttatgggaacaaagtcatgaaaagaaaactcatggaccccaccactagccttgtgtatccctcttagcatagcataaataaataggaataaatgtatttaattgaagcagtagcaataatattagtgaaatgatttgattttggatttggatggctttgcttggcttggctaacaaagaagtgtacggatgaaccaaccatatatcatatctctacatcttctcttaatttcaagaatagccgttttgtttagtttatacctaatctaaccacttaatatttagaataaagctaaggggtattataaaaaatagtatattatta

SEQ ID NO: 211526 - DNA, 676 bp, Cannabis indica
ttgtataccctaaaatgtaataacgggacaaaatacttatccctactatatatatatatatatatattcaagaatagatatataaaaacaagaacatatacacatatataatatataacatatagataacaaagaaaagaaaaagaaaaatcgttcttgaaattatttcagtcagttgagtatatatatatttagtgcattgtgacctcaaaataattcaagaactttaaacaaaaaaaaaatatttaccgtcaaccgagattcatattgataacatgttataaattattatgaataacataaaataagaaaataaaaaaaaaaaaaaaaaaacaaaaaaaaaaaagaataataactgaatgagaatttcttagtactttattttaattgggtgatctccaatttgtacaaatatgtgagacatagattaagaaactaaggagatgaatagtaattataattaatagtaattaatttataaatttaggttatttagacatccatataaataatatttataacactaattattttacttgtagtttggaaccatattaaagtaattacatacatttaagtattttttttttaaatattaatgagttgatatataggtaatttgtagttgctttcaagttttcttttatttttaggtcaaaaatatgggaaatgaaag

SEQ ID NO: 211527 - DNA, 772 bp, Cannabis indica
atctcaataaaaatatttttcttcaatttcaaattgaattttgtttttgcgttagcttattttttaccaatatttgtacgggtataggtgcccctaagtgaccgagtagacttttgactctttgtcacttgcatttcataagtttaataattttgtctatccggctttttgatttaggcaaaccttttgtacacatattaggtaattaaataacttgctcttatttgtaaaaagacataaaattgacacaatttgaatgataatttatatctttatttatttatttattgatatgtgttgttaccgtggtaatgtacatttattgaattataaaaagctattacatgatcgatctgatctttagctaattaaaacatagaacatttgaacgatatattctgcccaaagacatcgctcaagagcaatgattttgaactaactgtactttgaaagtggtcacctgaccttagtaccagttattttttgaacctttaagtgagatctgctcagaaggccaccacttaagagtggtgttcgagcattgtgcaacttatgtggtccccagactttttgcacttataggtagtattttcttaaatgttagtcattccaatacctaagtatcagaactagctccatgttttcatcatacataccaagcttgtatgctcctgattttgtaacttcagttacttggtatggtccatcccaattaggtatgagcacacctgatgcactatcatttgtgcttgggaatacccttctgagcacc

SEQ ID NO: 211528 - DNA, 438 bp, Cannabis indica
attttaatgtgtgtaggccaaacttttgactaataaattaaagaaagcggaaattaaattctataccttttttatattgttctattttatttttatcatttttttttaaagtctatcatttttacttcttttttttaaatattgtattaattttactcctgtcacttcaagatactctccatgtcactctcttatgtcagggaattttaggtacaatacatataaaaagaggtatgtttctaattaaatataaaattagaagtaaatttgatcaattgattaataaaagtagtatttttcaacttagcccttaaaagaaatattaaagcataccattaatttttagtaccacctaaatattttatgttataatataattaagtataaatctcactcaatttaatttaataactattataaaacatcgaataaccatac

SEQ ID NO: 211529 - DNA, 575 bp, Cannabis indica
aaaggtcttaaaaatatgcattatttgtaatgaatttaaactaatttgtaaaacttatatgtgcactagttccttaaaataaaattaaggtaacataaatgttgctacatttaaaaaaattaagtaacttaaaagtatcttaaataatataatataatacacaaattaacatataattttacaggtaatccatttaaaaatcaaaagatatctatgtgagatattattttaaattggattatgttataaaaagtaactattaatattttattgacattcaaaagatgtgcattgttcataatgaatttaaattaacctgtaaagattaagatagcataaatgttggtaaataaaaaaaaaaaaccttaaaatgtctttagtcaaattgtaattaaactaactaccttttttttttaatgaagtatgttatgttttacttacggtaattttttttttttttggaaacagaacctaataatttatttgcattgcatcttgtgaattaaatcatcacttgtggtgtgggtatatttatatatttatgtgaattaaatggccactaacaattactatag

SEQ ID NO: 211530 - DNA, 611 bp, Cannabis indica
aattttggcaattttgtggtttctagggacataattagcattaatgacccgtcttttccacttttcctccatccccagccattagatcttcaatattttgatcttaacggttactgggttcaaagtataaaacggtgagaatcaatttttccaccattttcatcttttcaaaaaccttaagcaagctttttgaaaaaaataaaaatcattccaattccctgagaccgtgcatgccctctttatctttgacgttcttcctgcgaatttgctgagacttgctctttgactccaggtgttcaaaaaactcatcgcgccagagtttttcaccacccgactattcgacttcatatagtaattgtctcatccctttctttttttttttttttgtagtttcttggttatgattaccttgcattttatcactcccttcggtttagcaatgacggttcatgatttttgggtaattttagggtttaggcatgttttaggtttagtatattctttaagcttctagtttaataaatttcatccaggaattgggattgtttttttttttttttttggtagatgttatacccgaaatttgggtagatttaaaaatttattaattt

SEQ ID NO: 211531 - DNA, 664 bp, Cannabis indica
acatccttaaggtgacagagccaatttttaagctggggattgttttcttgcttagtttcagcatccaaaagcacatcttggagggcgaatgtgattagcttaagcttgtcaagatcttgtttcattcccttgattccccatgccacggtaacatcttcataagcaagggaacccagtttgtccaagacatttccagctatggtgtaagctaaatctgccattatcaaacaaaagagtagaaagatgagaagttaaggcagtagagagtagagactattgaatttcgtctgttttttcagttgttgacttgatggtctttctcattcacaagctgggaccgcactaactatattcccttaatcataacatttgttttttgtgtgttttaatttggacaaactaaagtaaaagaaaagaatttttctttctacttttccttaaaacaaaaacaaaggatgtgtgttaccgtcaacctcttattatagttttttagttaacttttgtgttcaattttttttggtagtatctattatagttataatatcatttctatatatttttgaaaattttcgaatagtttacagtgctaaaattaggtttaaagttttttaaacgtgcctggtagattgaaatatcaggttctctgttttcggtactataaact

SEQ ID NO: 211532 - DNA, 555 bp, Cannabis indica
tattatcaagccattttacacccttatataagagcatactactctttgaatgaatacacatcttcaatatgtttctctcccttcttctaatttatcttccaaaatgtcttcaactagaactttgtcatactcacttgaagaagatgtacatttatgtcgtccatatcttgacatttctcaaaatccaattataggaataaaccaatccaaagatcagttttgggcaagagtggaagctgagtaccacttacccgagatgtttatgactctacgtagacctagaagatctttgcaaagctgaatgacaacaattcttgctgcaatttcaaaattcagaggatgcattaatcaaattgaaaacaaaaatccgaatggtacttcagagcaagatattgtgagtgtttattatattagttaatttataattgcttgccttcaaattatattcatatcattaaagtattttaattttatagataaatcaagcaaaaatgttattatcacaagatccaaaatacaagaatggattcacatacgatcatgtgtggcccattc

SEQ ID NO: 211533 - DNA, 710 bp, Cannabis indica
agagagagagagagagagagagagagagagagagaacgagggcggcgaagatggtcccatgctccatgatggccaacaatgaactccaatgccacgtgcaaaaatatgagaaagagagagttagagtttgagaggttcatgctatgggctgggttaagaagaaaggaagaagatgaaggtgatgatgggtgaagagagggaattaggttagagagagagatagatgagagaggggcggctgagaagaaaattagtgttagaagtgtttatattttaggatttagagtttttttttaaactgggctaaagctcataattgatttttttaatgcctttttgcttcagttgtgcacaaacgctaatagtgtatataatgactttttactttggttgtagaccgatgctaatagtgtatacaaaattttttatatctcatcttttgcttcagtttttgttttagcatcggataggtaacctacactaattaataattatttgcgtcggtggataactgaagcaagaaagtgtgggttgacttttgcgtcagtcaacaagtttgaccagtcgcgttgaccgacgcaaaactcctttttgtagtagtgagtggacggtgagaaacacgggcttgaggatatcagtggctagtcatcccgccagggagttggctggccagatctgggttcttaggggcaagcgcgagtacggtgagc

SEQ ID NO: 211534 - DNA, 569 bp, Cannabis indica
ttttttttttaatttttaaatagacataaaaatattaatttaaatacctcttaattctctaatttttttaaaaaataataattatgtttataaatattaattaattgattaattaataaaaaaaatatataattatagaacaataacacgttagatatatatatatatttttatttaaacataattgtattttaaaaaatttatattttttaataacctatcattaactattttttttaaatatacatatataaattaattttaaaaaatatatttaattaacctaactctaagaccctattttgtttcaccgcctcattcttctgtttttcattggatttgttcaccgtctctcagtatccctccctctcaggtggcaaactcctatccagtcgctctatcacaggctatataacgtttttaccataaacaagcggcaaaagggagtggtctatgtattataaataattaacatattttattactttggcatattttcctgtctttttggggtagtatattgttgatctatttatttggttcgtaattatttttttcttaattaggtt

SEQ ID NO: 211535 - DNA, 951 bp, Cannabis indica
ctatataactttttttcaattacctggctaatataatatttacaagctgcatgcaccttaatatagcattgctattaggtactagtggtgcttagcacattcacgacatgtcgcgttgcgattggctagcgatactcctaaaagctattatattaatttatgtgggacccgataattagttgaatcaataatgatattgacacataggagggatactaggaggcaccactggtgccctttaacatttctcccttaatatattagtaatatatttggggtattgtaaattttctcaacattttaaatttatactattatagaatttttacaatttatatatttctatataattttttttactattttttatttattaaagttttcaaaaaaaaaacatattttttttaggctgtttaccgacttttttgcctttctttctttgtcttctttatgtacttctcttttttattttattttttccaattatctctctctctttctcatcaaattaatttttttcatctttatatatataactttacaataaatgtatatttttgtatctcgtttttaatatttttacactctcacaaattttattttattatctttttttaaaaaataaaatacaaacacttattttatttttctttttcattttcttactattctctctttaactatttcaaaatatttttttagttaatcacattttatagaaaaaaaaaatcttaattaatttcttttcacttataactaaaatatgattattttaatttcatcactgttcttatatttttaacactctttctctctcttataaaaacacaattaaaagcacttctcttatgatttttacacatgtgttgttatttttctgttaatttataactgtcttttattttataagtatttttatgtcatttttaaagtattttatatagttatctt

SEQ ID NO: 211536 - DNA, 874 bp, Cannabis indica
gggcataaaagactttatttgttacttttcgttctaagaatagctattttgtcttgttgcacagtcacttccagttaactgagcttgtcgtaaagtacagatagtactcaacttacaataatttgatttacaattttttgactttacaattggtttattgggggcataaaaagtatttttggattatgatattttcaacttatgatgagtttattggtacatattcccattataagtcgaggaccatctatactgcaaagcttcaaaatacaccaactataaaaatccagtcatgttgaatatatataaaattttagaagacactagagaaaaatatatttctaaaatgttctctagtgaagaaacaataaatttttaagacagtttgacagtcacatagagagatggtgagttttacatggcctcccttcaatgttgcataagtggtcaggctttcccatcccattcccttggatacagtaattgatgaaaaaaaaaagtgtatttgaggaaattattcacttcctgaagcagatgtaagggcctatatctcattctgcactcaagagtttaatattcttcttctttaaaaagaacactccgagtaaaattggcttcactgatgttattaaagtcttctctcaacccaaaaagcacagtaatggcagggatcttatgttgggcctataagataacatcctatcaaacaccaccagcgactactctcctgcacctcagagaatctcttcaggttctgtgtttcaaatgagcttgtgttttgccttctctttctaatctgcttgctttttctcaagcctttgactaatttatgtgtgttttttatctgctgtctgcataactgcctaatctatta

SEQ ID NO: 211537 - DNA, 1647 bp, Cannabis indica
gttgaatgaaatttaaatattttcttttacggtttttgattatttatatattatttgtatgaggtctgaatgttgcttttatcttatttttatataatattgtataaatatatataaaaaatatttaaacgtaaaattatacgttttttttattaaaataatactttatgtaaattttatagtgttttacaaaactagttcgatttatttattgatttttgttattgaccaaacaccactcatgtaatccatttaaaaaaaggggtatattgagaaatactttttttatttatcaattaaccaaaattacctctaattttatatttaattaaaacatacctctttttatatatattgtacctgaaataccctggtataagggagtcacatggagagtatattgatgtgacaggagtaaaatcggtaaagtgtttagaaagaaaggtaaaaatgataagttttaaaaaagagagtaaaaatgaaaaaaaaaaacaatataaaaagggtatagtctaatttcctcttaaaaaaatattatgctatgaaaatcaacttcttaatctgtttatgatgtcattttaaaattaagcatataaacctaaaaaataagaaaaattatagtttatgatcgaaaaatatattactatgtatataaatatctttattttaaaatttgtaaagaaagtaactattttatactatttattgcttaaattattttttattgtataaaatttttaatgttatatttatacaccctcattttaaactaattaaaactgaaataaaatcttatgggtaagagcaaaagtggtaccctcacctaaaaaaaaatcctatatatatttaagatttagaaacatatctcttaaatatcattgtatattttttatcaattttgtttaaattatttttattttaaagttatatcaattttttttttcttttttgattgtatgtatttattattattcttaaataatatttattttttattttattaagtacaatgatagtatatattttgttagcataatatatatatatattttaaatttaaaggtacataattttattagtatgctacttacatataattattatttttattttaattatatgatatatcaatttaaaaatattgaatgtagtctaacgaacacccttagctgcatgtataagcgttgagataagggtgggtccttccatagcatcaggtaaacatacttgaagagaaaattaggccgatttaggataatttcaaaaaaacacaaaaataataaaaaaaattacaaaaatacggttctacagaatttaaatatttttacgattttatttacagaatatacagtattttgatgtattttgatgttgtattttttgttaatttattgctgattttttattatttgtatattattttttttgttactgtttgaatgttatatttttgttattattttcgtgtaattttataaaatatcctaaacatgtaaaaaaaaaatctttaaatttaaaaatatattttttttaaaaaaattaatattttatgtaattatatctttaataattacactagaaaatcatagaatgacagcttttagttttttttttctttttgaaaattgtttcactaaagaaccacca

SEQ ID NO: 211538 - DNA, 845 bp, Cannabis indica
cagagctactcaatgccacggacgacgatgaaattgtcgaccaagaagctgttatcaaatgggctgaatggttgaatacaatgaataacaaatctcagatgttcttcataccatggaactacaagtatatttaaggactagttaagtataatttaattcttctttttaaattaacacttaatattttcttattaatttcttattagacgtcattggatgcttgagattgtttgtgctgggaagatcattcacttggacccttggcttagacataaacgccctaagatgactattgacctcacactccaaaggtacttttcaattttcattttaaaattataattttaattttctataaatttataccaactattgctaattaaatcaatataaatcattgaatttaattagggcatatgaactgcttggaggttccaacgagttacttggaacatttccaggagtaaccgttgcagcgtgtccaaaacaaacattgggaattgaatgtggtttttatgtacttaggtacattaatgacattgtgaaagctctaaattcattcgttcttataagagaaaaggtaattaagctataattagttcatttatgtatacccgtaaataggatactatgcttataaataagtgatacatataactaatttacactttaattttacagtttggaaagatggacacatacgatgtggagacgatgttgctaccactgcaacatcaatggttatcgaaattgacacgatacttgtactagttaactttagacttttaattttaggcaatacttattttgtgtattttttttattagtaaggacttaacatattt

SEQ ID NO: 211539 - DNA, 584 bp, Cannabis indica
tttttacattaaggtaagcatattattattgattttgctctatgaactatatcttcatataattgtcatttttcctcaaatatatattatatgtgggaatcgtattttttttctaattatgtgatcgagattaattacgtatcattgtatgatatgtagaaataccttgtacaaattatgtgtctcataattattatttaatattaaaacatatgagctctaatattaaattagattaataaataatgctaggcaccaccaaattttttattgattatttgattaacccataaaatatactttacatttttgtaacatttgattaatatgttaataaaaaaaaaacaatttgattaatattgtaatataaaagtaagggcatataggtaccctatttatcattcaaaataattaacataacacataccttttttaaaactaatgctcacacttttctctatttcttttctttttaatatgttaatattacatataaataaaatatagttttaatatttaaaattaaaacaaaaatatttataaaattttcttaaagttattttcttcaaatatatatgtatata

SEQ ID NO: 211540 - DNA, 676 bp, Cannabis indica
tatatatggctcaatacttttatttttaatcaatgtggaacaatatttgcttattttcaccatctggatatcgtgcgaatggggaaagtctgctatattctccattaaatagtcttgtaatttataatattgttgaaataataatttaagaataaaattgtatatcacactgagatcaaacccagagttggactacttacttcggcgcacaagccgcttttagtacggaggcagagactgaattaggttcaccatatattcacaatttttttttctttttttaaaaaaaaaaagaaaaagacaaatattgcatagtttatttgttgtactaactacactttttttttttccagcaaaaacaataaataaataaattaaaaccattcaattatatatacttttctgcaaaaggtgtgtagtatttggccccgatactagaacttgaaataaatgtagccagttatattgactggattaatatattagtgaaataaatttatacgtttgtattgaaagtataaatttatatatttatatataatttatgattagtattaattgtatatatatagtgtcatatatatatatatattttgtcaggatagtgttatatataattgaatattaattattatgaatatttgccgcacccgttattaaaattataatggttttt

SEQ ID NO: 211541 - DNA, 1019 bp, Cannabis indica
atatactaaattatgctcttaaaacttttaaggctgttaaaagttctctcgattattagatttaaggttcaattttaataaaaaaagtctaacaataatcaaaatttagagacatgatttagtacatattaaaatttgagagatataatttaatagatttcaaagtttgaggagcaataatttattatatggacaatcactaaattagtaaaatagaatgaaattggacaaacgtctttaaaacagtctcaatagcttagaaggaattttaaatggtcagaaaaatttagagagcataatttggtacatgttaaaatttaaggagtaaaaatcctaaatagccttaatttaaatagtgccacaaatttaatcccaataatatatttttttttcaaaaacatcatggttatttaaggtatttaacgcgttctataattagttagcagtttctcatattatttatttattaaattaaaatatgtgagattcgatattaaatgcaccaatattaatatgtaacgtggtacttgacgccttagagcatctccaataggggacaaccaaaatagttgcccaattggtcccatctaacacattttttcttgtattagtcaattacaatttttttaagtaaaaatataaaggggacaatggtgcatatattagaatgaggttttacaccatatattaaaatttctaacttttttttttactgtggggcgaacttttttcaaaaatactgtattatttttttaaaaaaatactatctattgtattaagtttccactattgttctacagttattttttagttattctactgttatttttaattgttctgttttgttatttttacattatcttataaaaagatagtatttttgtaaaaaaaattgtaaacttttgcctaaaatttaggtatttttgtttatttgatgtaaatctatcacaaaattattttttagtgtcaaatatagcacaataaaaacactatctataagtgccaaaagtacacacatt

SEQ ID NO: 211542 - DNA, 855 bp, Cannabis indica
aaaggaaaagttctcgatcgttacaagttttgtatcatctcatctttattttgtgtggttattatatatgagagaagatgttcttattaattatatctatcgttaaattatataagggataatttttaaaaaataaaataaaaaaatacggaattttaaattattttataaatttttagattttatttacacaaaatatacgatttttttatgttgtatactcttattattattattattattgattttttgttatttgtatattattttttatgttgttttttattactttcatatggttttttgtgttttaatagaatactgtaaaaatataaaaataacaatacttttatgtaaaagtataaaattcttaccaaaaatagggatttacggaatttatgtatttgttcgtgttagaaattatcttaaagttagttatattaaaaaataaaattgttaaaaattgagtttaggatcctatttttaccattttggaaaatatatggtccattttatcatttaacaaaacagatggtctaattaattacttttacaaaatataaggtccaaattagtatttaccctataatttatagttaataagaaaatattttttaaaattttaaattaaatatgtaacgctgacaataacacataaactacattgacatgttttagcagaaaaaatttcaaggggtacgatacgatcattgtaatagttcaatgttataaaatttttaaatagcctaattttattattattttctaagaagaaataagtaaaaatacaattcgcttgagcgacacctttgtatggttccgccattgtctcatacaatagttcgataattccat

SEQ ID NO: 211543 - DNA, 853 bp, Cannabis indica
atgaccttaagcttatttttcatcattgttacttttatgatgatgttgaggaatagttgttgttggatactcccatatgagttgatccattcatgattttttgaagaagatgaattctcaatagcttcatttgatgttgatacactatttgtctgaagaaagagaaccaatttttttcatcaaaacgtatgcatttgaatatatatgatactaatacaaaaaataaatattattctagtttttttttggtgtggtttcccttctcaaaatagtcaacccactcatatattgtggcaatgaaatatttgttcttcactaccatatatatatatatggaagaggtttcaatggttacatttttattgtaaccatcatggttacattttttttaagccattggattactattaaatggttgtgattaatttggaaattaaataaaaataaataataaataacttgtaacctgaaagtgacctaatcatttatttccttataaaactttaattaagattaattatattttaaaattaaattaattataattattaattaattttttgcaatttattactatataaggatcttttagcaatttatttttttatacttaaattatttaaaattttatagcaaaactttttataatttaaaattatacacatataatttcataatttaaattttattatacttgtaatcttaattttaaattattacacttaattatttaatttttttatttaaatatttaaaaagtaaaaaatgaaataagttgaaggatttttttagaaaaaaaatggctgcacttgttatcgattgattagcttgaggcctcatacttagttcatat

SEQ ID NO: 211544 - DNA, 273 bp, Cannabis indica
caaaaaagagaaatagaaagtctaaatattattagactaaatacctatctctttgttatacgcacttaattataaatgttgaaaattgcctaagcttaatcctaattcgaatatatgataaacagagaaaagaaagaaagtgatttttttttttaatgaatactagtgtgtgtatgaatttgtacaagagtaagtgtctaaacctttaaaagtttgctacttatagcttaggccttagacaagtacaatgagttgttaagtgtcattaacagc

SEQ ID NO: 211545 - DNA, 545 bp, Cannabis indica
aaaatcttaattagccaaaataaaaatatgctatgtatatatatgcacaaatataaactgtaacaatctacatttagtatttagcgtttgttaattaataaaattattaacagaattaatcttacatctaacaaattttaaaagcaatccaattaatatttaatgataagatttaattaacaaaggctgcaaatttaaaaagaaactatgaattaataaagttgtttatagaattaatctcacatcaagtaaactccgaaagaggaaagctttcaagtttctgtgtagatataattataacaaaacatactactttcagctaatttatttattaattcatatatataataaatcaattcaatacatatcaacaacaataacaataaaaaatatattatgtacctacgttgttgagattatagctttgatcctttgtcttattacttagttgtctaatttaaaattaaattaaacacacacaacacatgcatacgtaacgtacgtatcctctttttatcatcatcatataataaatataataatta

SEQ ID NO: 211546 - DNA, 505 bp, Cannabis indica
ccaatatttgtacttgctagttttgttgttttcttaccttcattttatacccctacctattctcaacccaagacttcagaaatccataattccaatgggaatgtaaattaaaaatattcagtattaatgataagctaagctctccagcatagtaagttttttttttcttcaaattattgaaaactagtaaagcgcggttttaaaataattaaaaattatatgtttaaaataattatatttttttaataacaatatacaaaaatataatttgatgcacacatgtattaaatcacatcacaatatattttttttccatcttttcatactttttctatttgttaaataaaaataaaaatgagaacctatacatactataatctttttatttctcatataattagtaccaaaaaaaaaatcaagacaacaataatattatattaatataatagtcttcaattttatacatatcacttgctttctggaagaaaacatgaaactttttttt

SEQ ID NO: 211547 - DNA, 569 bp, Cannabis indica
attgttgactggttggtttttaaaacttagggataaagtttccattaagcatcttccaacaagttctttcaacataatttttagttaaaataagtgaacttctaaaaattaagctctaactatataaaaaaggcttcctataataaataatagataggaaactttttactcctttattaaaaaatttaatagtattttaatctaaaaaattattattttattaaattagtttatatttaataaattcaagatataaaaaattattcaaataataattaatgtaaaaaaacattactaaaataacaataataaaagggaaacttgattttatatacttaaaaaattaaaaaattttattattaaaccaaaaatttaaaccctaaaaaaactataccttttttttcaaaaccccaaaaatacccccctcacaattctctctctctgcatcatctctctctctatctcacccccaacccgccccaccctcaccacccacccaccctcccgaccctcccatccctcccgaccctcccgacccctccacccgcccaccctcccgacccaccccc

SEQ ID NO: 211548 - DNA, 909 bp, Cannabis indica
taaaatcttttatgtgataggggaagattccctcaactagattccactgccaagtttaatgttctttacctcttttttttttttttttttgttcgtgtgtgctttttctctccatagatggagctctccaaagctctgagctagtatattacataagccatttattatagtataattaatttttagcaaactttgaaacaaaccctaatgaatcgagagcttttacttcatagatttatgacactagctaacacaaaaaaagtgggcaacacagaattaatataattaagtacccgcgttcatattgtacgtataaaaaaactattaaaaatacagaaagatatgaaaaagtaaataagttttttattttttatgtttttgtagttgatcaacatttattatggtataatttcctatttatcttatataattattattgtatttttctaatatatatgtatacctacagttatgttaatgattatgtacatcattaattattgagatctcaataacgagatttgtatatgcatggacataaattatgaagtttaattaggagaatattatatgtttggaaatcataaacatatataatatattctaattatatacatatatatataagtatataattatgattattggtgtgtgtggatctcaattctcaacgttcaatttattctcattgaatgtgatatgatccaatttaaatatttcgtcattaaagtgacagatagcagctcaatgcatgattgcattgtaatgatgctataaattccgacaatgtatctgcaaagatatggacaacaatgtcaacaatttctgatacacattcttaacacctattcaattgcttcccaccctttttcactattcattcttaattcttcttctatttctttttcg

SEQ ID NO: 211549 - DNA, 1307 bp, Cannabis indica
tgcagggcttgtgcattcagagcttgaattccaggagcttgtggatgtcctactccctgaggaggattaatggctccatgttttctaggaataaaagttatccatgtgtaattccctgtctaggataaatgaccagtattcttacccaattgaataaatctctattttgaaccaatccttcaatctcatccctcaaataatcacattcattggtggtgtgtcctatatcaatgtggtattcacacctcttgttaggatctctttttttttttggtcttccgcccttatacattgccggaggtttcttgtaatggaccatgtttcaagtttccttataaatattttctccagtatccacaagacttgtgtacttagagtatcttgactcttgggtcttttcctttttcgcagaatcattctggcttggacccttagaactcctcttgctcagtgattggcttacattggactttggagcttctgctttttggtttgtttgtctgggagcgccactgaatataatttgtactgctctgaatctagaaaaactagcctgtgcagctagctgcactgaagcacttggtccatatatagtaggagtcgtgaaggctgttgccggaggaaaatggatggagtagtcatctgcgaagtttgggctacttctatgcctgtggaaggtgctagaagtactccataagcttgagcataagcttcttctaagctgatgaacccttgaactcttgtcaagaaatcagtcaaagtgtctgctctttttcgttagagatctccccatagcaaagatcatgtggttagtcatgatatataagccaccatcttcatatcatcagtaacctgtgttttagcagcaacatccatcatacattggatgtatttctttaggctttctcctggttgttgcttgacactggtcagagaactagcttctaggtcgaaggccttccctgctacaaatttctttttaacatttcttgtagatccttctagctgtggattgatccctgagataacctcttccaccagtctttcgcagacttgctcaaagtcagtgaaatgcaaagatattttgcatcatcactggccttagcaacttgcatcatgcgatagtacttggataagtggtccctggggtccgtcctaccttcgtaaaattccatttatggcattctaaagtgctccagcagtggtgcatctatgattcttttcacacatggttttgtatcttcttctttggtgtcagataggacaccatttttctttctcgaaatcttctccatgagcttcatcaa

SEQ ID NO: 211550 - DNA, 799 bp, Cannabis indica
caaataaaagtaataaatagaaatagaacaggaaaaactaatacacgtgcaatgcacgtggtacacacacctaagtatatatatatatatatgatgagagtggtttatataagttttagacaccatgttgaatgaattggagtttagttggagtacgcaaattgtattcactttacgtacgtatgtatttcttttacttcttcccaagttgaatttcgttattactttattattcagtatttatatatatatatatatattacattaaattttagaatattcttttgaataatcttcctcactacttgcaataacaatgttagttgtgtagtgacgttgtctacgctacgacttatattatataatttgtagtttgatgagtattaatttcatcatatatatatatagataggtgtcattgcaataaataatgtctgagtcttgttaacccaatcaaacgtatatcttctctctgcataataataaattaataataatagtcatgcaattttattttacattttgaattttgttcaacaaatttattaaagcctggaattttctagagaatcacgagtcagtcagtcagtcagtgcttgtgcctaataggagtcgatatatatgacattattcacactactattcaaaatcaattatatatataatttatcgagcggttgagataagaatttagatacttttatgtgtcgaccttaaatgataaatacctaaattatatggactttatgcataagtaatcccaatcccaagtatactttgctttcttaattttcttcta

SEQ ID NO: 211551 - DNA, 548 bp, Cannabis indica
cagaaaaattacgtacaaattttattgtttcaaaaactatagagaattttattatgaggtatattaaataaacccaataaagactttattcaattaattatttaaactctaattatatattatatgatctttaattatttaaataaataatataactgaattcagttttagatatttatatcttataacttattgaaggaatctctcaactacttgagagaatatcttaactgcttttcaaatttaaatatttatctattgaattaattaacccagaaagataaaaccaataaggacaccctacaatagtagggcgcgtgcattgtatctcgacataatggatgtggcgtctcccttgtttaaataaagacaaggaatgtgtcttttgtcctgacaacttttatcttttacctatttagttaatttgaaaaataaattatttattacaaaataaataattactattttgactattgaaaatagatttttctgaacatccatatacaacttttatcctaccctttcacagtgtttcaaggtggcgatct

SEQ ID NO: 211552 - DNA, 577 bp, Cannabis indica
tggagagtgaattattttaaattctgtgcgtctcccagggggctctgggacccaactgggtcatgttcatctagagaattagggttgggagaagaaagttttaacgatggagataagaaagagaggaaatgtgttgaacaagaggtgaaatcacaaacgaataatgtcaattggataactactgtgtacacctgtgtagataagtgaaattaaaacttcgaagtcaatacagtaataatacagtcggtatttaacggtgatatccagctggtacctcaaatttgcaaagaaaaataaacataagggagttttgctaccaaaaaaaaaataagggattaagtgtaaaaaataagccattggagatggtctaaatacctaaagtcttgaatttgtaagcagcataaacctaataattttttttaacggcataagaaccaaatgtttgtaaaattataattttcctccagttttgtcagtacaatctccgttttaaatttattaaaagaagatttagatataattgatactacatgtttctattcaaacccaataagctagaatatgtcatgtttaagac

SEQ ID NO: 211553 - DNA, 429 bp, Cannabis indica
atggtagtccgatagtagtccgatgatggggtccgatagtggtctgatggtggcccgataccatctataaatgtagatatggtccaatggtcacctaatgctactttttttatgcataaaataatgctactatcgaattccatcggacaccattaatatagatgaaaatagggagtatggatgacgaagttaaaagaaaatagaagagagaaatgtataatagatatgaatataaagtaccaatttttttaattttaataaatttgtgtttaaaaatttaatatacagtaaacatatgcatataaattcaaatttctatgatcatcctcgtgacaaaaattaaactaaaaaattttaatgtacgctgaaagacgtgtgaaagtgcacgtagacttagtttaaactcaaatcactagttagactttacct

SEQ ID NO: 211554 - DNA, 693 bp, Cannabis indica
cataatcataaattctacaatgttgagcctaaattagggttatgactcaaaaatgggagacctaatttatcaaacaatgaagatcaggaaaaaataaaaatataaataatgaagacatgggaaacatacggtccagatatcagcagggacgaggatgataatggaaagagagcaaaactaggtgtatccgatggtgagaagaacatagcaaggtacctcaggtccatggaagtatttaagcgtcaaaattaccattcccaccgtcaacggcaaggagatcatgtagaacacccacatctctgcttctctttctctcggaaggtaaagagttaggcattcgcataataaaatcactttcactatacagtcaccacaaattttttttgtttctttttcatttagtgatcgattatcaattttgtttccaaactatatagttaatgagtgaaatcactcacgcgtggtgattaattattttaagacttaattttgtgaatgtgtaataaataccaattgcagtagtgcatcgttcaacgtgtattagaatcatacatgatcgattgggcgcatgatttgaatggtaaacatgggtcacatgatcatatatgtattagaatcacatataaagattctcataactataaaattatgtgtattctcattataatttttatttttattttttttgtaagg

SEQ ID NO: 211555 - DNA, 561 bp, Cannabis indica
ttatgactatcagcagggaaattaaaattgttgtcaaagctagaatgatgaacattaacaaggctaaatgtaacaaaaaagataagtacatattaagcattatagagggctagtaggtattgttagttgcggccatggttagtgttttggttatatctttgctttgtttttgaataaaaaattttctcttattaaaaaaaaaataaattttgattctaaattaataaattgaaaagtgaaaagagttttatagaatatatttttggaaaatattttcacttttctaatcaaaaaacagaaaactaattaaaaaatgttaccaaacgtaaaataaaagtaaacgtttaagaaattaaaaatcaaaaaaaatatttaaaaaaattataaataaaacaagcttctaaaagcctagaattaatgtattaattgtttcttttcttagtttacgctgtaagatattaatagtctgatccattgtaatttctaacaccatcttcaataaaaaatgtaaaatttgtgctatatttgtcacaaaaaataattaaaaaatagttttataat

SEQ ID NO: 211556 - DNA, 522 bp, Cannabis indica
atggtggcgatgtgtgcactaccatgcttgatcgccgagaaaaagatcatattctatcaagaaaagtgtaactgtcgcttggtgacctagcttgtgagaaaattcaacatccatgaaaatccataagggtcgacatccacgacagttttctttgatgagcatttggggagccgtctgaattgagctactaggcccttttgggtttgggagaggcaattcctatcccccttctgggggagcaagtcttgctataagtaagctttcgtgtttcttctccttggatgggtttaagcttggggcgacctttcaatgtttgtgcatccttaaaggtctctaactcacaaaagattaattgagccttttccattaaaataccatgtgtcatatcttgtacaaaatacagataataggtatatatatgcacttattaaaaaaaaaacaaagaaatgaagaaaaaaaccttaaaagatgacattgccaaaaataaaacttgcaaccctaaactctcaaagcttcaaagaa

SEQ ID NO: 211557 - DNA, 1123 bp, Cannabis indica
taataattcaatattttttttttattctaaactaggaaacaaaaaccgcgtgttgcgcggtcttaaattatcttaagctatatacaatttttttaaaaaaaaaaaaaagtttatgtttttaaagaaggttgaattagtaaaacactaattaattattggacaaataaaactctatttaaagtttacaaataaaaaactatgatattttttaaatgtgaaacttttataaagttagatgaataaaaaaaaaatagaattgcattaaaatatatgatccatcttatcattcttatagatttttttaattattaataattaatttattaaaatatcttttgaaaaaagttgatgagttgtattttttttctttaaaaattgatagttactattttttaaaaagaaattaatagtcactaataatacatacaattaaaataaaacttatattgagattccaaatcaataataaaagtatactttcaaaaaataaatatatatatatacatatataatcatagaaataaaagtttattattgaaatagtacattgagaagaaagtgaaaaaaatatatatctatgattaagccaccatatctatattaaaattttaaaattgataatttacattagtcatggacatgataaattaaattcaaattttttaccttaaaaaagtcgtctacatcatagacatgatattcattgattttttttttattttctaattcaaaatattctcttatcacatataactataattatatataaatatttaaaaagtgatagtaataagaaaaacttaagataataggatatatataacataattttagtaataccaaaaagctcaaagggatatatcttgttagtcgggtatataaggcccgatattatcctcagggttcttttttgagtgcttctcttgggccgaatcctagtttcatatggaagagtatttttgaaacgcaagctttgattaaggagggagctcgtcggggggttggtccaggtacgaatgttagtgttctaatttgacccgtggcttgcggatgagtctcaaccgtgggttactctagagctactggtatggagacgtggacggttaataaccgtcatggtggt

SEQ ID NO: 211558 - DNA, 460 bp, Cannabis indica
aattcattcaaatttacccgcttctataagtttactccccaatttatccttacatatgctaccttaattaatagctagtgggtattcatgttggggagacatcacattaattgtatgaaacatgaaggatataattggtataataattagaaaagagggcataaattaaggctaattaggatttttattccccgaactttgacatgtatcaaattatgccccctgaacttttttggccgttaaaaattccccttgaactattgacaatgttagatttaaggacttttgtctaatttcattcaattttactatttcagtgattatttatgtactaaaccatactccccaaactatgatatctaccaaatcatgtccctcgaactttgacatgtactaaatcatgtcccctgaactttcatccatgttagattttttttttactaaattagtataaaagtca

SEQ ID NO: 211559 - DNA, 698 bp, Cannabis indica
gttccatcaggccattcaatgggttctttaaggaccctcaacagcttctgttgtgccagtagagatcttattttcctcctccatattctgtagtcacctgatccatcaaacttatcaatatcaattttaagactactcatattgtatttgctaaaaaattaaattagataaaggtctagaatgtcctccaaatctccaatatctaattcctcctcttgattgccatccttgtgttctagaatatcaaattcttcctgtccttgatttttaatatctttcagacttgcttcttgaatgtattaattttaatctttctttgcggaaattaattagctctgataccactgttggaattttaaaccaaactataacttttgtttttgtccaacacactttaagaaacaaaatcaatacaaaatgcaaaagtggtatttttcaaatttctacactttattatgcatccataataaaagtgatattattgtaactcagtatttgtgctatattatttcagacccaatgttaataagcccaacaccaagaagaaccaattcaatcaagagagcaagactcttctctctcaaatcaagcctccccttctcttatatatataccttcggtcaaagcaacaagagccgagtcaaacaagacttgcccatttcacttaatattcggcccaataagaatgtataccagcc

SEQ ID NO: 211560 - DNA, 540 bp, Cannabis indica
tttttttaaacttataattcgtaaataataaaaatatttcacaaaataaccaatttatgaatttaaaaagattagagttagaatatctataaaaatatctaggtcaatttaaatttataattatttgatttatcatataagataattttaatataatatttcaaattaaaaggataatgctatcatttaatttaaaatatgtccaatattaaaatattaatcttataattaaataatatataaatattaataaattaacaaattttaaaatctaactataatttaaaaataaaataataattttttgaatttaaacctcaaaatatcaaagaattaataataatctattaaataattaaatattataaattttgaaaatttgatatttaagtttaaatattaaaattaatattttattaagatatttatgattttgaagagaaaaaatcaaaattgggtgaaaaaatcacccaaaaattgatttttgggttgaaaattggtggttgcccaggaaggttgcgtggagcctaggacgcccgc

SEQ ID NO: 211561 - DNA, 678 bp, Cannabis indica
gagacgtagcctggcctgaaccctcaatattattttctattctactcacgaggccaatatttttatctgaagtcactattactttttcaccacgtgaccttgaatttgacattatgtctcctaagcctcgcaaatcaaagaacccacaggatcccaatgtcaccttcgaggtcgaactcatagaatccagggttcgatctattggggcttatgttggtggcattctaaggtcctgcggtatcaagcagggaaaatgttgtatcataaggttcatggctcatggggaattcagctgttttcctcctgaaagagtaatttgtgaggagtgcagtggacctagcactaacaattcctcgggccttggtgcctagagcctcgagcatatcaaggctggggtagtccttcccctaagggattactttaaggaattttacaactatctcagagttgctcccttccagctgaaccccatttcgtacaagattcttgcaagtttaaaggttctgtaccatattttaggatgtgagtgccctactccgttggagatagtctatttctactcagttaaggcagttcttgtgaggaagcaaggtgcaggaggcttttactacctcgacactcacacaaataaacacaggatcattgtaaggcttccaaacaagattgagtttaaagaag

SEQ ID NO: 211562 - DNA, 806 bp, Cannabis indica
tattttttattatacataattatatattatatattatagtatagagatttttttcgggtccgcgggagtgtgtgtcacgtgatgcttgttatttgggcaggtcgtctatttactgagagtgaggtccccccttactcttcaacgccctttgttttagaggatatttctagtctaataaaaattattttcattacaaaaaaaaatatagatttatatataaaaaaccatttaaattcattaatttaaattttagattaaacctatattttttacattaccaaattgaaccaaaaaaataactattggtggttggtttgaaaggattaatccaactaaatcgaccaactcattagacgggttactatttttttttttttgacaggttatagtgttaaagttttttaacaacccctttatattagattgaataaaatatagttgctactacaaaaagtactattcttgtcgaccctcaaatcagtttttttaagaaccgtcgttaataaaagtacgtgagtatttaaaatagtcggctatagttgagtatttctaacaattttaaactatcgtttagtatttctgactgttaaaatagctacattattgaaatagggtacttctaaaaatgaaatctctgacagttttaaaatatcggttatactatagctgacaattttaaaccatccgctttagtataatcgatattctaaaattgtcgcctcttccatattcacatgttatataaaatccaaaaatctcatatttgatatttaattgatcattccaatatcggtctctctctctct

SEQ ID NO: 211563 - DNA, 646 bp, Cannabis indica
aaaaaaaatacgaaaaattatggtggcctaatcttgatcattgatgatgatctaatggctaaaattgactttagatgataattttaaattttcagagctcgaatcgtgacagttgtatcgtttttgagtaaaaaaaaaaaaaaaaaaataacacttgactggaggacaaaagtttgacttgaaatcatgtgtggttgagctatagttaagctaaaatggcaaaattttcaggaagttttgttgctgtgttaggagactgaactgaacattctcgttcattatattaataatttcgattgcagttacttattttaatgtggaaattttatgatttatcgtaggctaatatttgtaatagagacactattaaaaacttgagctgttcttgcagcaacgaggagagctagctttcactattttgagtgatactcatttatacctaatagttaatatcatctcaatctcgttttatgtctaggggctaaaatcgtttaaggaacaaataaatcacaattgtttttgacgtaggattataatattagattaatttttctacatgatacccttaacatggatttgaactatgcatacacactgactcccaaaataactttagattagaaaaagctttgtatggcctgaaaca

SEQ ID NO: 211564 - DNA, 743 bp, Cannabis indica
caaatttaatttttctactaattaatacttatttgtaggtaatacatattaaaaatgcaacttatacaaatatatagagaattgctaaaatgtactactagtgcctaacagccttctcggtatcataccgctattggtgttattaagtatgaccaagtcccatataagttagaaaaataacttttaaaaaatttcgttaaccaatcgtaagacgctacttataaaaggtactggacactactaatactactcaaatatatataaattaaaaaaaaatagtttactttcattaagtcgttcttgggtcatatatattattattatttcatttcaattcactacgtaagatttaatatattcttcactttgttgatctttgagtttgagaaagtgacaaaagttaggttacacttttttacatattagttttttaattcccatggcaatgtgggcgaatagctagggctcaccattgacacacaatttgaatattttgatcaaattggaatacagaatcctatcttttctcttttttacagctaattaattataatataacattattttttttgctgttctgtttttttcccttgtctaaaaaaaataattttttttgataaattatgtaattttattaatatcaatcaattaaaataatagtttgtaatttaatagtatatctccttattgtagacacgaccgtgattagaattagaaaaacgagtcaaataatcagtcactta

SEQ ID NO: 211565 - DNA, 509 bp, Cannabis indica
ttttgtgaaatttatttaattttttccttcgtaaatgaaattttaaattgtacatattttatatgtcattcaatattaatttcttattttcaaataatcaataagttttaataatttaattctttaattgcttgctattaattagtttttttttataaaaatgagtttcttcttattatttttattttcttaattattttaaatatttattattatcatttattttttaaaatataatatttatagtagattttcctttattgtgtcaactttaaaatttaagttgattcaatcaaatacatacgttcacaatttaacaataacaataaagaataacattgttaattacaataatttttactattttttttttttttttttgtttaagttcataataacattatatgttaatgtctgccactataactattatataattttttttaaaaaaaatcaatcaataatttaagtaaaagtgcatgtgtgaggtgtgaactgtgaaggtggtg

SEQ ID NO: 211566 - DNA, 741 bp, Cannabis indica
taaattttgcatcaccataaataaactttttttgttactcttatgtcatttttattaatatatttggctagagcattaaataatggactatttctactcttttattattattattatttattttacttattattttatatgataaaataataataaataaagttattattattttatattttgagagagataaattctattttttttatgtgcaatataaaataatttttttaatttttataaaaattattttcattttaaagttatgttgtttttatttcgaggttataatgtttttattttgaagttatgttttttctatttaaaaatgatgttatttcatttttctaaatgaataaaaaattaattataaaagtataaataaaaaagcatcttttttatgttaaatatagtataattttttagggtcattattagatatcacccgtttctaataaaagagcctctttttacttttttagtaaaatggaaaagaaatcttgtccaaagaaaaagaaaaagcatatgaacaaatcagtataaattttttatagagtaaaattgcggcaaaaacccccctcaacctatcaatttacttgcaaaaaaccatccaacctcatatttggtgggaaaaccctccaaagtactgttcgtttacatttttaaggtgtcgtctattcagcctcgttaagtcttaattttgcccacgtggtcaatgacaggtcaataaaaaatatacct

SEQ ID NO: 211567 - DNA, 789 bp, Cannabis indica
tctcattgaaagatgcctggagtcgactagtgaaggtaccatgaggatgccttcctatagcgagatggatacctcgctattagttgcatgtacttatacgactatcttaccgtgtatcacatgttaagtgtctcgtgagtcgttatatttcgcccaacgtgacgaggttagtgtctcgtcttgtacacctaaaattacatggtttctcgttgatgcacaaggcaacagtttgtatatctttatctcgcataagactattcagtcaaccgagttgtaaatatactctgtcaattttctctttaactccacctcaaatgcaattatagttatgtgtattggttcatattcttcccatcttgcaacgtgtcctcctctcatgtgtttgcaaaattttgggtataacaattgcccataaaaaactctttctaataaaaagtgctttttaatcattacaaagggtatatttgtcataatcccttttgaaaaaatgcatgtcctctgatttcggtggttttgcaattttgaggtacatcagcattaaatgaccatcttttccacttccatttccaattctatctgtaggatcaaacatatctctgatccgacaaaactaatttcaagagtgtaaagtaagaaaaaggaaccaccatcgcattacttcctccattttagaaattctgaaaaactcttaagctcctctgctaaagaaccggcatcgagtttgcttgagaatttgcatgccatctcagtccttgacattttttacgcgagtttcctccgacttaaatt

SEQ ID NO: 211568 - DNA, 520 bp, Cannabis indica
ctgatgagattgtacatgtactaactctattagagagttttccttattcactatctatactgacacagtgttgaatcattgaggttggtatttcaaagctcgactccaaagtatgatggccaagtttgtgctccatttctattaaagcattcagcttggtatttcgtcaaagcaaaagtactctaaaaggattatgatttatgagtaatttttctattgtactgatgatcatgagggctcttgttcctcctcatctgcaaagtgacacatattaaaaaaaaattatttaatgttaaaatatttctagtattaatataaaattgtttaaattgattttgttttgttgtctgtatattattacaatcaaaataagataggaataaatattctaattatatataatcaaattataatttactaattaatttatttttcgaattagttgtcaaaatattcttacaattaatgtgacaaaaataataatagagtgtctcatttataaatatggggtctcggtccc

SEQ ID NO: 211569 - DNA, 630 bp, Cannabis indica
atatctgcgtgttcagacaatatgtattttgaggattactttttaaaagtttctaagtttttttggacttgatgagtatttttatgatttatagatgcaacttggtgcttttaaactcgtgtgagtttggtcgcaattttatttatacgacttttttacacagcttggtgtgtcacgaggtatgaacatctcggtgttcaagatatgatcatcttggtgttcatactttaagtaaaaaatttctaagtttacaattgcgaagacaaaaaatttcataaatttcacgaattattgaataatcagtagtataatatttttacagaagaaaacaatgatatccatacatatgtatccccttatacttaggtaattttcaaaaaattgactaagtatatgaatgcgagtactagtgataataatactttaaatgttcgccattccatgctctatcaaagacggagtcgttgagatcagatagtcagtatgttgtgtttcctactttttagcgattaggtaggggccttcctagttgtcgccaaaaacttcgtgcgcaggattgcatgtattaggcataactttttccaaagcccattctcctactcatagtcttctttctttaactttaaagtt

SEQ ID NO: 211570 - DNA, 680 bp, Cannabis indica
acattgattttagggttatttgctataattcagtggaaattttctaaaaaaagtgatgctatctcaacagaaaagtcaggtgttacaggcccaaaggcctaaggatgtactgtacagcccacaaaatattagtcgggtcaaacccgtaattaacatacagaatatcgggctatcgggtctctccatctcttcgctctccctctggaattttgggttcaagacttcatggtcgttgattttgtcactgtttgttgatcaagacgttatggcgtaaagcccacaccttccgagtcagttagcagctaaatctaacagttaatgaatctgattgaagcaaatgggttacgcttctctgattttcttgcttctcctcaatctgattctacccttttcatctggtaaatctatttctctctctttttaagtatgtagatgcacatacatacatctgtttattgttccggtctttcgtctttattccatatttatcacacgattacaaaaaattataaattttggtttttggaagttttctatttgtttttttaattgaaggtattgtgtaattttatgtagattttcccgtttatgttcaaaattttgtaactgggtgattcaagatttaatattttggtgtgactattgatagtcctaatgatttcttatcaattttccttttt

SEQ ID NO: 211571 - DNA, 637 bp, Cannabis indica
taagaaattaatttagttttgtcggcaacttattatgcaccggcaaaagattttttttaaaatacttattgttatccaagtttgcatcaatcagacacgtggcacaatcggagaggggaacacggtctctacataaggcactcggtggaactaaaagaaataactcccagatcgagaaggcagcgggaggcaatggcttccgaaagcaacgtccttcgatgaggatcgtggatggcaatgcgggttttggagatgttggacacataagctccttgtaaaagtatcgctccatggacgattatacttttttctgacacaggatcagatcttgtcccttgtgccagattgtggtagtgcacgcctgtaccctcgagcatgctttttgcccaatgacctgggtagagtctatttcgtaaaggagagatgtttgcacgacacgtgtccaaagtcgtacagaaatactccctagccactgtacaccacacgatgaagaaggttccaatcagtggatggtcagatcatccttacgtagtacaggccttagtagcatgtggaagacaaaaactcttgataggtaaagggtatgccctttgccccatgtgtgcttatacatagcctcattcttttgaaggcaagg

SEQ ID NO: 211572 - DNA, 796 bp, Cannabis indica
aagttttgtaacaaatatgggaccatactgttataaagtcataccatttggtttaaagaacgctggggcaacatatcaacgactagtgaatgggatgttcaaaaaatagattaaacgaaatatggaagtctatgtcgatgatatgctaaaaactcgataaaaagtgaagatcacacaaaggacctcgcagagtgctttgggatacttaaaaaatataatatgaaacttaatctgaagaaatgttcttttggagtttcttcaggaaaatttcttggtttcatagtaaatgcgagaagaattgaagccaacccagaaaaaaatacggccctaatcgagatgccttcaccaacgaagccaaaagaattccaagccttgacaagaagaatggcggcgttaaacagattcatttctaaatcaacagacaagtgtcttccattctttaatgttttatgaggtaataagaaatttgaatggactgaagaatgagaggaagcttttaaaagtataaagaaacatttatcgacaccttcaattttggccaaaccaataactagagaaactttatacctttacttagctgtcttggaacatccaatcagtgcagccttggtacgagaagagggaaagcaccaacaacctgtttactatgttagtaaaaggtacaaggggcagaatcaagatatcctcctcttaaaaaaacttccattatgcctaaatcatgcatcgcgtaaattacggccatatttcgaagcacatcccatcaaagtcttaactggtcagccaccaagagaagttt

SEQ ID NO: 211573 - DNA, 1199 bp, Cannabis indica
atgaagagcacgataaataaagtaagagttaggaagaggactattatgacctttcaatttggactgaacattcacaatttttaaaataaaatctcactccttttgattcaccacacctaatggctgtcatgtcatctttataagatgtccaagcttcagcattttcactagtatcgtatagtttttctacaatattggaaaattctttggcatttgtagtgtctgcaggcaaaccactcaatagatgttcatgaatggaactttttataacaatgaggctaagatattttgacttttcccattatgcatgaagagttttctatgcaacagtaatgatatcagtacgatcaacaggtttttcttctcgcaagtatatatccaaaaccattatgcctaaagtaatttttacatatcgtttccaagccttaaagttagagcatttagaatttagatggaaatatttattattgttcaaagaaaggagaccgaaaaattaaaacttgtttaagctatatgagcaatgcaattagaaaatattatagagtcaactggtcattataaacttccatttggaggtaagaatataacacacatatgatctagcttcatgaagataacaataaagaaaaaatatatatctgttatccaaattttttttttcacttgacgtggcatgtccacgtaagccaaagatagagtacaggtggagtacaacctcgccaatagcagaacagagcctccatacaatatatagcagaaccgtcaagcagcatttgaagggagtgaagcgagccctcaaggagctgtaccaacatccttggcccaccaagaggagcatataggcctgccagggtaagcctataggccggccaagatctatgcacaagctggccagccaagaagtgacttccggacccaaggagactttgttcgaacaagggaacctacctcttcatggaaacgatgtacaaagctatcctcaacttacaaaaggctggcttccacactcaaaggttggcctcctcttggtggagcgatagtgacttgccagaccctgcaagccttgtcctgccaggtcttggtaggaccatggccaaccaggattgacctgacaggaccatagccagccagacttccttgaaggcctattgacggctaagattaacctgacaagaatccatgtacaacaatacacttgg

SEQ ID NO: 211574 - DNA, 802 bp, Cannabis indica
gcatcatttccatgtatgttttgtttatatgatgaataaaaagattgttatttgcatttaagtggtgaaatctatgtttcaggttataattccagctccatattatgtgagctacccagagatggcaaggctggctgacgcaacacctgtgattctgccaacaaagattgaggacaattttctgctggacccaaaggttcttgaatcccaaatcactgagaagtcaagactactgattctttgctctccatccaacccaacaggatctgtttactcgaagaaattgcttgaagagattgctaaaattgttgcaaagcatcccaggcttttggtacttcacaatagaccttttaaagatcgtactgaatgttcacacatcacctttcctcgtataaattctgaaacatatttggctgtcttctcaggttgtttcagatgaagtatatgaacacattatttataggccggcaactcatacaagctttgcatctctaccaggcatgtgggagaggacacttactgtcaatggcttttctaaggtaacatattatttcattttcgtattggccttgtctttcataaattcattcatgaaatgaatgcacttagtataattggccaagatataaaacaatggtcttggtcattgtaaaaaacaacacactcttatgttgttatgaaagtttgatttgtgaaaatgataatatgcaggcttttgctatgactggtttggcgacttggatatgttgctggtcctaaacgattttatttacagaatgtgaaaagctacagagtcaggtag

SEQ ID NO: 211575 - DNA, 461 bp, Cannabis indica
  modified_base (4)..(4): a, c, t, g, unknown or other
tttnttttttttttttcacctcagttccccctcccatctcgacagaacaccccccttatccatcgcataaatcgtatcctcccgaccaatcgccgccaccaactccccccgatcattaaacctcagccaattcctcaccacatctgcctgctcagccatctccgatccactgttcttcaattcctccttctctgcttccaatccaccaatcattctctcaccaaattccaccctctacaaccgagaccattggagttagccgtggatatgcagctctgccaatcaaatacccatcccaagaggctctaggttcatcaaaggagtacctgtattcatccaatgacattcgaccagcatccatggataatcttggatcggtatcacaagacctacgccccaacccatagtctccaacctctgattgggtttctctcaaatgcctaggactacatctctcaacc

SEQ ID NO: 211576 - DNA, 644 bp, Cannabis indica
tccaagttttgttcttagggtttcgctaatcctaaaaaaatcaaaagcttggaggttgtttggctgtatttttcagtttttaatttttagaattgtgttttctaaattgacaatataaaatagtttcttttatctttttaaaaatttaatagtgtttgtctcaggttttttaaaactatttatatatttttttttacaaaaaaaaaaatcaatattctacaccataccatgacatgaacccatccaattcggaccgaagctcggacccagacctgaacctagaccccgaccctcaaacccaaacccggtcccaaaccccaaacccagacctagactaggacccaaatcttggtcagggtctgggtcgggattcaaggtacgagtcctattccgggttaggctacggtacgggatcggggtccaattttagggtctgggttagggtccagttttagggtctgggttggggttaggggtacgggttgtggtccaagttaggccggggtccgatgtctagggtgtgagtccaggtctgggtttgagtctgagtctggggtccaagtctgggtccgggtctgggtccaaggttcgggtcggggtcagggtcaggggtctaggttcgaattcagggttcagggtcgggt

SEQ ID NO: 211577 - DNA, 580 bp, Cannabis indica
aatggagtttctgggttttcaacacaggcgccgcgacccgctcgtgtggatagattgcatgttgaacttgttttgttcataacttttgactcgagactctgttcgggacgttctttatattgttggaaagtgcattctgagctctatatgttaatctgtattttgaatgaaaattttatattatgtggaagaagatttaaggattaaccctatacttataaatcccaaaaattgtgactagtataaccggcacttggtcaggagcacccggagatttggaatctccacgtttgcagtacatcagttaagacagtagtttgcacgtagagttaagcgcgatggcgctcatgttttatataatgattgtgattaattgagaaccaggattagggttattaccctaaaatgagcggttatatggtctagggttattaccctagtaattaaaagattttgagtgttatgccatgcttaatatgttggaataaagaattacgcgcctaaggcataattaagctagactcgataaactagtaccttaagcataattaaatgcggtctagagttattactctagaat

SEQ ID NO: 211578 - DNA, 558 bp, Cannabis indica
ataattattaatttaatttttactaatttattactatagtaaggattctttagtaattttattttttgctaactttaaattattttaaatttttatagactaaaactttgtataaatttaaaattatacacatatattcataattaatacactactatttatttttattaatattaaaagtaaacgtaaatagtagaaaaattttcaagaaaaaaaaaatagctacacttgttgaagaattaataatacaacaactcctccacattttaacacaagaaaacaaataaataagtaaaaattataatacgacaagtatattaaattccaaaaacaaaacaaattattttttctttcttctatactattagcagtaacaaatgaagaattaattacattcttgaaaaaaatatctgaggccattaataatataaaattaagcaaaactcaaatttactctgtggatttattgcttgtaaaagtaaacaattctaaccaagaactaaaatgagcataaagaaatcaccaaataacagcattaaagtagctcgcgacttcttc

SEQ ID NO: 211579 - DNA, 693 bp, Cannabis indica
tattttcaacttgtagactataaagtcttatgcgagtaaagatatacaaattgttgcctcgtgtattaacgagaaaccatacgatattggatgcatgaggcgagacctcaacctcgttacgtatgagtagacgtaagcaagataataattgcgaaaagacttagcgtatgatgtacaatatacaaactaagtataacaatcaagtgaactcaagcaactaataagcgaggcgcctatctcgctataagaaggcgcgctcctgttactttcaccaataaacttgggacatcttttagtgagatgtatagtcttggcgagtcagatgataacgttcaaattatgttaaatgctgaagtactctttgttattaagaacttcgattgtcaaaataatcggacttacattacgttatatgtaatcaaaccccacgatttcatgggagaattgttgtaaagattacaatcaactctgtaattaactgcctgactatgtaattataaatagaggcaagttagactgaaaaagggacgaaaaaatcataagaaaaaaggccctgaaaatccatcagaaatctaataagattgactcatggactatgtagaattttaactgtaaaaccacgtaaaaaaccttcgtattcatcctttccttcttatttcctttacagtttcttttatttttctgtgcaagttt

SEQ ID NO: 211580 - DNA, 605 bp, Cannabis indica
tacttttgggtttttccatttcttgcaatcttcatgtttaactagttagtgatataccgaaattcttgatttttgagcagttgttaattctgcctcgctttagcagttacaatctgcccttagcaaacttaaatatactttaatgatgttatcactttgtatatttttgatttgctcgtatgaatagttatattatctatccattttctaggttcaagtacttttatcaaggcatcgtgaaacctcgtttagtactttcctagctcgcgagaactgttagtattcagttttatacgtgagttataacttttgattttcctttcccgtcggataggttttaaatcaacaattatagttgtttgatcccttcttcgtcaaaaaggtttgatcaaaatgttataacgattcgacccctctctcataaaaaaggtttggtcagggagttataacgatctgactcaacttttgtcaaagagggttagtcgagaacctttgaatttcaaaaaaaaaattgaaaggatgggtttgcattatactatgtatttccagatgaattccggttaatcatacataaacacctgctaggtaatttttaaagaataaaa

SEQ ID NO: 211581 - DNA, 1170 bp, Cannabis indica
tctctctctctctctcttttgtgatttcatgaactcaatcttggaagaaaaaggcttgaattttggtgtggatcttgtgtattctcttgcttgaagcttgaagatcataaggtagctttctttgatctatttcacttattttaatttctggttgtaagctaaataatggtgttattggtgttcttgagagaagtttagtgattattgtatgattgtgctattaggtttatgctaggatcatctatgtgttttgggaggtctttggtttggatttctgatgtttgatttctgaagaaaacactttgaattttttggattttatgccttgaataccaaggtttcaaggcttggaaatttatgtgctaagtgatttctttttgtatgccaaagttatgcttttgggtgtgttgttgagctatttgttaagcttaatttattaccaatgttagattgatttagtgatgagtaaatcttggtttgtgcatgattattagatgtattttggtgtatgaaatgcttgaaaatacctcattttgatttggaagcttgttgtcaatttatggtattttagtgttgagtttggtacatttttgggtacccaaatatgagtttttctgggttttcaacccaggagccgcgatccggttcttgagtgccacagcctgctatgtgttcagcaaggcagaatgtttttaaaatttggtttggttagaacttttgactccaaactctatttttgatgttcttggtatcgttgcaaaactcatttcgggctctatgtgttagtctatgattggagttcatattttatatatgtattaaaatgaatttgagattaaccctatttatgaaatcccgagaatctgtgactaggattattggcgcttgctcaggaacacccaaagatttagaatttccacacacttaaattatcaggtaagacagtgtagcacatagagattagtgcaatggtgctcatgtatgttattttatatattatgcagaaaaccgagactagggttattaccttaggtttagctattttgtggtctagggttattactctagaatgtatgtgaatgtataatgtattatatatgttgatataaagagttatgcggttaagacataacaaggttcaactcggtatctaaaactgagataaaccat

SEQ ID NO: 211582 - DNA, 507 bp, Cannabis indica
cttctttcggattcgatatcttcttacactactactccattttgggttcaagtctatagattgccttttcttagtaaatccgaggctctagcaaaaataattggcaatctcattggagatttctagaggttcataacgattctcttaatgagggtggggtccttttttaaggattcgggttggcttaaatgtatcaaaaccacttttaagaggtcaaatggtttctctcccatggatgcgtgatgaactttggattgactatcgttacgaacggttgccagatttttgttacgaatgcggtatcatcggtcatgtttttgataattgcaaggtttatatggagaagatggatgagggcatagaacctgcacttgaatatgggccctggatggcaggttctcctttaccaagatcaagttatgatcgctatcgacaagatttctcgaaatcaggaccatggcattttatcactagactggcacgaaagactattactcctattatttc

SEQ ID NO: 211583 - DNA, 423 bp, Cannabis indica
ctacattgtagattatcctatcagttaaatcgtgtgtaatgataaatcataagaatacatttaatcacataatcttgattactttccactgtgttgacaacacaataaacaagaattttaatgtgataaggatatggatgaatttataaatcaaacaaacaaattaatgatcacatgaaccaaataacacactaaataagtaatgaaaataactctgtttcttttttgataattgaatagaaaagattacattgaaatagagttttatttagggcacaaagcccaacaataacaccattagacagctactctcaactggagttatctctgttgactatgtaaagtcaaaggataataatgcagattcactaaccaaagggttaaatagagaattggttgaaaaaattatcgatgggaatgggg

SEQ ID NO: 211584 - DNA, 545 bp, Cannabis indica
aaaccgcaacaaaaaacagtatagcaacctacatagaatctactttagaaacttaaatagtaaatttgagaaaaaaaattaaaaaacaatatatggggtaattccccttttatattttattttcaaggataaaaagaaaattgtagaaagattaggatcattattactcaatccttcatagtttggaaggattgttttttgggagatttttaattatatacataaatttctaaataatcacagaaataacgctaacctaaataatcccaaaaacacgtgtaccttatgcccaagcgcaaaccatttgatttcaacttatttaattctctatttaaaaatattttaaatttaaaaaataaaaataattgtttcactctatttatatacgatggtttttttttttttcttcttgtagttgtggtcttttgtttctttttaattatttttttttctttctctcttctttctattattttaaaaatattttttttatcataccattgattatttcagtttaaaaatagtagcactgaaatctatttttt

SEQ ID NO: 211585 - DNA, 787 bp, Cannabis indica
aaatattgtactagcatgttatgttgtaatgtaattaatattgttgagaattaattgttattgagattaaaatatagttattattgttatataatggaaagattgattgattaagcaatgagaatgtgaggataccatgaatgtgatatacgagttcacctcattaggtgatgcaattatgtgacatgtgagtaccaggcgtaggtacgggctcctcttattaggcgatgcgatatattagtgtcagattttggcacgggctcaccttattaggtgatgcgattatgtgacatgtcagcatcaggtataggtagaggctcgtcttattagccaatgcgatatattggtgccaggtttttgcacgggctcaccttattagttgatgcaattatgtgatatgtggtaccaagctatggtacgggctcgtcttattgggtgatacgatatattggtgtcaggttttagcacgagctcacctaggtgatgcgattatgtgatatataggtgcgaggctatgtcacgggcttgcctgattagacaatgcaatacaagattattagattaaagtatcgacttgcctgattaggcaatgtgatgtaatgaagatgattactttatgagaaaacacacacatatatataatttgtattattaaatgaatataatagttttgtattaccaatactcatgtttattcgtgacagatgccactagtgaattggatgtcatcttatgagtaatgtgtgatcttttgattctgattatctgagtataaatgatgatattc

SEQ ID NO: 211586 - DNA, 710 bp, Cannabis indica
gactgggggatcatcaacagtccctgggtaaatctttttcctaatgccgctcttaaccacttgggtttctatgggtctgaccacagagccttagaattagtcacatctaccattccaggaactgggtcaaggaatcatagtaagtggtttcattttgagaatgtatggctccaggaccaaaactgggatagaattttcgatcagtcttggactaaaccctcaacagcggaggaagctatccctaatctcatcgctacccaatccttgtgcgctcaaaagctcaacaattggaatcacaaaaaaaagttcaatttcaaaaagcaaatcagtaagctggagaaagagctagaattagcccggtccacccctatttgggacaaccgtactatagcaactataaaagatctccaatcccggctcgatgctttactctacaaggaagaagcttactggaaacagcgtgctcgtacccaatggttggctcaaggggataagaacacgaagttcttccaccgctttgcctcccaaaggaaaaaacgacaaaattcatcaactcgatacggcaaatggtggcatggtctctgacgaggaaggaattattcgagaaattgagtctcatttcaatcagctcttcacctcctcaaaccccaccgattctgacgtaaatatagctttggaaggcatcaattgctctctctcagactccgaca

SEQ ID NO: 211587 - DNA, 683 bp, Cannabis indica
acttcagcacacatatcgaaattccaaaacttaccgaaaatggaaaaagttggaaaatatcaattaattacttttccattaaaaaatttatttcagaattttacacataaaaaaataataaaataactattataatatgtgaggaacatatatttttctgtctccaaaaaaggacgactaatattaaaagtaacttctatttttttacacatttttatgctatattatgttattttattgtttaagataccttgaggttacctttttttgtaatgtaactcatatgatgtttagatattattcaatttatgtataaattataaacctattaaaatagttttatttttatttaatcttataatgtctaaatataaaaataaaaaaaaaattattaacttgtttgataaattaaactttatttaattttaaatattatttatttattaacaaaatatataaaaaaaacctgaaatatttaattaaaaaaagaagaagaagaaagagaatgtttgacaagtttatcatcattatttaaaaaaaaaataactttgttgtatatatcataagacacataaagataaaaagaaaaaaaaaatgtgtaggcgccgaagtttagaagagagttactaaagtatattagtatatgtattagtctatttcaacaaaactaccaatttttcaaa

SEQ ID NO: 211588 - DNA, 624 bp, Cannabis indica
accacgtaaaaatcatctgcactcatcatccaaaagctcttatcactatctcatttaattggttgttgaaaactttggtcaataaatgtgattatattattaattataccctattttattttatctccaattaattagtttaagaaaatttaatttacaccttaaaaatttataaaaatacttcattttaataatttttattttattaaaatatatatatttcattatatttttttaaaattttttcttccaatttatattcttaaaaaaatatacctgtcaaataaaaataaataatatatttaatattacgacaaaaatattatatgaaattttcataaaaaaaaattatacacgatttaaaaaaatatgaaaataaaattaaaataagtatttgaaattaatataaaataatgtgagaaaaaaaaataaaaatattagagtaatttttaaaaaatattttaagtttctttttttttaataatagggtgtacttatattatatggggttcaaataaaactcaccttattttattatttaccctattttaattttacctctaattaattattttattattatcctattttttttaatgattattattatcctatttaaattta

SEQ ID NO: 211589 - DNA, 572 bp, Cannabis indica
taccatttgtgagaaagaggaagttgcctcgctattttaagactacactgaggaaaagaagaagatgtgacttcttccaaagaacgtagatccggaaagaccaactgactgtaaattgactacgtacgtttaagaggtggtttcttggggacattttgaatagtcgtcctaggaatctgcacactggtgttggtgatgtacaaagttcttcacgaagtttttgcttgattggggaatggttggacagtatactacactcaataaagaatagtgtttaagacttttttgttgtctgttaggtttttgcgacacttttgcgaatttttacgacatatactacacttaatattgaatatagtgtttaggaattttttgttgcctgagagcttttagcgacattttcataacatttttcgtgacatatacaacactcaatattgactatagtgtttagaattttcatgacatgtcacgacatgtagcaatatagtttgcgacaactagcgatttgatttgtgacaccttgcgatattatctatttgttgcaatattcaaaataaatttttccgaac

SEQ ID NO: 211590 - DNA, 632 bp, Cannabis indica
ttttttttgtcgtgttgtgccaattcgcatcgtattgtgtcatgcctaagtctatattttttgtgttgtgtcatgcctaagttcatattttttttcatatcgtgtcgtgctcgtgtctattgggctcgtgccgtgtaaaaaaaacctaactcatatctacattactaacatatcatgttgcatatcagtgtgacagttagtagtcccgtgatccgtaagggaaattactgggtaagctgtgtaatcccacaccgtctggggaaggtcaagtaggttgattctgagactgtgtaggtatgaggctacatggttgaagaggacttaaatggattgattggtactacttatatcaacaaggtatatcttactttttggtagctcatcatgaaaaaatttcacagttaagtgtgcttaatctggggtaatttcaggatgggtgacatcttgggaagttttcccagaaagcgtgcgagtgaggacaaagcacgctgaaaacactcgtgttggtcggtctatagggtcattcgtcatttcatgaagcagccagagtgacgtacttgtatataagagtcatcttgttgtaagggtccaatagaggctttgaagcaatggacgttacaaatggtatcaga

SEQ ID NO: 211591 - DNA, 519 bp, Cannabis indica
atttttatctcctaaactttaattaatattaaatttttcccatttttattaaaaaaggttaaatttaaaatcataattttttataaattttgaaaaaaaaaaacgtgatgaaagtatttatttaataaaaatgtattaagtttattttagaaacctaaattattcctaaaaaattatttttaaattttattttatttataaatacatattttaaaaaatcaaaccaaaattattgaaaattcaataaataatttaaagaaactaaaattttgtcaaaagaaaatcaagtttatttatatttacaaattcatatcttaaaataaaagaataataattagaaattcaataaaattattaaattatttaaaaaattagaaattaaattgaaaaaaaaaaatcatgcttacttaaaaaacatctagatttttaaagaaaaaaatagactcaaacttgttctagtaaaattaattcttacaaaagttgaatttttaatatactttttgtatctaaatggatttg

SEQ ID NO: 211592 - DNA, 744 bp, Cannabis indica
aaaaaatgaatgaggttcgatctcaaatctaattggctatgggtagagtagctcgttcctcttgtatattttattatctttctacacattaataatgtgatactttatatgccttttttgatattctaagaaatatcactataggcttattggcctaacaagccggtccgatggacctagtgaaactactaggagtgaaataaagcttaatatatataaaccagcttatagttgccggtgccaccatatgcttctaatatgtaattaataagtgtaataccatcctattatgattatcaaatgtaattcacactacaatcaacaatagtcattataaaattatagattatattagtccacaaaataattttttaacactaattattggcactatgattctctctgtttatccactttcttctttttatatatatatatatatttttatttacccagggtaaaactacctacctaattaagggttctgaactccagacgtgtggaggcccccaaagtgcttatataaagtttactgatcaatcatatgctatatagaagacaattaaaaatagtaatcttaattatgaaaacccaagttatatatggctaaaagaaccgaaaagagtgatgaccaacgcattttgaggtatacgtcttcatcatatcaagagactagaaatataggcaagtggactgatgtagtttaaacatgactgtaatatagatgaacagatgtactctata

SEQ ID NO: 211593 - DNA, 533 bp, Cannabis indica
taaaaatataaattatttatactccaaatatctcaaatgtatatatatataataatatagttaagtatatacttaccaacatgaccactaacgagttgtagagaaacaccattgcccaaaaattcacccaaacgatcaaaaatggcagagccagcattaacagaagcagccaaaggattgaactctaaaacattcttttttgctaaaacaacccttccttttattttctttccatttagacccccagttagtgtgtccaccaatttcccagctagattcatcttaataataataatatgcaattaaccaactctttaaggatcaataagcaattatatttatacgtacttgtttttgtagaagatgagtgttgtgaataacaatgggagaaatggatggtatatataggccaccccacagatcatcaatacgtggcttaattattataaccctttttttagtacataagtactattattattattattattattattacaaggaacacatgttaatgtgtatctatatttatt

SEQ ID NO: 211594 - DNA, 516 bp, Cannabis indica
atttacgtaaatagcataataaagatataagaactctcataaattcccataatcatattattattattaataataaaatctcatacataaaccctaattatttaataattcaaggtattaatcatatgcggtctttacaaatgggccggtaggtctttttttaaaaatatttgttaaataattgtaaaagtataatgtatttcggtagatttataggattgttcgtagaatttttgccaaaattagatctctttttttttttctttcagagtattctgtatttgtatttttctcgactgattatcgataagttctcgaatggttctcgaagcagatgtcccaaggtcaaggaagacctttctcgaaggcttttgataggttctcgaggctaatctttatcgatatgatatcgataatatgctgacaattttgttgagtgtctcaaactgcttcaatgtcaagacattatatcaatagaatatcgacactttgacaatttttctcactgctcgaaat

SEQ ID NO: 211595 - DNA, 516 bp, Cannabis indica
aatacacaaaatatgaaaaacaaataaataactcgagtgaaattaataaataaattataaaatatttttgtcaaattaaagatgccaaaaatagaattaacgcactgtttttttttttttttgaaaggaagcgttcatatataaaataacaacgtttagacctcacggtcattacaaaatatgtctttggagtggacgaaaaaggcaaacaaccaaaccagttatgggtaaaagcccacctagccacattatgggtcataaaattacaagttcttaagatatcacaaaataaacaaccaataaaataaggaaagatactcttacaaaataaggaatagttctcaatttctcatctaaagtccactccatttagagaattgattattaccttaaagtcactttcaacaatgataaacttgtaaccttcttccttagctagttccaatgccagacagatagcagcagccactccacaaagagtgtcagaaagagatttcatcgatgtcgctgatcaac

SEQ ID NO: 211596 - DNA, 561 bp, Cannabis indica
attattacatattgatataaaaattttccattaatattaagtgtatgggagattatatttgtaccccaaatattataactatacctcattactaaattgaccccaattaaatattattttttataattccaccccaccctatctaccaaaagggtattattttatacacctcaaaacttctcattttaagtttttattttattttattttatttatttatttattttttaaaaaaaaaccctcaaagaatggaaggacttcgcaccattaaattttctacatttaccaaatcgtccctctgcattctccaaatccacaatttttcattataggactaatgtaaaggcacatttgtatataaattagtgtatcaaataaagacacgaatatcattcaacatcacaaaataaagtcaaaaacaaaaataaatcccataaaacactgtttacaagaatatatatatatatatataataaatttacttttctattcattcctctttgtataaatacttaaatttttagtaaagaataataaacggtttttttttaaaagtttagt

SEQ ID NO: 211597 - DNA, 762 bp, Cannabis indica
ggtatttgatgaactccatttttagatttcaaaataagcatactaagaatgtgtctggctgcaccatcttcttgcaggtactttgtattttttttttctcttgaatttatgtaaatatgtttattaacttgatattttatttttttaatttattatttgaatctcttacggaatacattgtgtgtttgtcatagttgctttacttgactcacgttgagtggaacattggttatgttgaccgaattgtgcttcccgttgatttttggtgtaataaaaaatgtaagtctgcttacaaatagatcataggcaatgggagtcccaacaatgagaaggtacatcaacatttggttatattgaattcatttaattttcttatatatattatttcgacattcaatatttatttttttaaacttgttcagtttaatagataaagctgatttcaactactgtaatactgcccaactactattctgactcggaagggagaaagagtactgaacactttttcagtgcaatcattgagttgaaggggtacttttcgaaggagttaacatctctatttagaaaattttctttgaaacatttggaggaatgaggaggtgaaggacgtagtgagaaagatttggaggaggttattgtagatgaagtggggaagaagccagagtgcaaccgcgcagtagatgattccatgttgaagacacatgcttattcgcgaaccaatgttgtggggcattcggaggagaatgttgtggaatcagt

SEQ ID NO: 211598 - DNA, 651 bp, Cannabis indica
gatttggacacttgcatgtacattggccactagtaaatattgagttggagttttcatatttatatattttacttcactttgtgttagcctaggcctagtagtcgtcaatcattacattaaccattattataatgcttagaatcatacttgagcttcaatagtgaatactcaaagatagtctcggaacaaacattacagtgtgaccacatacttctttccctaactaacatctctatttcatacaataataagtgtatctagctatcactttcagagtatatactagaaatatactatattagcttgtctttataatctcacttttatttagaaggaatttataatcttattgggcattagcaattttcattaataatgtacaaatggcatcgctacaaagatgataagcacataattgtttatagagaaatgttaaagggtaccagtggtgtctagcaccttcctacgtgtcaatatcgctattggtccaactaagtatcgggttccatataatttaatataataatttttaaagaatatcactagccaatcgcaaaacacaatatgtcgagaagatgctaggcaccactcgcttaaattatcactaaacaaacactcaattgtcatcaataactaaaatgatattgggga

SEQ ID NO: 211599 - DNA, 634 bp, Cannabis indica
tccctagatgtacgaattgtctccgtcccacgagttgggcttcagtcagtgggcctatagtcatgtattttatgcatttaccctattagtgggccaaatttacatgcaacatatagcgggttatggatacacacgtacctagttcttaacctataaagaccaccttacaccctcatccaaagggttgagaaatctttgtaaaaatactatagtaagaagttagggttctagcttctaaaaaatccattgtaatacattaagaccattcggtcaaataaaattattgtgaatataaaattatatttacgattatatcagtaaaatattctaacaattgtataattgctttaaaatgtttttttgttagagtatgtaaaattagaattttattctcaattttgttgttattttcatttatttgaaattttgaagaaaaattaacattttttttcttctctaaaaaaaaaataaacaaaaataataataactttctcattttgttgatcccaaaaatgttgcactgtggagcacgtgcatccatctagttcccctaaacaaagttgttaagcaaaaattaattaggtcactactccattacttaaagaaacttaaaataaaaccataaacaaaagtc

SEQ ID NO: 211600 - DNA, 625 bp, Cannabis indica
tgattttgttgattaaaggggaattttttgacgtagggtccaaatttcccttcgaccgggtaggaataaagatccaaatgggcagcacattcatcatgacccgattctttgacccgaatattagaaacaggtcgacgaaacaaaaccaccgccaccaccatatatgaactcaaaacaactcagtccaggcctacgaagcttactttgcaccgaccaaaacaaagcacggcctcattcaatatcaacctcaatcatactttcatcttcgtttccatagtttgatttaaagttttcttgaggtttttcttcttagtagtttttcttgtttcgttaatttggcttgtcatggcggcgagggcttggaagaagttttatagagattttggccacaaaagggcgtttttaagtcctattgcaagtgctaggcattgctcttctactgcagaaacggctcccaaaatcccgcatttttccaagaaagtaggctctctgtaatgtctcttaactgtttgttattatgtttttacgaatttttaagttattgccttattattttatcaatatggacactcaacttgctaatttggagttctctgtattgggtttcgatcaatgatggtataaa

SEQ ID NO: 211601 - DNA, 678 bp, Cannabis indica
aataacaactaccccattttacttttatatggatttgcccctagttaaactaatacttttcccccttaaaaaaatatttgtcgaaaagctataaagattatgttttcttagtgtcttttaggtgaaaagtaaaaagtaggtgcaaatccactcaagttttaaaattatttttaaagctttaataagtccaaaaataccttctaaacaccactcaaatgagaaaaggtccataaacataatatagtgatactacacatttcctccctttgcttgagcaatttggtctcttacctattgaggttgtacatcggtcggtttgagcggcttatcctatatattttctaacccaatctaaagtttgggttgctaaaatttaagtacaacctgcctaatttttttaaaaaaaatctgtaaaccgaccaacggtttgggcgatttggtcaggttaacccgaccaaatttttttttaatttcaaagtcaaagtcaataaaaattaaaaatataaaattccaccaaaacacaacacaatatatatgactttgaaactaataattaagtatataactttatattattatatatttaatcatttatgctatatataataaaaactaaaaaataaaaaaaaaaatctaaaatcgggttggttgggttattcggtttaattgggcggattg

SEQ ID NO: 211602 - DNA, 750 bp, Cannabis indica
tgttcaatcttggttaccatctcttccgttgaattctgataggatctcccctgtcaatctgatctcaattacaaaactagcaagaaaaaaaagatagagttgaagaaaaagagaagaataacactggagtattggatgataaaaatggcagcagccttgtattgatactcaggagttcgagagcctggttctctcccacaattaggtacaagctaaacagaattctcatgccttcacaaagcaaaaccagttaacttttattcaaacttacgggtgtagcaaaaactcaccacaccagaacaaaactcacctaaaaaattgccagctcacctttgattctctacagcattgcccaatccctttttcatacactttcgagcataaacatatgtgataggtggtctatcaataaccccccccccccaacacaagtctcaccttgtcctcaaggtgaaagtgcaaaaattgctcgcggatgacaaagaactcctcccacgtggcctctgttgcaggcaggttgcgccacttgatgagagcttgaggagctgtcttgtgcgtgcctgggcgaatatccaagacttcctcgggttcgagcatccattccaagtcagcagtaagtcccggaggtagaactgttggctgttgctgtggtcccaaggccacccgaaggagtgacacatggaagacgtgatgaatatcagcatgcgcaggcagctgcaacttatatgctgctgcacccacccgagctaa

SEQ ID NO: 211603 - DNA, 538 bp, Cannabis indica
aagttaagacatcctacttgaggaccccatggcacccctaggacgctcgtaaacattgaccaaccatttggtgtcgggactcacaaatctaagtgtgcccaaactagggtttatgggcctgcgcaagcgttttcaccctagagacaacaattcaacaaggaaaccaataaggacttgactcaataaggtataaaaaggcttatacttgaacataaagtcaagattacacaagaatcccatacaacatggcctatgcgaccactgccacatgaagatggcagtgctctctttctttttagagagcattgtatcaagaagatgaaaattctcgctactaacaaagaaaaccaaacaggacttgtcaaaatgtgttccttcaacatacaggagtacaatacaagtgaaagaaactattttccaccaaagaccaagcctagctgacctgtgccatctttgtggcacaaagaaaggcagtggtaggccacatcaaagggggacgagattttctttcaaaagtatctttttatcattaacatgt

SEQ ID NO: 211604 - DNA, 814 bp, Cannabis indica
aacaatagagaatagaacatgcagtttttgttagttgtttagtgataaaaaattaactaatttttttaaaaaaacaataataataatttgtttgtttagtgaacagagacaaaacatacacaagtttatatttcttgatagatttaataataccaaaatacattacagtttttttaagaaattacaaattttataaacttttatactttttgtgctaaaatatgacttttcttttcaaaaaaattattttaggaacaaattgaagaaaaaataaaataatatagaaaaatggggataaccaaatacgttatgccatttttttctatatacttttcaaaattttctataaaataactaaatttttacaaacttatattttaaaaatagtacaaaaggatttttttttttttgggtggagtacattagatacttttgattgaggaaattacaatgaatacccactttattttatttgttttaatttttcctttcaatttcatattcttttaaaatatacctacttttattgatgatgtcctcgttatattctttaggttaacgtaaatcatatataagtggagagtaaaaatatattaggcaacccacttggtaaattttaatgaaatataattcgaggatattttaattaatagatggtattcctcgacttatccccttttgattaaaaaaaaaaaaactttaacatacttttgacttttgaggtggtagttgtcgtttttattgctccggacatttttccttttatcttgatcttattcctatttcacaatatttttcatatccttcttctgtc

SEQ ID NO: 211605 - DNA, 959 bp, Cannabis indica
aaataagaataaaaaataataaacaattaaatacaaaaataaataaatataatatatatttccttatcttaagcatgcaccagatataaatattcattttccgtgacacaataataattttttatttggaagcaataattacaaataaatacaattaaaatatcatataataattttttttaatttctatcaataatgtttctattatggaagaaaagaaccactatttctttttggacaaagacaagtacacaaattgtattatttttctctttttatgttttcatgtgactctgaaattttaaccgtgagtattattattttcacgaagtactttctaatcacaaattaaatatagggttatatgtggaaaaaaaatttatgttttgatcttttacattttaattttttttttttcaaaatccctttatgtttaattttctttctaaatttgaggtaccagctaggtaatggataccgccgttagataccaattgaattattactgtattgacttcaaaattttacttttaggtatacacagtagttattcaattagtatttaacgataatatgaaactgacgcctcaaatttataaacaaaataaatttaagtagattttaccacaagaaaaaaaataggagagttaagtgtataaaaagtaaagagtaatttgcagcataaatacctaagtttaatttttagcggtaataatacttaagttatatttttgaaactccgtagatacctgaccacttaaatcattattcacatttaatttttttttttaaaataataatttaatgacttgagctaatcagagattgccaagtgacaatttacttaacagtcaagtacctacagatattttagtattattaccactaaaaattaaactaaaatatttatttagaattgagaattaaacttaaacatttatccttagtcaattactctt

SEQ ID NO: 211606 - DNA, 514 bp, Cannabis indica
gtttactttccaatgtgttgacggcacaataaacaggatcaagtatgtgaaaagggtttcagatgaatttatacattatgtacatataatcatgaaataaatcatgtgaaccatgcaatattaaatgttatttctgatctatattaataagtaaatctgattatattttatttagggtataaaacccaacaaaagactctacaaatagcctctatgttcttcaagatcttcttaggcataatgatcatttggctccaataagcttgaatggctattagcactgagttaatgagagttattcgacatgcaaaggacaaatttctcgaaccccaactctcgatcctagcagtcatcttttcagtcaataattcacaatccttcccagatatttttttagaggaaataggaattccaagataagtaaaagggagtacctgttgttggaaacctgaattttccaacaaccattgaacttctctccgagacatattgctacagtagcaagctgttttgc

SEQ ID NO: 211607 - DNA, 567 bp, Cannabis indica
caatacatttaatatctaatcgatcaaatctaatgataaccagtcgatccaattacagctgaccgccaaatattaaatattcaattttgattggatcaaattggatgttatttttgagtattcaattggaccggattagatgttggatagagtgtttaaaaatccaatacatttaatatctaatcgaaataattaatatttttatttagtttgaatgagtaattagattttatgttgttatacgaaaaaaaaaatatgtatatatgaaaattaacaataaaattttattttattttttggattggatggatctaattcaatctaatagatattgaatttaaaatattaaatgaatctgatccaattcaatatatattaggtctaaaatactggataaacttgaattaaactaatagatatacatgaaatacattcaatagatagagctgatccaatccaatatccattggatgtttgatcaattggatgactgaaattaattggatcagatcggatagtaaaatgtaacgtcctatatataatgaaatcagatatgaatagtcataa

SEQ ID NO: 211608 - DNA, 625 bp, Cannabis indica
tagtttcttctttagtcttctaactttatatataaatatatactattctatggaatataatacacaattttaatcaccatattttacatggtatcagagctgactgtaggattgggaattcaaaattcaaaattaggatttattccgaatttgggtttttcaattagggtttttttttcggaaaccatatttagagggatcttttgttaccacccactcaaaaggattgctagcggccgatctgccaaaccccaaagtctggtcatcagattcctcacacgtgtggcttacgcgccgctcgtttcttctgccacctaccccacgcatcgacgcgtgaaggcgcgtgtgacagaggtttcggcagcgattcgtctccgattcgtttttcaaccccccttaagcctactcacatttgtctcaggttatagtttggtatttctccctacttcgtatttgggtgttctttacttatttttcattattcaattcaaccttgtctcgttcgatatttgtttccgaaattatgacagagacgaaatcaaatccaaaaccactagttgtttctgatgtgattcttgtgttgtctaaaatcacggactgtgaattgattggttcgaattattta

SEQ ID NO: 211609 - DNA, 755 bp, Cannabis indica
cctaaaatataagagtataatatatcattgaagagaaatagtcatttctaaaaatttgcattgatgtcatataatattaggggttttttttttatatacttctatattttttttttttgtatttttatggaattttatatagaaacatttaatgcaactaacggagcgatttaaattgtaactaaaaatcgtataacaacttacatggaaactactgaagaaactactttagaaaaataaactgtaaatttgaagaaaaaaaattaaaaactagtatataaggtaatttcctataatatattactaatactattttctttttttttaataaaaataaaggtaaataaatttaatttataattaaaacaaataatttaattatagtagaatttttgaaagttgttatattattagagtttttagaaatgtgtataaaaataatataaaaaattaaaataaaatattacaattttaaataatgtaaatatttttgttcttaatatagctggtttgaacatgaatggtggagaatggagatgagtttctcattcgagaaacgtggtcctcagtcaattacttggactttccacgtattcttttttatggtcaactgaggtcaactattctttcttttactttttttctttttccaaaagaattgaagcattgaccttctgaaaaactgctacacagcgccatcatcaaccgttcaaatctaaataatgggtttttcattggagtgtactgatacattt

SEQ ID NO: 211610 - DNA, 580 bp, Cannabis indica
tggcttggtgactcctccctatcaagctcctttcctgacctagcagtgatttccaaggcaagaaatgtgtcgatcaaagacctgattgtcgatgaaggcctgcccggggggcgggtagaaagttgggatttcaaatttaggaggaatttattggagcgggaaattccaagactcactttgctactgcaaaaggtggaacatgttagagtgctgaatatttcgaacgatagccgcctatggaaaccagatccgtctgattttttcttgtaaatcagccctatcctggtttacatctaacccgaacggtagtggagtttactggacaaagcctctatggaaaagttgcgttccttcaaaagtcaaagtttttggttggctcgtatctttagataaagtgaacgttcacgataagatgcaaaagaggatgccttacctatccatctcccctggatggtgtgtttgttgcaaagctagcggggaagacgttgggcatttgttcttaggatgcagtttcacccggcaattatgggccagattgataaaggaatttaagatgtcgtgggttatgccaaggttggta

SEQ ID NO: 211611 - DNA, 623 bp, Cannabis indica
atagtaagataggactgttggttaagaatcattaattttataggcaaacaatgttcgaattccacttcacctttttttctatgtatatatacactttattaaaaataaataataaaacataagttcccacacgatcgaatttgtgatcgcaaaaaagaaattactctacgattatttcagttggtcacaacttatcataaatattaggggtgtgcagaaagtcatccaatccaattccaaccgaccgatccaatcccaaccgatccaatagaatcggatatccaatcataattggatcggatcggatgcaaattttaaaaatccaattggatcggatcggatgttggatgagacatccgatccaatggataaccgatccaatccaatccaatatcatccaatgtccatccaatcatatttaatatttataattttatatatttaattattttatttaatattttatatattattttattatctatgttagattattaggttttaaattatgttttttcatatatatatattttttaatgaaattagcctaaatagtggttaaaatggattggattcatccatgggatccattggatggatccaatccaatctaataaaaaacc

SEQ ID NO: 211612 - DNA, 590 bp, Cannabis indica
gcaagagaatgagcagccttgtttctttggcgccctatgtggatcacggctaagcagtttgtgtaagctggggattctttgatttcttctagcaacgcgctccaatctgtgttcacctgactgtagcccattaagaagttaaccacccgaaggcagtcaatttgtataataaaaggaacaacctctgtttggatagccagtttaattcccatccgtaaggccaaaacttcagccagctccaccgagaaaaggccttattgctgcttagtttctgctgctatgacttcgcccgattggttccttattagagctcccagcccgatcgaagattctgtaccatttaagctggcatcacagttgatgcagtagctattagcaggtggtgcttcccagccgagatgaggtgttgtatgaatttggctgctgtgatctttcggggagatgttattgttggaattattttaccaggatcttagatctactcacaagtatgttgattaacaccctaaatatgaactttctaaaacgatgaaataaacacatataaagtttaggaaaccttacattgggtgcagcggaatataatgact

SEQ ID NO: 211613 - DNA, 1203 bp, Cannabis indica
gccgaaaatctcggcaacattaataattacaatattatgtatataattaaaaattctcctaaattttattaacggcaattattcgagattacattaagaaactcacaagaaatatcatctcttcgtaacaaacgacatgcaacagaataggatgctctagccagaaagtagacaacactatttgcacgaccccctgaataaaaataacaaaaacactttgtagctcacataacaatatcttacattacaaaaataacacttaccaaaataagataacatgatgagcagacttcggagtgatcgcacaactgttagactatttgtttctatagtcaatccctgccatgactttccaaaacccccatagcctcagtatggcttatttggaataacataatataattgaagtttacaaagttaacactattaaatatatatgtataaaaaaaaaaaaaaacttatatgacatgactaataccatagaaaacattaaaaattaaagggattttttctattttgggctaaaatcattcaaaactaacatctatactattataaggaaaaataaacatttatactatttaatatttacaaaaatactatttttaagttctttattcacaaaaatactttgtaacatactttgtagttacaaagtaatgtgaaactaagactaaacaggcgcgtgaaaaggactatcctgacgcacgcaagtcagaacaaaaatatgataagttctctcacacaaatctatagttgcaaagaagacacgtgaaaaacttagtaacattattattttttttggtacatactacctactagtctgtatactactatcactttacttaatatttttactttttattttaataatatatgttattaaaatatgaaaagacacttccatcttttcctatcagaactttatatttacattagttactatttacaaaattgtgagaataaaaaaatattaaatattgtttgatctatttaatagctattcttttatgtgttttattattatttttattatttttaataatgtgtatttgtgggttatatatacgatttatatagtttgaaatataattaaaaattatctataattcaactaaattataactaaataactaaaaaaatatctacactactttcatatgcaaagaccaacacatcgtatggacaacttgaaaaaaaaag

SEQ ID NO: 211614 - DNA, 785 bp, Cannabis indica
gcatctacaaaagagcagtggtggactgggccaaaatctggtctggagctgcagaaaagagcttctagaggtattggagacaatggggaaagttgcgccgcttgataatcctgcaaaaaacttgaaacatattcctggacattggtacataagttttgcctttgaaaaatgtgagcatttctggtattccatatttgccagatgattccaataagtaagggaagttgatctttaggaattgaatcaaggctaagaatgtaaaaaatctctgatatcaagtctactattgtcagtaaagaattgtttaaactgacaatagtattattaatattttgatcttgtttagacatccactaaattaggttttacattattctactatcattcttagaatttatattcacttaatagtctagaattctaggtttaagtgataatttgcttttaatggtattgtgatgggtatcattatttgtgatgaagattataacctaagttaaataaattatttgttaaattgatttgttgcttagattcacatgtcttcatagaatttaatgctttccctatgttaaatagattgcatgctccgtgggtctactgcttagtaaaaagatttcattatttagtgcttcgttgtaattaattttaatagggagactcgaataagtgattatctacagggttaataattcaattttgaaattaaatataatatttatcattactattcttgactgattgttagaggtatagaataattattaactgttttaaaatcgtaa

SEQ ID NO: 211615 - DNA, 1334 bp, Cannabis indica
ccaacaaaactaaagaagtccaaagcttagctggtcagatagcagcattcagtagatttgtttcaaaatcaacagacaagtgtgtttctttcttcaacatcctttgaggaaacaagaaatttgaatggacagaggaatgcgagaatgcctttcaagaactaaaaagacaacttacaaaacctcatgtactctcaaaacctctggccggagaagaattaggaatatacttagctgttacagaatatattgttagtgtcgtgctgatcagagaataaaacaacgtacatcatccagtctattatatcagcaaaagactcattgaagctgaaggacgatacccattgatagaaaagcttaattactgcctaatcttagaaacaaggaagttaaggccctacttccaggctcatcctgttcgggtatacactgaccaaccactacgccaagtattacaaaatcccgacgcttatggacggttactcaaatgggcagtgtaattgggtcaatatgaagtaacctttcaaccccgaacaacagtcaaaggacaggccttatcaaactttgtagttgagtgcacaggcaaagaagaaagcatttcaaagtataacctagagccaatacaagaatcctggccaaacaataatgaagacagacctacatggaaattaaacgtaggtgggttagctacatatcaaatgtttagtgcagggattgcccttgtcacatctgggggtgaacacctgcacggggcagtcaaatttggattcaaagcttccaacaatgaagcagagtatgaacccctcattgctctccttgttggattgtggtctctagggttaagatgctcgcacgggcccataaaccctaatttgggcaaacttgggtgtgtgagtcctaacaccaaatggttgaccaatgtttttgagtctcctagaggtgccatgggaccctcaagtaggatgtcttaacgtatttaatatgtgagtcttggtcaaagtcgtagggttaactttagtgttttcaaggtactcttggcttgtgggcccttgtgcaagagtagccattttttttttgtttgcaaaaattggatataacatttgcctccaaaagtattttcttgtaagccttcaagtaattcttttgcacttatcccaaggcttgcacaaaaaatacttctttgtagagtgcatgaatattacttctcgtttgaagatgtgtgcatgggcacgaagaatgtccttaatggttgtgaagaggtttgaatgggcacgaccaatgcttttaattgttgtgaagagacatgcatgggcacaactaatgtccttggaattgta

SEQ ID NO: 211616 - DNA, 1012 bp, Cannabis indica
tttagttattaatagtgttgatatgaaaccaattagctacctttatataaaaagatttatttttatattatccgtctttcaccatcgaacctagaaatgtcaggctgaaattgactactgacgattttaatccatttgggaacataagcaactcttatagtctgtggcaagttatttgtgtcccatataatttgccaccctgaaagtgcataagttttgaaaactaattcaacaaaaaaagaaataaaatgtgaaattcttgagtagtttacttcctttcgaatgatgaatcccctgcgtaacctttttttaaacttaattaaagtaaagaaatgctttagaattcaattcaattcataaaagtgttagcccaagatatgtttccaagaggggggtgaattggaaatttaaagaaaattaaaacttttaacacaaaattatgcaattagtcaattaatcaagtaaaagcaagtagtatggcaagcaatatattaagacaaataattaaacttgtaaagtaaagagtttaaggattagaaaatgcaaactctcgatttttacaaggttcggtagaactatgccacctacgtccttggtcttcaaagctatggacctagctttgagttccaatatcgagccaagttaacgggcttgactaacccttacaaccgggaaattttcaccaaggtatttccaaacctcttacaatagtttcgcacccccgaggactattaacctctttctcggattgttaaagtgccaatctcactatttccgggttgtttacaaaaccggtgccaacctcacctcaatcacaatatggaaatgtgtttgatatacaagctaaaatcactctagaaatatgatgatacaatggaaacctagagtgaaaagcaagcacacttaagatgaataaaatcaaaattttggctcaaagtgtgtgaaaagtgttggtttggattttcaaaacttgaaagctccttaatctcacttagataggttagatatatgt

SEQ ID NO: 211617 - DNA, 700 bp, Cannabis indica
ggattgattgcttgaccgctagcttgatgataaatatgtaacacatgttgaatagagctagctgattgttgagtagcacgacaaaagagcacactatcatcagcgaaaaagagatgcgaaactgagggagcagttcttgagacacacagcccttgtaaagatccattgttctcttcagattgcagtaaccttgaaagaccttcagcacaaaatagaaaaagatatggcgagagtggatcaccttgtcgaattccacgtgtgggggttagatctccaagtactttcccattcagtaaacatcgaagaataagattcaccatggttgaaccaaaacccatcttcaacataacttgagcaacatagtgccattcaacacggtcaaaagccttagacatgtccagtttaatgtcaacataaccttgttttcctcgctttcgattcttaagtgaatgtagcagctcaaaagctattagaacattatcagtaatcaatcgttgagacatgaaagcactttgatactccgaaataaccaatggcaagaatggctggattctcaatacaattgacttggaaatcaatttatagaggacaatacacaaactaatgggccggtactgtgtaatgagctgaggttttttaacctttggaatgagtgtaatgatcgttttgtttaggtgagtaggatctgcactgtgttgag

SEQ ID NO: 211618 - DNA, 534 bp, Cannabis indica
catccataattaattacactctttattattatttttctggttgttaatttttagttatttaattattcaactttattattgattctaccaataaatagaaacaagaattcagttgattggtacttagctgcagtccttgtgggaacgatctcacttacctaagtattacctgttaaaacaatacgtatacttgcgtgttagatttatcacaacagtagattaaattgaaaaatctaaaatcgacaattgtgtggatagaatgttatttgatatataaaagtaacatattcaatccaattcacacatatttatatatatatttttaaaattttacatatatattttaatgtgaaaaaaattatttaaaaatctaatacatatattgttctaaaaaatctaagacatatacaaatatatatttcaaaatttaatagatcaaatgtatatttcatttttatttataaaaaaatataatctaaaacaaaattaaaaatttctttatacatactatttattttcttcttcttttgaatt

SEQ ID NO: 211619 - DNA, 542 bp, Cannabis indica
tctaaagtgctagccgaatttcgagtatcacattagatattttaatatttagtgtattttaaattaaaagataacattaaccttttaacttgaaatattaaattaaaaatatcttatacgataaattaaataattaataaatttaaaattaacctagacaattttatatatatcataactataattttttcaaattcataaattagttattttgttaaatattttattgtttataaattataagttagacaaatgatattttacatcattttacttatcagaaatatataaatagtattttaaatatttaaataacttagatttttttgtagaaatttgaaaaatacttaatttaagatattttgacatatagtttggataattattatttatttattaattttttttttaaaatgataattgtctaaccatatctattttaaaattggtttattttgttattttaattttattaaattataagattaaaaaatgatactaatagtatctatttggttaatttcaaatcatttatcttatta

SEQ ID NO: 211620 - DNA, 620 bp, Cannabis indica
gcgtagttgcacgatggttgcgcgatggttgcgtgatagttgcccaggaagcatagatcctgggttaaaggtatgtataagtggtatttgtgttaatttttttaattagaatgtacatttatttatttggccagctgaaagtatttttgaaatattatttttttttgttaaaactgaaaaaatccctatttttatcattaaagatgttttgataataatacatttcaaaagcattaccacttctaacttttttttttttctttttggttaattattgcaaaagatgaaattaattatgatttctatttgctgatggtggagaacggaatgtttcgaaagtcgtaattgctgaaattaattagcaaggcttttgctttagaatatttgaaaaaggaaaaattacttaaaatatttataatggaaaatttaatttaatatacttatattagactaaaataaaaatttaaactaaagagtagctgaaacaaatggtcggctagcagggacatgacgctctagaatctctctaatagtgatatttgctctctccttaattctctaatttttttaattttttatttataagtttataaattccttaaaatctatttatttatttt

SEQ ID NO: 211621 - DNA, 826 bp, Cannabis indica
aattctagatttgaaatcaacaacaccatcagcgatgtagaagcttttgtcaatcaccatgaatgtcactgaaaagattttttaaaatctcgatgaatgtcggtgagaagctttgcttcaagattcagccatggcaacatcgaccaacaaaaagagatctccataaaagccgacgaaagaagatcaactattaaggagagatctccttcatacttgcccaaaaaatgtggttttgtatatatatataaacaaatatgatgatgtttagtgtatttgatttagttatttttttaataaattatttttatttggttgcttcacatatactactgatttttattaatattttttttagtattttttggtatttttggaaaatttggaatgaaaattaataaatgaaatttttggatagtataatgagaacaagttaaactttaaaataagactatgttgttttatatagttgtcaatgtttttttttgggttgctgtccatgattgcagaataaaatatatatatatactagtaaaaaattacgtgcgaggcacgtatattaaattttatgctaggttttttctatgttatttgaaagtgatacaattaaaaattaaagaaaaaatgttattagttattagatgagattattattatgtgtatctgaatattatagtttatattgttgtcaattaaaagtgaataccgaatgcaatatattagtgtttaaaaaagcttgatgatttaaatatgttcttaaattaatccaaaaataaattaaaaattgatgttccaatacttaaagaaacattacttaaatgggtgtaag

SEQ ID NO: 211622 - DNA, 922 bp, Cannabis indica
tgaaatgataatttcttttagcttggataaaggagttaaatgattgaacgttcatttcggtaattatattagtttcctgaaatatatcatttacaagtagctaagtgttttaaggataaaatacattaaagggtaaaatagtaattttgtccctactcgatgtagaccttctataaaggatcaatgattgttgtgattgaaaataatgggtaaattatagcatatctatacttggtgtatagagcgttctataatcatgagtgcaattctgaatctatagtagagtcaggaagaattaatacgttaagaaatttatccaataaattttaagatctgtttattaggagcttagttacataggctcatggtccccgcacatttcctgagataatatcattttgtaagctcaactaatcgagttaataagtcaattagaattcgaaaataaactatgtcttatttgagatatttttaccaaatttaggcaattttaagcaaaaaaaatataaataaaggtttatttgttaattggtatactttgtgggtctaattaataaagttttttaatttgtattttatttaataattatttataattattaaaataaaattagtattgaaataattagaagagataagtggtaaaattagaaaagatactttagttttattagttgaaataaagtggcaaaaatctaactctaaagcccttatgatgtattcggctccaagtctttattttgagcccatctcatctaacataacccttagtgaatgcctatataaagaaagagataagaattgaaaaaaatgtaaaattatcacttcttctttttctctttgtaaattcaaaatttaatagaaaattctttctctaaattgtttaaaggtgttttgattatcagcccacactattcaagtt

SEQ ID NO: 211623 - DNA, 500 bp, Cannabis indica
tttcatgtaattttcactttaaattttgtgcatatatatagctggtatatttttttatatatatatatatatagaaaaagcaatacattcttatataataaatagtactctcgactatatcacaatttttgtgtagtgtgacgtgaatattcgctttgagctttttataatagatttggttaggatttttttttttaaaaaaaaggaaaaacctgtgatcaaattcctgatatataatatacgtaatgcatatatatttttcagctattatagattgatattttttaaagaactgctaaaaaaacaacaatggtatttaatactatctaaatatctaaagtgttatatcgcgcgcgctattagtatcgtaccctaatcacaatgctcttttctttaccataatcattttttatttttcagtatgaaatcatgcttccataggaactatatgttaatttatatttatctcttatatataataaatataagaaaattaagca

SEQ ID NO: 211624 - DNA, 558 bp, Cannabis indica
tttagcttttcttaagttcatgaactagggcagtccctgaatctaataatagtttacactaagtttatgaccgctccatcattctaaggttttctaggaattagacttagatgggacgacatatagaatgtcgtttgttgtgtctaagccatatccctagaaggactttggcagctgctagtaactaatcgtagacctttctttttcatcaatatgtaactctaaagttctagggaggtaagtttggatataatttgaagttcaacttaatcatctttgaaagacataaccaaatatttctccacccttatcagtttgcaagatctttaaccacttaccttatctgtttacaccaatgctaaaaattcatgaaatttctcaaacatttcaaattttcttgcataaggtaaatatctagagtgatcttctacgaatttaacgataactcatagccacccatgaatgtgaattcatatgtccaaagacagatggacacactttcaagtggatattggcatgtttcctctttacagaaaataatcttgtcaaaacaactat

SEQ ID NO: 211625 - DNA, 734 bp, Cannabis indica
agtttacctttaaaaaaaaaattagattagttattaattaaattgaaacgtgagaaattactaaaattaaataatagtaataattatattatcagatggatgtacttctgttaaacaagacacgatatcatttagtaattgccgtttagtatatgtacatatgaaatgagtgatgtcttttctttttatgtaagcatatgaatgatgtcacttctatttctagatgaattggtgtcgtacacgtattcctttatttcattctacgtttgtcaataagatatatttttagttttaaaaaaaaacactacttttttttaaaaaatctgctatataataaaaaaaaattaaaaattaaaaatatatatatatatataaaggagaagtatgagaatacttttttttcttttttttttcttaattctctcaattttttaattttttattagcttgataaataataattccaaaattaatatttaaaaaataatatttaattggccttattaagtatttattaagtcacattttatgattgtcatgattttaatatttggataccataaagataatttttaatttgatgaggaactaaattagaaatagtaaataaagattagttactgttttatcagttattaataacaggtattggtccacaatttgtatcgtattttttcactcgtgtatcccatcaccaagaaaaaaagttttaaaataaggttttgatgcaaatt

SEQ ID NO: 211626 - DNA, 657 bp, Cannabis indica
tttctagaattcaagtaattaaagttaaaaaaataaaaatatattatttatatttcaagctaaaaaatgctatagtttaaattaattttaagaactttaatataagataaatataattgagcaaacataaaataattgaataaaataataaaaaaaaagtgataatatggtatagattttaaactttaacttcaatatccaaacacattaaagattattaactataaaatctaagttttaagttaaaaattaaaatgtccaaactttaaatacaaaatagtttaactaataaatgtaatttatataatataagatatacacttttattaaaaaatatataaatcggtttaattcggtttattcgggttaattgggcggtttagaataatttgtaaaccacccaatatattcattgggcggtttgaattttcattgtattatttcgggttgtattttttgtcgatttattcggtttggtttgggcggtttgtaaattttattgaacacccctaatgaaagttatgtccatttttttaaaaaatgaagtaaatagcattttataaatgtttatacctaaaatgccattggttatatagatgaagctcaactctatttttttttttcgatttgtcctactgtttgcgcagtgaaaaaaaa

SEQ ID NO: 211627 - DNA, 649 bp, Cannabis indica
gtacttagcaaaggcttcactgccccacctttggcaagtctctttcagttcaggtggggttcttgactcatctcccaaacacaaggcaaagctctcttggtacacagcttcaatggcccaaaatgcagttattgccactgtataattggcctccacgctcattaaactctccaaaaatctgcaagattcttatgttgagtgaaagtgaaccttttctttttactattttactactgtatttcctcacatttatagaaacttaactcatcaatcatcataactctatatattaaaatttaaaagatcatataaatgatgagcattgtttttatgtgttctataagaaaaaaaaatcatactaggtggtatttggttatgagcaatgaaaatataaaaataaaaattgaataaaatttaaaatgcataaaaaaaaatattaattttttctcaatcataaatattaaaatgacgtttgttccatttcaaaatagaatagtcaatagtgaaaaagtaattccattaaaatcacatttcaatactatgagattgtttccattccattttattacctcccaccaaacaccaccttaattccaaattcaccctctaacaattgtttctattgctcacaatctaattaatttgacta

SEQ ID NO: 211628 - DNA, 668 bp, Cannabis indica
gtaatcataatatcatttctaatactagttactttgaggttctgcaacaaatatttttgtaatgatttctataattgtattgttgtttttttttttaatttttttctctattaaagaatttcattttgtttgcaaaccataagaacttctattccatagaatggaatttcttaaaggagaagaacaaaaataagaacaaaaatctgagtctaaaggtagacatgattcttaaactttcaatttttatagaaatatgtgagtgtttaatcaattaggaatgtattttttttgatatagtgtgcatgtatcactttgtatttaaattatcttactcatatattttatatattactaattagtgggcataattttataatagctgagttgctaagattttatattgaataagtttatttttggagacaaattggcactgctctcctatttatatggttcattgtattttttgagtgataattttctttcatattaacctaaatataagataaatatatatttaaataataatataagttatgtacaatgaacacttaaaagatacaaagtgtatacgtatataatttattaaattattatttttatttttttttatttcttttaacttctttcattattttattacttttcttaaggggtcgtttggtatg

SEQ ID NO: 211629 - DNA, 516 bp, Cannabis indica
taaactatttaaaaaaatttaaaaataaaaattaaatagttatccaactacaaaacatagtgtactgcagatttttccatgattgtctattttaaaaaattaaatccaactaagaatttaaattttaaactaaaatgaaaacagaattttcatattttctcaatttgagtgtacaaacaaccaatcacatattcaattttttgaaaactaaaaacaataaataagatataacttatcataagtttgtacaaactaaattcaaattcacttgaacctccaattttcttataagaaaccaatcaacccctaaatatttggttattatttcttttatgatgtcattcttaatttttccaaatcatttattttagttctttatctcttttttattaattaaaaatatttaaatgatgtataagaaattaaaaaacactaatatgaaaattctaaaaacaaatttgatgttttacttgaatcaatcaaccaaaatagtttattttctgtgtttcctcacta

SEQ ID NO: 211630 - DNA, 766 bp, Cannabis indica
aaatcatcatttccaatggaccgccgactttttcagctcaaaactgccccttccaaaaggctctgaccaagatatatggcccgatattagaaaacactctcatctatattgacaatattttgctcttttctcctgatgcaaaagctcatcaatcattaattgcccagtttgcctctatcactaaagcccatggtattatgttatctaaaaagaaaatgattattggactgacgcaaatagaattacttgggatgaaattatccaaaggaaaatatgaagccagaccacatatagcccatgaattactcaaattccccgataaaaatctcacaaaagttcaagtgcaacaattcttgggcatcatcaattatttgcgaaactttattccccgactgtctatactgataaagccactcaacaatatgctcaaaaagaataatccagaatggtcacatgaccaaactatggcagtcagaaaggtgaaagaaatcatccagaatctaccacctttaagattccctctgacgaaaaacatgttcttcaaacagacgccaatgacaaacatgtgggtttccttctagagcaagatgaacaggagaaaagacaaatatgtggatctaagagtggacacttcaaagattcccagctccattatcattcaacactcaaagaactaattgtaatcaagatgggaatcataaaattttagttctacctcatcggctatcatttcttagtgtttgagttctacctcatcggctatcat

SEQ ID NO: 211631 - DNA, 426 bp, Cannabis indica
tatatatatattaaaaaaaattcattgaagtataaaaattaaaaaactcataattattgtgtgttagtttcggatttgaaattgagcgtgttagagtatctctaatggtaaaactttgaaggatgcttggtgaggtgaatatattatgtggcaaaatattgaaatgctatactattgaaaaaaaaaaagatgtcattctaaaaatttgtatggatgctatgttgtagtattgatgttatttatttatttattttttttttgataaaaaattaaagctaaaaaattattgtagctaaaaattaaaatatatattaaataataatgtatgaaatcatagttataatatttttaaaaggtaatatatattgaagtatttttagaagtaagaatgtcaaaaatattgtgaaaaaaaaaagataaaataaa

SEQ ID NO: 211632 - DNA, 681 bp, Cannabis indica
tgatgcaaaacacaaaatacattaagtgagtttagtttagtgaatgtggattaaagatgagattagaaataaaatctcacaactcaatgccagaaaagtttttagtaaaacttatacaaagaattggaagccagcttattatggtcatatattgattattcaccctaattaaacttcctttttactatactaaccactcaaaattgagttttttttttattatttattttaccttcacttcactctatgttactctgaattttggtagaaattgttattggttaattaagaatttttggtatttgaaatttgatatgtaataaatcatgttcccttaattttttttattattaaaaattcttcttgaactataaagattgttggatttaaggatttttatttaattttactaatttgatgactgttcatgtactaaatcatattcttcgactttgatatctattaaattatgctcctcaaattttgatatgtgtcaaatcatgtctctcaaattttaatatgtgctaaattatgttccttgaattttcattattttagattttttttattaaaattagtaaaaagtctttaaattcaacaatctcaataatttatggagaattttagacggatttcaaaatttagggggcaaaaattctaattatcatttattattttgat

SEQ ID NO: 211633 - DNA, 872 bp, Cannabis indica
attttgccgccatggatcctttgctaaaccgtcttgattccaccttaactctcactgaggaagagagctctgttgctgttttaccaactgaagtggatcttctcgccaatgtcaacaacagccacattcttattgcaagaattctcactgagaactatgttcatccgcctactttctttgatcaaatggggggtcattggaaggggagattccctgtgataatttctgaatatggtgaagggttgttcaaagtttcatttggatgttcaggagacaaatttcgggtgttaaacaaagaaccttggcacttccaaaaccacttagttgttttctgctcaccaagtactctgcaaaatgtcacaatgaacaatctagtgagtacccccttttgggttcaggtataccgattaccattccttagcaaatcaaagtctcttgccactgcacttggtaacatcataggggaattcattgatgttcatgaggattctgttgatgaaggttggggcccttttttgagaattcgagttaaaatctctgtggacaaaccacttctccgtggccgaatgatcagtttaccaaggattcgggatgacttttgggtggattttcgttatgagcgattgcctgagtttttctttgaatgtggaaggttggacatcccttggaaaatgtgttgctttcatggaaaggatggacaatggtaataatgatgatgatcttgaatatggcccttggatgaaaggggcaaaattacctacaactggctatgataaatatcggacagactttgccaagggtaatgcttggccacttttgactcgtttagcccgtaaatcgttgacttcacaatcccaactcttcatacctcg

SEQ ID NO: 211634 - DNA, 522 bp, Cannabis indica
ttttgttttttgtttttaaattgtgattactatataaatagaacagagtaatatagtatggtatgtatatacatatttatgagacaaattatttttaacaaatttcttttgaataaaagcatagttatattaaggaataagttacactttatggtaatatagtatgataagttagatttcatggtcattatagaataagttatctggtatggaggacggattgaccatactcattatattatgggcaaaagctcacttgactacattatgagccgcagaattataaaatctagctaggaataaacgaaaaattacaactaatcaaaagtcttgagagatgttacaatgaagggcatagttatcaataccccaaacggaataagttcccttcagcgtattgatcactgtctcagaatcactctcaataatcacaaaagagtgtctccaactaatagctgattccagggctaacaagcaagccgcaacttctccaacgagcgaattagagaagttgagaatgtt

SEQ ID NO: 211635 - DNA, 528 bp, Cannabis indica
aagccaagtatgaagctctaatcagtggcctaaagttcgggagatgagagccgagcacattgaaatctgtagtgattcatagctggtggtaaatcacgtatcaagagaatacgaagctcggggagaaaagatgatagcatatctgagaaaaatacatgaccgtctcacacaattcaaaagctacggtcttggataaattccaagggaagaaaacacaactgcagacgcgttagctcgattggcaagcagtaatgtaagtgataaggtgaacttggttcctatccagttcctcgaagagcctagcatcactggcacaaaagagatcaaaatgattgatacttccccaaactggatgacatcgatacccgcctacctcaacactgggaaacttccagataatcagaatgaagctcgaaagatgagaaggaaggctgcacggtatatcatagtagagggaattatgtacaaaagaggattctctatgtcgtttctcagatgtgttacccaagaagaagctgcacgactcct

SEQ ID NO: 211636 - DNA, 1328 bp, Cannabis indica
ttaatataatatacattttgtttctttggtaagaataatttaatatttattgcagatatatcaaatcataattaaatgagctatgagaagttggtatttatctttaaattacttttaattttttatataatttttataataataaaaataataaaaatcatgtaaacaaatcaaaacataacacatgttcaaatatgtacgtataggtctaccactttggtatttaattttggatgtttaacataatagtatagacaataatagaatgtgaatttagagagttttactatcaaaaaatcgattcgtatggttaaatgtcacaaaatgtatatcttaagtagttttatcgtaaatatttcttaattgtattaagataaatagtgacataagtactcaaagtcttaagtttgtaagtagcataaacccaatgttaagttttagcggcataagtacccaatatttataaaactgtaattttttttttctaatttcttcagtacagattctgttttgaattttttaaaagaacacttgaaaataacagatactacatgtttcatgtttctgtttagatccaatgatctagaatctggccttatttgtatatacgaaattagaaaaaaaatacatttttaaaaatattggtattatgctgctaaaaataaatattaaatttatatcactcataaatttaaaactttgaatatttatgccgttattttgtgattgtattattaggtaagtaataaaggttggttctttaaaaaaaaataatcctaattgaactttagtggtggaggagtggagatttttgcttaaatttttcagtcatatataacaatgaataaccaatggatgtttgtgttgtgttgggtaaattctttttgtttattatatataaagccaacaatgattgacatatgtgtacacaattccaaacaattaagcaaagccaaaatagtccaaatatggactatgttcattcatcattactttctatactccttcaataatcacaattatgactttttcaacaccccccatttcctataatttcccatatatattacacaataaagattatatatatttatagatatagatatatcaaacataacaatcaaagttattggaacatcaaaaaatctttagtcctcaaaaacaccaccttggtaagtcactgtcttatatgttcagattttgttgcttataagttatacttacttacatatattaatatatataaatacatatgtatagatgcagaccattgagggagaaaaatggatggaaaaacagaagaggagcaatcactattacatgacacc

SEQ ID NO: 211637 - DNA, 535 bp, Cannabis indica
aaccaaatgcctgagactattatccatcttttggtgcaatgttcctttgcaaggtcttgttggcatctctcggctttaacttggagcaatgtgtttatggagacgttttgggattggtttatccggactttgttacaacattcaaccacggcctaggaagatttgctaatggttatttgggcgtaggcatggcaaaaagatccattcattcggatcgggttagtgatccgatccgaaggatcattattgatctaaaacattcagatagttattggatcttggatcagattcgacccgccccgcttaaatttttcttaaaaaaaacattttaactttttaatatatttttttttttgaaaaaaaggaaatttgaatctaccctaaattaagtcccaatttcatctgtttcaaaaaaataaaataaaaaataccaaatctcatcttcttctcggcttttctcctcattttcccgagaaaacccaaacagcctccactctggtgtcggtagtcgacctcactagctcgccctagccac

SEQ ID NO: 211638 - DNA, 519 bp, Cannabis indica
tttcatacaaagttccaacaatggtaaactagcacaatcacctgctgcaactccttccaattataaggaatggaaacctcctcctccaaactgtctcaagttgaacatagatgttgctttcaatgcagcctgcaaaaagattggatttggggctatcataagagattccaatggcaatgttaaagctgctatgtctcatcctatccatggttgttgtcagccacaagaaatggaagcaaagggtctcttttatagccttaaatttgctagacagtttaacttcaaggttgacatggtggagatagattcattgatccttgcaaattctctcaaaaagtcaacatcaaactgttcttcatttcaagatttaatttttgatgttcaaattcaattattctatcttccttcagtttgtgttaattatgttcgtcgtgatgctaaccaagccgcacatggtttggctaaacaagctttagtgttggataatatttgtacttggcttgaggattttccctcagc

SEQ ID NO: 211639 - DNA, 1352 bp, Cannabis indica
gatacaatcagagccaagccttgcctcccgcatcttcgtactatgggaacccctcagggatgatcggacaaatcttgtctcactccgctcctactgcaagcctaaccggaccttctcaaggctcctggattaacaggtcctcaaaaggcagcaaccggacggaggacaagcgccaaaaaagagggtatactccccaatatacccagtacacggagttgacagacacacaagagcgtgtgtattttgccacaaggcaaaatacacactaacggaggccgcctcctctgtacagagataattctcaaagggatcccaacaaaagatgcgaataccacaacgacattggacacagtaccaatgagtgcaaaaatcttaaagatgagatggaaaacctgatccgattgggtcacctctatgagtggatcaagagtcggatgctccatctcaactcggtttcggcaaggggtccattgccccaagggacaccaagaagtgcgcccggagcatcggcaccaactgtaccctcgggaggaccaattccccagcaaacccctggcctgccaccaagacccaacggaagagtggttatgatctctggtgggccccatattggagggaccactcgaaaagaattaaagcgctatgtcggggccattaaacacgacgacgtgtgggaagtcaatcagcttccagctcagaggtcccgactcatggatcagccaattactttcatggaagaagacgcaaggatggttcattttcctcaccatgaccctctagtcatagaaactcccattgccaacaagatcgtggctagaatactgatcgataatgggagttttgtgaatttgttgtttgaggaagccttcacagcgataggcctcacagaccgagatttgtcaccaagcagttcccagctcacgggattcaacggaaccacgcttatcccgatgggaaaagtgaggttgccagtcaccctgtgcccagcctcaccccagagtactttcaagtactacaacgttcgtggtggtggactagcccaactgcctataatgcaatccttggccgaccagcacttgtgtctgaaactccccacctaggaggctggagtaggaatcgtgagaggcaatcagggtgaggctaggcaatgttataatgtcgcggtccacttaccggtattgatggtccgttaagatatcgagccagaattggcagaagaagatgagttggatccccgtatgggatccgaaaaatttgtagaacctatggaagacgtcgaggaagtgcctgtatgcgacctcaaacccaccaagatcctatgtctgggaaagagccttgaaccggaggaaaaa

SEQ ID NO: 211640 - DNA, 720 bp, Cannabis indica
cttcggtcatgtgactttcttttaaacgaggtgaacttgaggtccgtgggtctccttactgacaaggagtttacttgcgattataaatatcccaagtattctttttggcagcaggttcgtgtcccaacggaggaagaagctcaggatcgtgtggctcgggcataatacctccagaataatgtcccttgagaaaccaaagaaggagcatcctcaggtaatcaatgtggttggtcacccacagtgctcagggtcgagtgtaacactctagtttcatttcaagatagcctttataacttttatacttggcatcccctcctcgtagatcgatttacgcatatatttgatagttagtatccatgattccatgtccaaattaattgtaatgagtcatactacgggatagccgagcagtacgggactatgatggatagggcgagccacttagactagagcttgaatttagaaccaattaatccctatgatatattcaggatcacgggttgtagggattttagtggatattatagtcctacttcctcatcttcttgtgattattgtaaattccttatgcaggaaactatgccccaatctccacttttatttgtctttctatacatgtttaacactttatcttatctcacagaaataaattttgagggtctcgttcactgaaagggaaagaagaggaggaccatcccggaggctccatcagacgttgac

SEQ ID NO: 211641 - DNA, 544 bp, Cannabis indica
aaattctgtgtgagagagaaaaaaacccagcacaagataatttgttgaagaagaaggagaaaggaaaaagaatgaaggtcggtcggtgcttttcttattcttgtatggtttgaccaagattgagactgaggctcacaaccactactacttcgcaacccattgaagtttcaaaagagttccctctctctctctaaagattaattcttctcttgttgttgaccttgttagagagtagttagggtttttttttctttgttttaattttctttttgatgtgtttaatttctgaaagaaagattgctattagctttatacatgtatatatatatacacacatgtgtgtctgtgaatatatataataatgaattataagtagaatttgttttagtttattaataactaaccagctgttagactaataatatgcctccctggatgcttctcatgttaggcgtattttttcttttaattagttcttttttttttgaataataatttcatttccttttctctctttaaccaaaaaaaaaaacaaaaaaagaac

SEQ ID NO: 211642 - DNA, 566 bp, Cannabis indica
attcaagagcaatcacagctctttaacactcgagaaacacccctgagaaacagtcacagtttctctaattctacccgagtacatccactattcataaccccttcaagaacaaggttttacagcttagaaacctaaacaatctctctctaaattctctctcttattctcttactcaaaagtgaaaatattagactatatatagttgtaacttgcaccagaaaaaataggtacaataccaactacctaactaacataacagaaagttagttaagttagttggtgtaggttagatggtttatatgttggtttagaggatcaacttccacataatcggttatatctatgtattatgtatgtatctattgttttaatttaaatttaattagacttaatattcattgaataggatcaaatctattcaatattttacatctcatatttattaaaaataaaatctaaatctgaatccgatcataattagatttttaatgttttgacaatcaaattgtaattagtataagttaattgtgatggatcgatttattatattttatcctaaaaaaaaa

SEQ ID NO: 211643 - DNA, 510 bp, Cannabis indica
caacggggtttgcgttaaggtgatctgttatcgccttacttctttattttatgtgttgaaggcttctctagtttgttgtgaagtaatcagcaaagtggtttgctcacggtttgtaagattgctcgaggtgcaccagtcatttctcatatgctttttgcagacagtagttatatctattgtaaaactactgaggaagaagcacacaatgttaaggagcttttgcacacttatgaagtggcttcgggtcaaagaattaattttgctaagtcctccgtgttcttcagcaacaatacaaattgtgatcttcgggatgttatttgtgcttcattggaaatctataaagttgatgaaaatgggtactatctgggccttccatgttcggttgggcggaacaagaatgttatcctcgggttttctaaggacaggcttcgtaagaggattcaaggttggagggtcgtttattgtctcgtgcgggaaggagatcttattgaaatctgtagctcaagcctt

SEQ ID NO: 211644 - DNA, 924 bp, Cannabis indica
taaatgacattacataaactaatcggacggtactcagctacaatcgaaggtctctccactttaggaattaatgcaatatagtctcattcaagcaattgagatcagctccatcattcaatatattaagacacacacgaatcacctctgtgttgaccgaactccagaatttttggtagaaaagcgccggtagaccatcctcccccagagcttttgtgggattcatatccttgattgcccgaaccacatgatcctcagtaaaaggctccaataattgttcattcatctcctcagttactttcggcctcaccacactaagaacttcatcaacaacccccgtatccacttcggaagccaaaaataaattttgaaaatagctctcaataagttgcatcaccacaggcatctcggtttgccaaacccccatagaatccatcatccctcttatttcattctttttacgtcttgccgaggctttatggtgaaagtacttcgtatttttatcaccccatttcaaccacaaagctcgactcctttggcgccaatactgttcatccttctccatcaaagcattcaattgcttctcagctttcttaatctcgggccaaatttctggttgttgacacaaggaaagtttggtcagatgctttttggcctttgtgacccttctatttaaatccttcttcttcttcttattccaatcgtgaagaagcttcccaagccgactggtttttccatgaaaagccccagctgaagtacatcgctccccactcttccaactattgtccacaattgctttacattcctcctcctcataccatgcctcctcaaaaactgaaaccacgtattctgtttagatttcctacactgcacgacttcgtcttgaacaagaatatcaacaactagctcgatgatccgactcccacc

SEQ ID NO: 211645 - DNA, 514 bp, Cannabis indica
ttttttttttttttaccatgaactttaagaaatctttattgaaatacactatttaccgatcatttttatttattttagtatttaaaatatttttttaatagttatgtgtgttataataattttaaatattctataaaattataagaaaattttttaaaaaaattagaacgctgaaaacaaaattcaaacaatgtgttgcacgcgtgaatattttattttacacccgtgtaaaatagacggtttgaatattgtttttcatattgtaaattattttaaatttgttaaattttataagatatcttaaataatcataacaaacacgaatataaaaaaaaaatagattaagaaatttttttagatgccgaaacaagtagaaggtgcatcagtgtatttttttttaaggggacacatagtagaagcatctatttttatttattattattagaaaaatcttagatgtacccttgttaagattttttgtaatattttgaaaattttggtaaaatttaatacc

SEQ ID NO: 211646 - DNA, 703 bp, Cannabis indica
caacttatcaatcctctaaccaagcaaacaagtataacacattccaaatagtcacatcctatcaaataaaaataaattataatttaaatattatgacaaaaaaattaaaataaaaaattatatgaaattttcttagaaaaaaaataaaaatatatatacatgagttagaaaaaattatgaaaataaaatcaaaataagtattgaaattaacataaaataatgtgaggaatttttttttttaaaaataaaatagagtaaattttaaaaattatttaagtttatatttttttttaataatagggtgtatttatcatttatggggtgcaaatagaactcccctttgacatagccccattcacttgcccaccttcccatgtaactcaaaactaacaccaaagtaaaaatcttccaataactagactagagcacctacgtattaggctatttattattacattgaaaaaatgagtacacaaagcaagaaaatcttgtactcgttagggataaaatgcacacaagcagaaacttatagagtttgggagcaggaatttaaaggcacaaaaatgtaccaagttgtttcaaaactaagagctcttaaaccagtccttaaaaatataaatagatctggattttttagacattcagggggcaggatattaaagaacaacgggagcttaaagagtgttaagaaaaacgcaaagct

SEQ ID NO: 211647 - DNA, 568 bp, Cannabis indica
atgtagtggtcacgtatattatatacattttacattctcttcgtcccctgcattttctccttcttcctcactcctactagcagtaactatctcaataaagctcttaaggtcgctaaatgaatcaaacattttaactatgaaaaattaattgatgaacatcattgttgctcacgaccacgatggaccaagaccgttcccaaaataattcttcaatctattgacgccatctttgaatccagaatttcatacttggcaatgcttcaattgattgcttataagttgtttgtaggtaggaatggtcatttgggccattttacaggttggggctcggcccccagcccgacaggacgactttgggccaattgattcgggattttatcgagcccacagcccagccaagtacatattgtttcaggtcaggtttgtaaatatactcactcaaattgtcacttgcaagacaactgagagatctgagaagctcttgctgagacctaccagtcggcatcaatggctcatgtatctaaactacaaatattattgcagaatctcaagaaagttggactctcta

SEQ ID NO: 211648 - DNA, 721 bp, Cannabis indica
gatctaggatcaacaagtgatattgaattgaatagatattacggtaaattttatatatctaatcaaagttcaatatcggtcccttccgatgtatactccatacatccgatgctggtaaactttgccaatgccctggaaaggacataacacttatccaaggtgtaagaatacctatcgctgattatcatgtcagtctaaatccagtgaactgacaaatcagggaataaactttcgaacatataattaagattatattccactgtgctgacaacactataatcattaacaaattcatatgttctggacttaaatagaattcatacattatgtacatataatcatgaaataaatcatgtgaaccatgcaacataaaatgttatttctgatctttattaataagtaaatctgattatattgaaatgggttttatttagggcacaaaacccaacactttttgttgctgcactaagttattatagagttttgcagctctaaatttcccaaacataccagcagcagctatatcccctctacaaaaggtttggcgaagtctacaaagcttcctccaataccagcttgtgtcttgtcttaatgtgtaattccaaaaatcagcgtcctttaagtaaatagaattgacccatttcacccataacaagtcatgcttctccattattgcccaaatgtactttgccaaaactgacctgttccattgagctccatc

SEQ ID NO: 211649 - DNA, 888 bp, Cannabis indica
aattatatattttgaacactattttctacactttaactagaatgtataacttaactacaatgtatatatacaaatagtcatggttctattcttagttaaactataaaatcgtataattatataatttttttttatatatgtatgtaaattatacatttttgaatgttattttcttagtttctaatatactgaattgttctatattttgaatgttattttcttagtttctaattttttatttttaatgttatcatttttgttttaatttttttttttgaaagaattgttttaattttatttaaatgatcactaaattagttttttctttaatttattattattaggattactattaatctaatagtctaaggttttaagtgtctgtgataaattataatttttaatattgttaaaactatttttgattgtgataaagaataaatactatgttaaatgaattatatatatatatgcttcattaacttattacctaaattaatctattttcattacattcaaaactttatctaagttaaataaattgtatgcttcataaatttattgctcaattaaaagagttcattgttgagcacttcactttgattacttgttgctttagcattatctgcaatattaataatttgattggaaaattgaaataacattcgttattagtaattaataataattgttggctacttctattgtagtatcacattttatttattttcttaattttgtcaaattttttctaagaaaaagtaaaacaatttcctttttattattacttaattttaaataatagagtaaatataatttttttgagatccatctatacttacttttatattaaaataattaaaagtataaaaataaaattaattaata

SEQ ID NO: 211650 - DNA, 583 bp, Cannabis indica
ataagagaattaaggagataataaataatgtgagaaattttaaaataccaaattataataaaataggttaaaagtaataattttttaataaaaaactcaaaacaacgtttgaaaaattcaattttaattcttttattataatattaatattaatatttaaaacactgttttagtaaaatatataactaactaaaaattaaaagtttcataaaataacaatatatattatgaaataatatttcattaaaaagagtaataaaataatttaaaagatttaatttagaataattaacaaatcatttttatttattttggtaattatatattttataattcttttaatatatatttacatatttataaatataataaaaaaatcaccaacattatcaaatttaatatatgtatataaaaaaattaataaactatttgaagaaaagaaaaaaaataaaaaataaaataaaaataaatttatgattttaaaatatattttttagtttttgattttattttaaaaatttttaatgaaaattattatttagaccgataaaaattgacatgtggtactttatttgagtttaac

SEQ ID NO: 211651 - DNA, 980 bp, Cannabis indica
gcaagaaaaaaatttatccctaaaagtgaacattagggccaacttttaagtttctagggacggcacttttatttgaaatcaatatttgagatctaaaatacttttaggagcaacttatacttttttagaggcaatttatggcccctattgggggcaatataggtctcctctaatagtttttttaatttttttgaaattaattaatttacattaaaatattaaattaaaactcataaaaaaataattaaaatatttaaatttattaaattatagcaaactaaattaaatcttacattgttcatattacaataatattaataaatatttaaactacaattatgatataattattgaaattctaaattcatactagtatcctccatatccttcccttccttttaatgttgcagtgcttgttgtggcatggacaacatctctaccatcaaccacaaatacatgtacatatatatagtaagtacttaataaattgataaaatgtgaggttatgtggttgataagagcctcttaggctctacaattgttaatttctccatagttagaagatgttattacttggtaattttagtatttttcatcatgtttggaataatttgagtttttgaagaaactaattcttatgagtaaaagtaatagattttttattttttatgctaggtgatgttagtggatggaatgatgtgccaaaacatatttttctagaatttcgaaagtccatgaagagctaaaacccgtgagttgtgttgtagggaaggttgaggcttgccacagctagcaaaaagaaaaaaaaaagatatggtgtcaggatttgtcgccgcgaccacagaatggctctccgcggcgaggaccttgtcaccgcgacgaggctacccgtggctacggcggggggaaaaatttgggcagttttgaattttttatctctttttttttaaaaggagatatctttttttagtgagatattt

SEQ ID NO: 211652 - DNA, 666 bp, Cannabis indica
aatttataactacaatttttcatgaaaataataaaaatcaaccccgctatgtttataccttatgccaactccaatgacacgacaaaacttatcttatctcctatttgagtttgcacctcataaaataataataataatattttattattaaaaaaaaataaatttaaaaaatttttaaaaattactcttaatatatattttaaatttcttactcatattattttatgttaatttcaatacttattttgattgtgtttttatatcttttttttctaaattatgcatatatttttctattttataaaaaaaaaaaattatataattttttatattaattcttttattataatatttaaaaaataatttatttttatttaatagatatattttttaagaatgttaattagaaaaaaaatgaaaaaaaaacttaatacaattaaaattataaattttatataaaataaaattattaaaataaagtgtttttataaatttttgaggtgtaaataatttttttttaatttttctatagtgtcccactagcgaaaaaatattttaatgtggtttaattaagtgtccgacttataaggtgggacaaaaaaaatgtgtttacagtaactttaatatatattatttttgtttaatattaaattaatattcttatta

SEQ ID NO: 211653 - DNA, 885 bp, Cannabis indica
tattaaaaatataaaataatgataatacaaaagtaaatataaattttaataataaaataatactaattaagaaagtaatttaatgcaaatattaccatgctaactaaattttaataataaaatattaaaaatgacataataataaatataaaaatatatagcatttattgtgatgcaaatcttgcatcatattatattatgatccaaatttaaatcacttttgattatgtgagatatctatatcactatttggcacagcatagaagttaaattttgacaaagtgaattatatttttgtggagtaaaagggtgcattatgctttattataacaaaagataagacctaagttgttgaattttgattaagactaatatggtgatgatgtgggacatgaatattaatttgtttgagtaaaatgtgtgaaaacttgtaattattgtatatgaataaagcacgaaaatgactgaaaagaacatatatataagaaaaagaaaattcttgacttgctttaataataagattaaagaataaatataaagtgtttgaatattgcaaatacattttggaggccatattagggttaatttcgacatattattaattgtgttataattaatgtaattggaattttattaatttgatgatgttttcacgtatgcatgttgcatgcattacgatagattgatgttatatatatatatatagatatattgtcagttgtcagggctcatcgggtcgaaagaagggtgttcatccaatctaattcaattcgcactattttgctcatagtgcatccgatctgcactaagtgcggattttatcttttggattcaatccaatccgcacaatatggctcaaattaatccaatccaatccactccgca

SEQ ID NO: 211654 - DNA, 811 bp, Cannabis indica
gttcattcttggccaaaatccaccaccaccaactcttcttgcaggtaatgttcctaatcccgctcatcaacaatggcttcgttttgaccagtttttactgcactggctaatgaattccgtttctgaaaacatgcttggacatgttgtaaattgccaaacatcggctgagatctgggctaccttctcccaactgtttgctactcgatccagagctagacttttacagcttcgaaatctccttcagaccaccaagaagggctcacaatccattgaagaatacacactcaaaatgaaacaatatgcagattctctgtcagctgctggacaacccctctccgatgatgatcttgttctttacattcttggaggactcggttctgagtatgaagctgttgtagtgaatctcacatctcgaacagagcctctcactcttcaagaagtgcaatttatgcttcaaagtcaagagatgcgcatacaacaactcacttctgattcgcttgtcaatattcaagccaacatagcttccacaaacttaaataatggaggcagagggtcctataataatcgtggatttcgaggaccatacagaggaggaaggggcaattacaacaataaaggaggcagaggaaatcggcccatttgtcaattgtgtgggaaagctggacatgttgctgttaagtgctatcacagattcgatattgcattcactggacctcccccaaattcgaatcccccatcacagccctctacaaatgaaccacaagcctatctcactgaagcaggtccctcctccaccacaccagatctcact

SEQ ID NO: 211655 - DNA, 638 bp, Cannabis indica
ttatgaataaatttattaattatatcacttaaaaaacctatgttaaatagtttattattagtttaaattaattaatataattatttgaaagtggaaataaaatgaacataataaagtacgaaaataaataataaaaataagataaaattgaataatttaaaaattatgaaaataaaaagatattcatcacatgtatcaacaaaaagttgaaaattaccaatttatctcatgtaccaaactgaaaaggaaaataattatttatgaattacgtaagtctatattcaatattattattatttaggaaaacaaatatgatcaaaaaatgatgtttaacttatgagaatttacacttcaatggccagaaataatgaaatgatactttaatcaaatgctctttattgtcaaatatattttatatttatgatttgcatatataattggttaaatatgatataataaatatttaatattctatcagtttaataaaattctgtatgtttccgttcatcagttttatttttattaattcttctttaattgcattaattataattttgaatatataattaatattctatcagtttaataaaattctgtttttttccgttcatcagtttcttctttaattgcattaatta

SEQ ID NO: 211656 - DNA, 637 bp, Cannabis indica
gcacgacctaaggccgtggggaaaagtcatctagagcttgtgccgatttaccatctcaggagtagggacaggtctctttgagagggctgtgaaaaataaaaccttagtcagaaaacttagaatggaaagaaatggattaatctaactaagcctgttgaaaacaattacttacgaattgtgaggaagatggttgtgcccattggggagaggccagttgtccaaaagaagttatctttgaaagatattttgtttggcaagtccacaataattttaggctcgctagaatgagtaccgatatagtaaaaaacccctgcggcattcttcctcgctggaacagccttaatagagtagagatactcgatttccacaggcgtagggcattcccacttcagaattttatacaagaccttcaaactgacaaggattctgtaggagacgggatttagttggaatggggcaagtccaaggtggtttgcgtaatccttgaaataatcacggaggggaattatggtccctaccctgatatgctcaaggctctaggcacctataccattcgagccgctcatactggtctcgccactggctccttcagaggcctcacctgcaagacgcataggagggtaacaactaaactcac

SEQ ID NO: 211657 - DNA, 756 bp, Cannabis indica
atagcacttttagatcagattataattaaattttattttaacaaaaattcaattcatggtcctatttgtatcattttacaaaataaaaggtccattttgtcatttaacaaaacacagagtccaattaataacttttgcaaaacacaaggtccaaaatagtatttaccctttactatataattatttatttggtaaatttaaatttgttaatgtttgtaccaaaaagtcatagttttgtttctcttctttacatagtgttatgtaattttcatgtaataaagtctaaaaattagttgttaaaaataccataaaaatttatggtattataaaaactttgttatggcaaaatatatttttgcatgtatgtatataaatatccaaatatatgttaaaggaagaacatatatataaaatatttctaataggaaagcaaataagtaaaacaatataaaggtgacgttgggttatctaatcaagctgactactaaacccacaaccttaagcccgtctaggcccaaaagcaatatgtgaagtcagatatactagcaagcccaaggtccgatagtaggttgttatcaaatagtttatatgttggtgtgattaatcaaaaaaaaaaaaaaaacaaaacaaaacaaaatagtgtgtttgtcattgatcatgtttcactaatttgtgacgtttatagtatattcattagctactaagatttaatctatgatagactttggcaattaaataaaggagtttttttatttt

SEQ ID NO: 211658 - DNA, 792 bp, Cannabis indica
cttttgaaattgacaataaaagattgtgcgtggtaacataaaataaaataagacattgtaagataacatcaaatgaaattcttatcttgatttgatctctttaattataaaccgaagatagactagaacaattatgtttgtattatctcctagtgataattttattttttattttacatgggcacaatttttcttagacctgtttggagaggctgaatcagtaaggacttttaaatacgtgtttccaaattatccaagactttgtttggccacatagatagttgggcttgttgtataactatggtgtgatctattgcttatttgatattgcctttactatagattttggtacgtcgtctcctcacacgttcttgtaagttagtaaacttactaatagtctgcttacttatgagaattgaggggaggtgctactggaacttttacaaaaaaggaaacaatcataagaggatagattgtacaatatatattacaaacctgaatggaatttttacacttccacatttttgactttgttttgaactttccactttttatactatgtagaaatatggtgagcgatgaaaactggatgactttgaacaaacgttctacaaagttttgtaggggtgtggatgagtttattggagttgttcgaatgtaaataaattctgctagagttactcgatgccattgcatgagatgtatgaatgtgaacttcgagactcccgataatattagggtacattcatttgtgcatggcatccaaccatcgtacatgacctggtattttag

SEQ ID NO: 211659 - DNA, 529 bp, Cannabis indica
cttgctcaagctaatcaacctttaaaattctgggatgaagctttttaggacatctgtttacattcataattgacttctcacccatgtgctttccctaaagtctcccatcaaagtattgtttagcattactccaaattacgccaaactcaaagtttttggttgcatctgttttcccaacatcaaaccctacaacaagcataagcttgagttcaggtcttttccctgcacttccattgggtacaaaaggctataagtgtcttggacctctggtagattatgcatgttgagaaatgtcatatttgatgagtccacatttcccaatcacactacagatacatcactatctccatctcagtcatctgtgtcaaatacatctagtaaaattccaactgtcagttgcgctgacactgttgaatttttgttcccacatgacactaccaatcatccccatgttactatttgtactaacttttctgtttatgagattagtgaagaacaatttttacaggatccaagttttgatgcttct

SEQ ID NO: 211660 - DNA, 664 bp, Cannabis indica
aataagaatgttgatggcacaatatgtagtaatcgacttgccatcagctgtcaatgccatgataggttgactagccctgtacggtctaaaggcagtaacatccatctaccacctaagcctgaagttttgttgtacccaaaagtgagtgttttaatatttatgctcgcaagtgcacgaatcgtttcagaatataatgttcatgtaagtacgaggtcgaacccatgagagttgactaacatcaaaagatactattcaaataaaataagaatattctaacctagttccaaatatttgatatgattttgatttagaaaaaaaaaataaaataaaagacaagtagtaaaaagtttaagatagagatgagtgagtatgaaaatgattttcaaatgaggtgtgtaaaataagatcattaacatattagaatccacaaaatgcaagttcaatagtatttataagtatattgatttccaagttcatatatagttgaaataaatcatactatatttttcaaaatatatttttattttaagcacaaattattttcaaaaaggtaggatttttcttcacttacaaaatgcataatttttaagcattaaatgtgttacaatttattgaaactacacaaaattaaaaaaactatatttaggcaaaatatgatacttat

SEQ ID NO: 211661 - DNA, 659 bp, Cannabis indica
attgatgctactgttggtacacaaccatctctcacttggagatcgattgtttaggggaaaggaattgcatcttaaaggattaaaatggagaataggttcgggtgctgttgttttctgcaattcacaaccttggatcccaggcccctcgaattttaaacacctgtattttttggtaatgatcttaatatcaaagttgctaaatttattactgatatgagacaatgggatgttcaaaaactccaagaacatttctgtcaacctgatgtggatagaattatttctatagcattgagtttgtttccttgtgatgatgttctatcatggcattacactacatctggtttttaaatggttaagagtggttataaattggcctcataagaacctgattcccctctcccaagcagcactcatacattagaaacatggtggcagtccttctgggctttaaaattgccttctaaaattcgaatttttgcttggcatgctttccatgaagctctacctgctgctgcaactctacaacatcgacacatttcagcatctccttaatgtcctctatgtcagctaagtttggagaccactaaccatgcacttttctggtgtactcgtgataaacaagtctggaaaaattgagattcagcaatcaattggcaatt

SEQ ID NO: 211662 - DNA, 1046 bp, Cannabis indica
actgaaagttaacatggaaatattctaaattgtcaagaaattaaccatctaaagctttaaaactaacacgaatcgacaacacgaaaagtttaggaactcgtctcctaatccggttaaccagtttcacaccaagtaacccagaaatttcaaaaccccaaccaaatcgaatctaaacctcaccaaaccttcaagacctgcttaatataccccaataaacatatcccaagcaacagaataacataacatgctcaaaatcaaaattcactattaaagagccaagtttgagttcttaaactcaaagcttgctcaaataacacaaaaactaccaaaaccagctcaaatcaacataaataaccataatctaacttcaaaaaatattcagaaacaacaacaacaactacagaaccctaaaacccaaattcttgcataaatccttaacttaaagctcaagaaagcaaaaagggaagtgctaaggaactttaccttggattaatacacttggaacctgctgggatttcttgaattaagtagtaaaacaatcaaccctaggtgggttctatagggttcgaaagagagagagaacttagagagagagagagagagagctctttttctaattttggattttgtaaaataaatgaataaaatagattttatttaattaacaccagccattaaaatcagattactaatctattaaactctcactaaaagataaaaatccaaaaaggcaaaaagaccataatgtcgttgcctataccaaaagtcataaaatcacttaggggtaaattggtcaaatctaaaatctctactatccctgacattcccaatgtctaactatattgccccgctatactaaaaatattatgatgtcattctaatacccaaacgccgcgttccaatgttgtcgggcacaaaacatgcaaaaatatgaaattccatatgtgacatataaaatgccttctaaattcaaataaatctccgcaaactgacaattcataatgaacatgctagattcataagtaaaccctatttatctgctaatt

SEQ ID NO: 211663 - DNA, 656 bp, Cannabis indica
ttttaaactgtaaagccaaacaccctctaagtctctatatgtgtgtgccattatataaccattgtatacatattattaaagaacagattcacactatatatgttaagttctcaaccaaatcttttttcccaccctacccaaataaatctcattctatttctacacatgattggataacctttgatttatgaaatgaaatgaaaagttgtaataagttcttacaaatgagatgtggtgtgattttgatttcagtaggaagacaagaagagttgaaagaataactgatgttagtggggcaattgccaacaaccaaacaagttttggccatttcatgctctgcaatagtcaatttagatcaataaataattaaaaaaaattatctttatttcactaatatattgttgcacttgttgccaacatctagagatacttacaatatatctagtggtcaacataaacagtaggaagctatagcccattacaatagtttgccatgaccactgcaaataaataaaaaatcaagcatagttagttcttgataataaatgtgaagtaaaatagaaaatttaataagctacaaacaaatacatgttacaaaatgttgacttttaaaagttatatagatgaacggttaaaaaaatatatgtattatataa

SEQ ID NO: 211664 - DNA, 599 bp, Cannabis indica
atgtggtagcagataactcataccatctgatagccttgcatatatttgttggcatctcagtgcaactctatgtacacctcaccgatgccctgatatgctaatctgatggctatagatttgcctattctcatggcaaataatatgtataaacatatgcaaccattatactaatcttatctcgtttccgaattcaggtgtgccgcccaacctaagtggaatagctgctcgacgaattacagacccataaatcacattattcgtaaaactgatgagtgacacgctaaatcactttttggggacttaaacttgaaactaaaagtttccctattgataaataacatgacaataccctaaatattacaaaaacgagaaaaactagggttcccaaaactgccccaaccggtagaccggttttccaaccagaattccagttcagtggggtttcctggggaccaaccgtaatttcgattcctataggcccccctgaatcggtcgaccggttcagtggaggaaaacttcaaaatttcactactctctcaaatcaaccccaaacttaaccaaaccttccagacttgctcaatataccccaaagaacataa

SEQ ID NO: 211665 - DNA, 702 bp, Cannabis indica
gatatttaagaattttacatatcatatttgggaaattttatttacacctcaaaaagttctaaaggcaccccattttgataatttttattttatataaaatttatatttttaattgcactaattttttttttttaacttgtttctttcaattcatattcttaaaaaataaacctatcaaacaaaaaataaagtgtatttttaatattatgacaaaaatattaaaataaaaaattatgtgaaatttttttacaaaaaaattaaaaaaaaaaaacacatgagttagaaaaaattatgaaaatgaaatcaaaataagtattgaaattaatataaaataatatgaagaaaaattttaaaaaaaatcaagagtaatttttaaaaattatttaagtttatatttttttaataatggagtatatttataagtctaacgggtgcaaatagaagtccccatcatattttaaggagcgttaattataattttttagtcaaccttcacgccactctaaaaaaataattttttggatggctttaaactgtcaggtaaagtattcccgtcgattttcataactgtcgcctatacgatgtcgcaaaatagaaaaaattgaccattttttcatttctaacggtttaaaaccgtcgcctatgatagggtataggcgacagttcttaatactatgggcgactaaatgtgacttttagtta

SEQ ID NO: 211666 - DNA, 628 bp, Cannabis indica
aaccttttataaaaagcttatttttctgaacttaattatcacttcgaaaagcccttcaaacttcaaaacaatcttcagccaaaggagattgaaattttttgaaaaaagttctcttgaaattttagagagaggagcttcaattaggaatggcaaacggggcgggtctgcctcgacctgccctgacccgacaaggcattgccccgccccgattgcctcgcaagcttaatcgggtctgacccgacccgacccaacagagttagatttgacccatttttttttttccaaaaaacactcaataatagtttcattacccaaaaaaaaaataataatttatatgtgttaaaagagaagtatactaaattaccacccactactactgcaaattatatgtacttgactttcaaataaagattaggacaatatatatgtatatatacgttctaggatttttttttttgttttgaatgagcacaactttgctcaaaatgaatcttataaactccaccacttaataacaataattatattgggttatagaaaagcaatatatatatatatatacgtgtagcatcaatttatataactttgtgtttatatatatcgatcggataaacttagtctgtaggtc

SEQ ID NO: 211667 - DNA, 592 bp, Cannabis indica
cttgatttgagtttttaaactcaagattggacctttaatggtgatgttttatttacaagaagcttgatgatggatttttcagttggcatacgttgtttatgacttatttaggtgttctagagcatttggtgaaatttgggttagaattcgttgacatatgagattttttgtgtttctgcagtaaaatacagcagaccatttttcagattcggtctattgattttggaagtcagagacccaaaaaacagcttgccgtttttaggaaacggtctgctattttttgtggtattttctagagaatctcattttcagcattttctcgatatatttagtgtattttcatgcagaaagtataataataggacaaaatcatatctctaataatttaatatataaaatttaaactataattgggaatattgtgctaacagtttgttaaatcttaaatattagagtattgctaattagcactttaaaatggctaatatcatacatgttactttataattagttaatggtttctcatcttatcttttaaatataaatcaaaatgtgtaagattttatattgaaatgcactatgtaccttaata

SEQ ID NO: 211668 - DNA, 550 bp, Cannabis indica
ttgagattttgagataaatgactacacttgaaattttttttgaggtaaaagatcgtactcgggatttttaaggtgaatgatcttatttggaatttaataaggtgaatgactttatttgggatttaataaggtgaatgacctcatttgagaatttgaggatttgtagttggagccaatctttacaattaggttgcttacgtatcctttgggaggaatcaaatcgaacgtagttcatataactttgtaagaaatgaattctttggagaaaatgagtttgtttttaataaaactaatatcacttaaatagatttagagatcatttgaattacaatactattttgatgggaattataaaatgattcaaattaattaggagattttgtatttttataaaagtaatttgaatattctattacgaaattaaatacccacaatatttgagaatgatatttggacaagaattatgactatattttttctattcattttgtatttttgtctagatattaaaatttttaatttgtactacatataattataatttttttac

SEQ ID NO: 211669 - DNA, 582 bp, Cannabis indica
tttaaaagctttctcgcattcttctgctcattcaaatctcttactacctcgtaaaattattttgggatcacatatatataattaccttagtattttttctcttcatagtgccttgccataaccttataatttattggaggaattcaagtactctctttagattttctttctactgccaatatgccattttgtttgtttatgccttcaaataaaaggttgaatggattgttattgttattatttgaattttaaataataattagtattttattttttaaaattttaggcagtgtttcttttaattttcttttatattattaatatattttttttataaaattttaaacagtaacttttatattttttttaattactattatagtttctacttttacaataatattttttttactatatgtgactatttattataattaataaaaataataatgtattatatttgaaaataaattaactaagtctacgtgcatataacttcaatctagtaatacatatacatataaaatttagtatatgaatgtttggaatattatctttcacctatttatttgaatttttttt

SEQ ID NO: 211670 - DNA, 711 bp, Cannabis indica
agttaatgtgtaataaaaaattggtagtttttaacttatctctttattttttattcaatccgtgtatttgtttactttatttagacattatatttattttctatttgctttttatttttaattgaataattattttttgcttattttgtatggcaataggtgcagtgaataaagtgagtatttaatcagtgatcttttgatgtttgatggaagactgacctacaaatttcaatttcgttagtggtaattaaatatgcttattgatctatacctaattttggatagtaatctttctcaaaatagtagctaaatatatctaacttttaaattgtgtttgagttaacgaaaaaaaaattgtttggatagtattatagattaatttaaaacctagtttggaatactaattaaatgagtagttaaatgtttgtgtttgtgttaatttttagatgtatttacatacatgataatggtagtatagctaaatctgacatgttgcttttaaaagttccaattatgaatatacagtagtagtagctagctacttagaattagtagtgaaatactcaatagttatttagtaattaattagtagctagctacatagtgatagttagtagctaaacacttaattgtatctaaatcttaaattgtattagtgtattagaatgcttatcagcgttaagttagaagctacatacgtgttatttattt

SEQ ID NO: 211671 - DNA, 960 bp, Cannabis indica
ttaaaataaaaaagtgagccacaaataacgtctattttaggcaccataaataaagtatctttaaattaaaaaacaaactatttgtaattatgtgatttttgcatgcaaatgcttaattaataaaattaaaagtaaaatgaaaaagaaggaagcacgtgtgggagggagggggtgaaatgaatagtatatttacaaaagtggtcaaaagtgataacggttaaaatatggaaaaccaaagcgcgtggaataaagaagagggagtgagcgcgtagggaagtttaagaaagaaagtgagaggtttgggtgagaaagtggggtcataacaacagggttggttcgttgaacgggacgccactcgctcgactacactctctagagcgtgcagagtgggtacacatactctaactcttattttttttactatttactttctattacaatcttttaattaattttcgtatataaaaaatatatgttgaattttttttcaatttttttaatagtggtattcgcttacaacattattcctgtaatttttttaaaaaaatttaaatagtttacaataatgtttggagttttttagcacgcgtggtaaattagaatatcagatgtaattataacaaatacatgtaatttcaggcatagaagttgactaagagattgtaattagtattcatctttttctttttgacttaaaccatcccaccaaattaatgtaaaatttgagaaatactaaacacacccatgatgctagggcactaaattggtacaaaatatatattaaaattgtgcaattattagagatggtctaacgctaccacaaagtaacaccctactaatgattaatgattttttttataataattataaaattaaaatatgtagaatctaataattaattacaatagtaataataaagattttatggttgtatccgaataaaataattttaattttttt

SEQ ID NO: 211672 - DNA, 500 bp, Cannabis indica
ttctctggctggcagattggtggtctgtaaggtgcttcacaaaagaccatctgcagcttatggctgtcaccctccatatggacctgccagacacacttctgcctggaggttctttgccaggtcaaagagttggctagattatgccacatgtaagtgtcatgtcaaatgtgcaaattttaaaatagcagaaacaatgacacatattaaaaaaatgactctacataaagacatttttaatacctctcctgtagcattatcctatatatattcatatataatactcattacacaacgatgtaacaatgttatgaattttctagtaggtaagtatgtagtcgattcaagtaatttctaaataattctatttagcaacaataataagaaaatatgttcaaatctattgacaacgaatataaataaataaaaattcaagttaacaatgattaaaatttagggtaattaattttaattgattctactttatatggcttagtgtaatt

SEQ ID NO: 211673 - DNA, 760 bp, Cannabis indica
ttaattgaagggcaaaacatgtataatatgatgaccaggccgacttaaaagaaaaaaggatgaaattttattccaataattaaattcccgaattggaggtttaaagaagggccacgaacctcgaaaatcccaaaatcttcaaacaagtaatttcgaataggtactaacaaaaataatgagagatcgatggaaacttgaggagtcttaaggccatgagtgcgcgtctaaatcaagaatagaaagccctaattttgcctaactcaaattgtcgaagaacaactgcaagaacccaaatttcaaagaaagcagttcaaaaatggtatgcatatatctaaagaaaaataaaaaaaaaaaaaaaaaacgaagaagaagaaagaagacttacgttttttaagctcgcaaatgtacttggatgggtccttcgaattaagcttcaagcagagggagtcttcaaagatttcaaagaaaaggaaatgtgctttggttatcgttgagaatgaaaatggctaaaagagtgtaaagaatttttaacccattatataggcggttagaggggtaattaagtaatttaaatttcaaattttgggttttccccctaaaaaacgtgtaaatcatcaaatgttggggagtacatacaataggcatgcgaaactcaataacatcgttgtgccaatcgagattcgaatttcatggcgtgacattaaatgtcccaaatatctgaagagacagtcaaatcttctctttttacatttagttcaca

SEQ ID NO: 211674 - DNA, 765 bp, Cannabis indica
aaaagtcagggccggccctgatagtgcatataagtgtcgtgtaaaatctatttaatcagtctcttttattgtctttgtattatttttacaattgagctatatataacttgatttatctttcattattgatatataaaatctcttacataacacgtagatattaacttaacatttaacggtgaggtacatacaaaaattaaacttagagattaatactgtcaaaaattaaacttaagtatttatttgtgactagaagttaataaatttaaatatttacactgtagactaccttaaaaaattaatatttagagaattgttattagaaaataataacaatgattagccaatgtaaaatttttatttattaagaaagttattgagctaactcaagctaacaaaaccaacttattaaaattgttcttactttattaagtgaatacatatatgatcagccaatatagaattttaatatgcccctcacgcacaatgtgtacaatgcaaaacaattgtgaactacaaatcaatattagggcatccaatattgtaaaactaagtttgttctcacataatattaagaaagttattaaatctaactcaacctaacaaaattaatgatctcaccttattttgtaagcctaataagcctacagtacactttttaattgttctactatttcaactatttttttggcatcattaggattaggagaatgtttagtttattttttatttaaaattgaaagttataattatttaagattatta

SEQ ID NO: 211675 - DNA, 439 bp, Cannabis indica
tactaatactgggaaataatttagatttttatattttttttaaggcaaatatcattttgaaccatgtgttttttaaaaattaacaattagactctctattttgttaaatgacaaaataaactctatatttttcaaaataatacaaataggatcctaaattgattttttgtcaaaataaaatttaataataatctaatctaaaagtattatgacagaattgtttacattttctatatctgttcgtattaagaactgtcttcaaattagttatattaaaacaaaattataaaaaattaagctcaaattctattttaaccattttgaaaaatacaaggtgtattttgtcatttaacaaagagtctaaaccctttaatatataatattttcgagtgaaacatatgacacaatgattccaaaaaaatgaggtttaagaaacaaa

SEQ ID NO: 211676 - DNA, 498 bp, Cannabis indica
aatagtatgctgagtgggcagggacaaaacactcctcatgcaagagtaaaaacaggatgcacaatgtcaaaaagcataggttcaatgaatagaatctgtatgaacaacttcagaagatggatgaaactgaggttgttttatgtgtggaatcagtattgagagactcaatggtagtagggaaaaaaatctgatatgtgaagtggtaaaaaattcactagacaaaaatagaaaaatgtgctcatgaaaaaacaacatctctagaacaaaatatgcgacttgtattgagatcaaggagcttataagctttcgtgcctacatgatatcctagaaagacacaagcagtagctctaggacagaacttggatcctagcagcccctagggtagacacataggcaagacacccaaaggttttaagatgactatagttgggaactttagagtttaaaatctcaaagggtgacttatgatttaaattgggagtaggtattctgttaatc

SEQ ID NO: 211677 - DNA, 603 bp, Cannabis indica
caatgccctggaaaggacataacacttatccaaggtgtaagaatacctatcgctgattatcatgccagtctaaatccagtgaactgacaaatcagggaattaaactttcgaacatataatcaagattatattccactgtgctgacaacactataatcattaacaaatacatatgttctggacttaatagaatttatacattaaatataatcatgaaataaatcatgtgaaccatgcaacataaaatgttatttctgatctttattaactagtaaatctgattatattgaaatgggttttatttagggcacaaaacccaacacttgcaagcacacatcattgaggttttggcaaaatcggaggcctcaggtagattactgaagtggtcaatagagttgagccaatttgacatcaggtacaaacctagatcagcaatcaagggacaagctcttgcagagttcatactcgaatttccaagtgacgaagtagccattattgtagaggagcgaattgatcttgacgtaccaaatggcaaaggatggacattgtatgtaggcggggcatctaacagcgaaggatcaggaggtggttgttaatgtagatt

SEQ ID NO: 211678 - DNA, 531 bp, Cannabis indica
aaactctaagagtattgtttatgttaattataaattatgcaatttttataatttttgctcgacgacaatgaaaaatgtgatggatggccattagagtcacatgtgtatgttcagaacctatttcttagcaagacaaacataaaagaatattttgagcgtcgggtttaggggaggttatggttattgaccatttacccctaagcctataggtttcttaaattggatgtaagggcattttgggtattttattttgaagtttaggaggctagtttgtagcttggcagctggccattaggtgtatttcagctttggtttattgagtaattagtgaaattagttatttaatagagaaagggaaaaaacccaatttttgctcctcctcccttccatttttgaacctagctcaaaccagcaacaacctgggatttttgtatgaatttgaggagttttaactgaaatcaagtggagtaactcaaaggtaagaatcctagaactcactcttttaagttttggttagtttttttttttttt

SEQ ID NO: 211679 - DNA, 826 bp, Cannabis indica
taatatatttgagatccaatagtcttactctaaacttataagaaatgcatatatgcatgtgtccctacttaaaagcctgctgcaataatattctaataaaaaagtattaatgtaactcatatagtttagttagattattataatgaccggcctagcgatcaatatatatgaaaatatgatcagtaaaaaaaaaaaaaaaaaaaaaattaggaccaaacatcaagatgattaatacgtatacattgtgcggatcctattcctacttattattttgatatataagattgtaattaaataattccaattgttttaaactttatatcttatatagaataataaaaggattatttgaaatattatttaagctaatgttgtatttcttacttgatggaattccaattggttcagtcgatctgaaaagctcgcggggtgaggtaaaagaagtattgagaaaaattaggctattgtagatatcatactaacaatctcatttttttactatttatttttcctctgtatgtaggtcttttatcctgaatgagttttcacagtgtcagtgagtgttctttattttcttatctactacttaattaatatatttagattttattaaagagaaaaaaaatctatcatttcaccttatattctgcatacgtatatggttaattttcacatattctaactgaaattaaaatatatagaactgggatatacagcaccaattttgataaaattcgttcccaacattattctaagtgataccgtaagggagaaattaaccaatgtcagaaaacgagtctatatcattggttattataaaataacc

SEQ ID NO: 211680 - DNA, 646 bp, Cannabis indica
ggtcggtcaccgtgggtcgactgaggttagggttgggatggggtgggttgagccgtgtgttgagagagaggcagatgagattagggatttcaaatgtgaggggtatttttgagaaattagaaatgtggtcatatatgaccaattttaataagtatgcatttagggataaaattttaggggattgtaagtatagaatttcaaatttccctttatgaatgtgtagtattagaaaaaattgagttattacgcttaattttttcatttaattaaaaaaaattctcatttttatattgtatggactaaaaaaattaagaaaaaaaaattcagcaaaaaaaaaaagttgaattttgacttatattttgtatataaatatatttttattgtaagagatattttttgatagtttttttaattaagtagctaaattatgcataaaaatttaaattttttcttttattattcgtcattagatcaaaatcaaatgatttaatatttttaaaattaatatttatatagttaaatttatttagtaatcattaatgggtaatatacattgagaatatatataaatgagaattgttaaaaggtaccactagtgactagcactctcatcggtgtcatacttagtgtaattaaatatcgggtc

SEQ ID NO: 211681 - DNA, 763 bp, Cannabis indica
caaattcacttgctatctgtgttttcaaagcaatgcgactttgagaagttcttagttggatcaaacattggggctgacagaatgtttgtgtggaaacagactatttatgtgttgtccaagctatatagagctctatttataagatttctttgtttggtaatataatcaatgattgtaaagttttaatttctgaacttggagatattattgtctgttttgttaaacgataagcgaataaggtggttcatagttttgctagagcctctttactctacccaggttgtagtttctgtttggagtccgttccaactaattagttactaatattagtaacagaagttgatggttaataaagttgattttctaatttaaaaaaaaaaaaaaaaacaaaaagacagagagagaattgagacaattatattggttgagtttataagtgttgagggactaagacttgctgtaactattttcttgttgttcttgagaatgatatctcttattctcattcaatgaagaatggtggtgtgttttcaaactagagtaggattaagttcacattaattctcgtatgttgatgtgtctacatctataagctatttacttttatctatgtgtttatattgttaatgaaactcactctgctgagttgtcatatggttaagattggtttgtttaggcttgtcagtttgtttctgttggttctgttattagttctaactgtctttgtaaccaacttctgtcaagtggattctatgtatatatt

SEQ ID NO: 211682 - DNA, 712 bp, Cannabis indica
atgtcaatctaaagaagaaggtggcatgggttttcgatctttcctccacttcaatcaagctctccttgctaaacaggcttggagaattttagaggatccccactctcttttggcccgagttctaaaagctcgctatttcaaaaatggcgatttccttaacgcttcaaagggcactcttccgtctcttacatggcagagtatatgtgatggccgaaaccttcttgtaaaaggacttcgttggaagattagtattggaaataaggttaaatgcgctacggatccttggttaccgggtaacactactttcctcccatatacctatcaagctgatcctctctttactgtccaacactatatcaccagtgaccgccaatgggatataaatcttctccaacagcactttggtcaaatcgacattgatcgcattctttctatttcgattagccctaatccaagagaagatagattgatttggcatcactctaaaactggtacatatacggtaaagacaggatatcacttggctgagagtattgataaaataaatgattcatctacatcctcttctaatagcacttggtggaagcgtctgtgggcgttaaagctccctaaaaaagtaaaaattttgcttggagagtgattaatgatgctttgcctactgctgtaaatctcttgcacaggaaagttactcaatctaatgcttgttcattat

SEQ ID NO: 211683 - DNA, 1519 bp, Cannabis indica
accagtaaggctgaataataaggcttccctaaaggaaattagggaattattgagactcgagaaagttcgatacagactttggcataattctagacatggaatgattgctagtgtgactccatgataacacaagtgcagttgccaaatagtaaagaatcctataccctaagaggaggaaaatatatagatggggaattcgcaaaatcatgaatttattaactaagaaaaatgtgatggtggagaaggttgatatcgaatacaacctatcagatactattacatagtttatgccaaatactgtatttgattaggacataaagtatatgagattaaattgaaatgcacttttagttttatattagtgcaagtgggagttttttgagattttatgccctaaataaaacccaattttattataatcttattcactttcaataaagattagaaatcatatcttgaccttgtcatatgctttgttcacatattttatacatgattatatgtttaatatataagttttattaaatcccgagcaaatcgttattcaaaattatagtgatatcatcacagtagaaagtatgattatatgtttcaaattatttagttccacgatttatcaattcactagatttacactgacatgataatcaatgatggggtttacttacacttggataagtggaatgtcttttccaaggcatcagtaaagtaaactagcatcggatgtgtcgactatgcaccggactggacctatattcacaatggaaaagatacaataaactaaccgttatattttttctatatattttttctaagtcaatatcacttagttgatcataaatcatttgatctcaatcctgagatggttaagctctagcttaatatattgcacgagttctttgaattgcttgtgatagcttatatgtaggcataatacttacatcttggcaactcggtagagtaattgagtaggagtgttaactatagatatggacatgtatagcttatatgcctattagaagtgaaatgatggtttccttagagcttagcttaacgtgataaatgatagagtgctcattttgataattatattagtttcctataatatcatttacatgtagctaagtgttttaaggataaaatacattgaacgataaaacggtaattttatccctactcaatgtgaaccgtctatagaggatcaatgattgttgtgattgaaataatggataattgatagcatatctataattggtatatagagtgtaccatgtaattaggagtacaattccaaatctatagtggagtcgagagaaattaataagataggaaatttactcgataagttttggatctacttattaagagatttcttacatagccccatggtccccacattttttgggataatatcatcttgtagactcaattaatcaatttaataagttagttagaatttgaaaatagactatatcttatttaggatttttttaccaagttagggcaattatgagaaaaa

SEQ ID NO: 211684 - DNA, 847 bp, Cannabis indica
tcagggttaccaccgtcggtcccgttactgatattgccactagcaggttgattgatgtcgtggttgcatcctttgctatctactcctttgttacatgctggtcaacctcctcagcaattaaggctagctctaccacttttttgtacaaagtgtcatgagtaatggtaatcttcaagtcctgactgattatggcattcagtcctctcacatatttttgtttttagcatttccaaccccagcattatcccccagattctgcggtgccagtggatttgtctggtctgcaccaagctacacgctcaccctgtggtctaggtgattgcggagggtccatttttacaaatatccctgtaatcaactaccatagttagttaagcaccaataccacacttatgcacttgtcgccttaaaccctaactaaactattcattccaattaaataacatttatcatataacattctaagcatggcatcataaatcacataatactctagaagctcgcatattgcctaaaatggaaagcggtaaataaatgatcatacaagtagtaaaggatttactctcaacacttactgcaccatgagtcgagcttgtctgtggcaatgattgtacatgttcggccgatctacaggaggtttaaaaaccttggcactctaatacaaaactgtaacgccctaacaaatacacatactacccaaggtgattaagaaaccctaatcccctaaacgggattactagaaagataagcacgggtaatttaaacgttaatagaaaacaaaatgaaaataaaacatataataaacttaactttgcaatcaaaaattacatgtcttgggatcccaaaa

SEQ ID NO: 211685 - DNA, 516 bp, Cannabis indica
tcaacatattaagtttatctttatagtatccaaagtgctctttgttccatttagctaagctttttcttgtctaaacaatcttagaaataagttgaaaacttttaactccctgaactttaaatattccatgtctcccatattattttactacaatctggatcccgggtccaagcatcaaggaagagaaacggaacatggaaactctctctatcgaacaacaaattaagaacaacaggggcatgttcagaatcctttatcgcaagagagaaaacaccagacttggaaaatgccacccacccattctagatcacaaatcacacgatccaatctgtcacgaatcaaatttccaaagtctcaaccattcgtccaagtataaaaagttccaacacaacctaaatcgacaccaccagtcaaagaaataaaatccttaagacctttagcatcagcctcttccacaaagttacctccaaacttttcagattgatctaccaccatattcaaatctccaagaactat

SEQ ID NO: 211686 - DNA, 528 bp, Cannabis indica
tttaaattgtggcatatagtcttgattatagttgacggttttaaatagtcaagaattcttttatactaatatttttctactatcgcctattctacccagtaatcgcgatgctcgtataagtgacaattttatagaagcctattctactcagtactcgcgatgctcatataagtaacgattttatagaccgttaggaattctttacctcacggtgtaaaactttcaaaaaatttggattttttaatagtgattgtttgcataatattattatgtacctttattattttaacttgcatcagtttttctttccaaaaacaaaaaaacaaaaaacttattacaattatatctatatatataagtaatgataataaaaaaaaaaatgggaatttaaatgtaagaatttatacaatattggctaaaatgtaaaaagatctcataattattttttattttagaaaaaagtaaggagagctagtgtcccctttaagcattatgtaggtccgcaagtgtttatttattttttttttt

SEQ ID NO: 211687 - DNA, 625 bp, Cannabis indica
cacttttattctacttgggttgtagaatttttgcttgacatggaatagaacttgtgtgacatactctcttgaagcgaaatccttgatgatttttgcttggaaatgatctaggtaaattttctttggtccgattgagcctttcgagcttacctgaaaagttttgtccttagtttacccaaagttgagccttagcctatttcaaaattctcaccacttaattgagcataattttttatctttaactactttcattctcaatgtaccttattatgcaattagcttttaatcaagtttgggggggaatgaagtgttttaagtgggaaatattttgaaagtaagagattgaaaaaattgttatgtgaagtgtctttactatctaaaagaagaaagaagaaagaaaaaaaagaagaaacataaagtaagaaatgtgataattcttcttgaaaaaaatatgaacaatgaggtaggcacataaagaggaaaatataatcttacagtttctttgggataaaagtatggataattgtgggtgcttgttcgctatattttgcttatggtataatgtagcctaaatgactgctcatctacctgttttacctaaaccatgatattgtaaccgaaaaag

SEQ ID NO: 211688 - DNA, 787 bp, Cannabis indica
ttctgtgacaaccaagcagcactccacatatcagaaaatccaatctaccacgagcgcaccaaacacgtcgtgatagactgccaccttatccgtgaaaagatcaacactggtacaatcaaaacaaatcatgttccatcaaaatccaatatcgcagacatcatgacgaaacccctgtttccagcacacttctctgctcttatttccaagatgagtgtcaaaaaattttacactccatcttgaagggggctcttagaccgttattttctgtttctttctgttattttctgttatttttcactcattcaataaaatctctctgtttcttctctgcctttcttctaataaattcaagatcgatctacaatagactaaagctttaagatgatgggtgttattgcaataatattcaaatacaaaatgttggctaaccgtgcatgttggtagttcagacgtaaatgacaacaaatattacttaaatttgtactaattggagttgttgaaatattcctttcacattataataatatacacatttactaaatagtttataataataatataaaaatcaaaaggattatcttaaagggttatgagagaggatattatcttctctttcatgtattctggtatagtaacttgtaagccaatgtttttgatttgtaataacagtaaaaaacccgtgttatttttttaaaaaaaacttgttttctttatcggatagattccaaataaaataaataaataaaaaagataagtgtaaaaaaaaaaaaaaaaagagaagaaaagc

SEQ ID NO: 211689 - DNA, 607 bp, Cannabis indica
aaacacatagatttgttatagagcttcgtcccctgtgatagcagacaatgacctactctccttttagttgtattaatatcgagggttaatactattcagattgctataggtgggatctgatatagcacccttaaggatacaatgtatgaatcgggattggaaaatctcaagtgatgataatgcttatatgggtgtgtgagagaggaagtgaagaaaagaagagttatcagacttaggcttagagattggaggctagtctcaggcttaactgaacttaacttttctaggttagagttaaggcctttatataggaagcctaaaccctggattacaacttgaaaccctagatatttgtatatttaattagttaattacaaaagaccaaaataccactaaacttagatattattcagctattctattaggcttttagggcccaattcccagcccaaataaagttgtccatgtgtagaaatgcacagaaaaccctacaaagctcctcatggtcggccagacccatgtaaggagctggctggctggccaaggtgtactccagaggctggctagccatagcactggccaagggtggccagccagctcctgtgac

SEQ ID NO: 211690 - DNA, 555 bp, Cannabis indica
ataattaatgaattaatcacacaatggagtaagattttattttcttacagttgttgaatatttatcttctaaaatagtcattttagtacctatgtttttatgttttttgatatttaattttttagtcactaatttataattgtttactatgtaaaattatcttaaaaaagttataaataatttataatataaaaataatatttaaatattttgttacatgtctcttttttatataagtaattatttaaattttatttttgacacgttaaattattcaaatttttttaaaaaatatacaggtaattttaaattattatacaatatatttttatttttattttaaaaaaataactagaatatgtgtgatcataaaaataaattaattttattttaaatattatagaagtatatatttttactattgtttttatcaattaaataaacaaaaacaaagcataagcttaattgcttattgaaagaaaataaaaaaaatctttggatttccgaaaaaaggaatgtgaaaccaaagtaaagtagtagagcaagttgattcaa

SEQ ID NO: 211691 - DNA, 703 bp, Cannabis indica
aaaagtctgctccaaaacctcctaagaaagacatgaatccggccgatgagccctcgagcacgcagaaggccgctgatgcttttaagcctcgatgcccttctgatcctagaggcaaagtcgtgccaaagaggaaaagtactagagtacctaagaaaaggggtgagggaaccacctaagccattctgtcaaccaggacaaaaagatgactgtgggacactatgaggacagctggtccaccgtagacctctgacaatgattagacgccaagtacgagaagtacaaaagttaaaaggcaaggccacgttggggtgacctcaggaaccaagtaataaaatgaggggacgtgatcttcttgaaagtaacacaaagaggctggaagagcagatagctgctctaaccaaaatagttaaaaaaaatagaacggagccctcttggattcagaagatgaggactcagaaccatgtgtaagaaggattatgcagaccccacttttagaaaactttaaaatgccccatattgagttgtatgagggaaggaccgatccacgagcacactttgcaaaatacaacaaaatgatgcaagtggcccgagttagcagcgatgccaagtgtttatgtttttccctaacggtgactaaatctgtgaaagattggtggaaatgactggctccgtgatcgattaatagatggaaggacttatagac

SEQ ID NO: 211692 - DNA, 637 bp, Cannabis indica
cctgagtacttgagaattttatctaaccctttgggcgtggtccgcccagaaggccattcacttaagggcaaatgttcttttgtttcgtacttgatatggtcatctgacctggtactcctattggtagtattttcttaaatgttccccgttccaataccttggtaccagaacgagttacatttttcatcatacttacctaatttgtacgcccctaattctagaacttcgaccacttgatatggttcttccgaattaggtccgagcacacctgccgtactttctttggtgttcaaaaatactcttcttaggaccatatttcccacaaataattttcgtgctttcacttgtttgttgaaataccgagctactttttgttgatgggctatcagttttaattttgttgtggctcgcttctcttcaattttatcaagtgattctgccaggagtacatgattgtccttttggctatatgttaatcttttgtgggatggtggttcgagttctacaggcaggatagcttcatatccaaatgccatggcaaatggagtttgtccggttgttgttttctcagttgttcagttcgaccatagaactttagagagtttctccagccgatttcctttggcgtcctcaagtc

SEQ ID NO: 211693 - DNA, 628 bp, Cannabis indica
aatatattaaaatttaaagaaagctgtttagagttcaagtctacccttttgcataattttaaattatttatttttgattttattggattatagtttcacgtgtttactgtttaatatttttttttcggtgtcatacatatattagtgtaattaagtatcgagtcttatataaattaaaaaaaataatttttaataaatatcactaactaaacgtagggcgtcacctataaaaaatactgtacaccactaatactcaataacaatgctctttattatttttttggtccgtatttgcattttctttttttaaaataaaaattgtgtttaattttttatttttaaatgttggaacatcttttcacatcctttagaagagtgcagtaagaaattacttttttggttggcatttagcacgaagatttaagatattcatgacaacatacttaggacgcatttaaaaagtcactgtgtaattaaagacaataggcacgtggttttttccatcgatgtctagggttcaagtctacccttttgcataattttaaattatttatttttggttttatttgattatagtttcaacgtctctactgtttaatatttttttttgtgtcatacagatattagt

SEQ ID NO: 211694 - DNA, 952 bp, Cannabis indica
ctattgaaatgcccaatatttgataatggtatcaactttaaggttttgttttgttgttttggtaattgtgtaaacattgatatcttaatctttctaaaattggaattaatatttacaggtaaggagaatttattccttaagcatactaggcactttgaaatcttctctttctttataaatcaagtgaactggattttttttagagagaaatttggactgcttaaaaagaaaacaacaccatttattttgttttggatttgatttttttattacattaatatatatatagtattatttgagtaatattctttatttataaatcaataatatgtgaatattttaacatttatttttatttttatggtaggtatttatgtttaggacctccttaggtttaaaatttagtttttttttttttttttttgtgtaaatggatattttgcattttattaaatttttgtaatgttttcacaacttaacaaaaaaaatctttaatcattcttaccaaaaaaatatatattttcttttttcaaaaccgtatagcgcattttctctctcatcattatagcaaatcttctctaaaatactcacccaaaaaataaagaaatctcaaagccacaaaaatcagtggtgatgttagggagaaagtagatcatacctcttttaattgatgactttttatttttattttttgagcattggacactaacggtgtttagtgtcttctagatgtgtcattttacaattaaatactctttaaagtttattacattaaactatgtgaaacctgatatttaatcggaccaacaacaatattaatacataggagaacaataggcatcactggtaccttataacatttatctttatttttatactatttttttttttaaaataaaaaaaccattctactctttttttaaccattttacaaattttgctcatatcaaaa

SEQ ID NO: 211695 - DNA, 1668 bp, Cannabis indica
tagtctaatcaatactacttctcgaattttacattgaaatcataaacaattagttagtgatcaagcaattaaaagaaattaaatatgaatgaaataggtgcacatatgatatgtgaaagaactaaatcatattaaaagctacaataaattgtcaaagaatcaccattaacaaccctaataaaaattctagctactcatagtcattgtaaaaaattataacaactaattaagaacattgtaaaataaactagaagaaaaaactcgtaaaaaaaaaatattgaaagtctctagattcgcctctgcatctatttttcatctctcgaagttttgttatcaaaaagtgtcaaatgtcccatttaaatattgaaattagagtttaaaagtcttaattttggcctttagaccatagcgggccgcaacattgaccctccatggcgtgacccttgaaggttatttttgggcagcaagcttcttgatgcgatgactaataatattttggtcataactctttcaatattgctcgaaattagacgattcaagatattttgaaaagctgaaagaaagatctaaacttttattcataatattttttctcaaagtgaacgaatcatagttaaaaattagcttgcagcttcagacttaattttcgatcacaaacgaagattgttgaacattcaaaacttaaaatgtttcaccttattaaatcttagaactccaaattctatgataaatttatcatattcatctcattttcaattcatattgtgaatcttacaatttagacctgaaacaagtaaaaaataagcataattttacacaaaataaaataattaattgaaacacacctctaagatatttcataaaatgtacctaaaactagactatcataataattattgatctctttaattttttaccttttaatggaattattcatttttcttaataaaaagaaacaaataaaataattatgcaccaatatttaaaatccaatattattaatgctgtgtaatttagtgctaaaaaatatcaacctatttcttcttgaataagtaaaagtaagaagatgttcataaaaaaaaagtaaaactaagaagataaatacatatgtgtttttttgctaaggaatatataaataagtgttaattcatatatttgttagttactattttttaaatctcatttgatgtatattttgttttaggaaaaaaaactattttggagtttaaataactttaacatttctcttaaaattacacttctctattgaattttttttggattttttttttacactttaaaatagtctttttttttttttttatttttttttgttcatttttacttgaattcttacatagaaactacctattacaatgagcggaacaacttaaatacgcaaccaaaaatacgtatatcaatccactgtaaaattaaactgaaaaaattaactttagaaatactatgttagactatatatatatagtgtatgtaatatagcataatacaaaagaatatgaaatagcggaaaactaaaactgtaatctatatactataatatatgcaatgaaaggaatgactgtaccgtccagccattgtatctttgtagcttctaatccctgtcgatagcttcggtagttggtagttcggcgttcctcgctctctcac

SEQ ID NO: 211696 - DNA, 686 bp, Cannabis indica
gtaaaaattattgattcgattatttgttttattaaatgacaaatagaacttgtattttttaaaatagtactaaatagtattataaaatagttttttgttaaaataaaacttactaatagtctgatttaaaagtgttataataaaacttgttacatatttctgcatctattcgtgttatgaattattttggttataattaaaaaaaaaatattagaaaactgagatcatggttctatttaatccatttcaaaaaagatcaggtttattttgtcatataacaaaacagaaagtatattcaataacttttataaaacataaaattcaaaatagtattaattcgtataagaatcctataaaatagagtattaatataattagactaatttagcatttgtttttgttaaatgagacttcgggttttatattttacaaaatagatcaaagtgatatattgagctctaccaaaataactttctaagctcaattttggaataattttgtttttggtgatattaaaatgggaaatatcacttgactaaaattgacccaagtgtttcagagtgtgatctattttacaaaacagaaagattgattgcatattcaccaaaacactactattttcataaagtcttaatgatgattgaaattgtccttatttattgcctaggctaataagctatacttgg

SEQ ID NO: 211697 - DNA, 437 bp, Cannabis indica
gtattatatacatacttaattttcatattttttcgacggttgttttttagttgttatgaattattttttaatgtatttagagtaaggagaaattttccaagttaaagattatctctcgtgatattatggaagtccctatcgacaaaagagttattgaagtataatatttttttgtgttgtttttttttttttagttttattgttgttttgctaagttattttatgttattgttttaagtattggaatcttaaataaatagttatgtttggacttgaacaatagttgttttttttagctgttcaaaggaaaaaatcatggaatattttgtaacaatttccgtttaatagtataatataaatctacccaaaatctagtattttcataagaacttaagtggacatgtcctagctgaatagtattgtagcgccgaggttaa

SEQ ID NO: 211698 - DNA, 517 bp, Cannabis indica
attttttttttaacatattgtaaattgaataatattaagagatttttacactatttttaattttttaattcaggcgattttttttttaaaatattgtgtgttaagttttcatggttgttccacggttattttttaattgttttaatgatgttttaattgttttattttattattttataattattttatataaaaaataatatttttataaaagcttttgtgacaataacattgtaaacctaattcaatatttttataaaaactactaatattaattatttgaaagcaacataagatagtaagaacatacgctcctcttacgtagatagtaaagatggcaagtgatgatgaagaatcatgattcatgaatgagattattaaaaccgagtacttcataaatatcatatgtgcacaatacacacaaaaagaggcaattttaattgcttaccaacaaagaatctcatactttttgtttgagtgtagtgtagtgcaagccaaaaacagaaagaaaaaaaaa

SEQ ID NO: 211699 - DNA, 696 bp, Cannabis indica
caactaatttattattagattaaggatagttgaaagtaattaagaaagagaaggtgttaatgagccttagtatacgagtgacatgtattgatgtggaagactacaataattttgggtctctagagaatttggtagaatttttcttaaatcaaaattcagatcccttttacaatggatatgtcttccaatttataggaaaatacagatgagctttttggggacaaagacccttctactaaaatttaccctaaaggtcgcatggctgatttcctttcgtgaagagatcattctcttagtgggccggtgactcgtgcccaagatagggagtaggcgtgtttggaaaatacttgtccattgtggatgtgattgctagaggtgtgagctgattaagggtgtatgggaaaagtgcatgtcagaaaaggtagtggaggaaatcctgaagttcatatgctttatgggaaactcattttgtcgtcgatacagaagggaaccactacaatactttcccttgttatgtgctgcaaaagttgagaccacggatgatggaagggattcaagactctagaactttatagagcatcttttttagtgatctcttttaagtttgcctttggcattaacgtgggcttcttggacaataaattgctccaggaactagctccctttttactttgtgggataattatcattattttt

SEQ ID NO: 211700 - DNA, 722 bp, Cannabis indica
actcacttcctgagactatgttgctatcccaatttttgcacacctaatgtggcatgtctatgtggataatatcagtgccacgtggtagtacaactcaccaacgagaagattaagtcatctactcagtgccctagccaacgcgaggtcccatcacacaaacgagatgacgagtgataaactaaccaactcaaggaggttggtcgaccacccttggccgcccctatgaccaaccagcttctggacagcacaaggccggccagcctgcaccctataggtgtcaacaaaacccttaaggaaaccctgaagaagcaccttgaggaagcaaaaggcaactggcctgaattgctctcaaagttcctatggtcgcacaggactaccgagaaaatgaccactaggcaaactccattcgctctagcctatggctgtgaggtgatgttgcctgtagagctagtgccactgtctcacaggagcacaacctatgaccaagatacaaacgacatcctacttgcaaaatccattgacgaaatagaaggaaaaagagatcaagcaaacctaaagttgcaggcctaccagcaaaaggtcgcaaggcacttcaacaaaaaaagtcaaggacagaaaattcttcataggatacctagtgcttcgaagagtttttgtgaacaccaaaaatttagcagcaggagtgttgggacccaactgggaaggttcctatcaagttatag

SEQ ID NO: 211701 - DNA, 523 bp, Cannabis indica
aaaaaaaaaaaaaactaataagttaagggtcttgagttcgaactcataccctcttctttttggagtaaattgaaaaatgtattttttatttatcaattaactaaatctacctctaatttagatttaattgcaatatacctctttttatatgtactgtattcaaaatacactaacacaagagagtcacatggagaatatattaaagtgatagggacaaaattagtaaaaataatagactttaataaaaaaaagtaaaataaaagaggacataaaaaagatatagtctaatttcctccttcctttttcctatccctcttttaccattaagttaacctaagtgttatatattctgtagatagtattacgaaaaatatacttattttacaaccaccttttgatcaaaagtaaatggaaacacataataatttaaaatgctgtcaaacaacactagtaagtgtgacttatgtctttatatacttgatacataatagaaatgctataaccagggacagacacactaata

SEQ ID NO: 211702 - DNA, 624 bp, Cannabis indica
atttcgcacctcttgatgttcttgaccaatttgagccgatagtgatagagtaccatttccacacatggcaagtcaagtactcaatcatagtgcaaaagacggtggttaaccaaactgaaggagagacggatatccaagctcaaatcttgttattactctgcgacagaaaggaacaagggttagagatctgagcggaaggagtcatattattccgctaccatcaatgcaaggttttcaaaactcttatgtgtttaattttattattttaaagaattcatatttagggtgttaatcaaacatacatgttagtaaatccagatcctagtaaaataagttccaacaattgacctcagagccatggtaatgatttactttcatgaaaatatagatttaaaatgatgatttattgatttggatgtgttcatgttggtttatgtgtgatttgatgaatgtatgtgaattacaaaatttttccatgaaaataattttgttttcgttctgaaaataatttatttggatttcttttgcaggtagagcgcaactgattcactcggtgatgcttggtattcggaattattggatgactatcttcattctcccccctaaggtaacgacagctattga

SEQ ID NO: 211703 - DNA, 1090 bp, Cannabis indica
tttatttatgttctcaaacacacacacacacacttttacatggattctctcccattaaatatacctttttgcccatctactcagacacactagagagagataagagaagagagagtcactctgaagtgagactagagactctgcaaaccacaaaaatgtccactaaagaagaaactcaagcttcacttcccacccaaaggtaacaactttcctatctttctcttttccttaacttagattacttttgttttgtttgtttgactataatttgtttcaaacatcaatcccacccttagataatatatagcatatgatttgtttattgttttgagatccacttggattgttctgatcccaattctgggttttccaaagttttgtcttatatgtattccaaaaacaaaatttccaattgggtttgattagctgagtatcaaaaggtctacttctgacccaaaatatatttattaatatctgtgcttaatttgattgcaaaacaaaacagtgttgatctgttgttcaagtttcatttttgttttataaagctccaatttctaatgttttgtttaattttgctttatgttagttattacagtggtatcaagcttggatttctgagtttttataatgtataacttataataagtatttagggaatttttccaaaaaagttcttaactttacaaattctggtattattgatattttaagtcataaaacttatcctgaaaatctgttttggaatccaattgagttgggaattgatggttatgaaaagccaagaaaaatgcttacaagatattgatatcgatattgacttgagcacaagttagaaccattcattaagatcaaaaattatgcaggtggagttttgagtaggggtagtggatcccactcacaattcaatggattgtacttaatttgctaaaaatgacaaaaaccaaatggataccaaatttgtttgctgtgaaaattttatatgacaggacgaaaaaagccaaacgaaaacagtccaattagttttgacttgttgtttgttattacaagattcgaagttggaatcttgcatacagatttgtttaactcaatt

SEQ ID NO: 211704 - DNA, 819 bp, Cannabis indica
cctcgtccaagtttgtggttatagttattcattgctcgtacatcttacattttctttcttaatgcaagccattcatctgaaattctagattcaacaaatttttgccaatcctcatctggtatcaatttctcatacccttttggtttcctaggaggaaactcatctggtctctcttttatgcctttcagaacccaatttttggttagataagtcttccaatttctaaagcgcgccgcggcgtgactcaacattttggttttatggttagggtctaactcaaatattttctacaagattaaaaaagtaatcatgtaagaaaaagaaaaatacaagtagcaaacacttaaattaattaatcaaataatacctacattcatgacctcccatatctctctttttttggcagcggggacttctttccaacaattgcagagaattgacacaaacctgcgtaccgtagaccctaacatcgaagacatgtctactcgaccaataccagttggttgaccgtagacattgtaatcaacgaaaatacgccttccttcacttctagattggattaatctaggcaatagagaaggtcccctagaaggtttctgactgctgttctcttctccaaccccatccttatcttctaaatcatcctccaaatcatcctctaaatcatccacatcatcaccacaaggatcatacaatcatcctccaagtcttttcttgccttaattccatctttactctttccaggaatattcaataaagttccaatcaaactatctcaaacatttttctctatgttcataacatctaaattatgacgta

SEQ ID NO: 211705 - DNA, 1286 bp, Cannabis indica
taggcatgttatggcttttatatatatgaataacttttagggtccttttggagacttcgaaaggagcaagccaatcaataaattaaattaattaatgatatttatttatatatatatgagtgctacactctattaaaataagtatattggtgtaatttttttactgttttataaaaaaaatttagtactattttaagatattttataaaaatttttgaaaaaattttagaaataattttataaatataaaattttaatgtttcaaactatctatttcacacgcatataaaataaaaaatttacatctgcaatagattttttgagcttgttaaatttttttgaatttctcaaacttttgtagaatgttttaattaactataacgtatatgatcatacaaaaaaaatcagagtatttttaataaaaaaaaatacatcaatacacctctattagttttgaattctaaaatttaatttttcaatatattaataaggatatgtaattagtgtaatttggtcatcatgacatggctatagtctatagatctaactttgtaccatttgatgtacggaaactttttgaaaagtaaccccactttcactatttcttttttcatttttccaaaaaaaaaaaaaattttcttttcataaggaggaccattatttatatttattaccaccataaatcaatgtggaccaacattttttatttatttattacatgtatggaacccactaaattaaccaaaccaacccacctaattaaaataaattctcattattttatagtataataattgtagaacttttattcgaatgtgatgttatgttcgtgaaccatgagaattaagaaaaaattaaaaactaattattaaactattaaattaaagtactaattaatctaattagtacaaagtagcatcaaaattaattaactaataattaaataaatagcttatatataaatatatataagcgatcaaattttgatatcatttatatatattttagaagaattcagtcaaagtcaagacaagtttaattaattatacaaatcaagacaacatctttattgcttggtgctcttgatgttaacctttgtcaaagtttaagagtcaagaaagtatatataatctttgatttttaaacaaaattacaaaaaatataaataaaaaagtatatgtatacgtatatgtaaatataataatttatatatttatatgtcgacattctcaaccttcaattctttatggactagtggtagtgatcttgatcaataaccatttgaa

SEQ ID NO: 211706 - DNA, 720 bp, Cannabis indica
taatttagactataaaatttttaaacttgaattataaataatatacttttatatttttaaattttaattatttgaatactaaaaactaataatagttaaaattcgttgttttaccaaaaataatttatttctagaataaaaattattaaaacattactataataacagtaacaagttaattacttgctcacacaaaaacactactttgcaaccacaaacaattgcataaataaataatgtagaaagtaaaaattcacataagagaattataggttgtattagttttctctcgaatactattagacaacgaggcacacccagagaaaaatcaattagtagagtataaaagattacaaatgcaattgacttatacgaagtttaaaatatctctctatgtatgctcactttcttttgaaatgagacttttacaagtcttctcccaaagacaacctttagttcgaagctgctcgtgaatctattctatgaatagtacatgagcattataaatgttgcctcaaatttttcccaaaatacgtggcagtggccgagggtgacacgtggacctaaaaaaggttccattcacgaaaatcaattaagtcttgagcaggaaactgcatctcatggagtgagcctcccggaggagagcataaggcacgcccttactctctgggaggctagaactgtaacagggcatctctgggaaggaaagagattcttcga

SEQ ID NO: 211707 - DNA, 872 bp, Cannabis indica
ggtttgagaaactctctaatgttcttcttcagtatggtttccacttttccaagtcagatccttccttgtttatcaaagccaactccaattgctgcatctatgttcttgtgtatgtggatgatatccttgttatgggctccaatgacaacttagtgaatgatctggtgacagatctcagcaacacctttgctttaaaggatcttggtcttgttgattattttttggggattcaagtttcaagaactgcagcaggtatccatctctctaaccaagtaccttcaagatctcttgaccaaggctggaatgcaaaatgtcaatccccagtccactcccatgaacagtggtctcaagatgtctggttatggcagtgaaccagcacctgatatcaccctttacagatccattgtaggtgctcttcagtatgctacaatcacaaggcctgagctttcttattgtgtcaacaaggtctgtcaatatatgcatgctcctctcctttctcactggataacagtaaagaggatcctgagatatattgcaggcactcttgactttggcctttatcttaaacctgctccagattttgccttggaagtgttttgtgatgctgattgggcatcagacttagatgatagaaagtctaccactgattattgtgtgtattttggaggtaatctaattgcttcgaagtcacaaaagcaggtcactatatcaagatcttcaacagaggctgagtttcaaagccttgctagtgctgtgactgaggttgtatggatacaatccttactgcaagagcttcacattcgtattcctgcttctccttcagtgtggtgtgataaccaaagcactgttctcttggctgccaatcctgtgtt

SEQ ID NO: 211708 - DNA, 740 bp, Cannabis indica
aataataataaaaaaaatctacatgatcaataaataactaaaaaatactaaaaaataactgaatatgaaataaatttaataatttaattttaatattgaaattttatcttcaaaattgttgaatgaagggtatgaatggaaaaatttaaggaacaaaaaatatatgattggaagaaaaaatcaaaataataacattaaaagtaaacttttaagaattcacaggttaaaattataaataaaattattgatgaagatcctaaaaagaattaaatcaatatgaacatttcatggaattaacaacatctagaattaaccaaaaaatatgaatccaatttaaaaaaacaaagattaagagatagaatacttatcattaattttagtatgaacatgttgaaacgtgatccttgaaagcatatgaatgttgcttctacattcatcaccactaccactactcctctacaaaaacaccacgtaaaatgtaaaaatttatattgattatcaaaaagtgtatataattttaaatatattaagtacttaatgtataaaactgagaaaatttctactatctttaacaaatcacaccacagtagccagtaaccagtaaccattagtaaatgttctatgagtaactacccctaacgagtggtgccaagcaaacaaccaccaagagtaactaccagtagtaactgttcaatgagtaattacccctgccaagtaatgccaagcaaacaaccactaag

SEQ ID NO: 211709 - DNA, 996 bp, Cannabis indica
atatatatatatatacattaaaggaagaaaggttgtggtctgttgaaggacatggttattcaatgcaccaaatgattatagaagacccattttgttttggattttaccgtggattttccatctgagccaagattaacaattgttaaagtgcctgaaatttaaacagggcaattgagtgcataatatttatcaccaattgtctactgattttacggttaaacatcaacattatcatgtgcacaaaggtcattttaatcttcttaggatgaagtcttggaattgatttgctgagtttgttctgtgcaattttatttggaatacttatcatttgtttctttgatgaatttagcttcttatgatattcctaaacttgacttttgctgtcttgcaggcacaagacaaggcaacatattgggcaattggtgaaggatacttcagagaaacttaaagtggccagtgaaagagatcatcatactggtgtcaatgtaatttttttgagtaccccttacaaacaccattactttacatactttagtagatatatatgtatgtatgtatatatatatatacatacatatatatcttctttatattaaatttagctatctaacagatattattggtttaacgttttttttttcgttaaagttaaacggttaaaactaacaccattaaataatcaattaatcattcttttttttttagaaaaaaattaattttaaatatttaaatttaatttaaaagtatcaacaaaattaaatatttaattattttatgtataaatcttaatttaaatttgaattagaggttaatttaattaattaatcatactttgtaaaaaaaattattagttatattatttaaaatatctaaacttatttacttattttatggtttaataaaattagttagatatatttttataaataaatttaaaattatattaaatgtatatatttaaaaatattattgagttgttttagatttaattttatt

SEQ ID NO: 211710 - DNA, 938 bp, Cannabis indica
gagtacaagattgcagagatgggttatgttaggttctacttggctcctaagatagaagaggacgaagaagagacgaacccctgagtttagggcaagttttgctattaaccctggttgcactgtttaaagtttagcagaagtttttcttgtacaattcgtctagggtggctattcacttttttaactatagttaaatctgtagtttagatgattttccaaattcaacggttttttttcttcttttgttgtgtaaacaatgttattttaatgtttattgtttgcttatatactcatctaaattgacaccccaatgactaaaaagggtttaaaccaacaaaagtttttgtgcatatcttcacttgtaggaaaatttagtctcagcacaattggccttccagtgcgggaagacaggaaatgtccattcgaagacggttgatttgcttttagactaggagagttatggctacgttcggtaaccattttaaaaatggttttttattttttaatcaaaaatttggaaagacaaatagaaatggtgttcggtaaattcaatttcattttttgtttttaaaatttaaaatcaaaaagagtaaattttaaaaatagatttttgatgattttaaaaatagatttttgatgattttaaaattttttaaaaacactttttttctcttgcttggctctcttaatcttcgttcttcctcaatgagtcttccatggcgtcagctattctaggtaatatctcttcctctttatctctctctctctctctgtatgtatattgctcttctttgtttctctctctctatatatctcgcctctctttctccttatttttcagtattttttcttattccttcatttctcagattttgaaaatgaaaaaaatgagaacaacatgacatgagaaaggaatcttagtgtgaaagatatctttg

SEQ ID NO: 211711 - DNA, 1145 bp, Cannabis indica
atttcatttattttacaaaaaatttatgtgcttggtaatattacattcttgactaagttcgattttgtgctttaaaagaacatgaaatcatattaggtaattttctagcaattgaattggtttatgtatgctaattgtgatatgtgaaaagttgtttgaaaaaattctagaacttgtttgcttgctatttgaggcgaaataataaattatgcatgactaggaaagtgatttagacattctttgaatcgattgttcctttcaagtcatccctaaaattttatcctagttatcctttttgatccttaacttgatttctttatttctatacatattgagcataaacaagataaacccgtaatatccaaaatttgaccttaagtataccataagtggatctttagtttggaggaatttggatgaaaagtttgtgatatgtgtgtggaaataagtgtgaaaattgagagaatatataaaaatgttgattggcaacaagaagaaaaagaaaagaaaaatctgacagtaagtgtcaaaattcgaaaaaaaaaataaaaaataaaaaataaagtagttgacaatgttagtacgaaaaaagaaaaaaaaaaattctactcatggaaatggaaattagaaaaaaggaggtattaggattgtttgtgaaaaaaatattggatgacatggttggagaagcttatggtataggcaagcctaaatgagtatttcaactacccgtacctaagcctaacattacaagtctagaaagaccttttgattcgaattgattgtgcattgatttatattagcagagaatagtaagtatatatggaaattaaagcatatcgaatattttgggttagtagattgatggatgtaattggcatgtataaattaattgtttcaattgttagttaaatgcgttctatggtttcatgagctgaatgagaaaaaatattaaagtgtgtcaagggtgtaattgaactgaaattttgaattattatgcatagttgaaatttttcataatcatgttattgagtctacttgaaaattactcatgttctgtggattgaattgttcaaattgtgtatttttcgtgttagtgttttaatcgaggacgagtaaatgtttgtttaggggaatttgttaggttt

SEQ ID NO: 211712 - DNA, 1282 bp, Cannabis indica
ttacttgctcccttgccccatcccgtgcacgacggatttttggcgtccccaccctcaagattggttgaagctaaactgtgacatcagagtggggttggatagtatgtgtgcagctatggtcgcaagggatcacgttggcaaggtgatctgggttactacatctaacctggagttttctgatgctctatgtggggaagcggtggctcggtgcttggccctggaggaggctaagacttgtggtgttaagtttcttatagtggagagtgattcgagggtggtgatcaacgcttttaatgggagggagtctcgttgggaggttgagaactatgtctcattttgcaaaagaacctctcccttttttattggttgtatatttgaacatgttagtagacaatgtaactgtgtggcccataatgtggctaaatgggcattttctcatcagaggtttggctccgtgccgctgtcctctatgcccgatattatattttgtaacgaccgcgaggtctaactgattttaatttatatatatgcacgcttttcttcaagaaaaaaaaaacataattttgagatatgatataggcaatctctttggatcaatggagatttttaagcctaacctatttgttgattccctagttactaaattggaccttaaatattgaaattttgtttttttttttcactttaatcttatacatgagccttttgagcttagaaaaaaatatattcatcgtttttcacactatagtatattaatattttatatttttaaacgtgcgagacttatgttgaggggaaaatattgatggttatgtattagggatgataaaaaaaattactattcccttagaatgaatgtttgtaagttcttagtatttcattaagaaaagataaaaaatttgatgagaaatatatgaatacttgcaacaatttaagtgtggaagaatagtaacttttatgctgaaaaaaaaaagatacaaggttgaattgttgagggaagttacgggaaatacaaatgggaattatttgagacaatattgtatatgtatggtatggtgtgatttgagcctaaaatttaactttatcatatactttttaccctagccttacaatataagtctatacagccctattaatttttagattgcgtgtaattatattagtggagaatggtttgataattaagtttatggaatggatgttcgttaaaatacacatttattttgagatgaacattgattgctagcatgcatgagttaatttaaatgttagtaatatgatg

SEQ ID NO: 211713 - DNA, 1500 bp, Cannabis indica
gtgttgaatcatatagtaataaaaaaattgtaaattgaattagtacattaataaaataaaaattttcctcaaatattgacatctaataatattaagagttagtccccacactgctaatgtgtggaaataatttttgcctcttaaattttgacatctatcaaatcatacttcttatacttttttgaccgtttaaaaatttccctgaactattgagattatcaaatttaaagacttttatcaaatttcattcaattttactaatttagtgattatttatgtactaaatcatgctcattagactttaatatttactaaatcacgtccctcgaactttgacatgttccaaatcatgccctatgaactttcatccatgttagacttttcttactaaaatttgagaaaaatctttaaatccaacaatttcaatagtttggaaaaaattttaacaataaaaaatgttaaaggagcatgattttgtatatgttaaagttcagagaacaaaaattttaattaaccttaaatcaattaaaagtatttaaaaaaaaaactataaaaaccgcccaaaacactacttaattttgtatataaacatgtgaaatcaaatttatggttatagagatagtgaattaatgttaaaatataaatataataaaaaaaatattatggattggaccccatagagagttagagctgcccattatcatatgtctcagaccaaaacaaatcactagcatataaaaggacataaatggatcaaatgcagaatatgcatccatatcctttttaatttgacaacattttcactaaaatttatgcttttcacagaacaatttatttgttggtctacattttcctagtgaattattactatttctctcttcttatacttatctctcagttggtctctgtacattttattatagggttgtcagattgccacgttatgctctagtttttttttttttttttttaaattcaaaattaaaaagtaagaggtaaaagtgtacatttaatttggatcaagtttcttgttttttttttttccttgagcaaattaatcacactcttacaactaaaataaaagagcataaagactaatttatttcataattaagaaacaaaactgtgcttcacgtacaattttatttctagtactgttgctcctaaattcgccgaatatacgtggaccagtcaagaggggacacgtgaatcaaattacttaagaagaactgctaagtctttgtatgacaccaggaagcattattcgcatgggtcccggaagatgtacccggagtacaaggtactcccggaagcgatcatagcttgaaggcactccgggatgtgtcaggtctctcccgagaaatcaagtcgcatttaatgctgcatgggaggaagcgtgttggaactgtaacacgcaataaagtctgacggcaccaacccccaacagcagcgctacagtaatgatcatttaagtctagcgacggctactctgcgaagagt

SEQ ID NO: 211714 - DNA, 757 bp, Cannabis indica
cttgtacctctcgtgcatgtattgtccattgtgtaatgaccaaagactttggaattgaagtcactttgaattttttcatgacacagaatatatgtcggcatgggatgccataggtcgggaaatattgacattcacaacctatagaaccagttgacaaatctagatatactgttctatgcagcgtgtcaaaaagaggtgtttttgtcaatcgaacgaccaccatatcatcttcttttgttgaagaatctaccatgtaccttgcttctttttctatttgagcacgaactcggaaaaacatatttcttgtgtacaattttgctgcctcctcctcgatatgtgccatgtttgtctgctgaagcaacggcatagtattcatcgtgtcatagtcatccttggcgtctcgagttcttagcaatgacattcccacatcaatagcacgaacaaattcatacattttcatcttctcattcactctttttttaagtagagcatgcatgccctcacacctttgtgttgttgtcattccagcaaagaaattacctctcaggtatgcctctgcccattgctcttttctatcggtcatccactttgcccactcgtttttttggagcccatattcttcaatcaaatctatccataaagtttcaaactcatcaacagagtaatagttaaagaataatttattgagcttccttaaaaactctggatccttcacagctatcgcggccttcttgtggatgtgccaataacataatct

SEQ ID NO: 211715 - DNA, 699 bp, Cannabis indica
tatacacacatatatatatatatatatatatatttatatatactatctaagatgcattattttggacttcattaaaaaaagtgacagtaattaataatatttaataattgaaatagccaatccaaaagcttattattagttaccgttgtcaaccaagtcaaactagtttacttaatttctcttgataacattaatgcaccttgctcgtgctacttgtaacttttcagataaaactactaaaaattggtattatggttttattaaatatgagtgtggtccaccttctttttactagacatggttctttattcaatattgaattgcccatctcatttaaaaacaaaatacacatcatttggtcctttttttgacaaaccaaatatctttttttttttttttggagtgtagcgtaatggtattttacaatctcttaatagcttcaaggtcctaggttcgaacccatgacctctccttttttcccatccctccctcaccactaagctaaccttagtggcttaacaaaccaaatatctgttgtaggaggtctctacctagctttttgtatttagatttaatttaatgtaattaggtttacaataattaatacatctctgttcgattgattcaactattgacctcacaattataggttgacagggtgaaaaacaaatataaaatttgttatttttctgatttttc

SEQ ID NO: 211716 - DNA, 1295 bp, Cannabis indica
tctgcctcctcgagccaggtcattgaaacagtgcctgtcgaggcaagaaagattggctcggagttcacccaagagtttggggctgcatgttggtgccagttcaaggctctccttccccatgattgggatttaatcaatcatggtgatttggagggagtacttacgaggagtttgtctcacagcctcttggtaagtttctttgtcccaatctgctcacttatcttatttctcttctccttcctctttttttatacatctttgtttgtgactttccaggcttctttcctctcctttgctgcccaacggtgaggcttagaaaagattaaatacttggagagcgaggtccagaagtcactaggccaatgcaaggtcgtggtcaagaaatgtaatgatgcccaactggaaattactcgccttactaaagaagacaagaggatgaagaagaaccttgaaaatgccgagaaggcgacaaaggccaaaatcgatgaatgcgagaagcttaaagaggaacttgaagctaccaaggtgacacttgatgggaaagagatcaaaacctaagaacgatgcaacaacgttggccttcgtaccctttaccgagcctggatggcaactccatacatggacacgagtttcttggaggaagaagaggagaaaattcttactttctgcgagatgaccaagaaggaggaggaaaaggctgagacagcagaagaagaagatccgtccaagtctcctactatgtaggcttggtttttatttatttttattttgtttaggaaaatgatccaaaggccgagacaatggtttgccccttgtggcacttttttttttgtaaggacaaatttgtaaggttggatggccaactttgcttttatcattattaaatgcttcgtacttttatgcttgaactttaatatatacttatttgcttgcatttttattcacaatttaaacaactatattttgatcaaatgcaaaatactttaggcctttccattgctcgtattttcctctaacaatatgtaagtggttaatagtctactatatgcgtgagcaatttattatttgccacgttttttaatttgcgagcaattattaattctgtctcgcaataacagttataatctattttaagcaaacttgaatatacttttaatgatttatcactttgtatatttttgattacttatatgaatagttagatcgtctattcatacactaggtttaaatacttttttcaagacaccttgatgtctcgtttacttatatgaatagtattcagcttcacatgtgag

SEQ ID NO: 211717 - DNA, 692 bp, Cannabis indica
gtgatgagacaatatgtatttatagagttagggaggggacttagctacaaaaccctagttgggctgggcctactcatcaaaggcttcagtcaactagaaaagcccacacttctgcttcacctagactttacacacagatgctaagcccattaacaattgatcaccaacaacatgggctaacgcagcaaagaactatccaatcaacccaagttttaataaaaccaataaaacttaatgtaagcccaaataaaaagtctaacaggaaagactagagagaatgttagatgaaatttcaacggggttcgaggatagtctcctatccttcgtgggctgcttgtttgaaggtatttggaaagctagaaacgacttaatgttcaaggggtggcggatcgatatacaacaactgagacagtctattttgaggagatattcggagtccgttacagccatggaggaggaagcaaagtctgagacgtttacacatactgtatttcccagcagaaggatatgcgacacagctaaagtgttcacggtttcggatgcttcgtggaaggagggcagggcaggtattgcggtgggccttttggatatcggaataacaaaacggaatggttcgcaaagcaggcttcggctacatctgcgactgaggctgagatgttggctattaagtgggctatgcagctcgctagaga

SEQ ID NO: 211718 - DNA, 561 bp, Cannabis indica
agtttaattttaaattttaatattatgaattccaaattaaggaatacaattttataatttgatttcattttctataggagtagttcattcttgtcacaaattgtgtagcttaattgtaagtgaactgtgctgtgctgtttctgtttctagtttcatgttttttaagggaacaaagctgttttccatatatgatgaacaccttaaaactgatgacatttcatggccataatcagatattttgtatgcatcaattatgctactttgaatgctattaatttggttgtttttgggggtaaaaacgcagtttgaagcgttatgggggtaggaatttgtctcaaggattacatatgatattcatgtaattgctgaacattcttcttcgtgttatgtgatgacagccagagcatcaacaactcattgttgacaccggtgctttgtctcatcttgtggatctattaaagaggtataagagtggttcgatatctcgggctgtgaatagtgttattcgtagggctgctgatgccatcaccaaccttgctcacgagaatagtagcatcaaaa

SEQ ID NO: 211719 - DNA, 604 bp, Cannabis indica
tataaaaattaatttttttttttggagtgcagttaaggtacttttttctttagtaaatgcagatacatgaaaaaaaaaaaaagaataattacagtatgttaatgaattaatctttaggggtaaatagcagtataagtacccaaagttggaagtaactgatactatatatttctatctagacccgatgatcaaaaatttaggccttatatgtgccctgtttaagacaatatcagagtccgtactgacaaaattagagaaaaattacagttttacaaacattgggtacttatgcccctaaaaataaacattgggtttatgccgcttacaaacataaaactttgggtacttatgccactatttaccctaatatttatttattttttttttaaaataaactctgttatttaaatgttttaaaataatatcatttatactagcttattatttatttttttaataagttttttttgacagatagatgagtattacataatttaaaaaaaaagatatgtaatttaattaataaatttaacaacttataatgttcattcacaaaccacaataactaaaatagtttcatcatttatttatttacaaattgata

SEQ ID NO: 211720 - DNA, 612 bp, Cannabis indica
tttcaacttagcttcacacttcaattgaatcaattcattcttcggatgagctcgttcaggtcggccagcaccagatttcctcttcttccccgtcacggacttaggattaaagtcctcgggataaagcccgcacctcataagattatcatcggaggtcaactagataatattccggtcttccctcagcaatcaggcgagtttatgagctctatccctaagagcaagagtgagaggaggacggtgataggtcggaatctgctaaaaccatatccgggtaatgctcggatccttcaccatgaagtactcatcagcaaaatgccctattttgctgatggccttatcatccgtgccggtcaaccacttgaagcctggctgagagaagtacaagtaccccgacctgccttgtttgggggtggacttcagatcaaagaaccaggcaacctcatggggagaaggagtaccccatcccttggaagcatagaggacgaagacggggaacaaatacttaatgcccttaggagtgatttgggccgagaagaaatcgaagaagtcagccacatccttaaaatatttatgcaagggcatcaacgctccctgctgaccatgggcccc

SEQ ID NO: 211721 - DNA, 579 bp, Cannabis indica
cttgaggtacactgttagttgtatatgtgtgacttctttttttgcgaggatttactaaattctcgaaatggtgggtgtgtctcattacctaaattttcatgtagcgtcatgatcattatgttattgagatacacccagccatttcttgagatgtctggccaacccttgatatttttgaattttttatgcgggtgagggcattttattattctcgcattttcaccacgctgaaaagatcttctatctttcagatgagcgacttatcggatagccaaatgctcgactctagagatggggctttcactgatgagttggagaagagcgacaactttatacccacctcgatttttgaggaggaggcccctgttgccagagctcgttagggctcactatctactaaagagagataggatggtacaggaacttgctgaaccagtgacggttaaaattcacgatagtgaatccacagtgtcagctcaggcgtatctttttcgctcgagatatgcccttaacatcgaagtcaaagaaatgggagaaggcttcgaggtacgtgattgcgagtcagaagaagaaggagac

SEQ ID NO: 211722 - DNA, 498 bp, Cannabis indica
aaatgcaaaaaaaaattattttgaagtgtaaaaataaaaaaagcccttatatatatactttcattatagctaaaatttatatgtttagtgttaataataaattaaatttcaaaataacttaatttagttagttaagaaaagtgttacagttaatttcttattataacctcttaattaaatttcatgttcgaaaatacaggttagaatatttatttttcaattttttttcatggtggtattcattacatttacatctattcctgtaaatttttgaaaaaaaaaaaaatgaatgatttacagtgctaagaataggtttgaaatttttgaacacggtagacttaaaatattaagaattctattttcgataccttaaattattcaaaaaattttaaaaacttacaaattaaaatgatatttcaactataacaaatactgttttaaaaaaataaacaataaaaaaaaaaaaaaaaacaaaaaaaaaaaaactaaacaacaaat

SEQ ID NO: 211723 - DNA, 591 bp, Cannabis indica
gaagcattaattttttctatgtgttcttggtatatacatataaaaaaaagaacaatatgtgtgtgtccataagctccaagaaaggagctgaatggcacaagaggagttgctcgcatggctccataagctccaagagaggagctaaatggaaaaagtggagccgattggcatggctccatgagctccaacaaaggagccgaatgacacaatggagctgaattgcacaagtggagccgattggcatggctccatgagctccaacaaaggagctgaattgaacaatggagtggaattgcacaagcggagccgatcggcatggctccataagctccaacaaaggagccgaatggcaagtggagccgattggcacaagaggacccaattagcatggtttcctaagctcctccaataaagacaaaggaggttttggtcaaaaggagacccaattggcatgattctctattgaaaaaatgtatatatatacaaagggaggcgtggggatgtgtatatatgtttatgacatatatactcatcaattcctacctattttagcctactctactttttttatctttacttcttaaagtctaa

SEQ ID NO: 211724 - DNA, 816 bp, Cannabis indica
gacaaagtgtggaaactaatgaacaattagagcgaaaaaatcttttcagcagggggcaaggaagtcctgcttaaagcggtggttcaatccattcccaccttcgccatgagctattttagactacctataacaacaagcaatcaacttgaatcaatgatggcaaaaatatggtggggcaagactgagtcggatgctcaaattcattggaaaaattagaagtttctttgcaaaacaaaatcaaatggaggaatggggtttcattcttttgtgcatttcaatcaggcatttctagcaaagcaagcctggagaatactcaaccatccatcatcgatgcttagtagaatcctaaaagggagatactttcctcatacttccttcttggaagcttcaaatggtcactccccatctctaacatggcagggtatattctatggaagagaacttctagaggctggtctctgatcgaaagttggagatggtagacatatgagctgtggttcgaacccatggatcccaggatttcataattttaagccggcattctattcgggctctccttcagcggtggttgctgattatattactgatgaacgagagtgggatgtacatcttctacaaagttgtttctcaatggtggatgtggaaaaaatattaacaatccctcttagtttttttcaaagtgctgatgctttgatatggcaccacaacaacactggtatttatagtgttcagtcgggatatcaccttgccgctgctcttgaagacattgctcatccgtctgctacttcttctgcatcatgcaagtggaactttttt

SEQ ID NO: 211725 - DNA, 712 bp, Cannabis indica
ttgtttcaaaggtcattgctaattcgctcaaagttattatgccttcaattttatcggatactcaaagtgtgtttctccaatgttatctaatatcggataatattatgatttcttatgagataatgcattacttaaagaggaagagaagaggctgtgatggtgttatggcacttaagcttgacataagcaaggcttacgattgacttgaatggggatatcttcaggctatgcttgaatgaatgggcttcgatggtagatgaattaatttgattatgcattgtgtggacactgtctcgcacacgatctctcatgggggaaaggagttgggccctattgttgcacaaagggggctgcgccacgatcaccatatttggttattttctgtgctgagtgtttctctagtttgttgcatagtggattaattacagggtgtaaaggtgctagaagagctcttgttatttcacatattctgtttgctgatgatagttacatctattgtaaagcaacataatgttaaagagctattgtatacatatgagattgcttctgaccaaaagatcaatttttcaaagtcgtcagtgttctacagtcacaatactagtacctctcaaagggacatacatcatttatgagctattaaatagttatgaggctggtgagaatgggtcgtatctgggacttccatatttggtgggaaagaataaaaatgtta

SEQ ID NO: 211726 - DNA, 548 bp, Cannabis indica
caaactttgtaatgacatttgcctcataagtctgcatgtaaacatctgttcggatggggacttttgatacttgtatgtatgctagcaggtacgtgagctccatgtgatcgacattttggcaactattccgtgatgaagtgaactgtcaccttttagtctctttagttctttattagcgagccatcaagttgagccaatttatagactcttactccaactactgctttgataacatatggaccctcccagttcttgttgaacactccttctaatgcatctctcgtatttggaaagactagtcttaacaccaagtctccaacattgaatagtttgttgacttttttgttgaagtatcttgtgactcggtgttggtatttagctcaccaataaaaggatcaagagagtattaatagacgatgggagatcagtaaatatcatttacaaggagaccttaaagaaaatggtgttcgaaaaagctaaattaaggccttgtatggtgaacctttatggattcaccagagacgctatcgccagccttggcataatcg

SEQ ID NO: 211727 - DNA, 557 bp, Cannabis indica
ttagaatcttctagtacatagtgttttcattttcattttcagtaatatacatgtaagttgtaaacttgaactagaacacctagaccaaatagtgtttgtagataattgtctgcttaaaatttatatttcttggttgtatgcatttggagctttgccacctaaaatcaaattaactggcccaaacatactagaaaaaaaaaaaatattggatacatttttggacacgtgtttgtaacgtataatttctcagtctgattatttattgaagtaccatcaattgactgtacggtaggacttttggggcggcgttctttctagtttggtgggcagattgtagaataagtgatcattgtatatatctccagaccccttttcttcaaaatataagatatgcttttaaaatttaaaaattaataaaaaccagatcacagaccttcaagtcaaacacccatctccacccaccaaccaccaattttcgaccatactcttaattacgttatttactcttgcagaacgtttaatggttgtctttaggaagaaatatatatatatatata

SEQ ID NO: 211728 - DNA, 562 bp, Cannabis indica
ccgatccgcgaaaaagcccctatatgccattcatagttttaatggaaattgaaaataggagggaaaatgaagttaattaacttgtatctaggggtttaaatatgaattataggatcttgacatgtggcattggaaaaccaaaagtcactcaatctaacaattatctcaaaacacgctcacatgaatgccaaaggtttgatgacatggcaggttgaaaaaataaaataataaatgtgggtgtcattttaaaaccctgatcaacaagacaaccaagagtcaccgtcatgtgacagaacaactagcctgtccctcatgaatagttttgctatttgagaaatagttgtcatcacgaaactaagggcacatgttattgtacaaattttctacctaaaaatacgagtacagtctcataaataactgacacgtggacccagttcccgatagaaaaggatgatagttgagctaactttgcctgatgtaaacttccaagaagatgccttcaagacagggtctataactgaaccactagaattctcttgtcttatctttattttttgctttc

SEQ ID NO: 211729 - DNA, 510 bp, Cannabis indica
agatattttgtacttggaaaagagagttttaatgttaatcaattattataattttttagttaatttttatatttgaaaatacatataaaaatatttattccaaaaaatttcatgacaatttcgttatagttacaatatcatttttgtaaatgtttaaaaaaaattaaatagtttacattctcgaaaataagtttgaaattttttgaacacgcttggtaaactagaataacgggaactccgatttcactactgtaaattatttaaaaaatttcaaaaaatttacaggattgatattgtaactataacgaacaccaccataaaaaaaatattctaacatgttatttcaggtgcggaaattgaagttgtaattagtacttctctctttgaaaaataaaatctgactatctccaacatacaatttttatattttttgccaaaaaatgagctagtgttatatttgaactactattaaaaattacgagttttttttttcatttatacacttcaaaa

SEQ ID NO: 211730 - DNA, 640 bp, Cannabis indica
atatgtatatgtatttatatgtatagtgtatacattatattaatttgttttttttgtttgtataatgtataaatctcagcaattctcttcctctttcggcagctcctccctccctctcagcagcaggggtaagttttcttttagtaaattcattagggtattagatattgcactgcttgttttttccttcaaaaaaaaaaacgtttgtttatttctaatgtttatgttacatttttttttttgaagaaaagtatttgtattagattgatttatgcttatatatgtgtatgcataatttttgtgtattttatgttaaaagttagtatttaaagtgaatagataagttattaatgaagagtttatttcaaaaaaatgaatagataagtttagattttttttagaatgtcaacaaatttttgagtatgtgtttggaaacaaaggtatagttattaggtagggtagttattatggtagtgcacatgaaagtaattacattctattttaaaatacattgtgtgtttggatgttaaatagtaattgtatatgaatttttgtgtttggcaaatgagttagtaattatatgtttttgtgagataaattacatatgtgcatatggttatatgtatgtataaaagtaagt

SEQ ID NO: 211731 - DNA, 635 bp, Cannabis indica
ctaattgacactctttggacaaaaccatgatatgaaaacctcattggaaatgccttgtatctccaccatgttttgtacaagggctacaagtcatattaaataaaattcataaggacttgtcgatgagatacatctcaagtacattgcaagagaaaccaaaacaagacaaacaaagcgtaaagtagaacaagaaaataaaactaaacaaatgaaaacaaaaaactaaattgatggtaattaagttccacaaataaaatttcactaaatcaatccccagtagcaacactaataacttgttgtaaaaattaatatacgcaagtatacgcaatcacacaagtaataaagtgataaatcaagtattatcgccacatggattgaaaattagaaattaatttacaaaactaattactcacaaattagtttcaacaaaataaaataaagtgatgagaatatataaaaattaacaaacacaaattatgagaagaaaacaagctaaaattattaaatcagacgaaaaaaaatataaaattgatataatgatgcaaataaatattattgtaaattgataatgtcaattagaaatttaaaatgtcataatcctttttcttaaagtgtttatggtttgatttcctaat

SEQ ID NO: 211732 - DNA, 582 bp, Cannabis indica
agtctacatcgagccatcggtacccagttgaaattgagcacagattttcatcctcagacggatggacagtccgttaggaccattcagattttagaggacatgctacgggcatgtgtcttagatttgagggatcatgggtaaagtaccttccctttatcgagttctcgtacaacaacaactatcaggcaacaatcgggatggctacgtatgaaattttatatggaagaaaatgttgatcacctattcactgggatgaagtaggtgaaagaaagttcttaggtcccgaagttgttcagagaacaagagaagcagtggataaaattagagcatgaatgctcgcaactcagagcaggtagaagagttatgctgataaaaaatgttgggatattgattttcaaatcggggatgtggtatttctccaagtatcacctatgaaaggcatcaagcgctttggtaagaaaggaagcttagcctgaggttcattggacctttcgagatacttgagaggatagggcaagtagcgtacacgttggctatgcccccggcgctggtagctatgcatgatgtatttcatgtttcgat

SEQ ID NO: 211733 - DNA, 768 bp, Cannabis indica
tttttttttttgtaaggaaagcatatgtaatcttaattatttgtactcaactaataaagctatttttttctattaattaattaaatataattttctttttgtggatgagataggagcttatatataataataatgtcttttaatttgtcatatccttaatggtgactttggactaattatttcttgtctttattaactaatcaaggctgctacaagtgattataaaatggtgcctgagtttgagattataaaataatttatttataatttgtttaagaagattcttaatactactatagttattaattaagaatgttcaaaatttcatctgcatttgtataaattagattagttgagcataattagatacaatacataaatattaataattaatgggatccataaatacttatatgcaattttatattggaaaatattattgtaaacaaataatagtataaggaacatttcatatcaaaataaatttatgaatttttactatttatgtattgttggagcttgttgatgaagttgatgtttatggtttatgaattgttgttatggagtataagttttgtatttaaatttatgactctccttgtttatgttccatgagggattctcggaattttattagctccctgatttatgttatgattgtttgttacgctataattggttgtttgattattttcatttattctagattgaatattgaggttgttatgttctaatttttattggtaagatcattggctaataatcatt

SEQ ID NO: 211734 - DNA, 558 bp, Cannabis indica
ttttaattattattattaatatttaatagtttatttttgtttatatatattgtttaatattaaaatatattatattttattaatataataaataaaatatattttttggtgtaaattttagtgttgtggttggagtgaaaatactttttgacactaaatttagtgatagtgtaacaccaaatttaatgtgtcattggagatgctcttataagttatttaaaagataaaaaaatgtgtcactataatttgtgtaaaaattcttaaaaaaagaataatttacgacgtaaatatttaaatttaactctcggttgcagataaataattaagtttaattttgacgataataatactcaagttatatttctaaaatttctgtagatattcgatcattaaatgttaaagttattatctatgtattattttcttattaatatatttaaattaatttttaactaaaactaaatttaataacttggaccaattaaaaattgactcgtaggcgtagccattaatttgacacttaaccactataaatggaaattctagaaatataactta

SEQ ID NO: 211735 - DNA, 1134 bp, Cannabis indica
agatcaggtttctagcttataggcaacttaggcaacttacgttttcagtcaaaggttaaagcctttatataggaagcattaaaccctaggtttacaattcaaatcccttggaaatcgtatagttagttagatatttataaaagactgaaatgcccttgattctagatactattaagctattaagttaagcttttggggcccagttcactgcctatcattgatgtccatgtgcaggagtgtcctgtggggcctgtagagcatcctttggccgaccaggcccttgtgctagccaggctggccaaccaaggtgctgtctctgggctggccggccatggggctggccaggggtgactggccagctcctgagagtgagctggtctgtcacttgatccctgtttgagtgtcggggtcttcgtttgcttgggtgctaacttggccttctttttaatgagctgtattgccatgtgacacatgttctgtccacgtaagcatgacacgtcatgaggacaaaaattaggataacaccattaaaacaaaggttctaaaccaacccatgtgactctaacgaccatccgtcgcatgtccattgttaccaggcaaaaatcaatgaaataataaatttcacatatggcataatacacttagagtttaataagatctctgaaactgagaaattataactaatgcctatttttaaaaataggacccacaatataagatatttatatataatcataaaatgtaaataattaatgttaattatcctactaatctatgttctaagtatgtggtcattacaggggggtcttcaatttccagaacttgagtcgcgtttacgggatccacttctagtaagttatagcttaaattcgtaactcttttgagggcaaaatttggacttgataacttcaaaattacgattggattgtgatacataacttgatagagcatttaaatagcttcaaaatgcaagttgaatcgcataaatcagattgagtgagttatggccattttactaaaggctgctttgataccagtgcctaggttgacatccagcgcccaggttaacatgtgatgtcaacctagatgctaggccaagggaaaatcatgctgaggatgtattttttgatgcct

SEQ ID NO: 211736 - DNA, 681 bp, Cannabis indica
tatatataaatttatttatattgcttcacatcccattttcaaatttcgcactaataagaagttaatacaatatgtattttttattttgaaagaagaaagaacagagtgaaattgagttctgaaacccagaatccatggcttcacggagtgctgttgcattgttgtttcaacaatacaaggcactactgaagaagaatttcttgctctcatggcggaacaagagagctactttcgtccagctattcgcttctttcatattcatctttcttatttttgctatccaggaggcaattaaagcacgcttctcttcctctacttcttataagagagtcacagacccagaccctcagttctctttcccgatcttgccatgtgaggaaaagtactacgtcaagcttccttgtgtcgattttgtatggagcggaaatggaagcgctaggatcactagccttgttaacgccattagagccaacaatcctgggagaccgatttcttcagataaggtaattgctttattaactggaatattgtattccttctgtttgtttggtggctgagaaaatgaaaagagaaaaaacatgcagaacagaatcttcgtttgcttgtttgagtctgttatcgaaggacacgtggcagtttacaatttcgtattgagatttgtcttttaagtttttttttttt

SEQ ID NO: 211737 - DNA, 701 bp, Cannabis indica
aatgactcaagattgttaaagaaatataatttaaatatttttttcaaaaatattttaatatatatttatattctagataaataaataaaatcatatatattaaaataaactatattagcaaaataattatcaataaaaatataactttatcttataaacaaatataaaagaaaaattaaatgaaatactacatatattttttttaaaaaaaattaaaaatatgaaaatatattttcacttgtttttatgtgtaaaatgtatgcacatgttttatgatgccaaataaataaaaaatcgctctttaaaaggtctactaccaaaattttcaaaaattttatctaataatgttgagaatcatggggttccatctcaaaaccaataggctatgagtggagtagtccatgttcttatatatggctcaatacttttacatttaatccatgtgggacaatgttctccaatacctagcatagaggtttgaagcaacaaaaagtgcataattataggctttccaaatgaagtgtggaccaccacctcctaatgaagtgttgatctaaatttgttggagagatataagcagtcttatccaaataatatgcttaaactaattggttttaagatgaaatctcatgcaccttataccatgcactcacctattcctacttcttcaaccatacaagactatgggactttgttaaatt

SEQ ID NO: 211738 - DNA, 725 bp, Cannabis indica
aaatgtaacataaaatatttactccgtaaaacaatatatatttaagtgtataaaatttaaaacataaagtatttatgccgcaaataaaaaaaaaaaaacagtagttcttatagaaagagaaaataacaaacaataaatgtggaagtgtactaaagataacagaagtattgtcttcggagcaaagctaaaatggagtacccattattgtatatgcctgttcaaatctggaatgtagtctctatgacaaaataattgattaaaatgacaactgtgttttccaatgattgaaacgttagatcatgaaaagaaatttcaatgaagaattaaaatgcgaagaatcatttactgtaattctttactttagaagttaatatagaatatgtgttgttagaaagggcttgtcagggaagaaaagaacaaagacaaacataacgaagaaaaaaatcacattacatcgccatcatcatcatcaacatcatcctgaaaaatcaaattacaacataacgaagaaacacctaaggatcctgatatcaaaacctacgtgataaatcttaaagcacacgacaaacaccttaagcttgatcgaaagaacccttaaaaaaaacaccacttgtaaatgggctaaaagtagtgggaaaagctcataccaaatcttaagctgaccgaaacatagatgcaaggccgtgccgagtaatgaaagcacaaaacggaagatttatgggatc

SEQ ID NO: 211739 - DNA, 556 bp, Cannabis indica
ttatgaactgtcaacttctcccacgacaaccaatgaatacctgggccattactacttgctcgccacaaatacttacacatgattttctccattttagaacaaagcttaagcgaaagcagaaaaacactcatagccttactagggagagattgagcgaaagatttcaaaaggacttcccttccaaacttagagagccactttccgtcccaactttccactcgcttatgcattttatcttttaggaaacacaaagtagcattcttattcctacccatagtattaggaagacccaaatacaaactttaatcacctgtaacctgcatccccaaaattcttgaacttgagcatagtttatctttgagctattagtcctaaaaaagataaaagattttgcaatattcacttgttatcccgaagcttgttcaaactttgtcaggagctctataatctcggttgcctctctttcattggaccgataataaagataactatcatccgcaaagatcatatgagaaacaacaggagctcctttagccaccttacaaccatgaagcca

SEQ ID NO: 211740 - DNA, 1007 bp, Cannabis indica
tagctgccatactgggggcatcaagattcttggatagctatggaaagacattaagaaaagtggtcatgtagactctatgagtgatttcctcgaccgagcaaatggtttcatcaagcttgaagaagccgttcaacggcagatgtcgagcctagaccgggacaaccacaggctccttcagttggaacatctgcccaaaaccctcagtaccctagtagctcaaatcctggcgggaaaagatctaattttaacggcagaaaaggcaatgggaaaaagggaaagttaacaggaaaagccgaacagacccctaaagagaatccttccaagttcattgctttctctatctcgactgacgacttggagaccatttacatggctacgcagtcgatagtcccgtacaagaaacttgctcccatgaaaaaagacataagtaaacgggacatgtccaaattttgtcgttttcatggaaattatggccatgacactaatgaatgcaacaatctgaatcgggatattgaattcctgataaggaaaaacaacccgcatgtgcaaaagtatgtcaaggcagaccagaatcaaagggccgcccaagcacacaataaccaagacctattattgcctccaccagtggacgggcatttacaagtcatcatcgggggcccacatatagttggagattcgggcaaagttcgggataggtacgcccaaaatttacagcacaaacaaaaagaagtggttctggccgtagaggaaaggatgccaaaaataccacgggtaggggaacccactataagtttcactgaagaagatgttgtcaatgttcgcttcctgcacaacgatccattagtcgtggaagtacagatagctaacaaaatagtggcctgaactatgatagataatggagcctcaacaaatatcctgttcaaaacactgtatgaaaaaatggggctccaactcaaagatctgatcccctgtctccaacccgtatatggtttcttcagccagagtgt

SEQ ID NO: 211741 - DNA, 619 bp, Cannabis indica
aatgaaaatgaaaagcattataaggaaataaatatatttaagaatggaaaaaacaacaactgcatattgatcaaatctaatgggaataataattaaaattttgtagcttcagcttgttttgatgcttttcaatagtttgtctcattttggcatctattttgctatgtcacatttgtgtttacatttgaatttacttctaaatatttgtcatacatacactactttttgagaaataaaaaagtcaaacttaagggattttgaccaagaccagagagaactaaataaggttgagatgttctatttaaggacccatgacacatcaatgaagattatgaacacactaaccaatcacttggtgtcgagagccacacccaagggtgccaaacttagggtttcatgacccacacaagggttttgactctaaagttccttattgacttcacttttagctaacgatactgaattaattaaataattagaatgatagatcataattaataataattatatgtacttaagcaataagaacacatagatttatagaggtttgatctcgtgatggttgtaatagccgactcctctttaacttgtattaattgtgagaaaagaagtaagaagt

SEQ ID NO: 211742 - DNA, 691 bp, Cannabis indica
cttgagtggggaatttcaggcatcagtgtcgtattgacgtgacagcgccaaaatctaccaaggcgggtcgaccgaggattgcattataagctattgggcagtccaccaccacaaacgtgcaatacttgaaagtgctttggggtgtgtctgggcacaaggtaactgggagcctcacttttcccatcgggataagcgtttttccattaaatcctatgcgttgggaaccacttggtgaaagatctcagtccgttaggcctatttcagtgaaggcctccttgaataatatattcacggaactcccgttgtcgatcaagactctggccacgatcttattggcaatgggagtctctatgaccaaagggtcatggtgaggaaaacacatcgttttagcgtcttctttcgtgaatgtaatgggctgatccattagtcggggcgtttgagctgggagttgagtaacctctcagacctcatcgtgtttcatggcccctgcgtaccgtttgagctccttacgggtagttcctccgatgtgaggtcctcccgagatcatagccactctcccgttgggtcttggtggcaggctgagaatatgttgggcatcttcgggggaggcaactggagctaatgctcccactacaccccctggcgctccttgaggcaaaactcccgctacctgacccgggttgagatgggg

SEQ ID NO: 211743 - DNA, 569 bp, Cannabis indica
aataaagtttaaaattttctcgcacttgccattctagtcatcctagtttagaatttcataatcagttgtcgtgacgtgcctaattgttagggcgttatagtaatagtgtgagagttttgagtgtatttctcaagtatttgtcaaaatttgagagtgtaatattctgtacccattattattgttatagtgaaagatttaccatggtttttatttgccacaagataagttcttggcgtacatttattgctttgattattattcgtaaagtactatttatattggaatatatccgaaaattctgaatatgctctgtgattgcagctgtgagtgatccttcacatcagaaaggaattttagagtctccattttattttcccacaaatatttatcataaaggggaattgggatactttctattatttctaacaactggtattagagccacgaggtcagagctctatttctgcagtgataatggttacgcacggcataaatatttctatctaggagactggaatttaagtagtctacctgtgactctccacatctttcttgggaactcacttata

SEQ ID NO: 211744 - DNA, 577 bp, Cannabis indica
tcgcagcatagtggacgtcgaggttgggactgcaacgttcagaagctggttgttgggaattttcaccagggggcacgaaattgaaatggaggaactggcgatggtgagttgggctatttggcatgcgcgaaatcactttgtttggcaaaagaagagttggcttgcttcaaatattgtaacatcagctagaaacatgcttgatcaatacaaatttgctcaagaaaggaagggcctttcgttgtctcctttgaatgatgggggcggaactgcgagcgttagagtgcacctgtgttaaacaagattaaagttaatgtccatggggctttatttgaacaagagggggcgatttggagtgggctgtgtagctcgagatcatcatgaaacaatagtagaagctttcaagaaaggaaaggttcggtatgtccaactcgaaattgccgagatcataagtatcaaagaagctttgagttagattgcgactcatccctgagacaatatagtgttagaaacggatagtttggtgtgtgtccaagcagtccaaagtaaagtctttatgtcctcacagtttggtcttatt

SEQ ID NO: 211745 - DNA, 1267 bp, Cannabis indica
ctttcaaaggtcaactgccccaacgtcctaactcctgccgcagagagggtgctccggttagacatcattgcttcgggggaggacccgtatcaaaagtaccgctttaggagggaacaggagttagcctacatcaaagcccaggccgccgccaggaggactcttggtttggaggctattccagatcgggtgccttctaggcctaaaccactggtcctggtccccaacacataggctcttgacgccagtacgtccggctctagtaagtcccctttaataattcaccatgtcccctctgtccgagagtatgcccggcttagacctatagggtttgatgaacgtctttttaagtttaggatgccctccactcggtggggggatcatgccaaggatttctacttttcccacttatggcactttttaggccggtcccggatgggttctgggcctcctgcgcccattcccttagatcactcagcctacttatcttccagctggtttctcccctcgaaaaactttctcaaggatgacgaagccagcattatggtacaagactttgctagggctgagttagatactcagggtaggaatagtcttaattgcttttgttttctggtacatgctttattgtggccgttctaacactttgtttatttttttatagaagccaggccaatggaggatctcttagcaactcttgcccagacctacagtccggatacttctcgtcctccggcagctatccagttggtgggcccagagagatcttcctccaacgcccctcttggccaaatcatcctactcgacgaggacggtgaggtcgtggaggaggaagaaggcgagatcatggccttgagcgatagaaaacgcaagggaaaggcggtggaaggtgaaccctccaagaagtccgagaggaaggatactccgacggttagctcagactcagggattcctcctgaggccgaggaatatgtggtggcttctaacatcgtccttactccggtccctgctgatgaggaaaggcagcaactgcgggtggccaagtacatctatgccatggacgagtacaccaagggtaatgcggaggcaaaggccttgaagaaggtcctgcaagaggcccaacagaattccatgcgcttgggggctttcctgaatgcttgggatctaaccatggatcctctgtcggatcgtttcaactgtttcattggccccacccttgctcattttgcctctgagctgaccatcctgtttgtgtctcacctgacccagc

SEQ ID NO: 211746 - DNA, 627 bp, Cannabis indica
attttagccattgcaaatgtacgtttgctaaaactttgacctctttcccagcgcagtttacaaaatgcgctggtaaaagtgacatttcttgtagtgggtggtggttgttttgtgtttatcctaaggttgtcgtgaagtaatagtgatacatgatctgttccgcagttagtagagataagttttttcttcataatataatatttcaaaatatttttcgttttaataaaaattctcattttaatattaccattaagtagtgtgctaattaaattttatatattttatataggtatgtttttattttactcacttggtgacttcaaaaaataagttttattacaattatctttcttcaaattttactatattattaatctatatgtcataattttaaaattattattttaacgtttatttattaaattattaaaatttatttatttgatatttttggtctaggtatcaacttttctagcaacagttcttgctttcttggttggattgagatggactcaaggatatctcacaggcggaagttgtagccctaatgatgattgcatcggattggttgttggaattggactccctctcatttcatttgagtatgattgtttagatttgatctct

SEQ ID NO: 211747 - DNA, 733 bp, Cannabis indica
ggtaagctcctagcaacttcctcttaagtctcttgaattttaagaaattggattatgcatgtttttgtggttttacttgttgttgttgttgctgttagtgtttggattatgtttctgtagttaaattatgtttagatatgttgatttgagcatgttttgatagttggtttgttgttagagcaagctttgagttttagaactcaagcttggctctttaatggtgtttttcaattctgagcttgggtagttgttttattacttggaatatgtttattggggtataatatgcatgtctggaaggtttggtaaagtttggaatcaatttgattaggttttggagttttttgggttttctggtataaacctgctaaccggttttacaatgcctataaaatctattacccgaatttgctgttgggttccccaaaaaatttgtgttgtcgattcgtgctagtttcagagctttggttggttaattccctgctagtttacgggattaccatgttaagttgcagtagatagggttttggtttaaaacctaagtccccggttgtgattcagcatgtcacttatccatgttgttatcgatgtgatttaggagcctgtaattccctgagcagttatttcactcaggttcgccgacacacctgaatttggaattgaggtaagattagtataatgtcatgcatatgtaattacatgtttttgcatacatattttttatgcctgttag

SEQ ID NO: 211748 - DNA, 774 bp, Cannabis indica
ggggaatttggttatatatcttcatcttcatctccatattaaatatttgggcttaagctccaacaagattataaacttggatatgagctacaagaagaagataatttatatgaagctaagaaaaaaagaagagagaaatttaattttatttatctctttaactagattatgttattaatgtcttttgggtttttttttaagttttgcaaaacagatataaaatccaaacaaagggagacaaagctatattgactatatttttataagtatgtttatttaattaattagttcttaaaattagaaaaaataaataaaaattctcatttttttctatttctccactattccatgattcaaaattcttatgataaggcatgttttgtttgcttattaaaaagaaaccaataattttatgataaagcttgttcaaaaagataaaatgatgatgattttatgataaagccatagaccttttctatagaaaaagtaaaataagatgacttatattggaaaaatacaaatcatctttttggtgtgtgtacaatttctgtgaaattaatcaatgtatcatttaaaattttgcgagaaatattaaaatgtcactgtttaatattttttaaagattaaaataatattattattagtgtaattaagtattagatttttataatttaatataaaatattactaattaattgtaaggcgctatatctaagtagtgttagtcttaagtactaatgtcttataataatactctaattttgtatacattca

SEQ ID NO: 211749 - DNA, 517 bp, Cannabis indica
tcagttctttgctaggaaccgacaacatagggtttagttaaaaccctcaaaattttctaatttctaaccgacgacatagggtttattaatatctatacctacagtttttaccgaaaaattgcctctaaatgtcaatttcgaattaggcgggtattttcacaccctttagcttccctttttataaaatgagttgaaaaaaggaaagctaaaggcccttttagtagtctattaagatatgagaaggatatgttttgttttcatcacggaataaaagacaaccaattggttgcttacaatactgcataaactaattggttacctatagtgctgtaaatatgggttgaattttttgacactacacgaaatcggcacgagccaggtaagcacgaggatgactaggcacgaaaaaatacggctttgggcacgacacaacacgatgctacaaattagtacaacacgacacgaaaactatgtccttaagtacaacacgacacgaagcacgaaaggcatgacacat

SEQ ID NO: 211750 - DNA, 1383 bp, Cannabis indica
aaataatttccaacactccctatgctaggtatggctttgacatgtgtgggcatactctccaaaatactataggcttcaaattattcagtagagaagaagaagaatttcaaaaataataactctctttattttctaattgtctaataaaaggagtctgatcatcatctgaaaataatggctttatcctcttggcgaaaccctatattgggcctattgggtttcaattttgccattttatttaaactcatctttcttttcacaaacgccatattttaattctaactctataaatatcaattctatctatttaataattataattaattatcaaataaaattaccatttaacttatttattaattagaccttacaaagtctcttaattaataaataaccctaaaatctcttttcttattaaataagttcttgcttagtgaaattcacaaacaagacatagtcttatttagaattctaattgattaattaaaatcaattcattgagactacaaaacaatattatcattcttagtgcagggaccactgacctatgtaaccaagctcttaataagtagatctgaaatttactaagtaaatttcgtaactgattaattcctcttgactccactatagattcagaattgcgctcttaattacatagaacgctctatataccaaaaatagatgcgttttgaattatccattgtttcaatccaaataatcaaagattctttatagatgatctacatcgagtaggaacaaatttactgttctaccagtcaatatattttatccttaaaatacttagctcactataaatgatattttagtaaactaatataattactaaaataagagttcttccatttatctctattaaaccaagctcaacggaaatcatcatttcatttttatataattacagaagctataggttccatatctatgattagcgctcccattcaattgtactgtactatgttcccaagatgtaagtattgggaagatctatttggttaactttaacgaacaagttaaagaacacgaataatagagttaagctagaacctaaccatctcagaatttaaatatattaatctaagatcaactaagtgatattgacttagaaagatataacagtaagtttatgatatctttttcattatcaatattggtctaatctgatgtatactccatacatctgatcctagtatactttgctaatgcccttgaaaggacataccatgtaatattccagaaaatataatagtatttaattaggcatattttattaaatatgtgattgtattgatattagagtaggattataatcttactaaagctaattacaagttgattagcaaaaatttgagtaaatgaataaat

SEQ ID NO: 211751 - DNA, 967 bp, Cannabis indica
attatagaagtataattaataattatctaaaaatttcttatgtatatggagaatgtataatcttgtaaggatgtataaaaagattaagattatagaatatgaataaaactagtcaatagtgtatttaagtaaaagaactttaatatagaagtactaactacaatttactatacactatactctagtgtgtgtgtgtgtgtgtgattttaattcggatcacatatgtagatagacatgtagtaaaggtactgtgtgtactttgattatacattacttgaccgatatgaaataatatctttcattaacgtgtcgttttccatgaaagagttattcatatcgcaacgataatcattggtagatcaatctaaatcctgagtatacatgaactcctatttgtgttcattgagttctttgattcacctgttaaaatttctcaaagaagatgattcttacaacatttatttggggagcttaataacatgagtagtagggaacatgttatacaataatagaatagaatctaatctttcttaacggatcgaatattagttctattattgtgttaattctaagagtgctaacaattggattcaaatctataatacgttatagattagctgttcacattgaattaatggtatataaagaatcaagagataattagaagggtaaaacaataattttgatcaactataattatgaactaataattagagggcaaactacttatattgattatatcaataactactagtaagaattctgtaaatataattttatattgtcaaatagtgcaatttcatatttatagtggagtaataatagaatttataaactggattattctattaatgagattgataataatcaagtgtttgttggagctttaaaatataggtccatggtccctaagtcacctctatataacacagtacaggggaagatttatttgatgagtaaatttggg

SEQ ID NO: 211752 - DNA, 565 bp, Cannabis indica
gttcttattcccaaaaagaaaattttctctaccatgggagacttgcgccctattgctctatgcaatgtagcctacaagattggtgctaaagttcttgccaaccgtatgcgttctctgattgatgctgttatttcagaaacacagagtgccttcatacctagtcgactcatttcagacaatatcatggtggcttttgaattaatgcactacttgaaacggaaatgaagagggaaaaaagggttcatggctttaaagcttgacatgagcaaagcttacgaccgtgttgaatgggattatttgcgtgccgtcatgctccgtatgggatttgctgagaaatgggtgaagcttgttatggaatgtgtcactatggtcagatatactattgttcacaataaccatattatgggaccgatcattccaacttgaggtatccgtcaagaagacccgcttttgacatatctcttcattatctgtgctgagggattttcttcaatcatcaaaaaatttgaagctaatcaacttatccaagtttgccgagttgctaatggggcccctacgatatcac

SEQ ID NO: 211753 - DNA, 508 bp, Cannabis indica
tatattcagcacaaacaattttgtgggaaggcagacatgggaatttgaccccaacgccggcacagcggaggaccgagccgccgtggaagaggcccgccgtaacttcttcaacaatcgccgtaaggtcaagcctagcagtgatcttctatggcgtgcgcaggtatatataatatcagatatattttagttacatcacaggaacggagttaaaatttaaaaggaaaataaataataaataattgatcccatgtagagagtctttactagggacaaccacataattattctgtgtttagacacaataaacttgtcctaaatcagagtatattttcacttctctatattagtttgttgctttttgtcacataaacctgaaatggagaagttaaacttttgaaattcagatttagagaaagaaagcttaaatttttctttagtttgcactatccttttccaatatcaactagcatcaagtgtaacttcatagtcccaccaactctcttctttt

SEQ ID NO: 211754 - DNA, 1038 bp, Cannabis indica
tctggtgtgttgatgttattcaataacgataaaaaagtagagcaaaaagaaccacttgtgatccgagatagtgagctaaagaaagagccacttatgattcagctgtccaagatggtgagtaaataaaatagctacaatcttgaggggatgttagatattctcacatcgttaatatgtggaaagataataaaatatataaaaagaatgagctactcctcccattgccattggttttgaaatgaaattttattcatcttattttaaattctaacacatcttgagggaggtaataatatttagtatattaagtatcagtttgtttagttagtttaactaattagttggttatatataaccgttattctcttatagttagtcagtctacactgctaactaaatattggttagcttatttcttattttgttcttgaactgatctcaatataaacagcattcttgattcaatttaacacaatctttttactttttttctcttccgcaataacatatattgttgttcatttttttttaatgtgtagaaccatgtattaatttgaggtttctactttccaatgtacgaccaaaatgtatagattttttagtacaacaaaagtgtgtaaatgaaaattacggtcattttcttatcattattgtttttattattatttgaatggactatccctttttttttttgaataaaaataaataattagagaagtttccaatgaattaactattcactactcatgacgtgagtatagtagcattacaagaaaatctggcgaatctgtaggaatggtcctaccaataaaaaatcaaatctattacaaaaatgatatcaaacaattatattcctctctctcattttatttatttatgaaaattaaattaaatcttttacattaaaaagacatgtaacaatctcgatcttagatatgttgggtcctcacggcgcacccacaccaagtataaatttcatttttttgttccaaccgacactacgtactcatgtcatgtatagatgagatggatatttat

SEQ ID NO: 211755 - DNA, 1112 bp, Cannabis indica
aataataataataatttacttaattgattttataagtatgctttcgaaatggccttacaattattaaattatttatgaactatttctcttaatttgagcatagactttggtttttttagtacaaggagcatggactcttaatgtataaataataattataatataaaatgaaaaaaataatacaaaaaatgtaacaattagaataattaataggataatttttcccgaattatgctttgaactttgttttttttttatatattttatttaaatttaaattttagatattttaaatattttaatttatttaaatttttaaaccgttctcatcttcgtatatcacgtatattttagatattttaacttatttaaaattttaatttttttatattcatttaatcaaagagatattttcaaattctgttagaaacatgtgagagagaaaaaaaaaattataaaaaaaatcacataaactactctaccaataaacaaacactatatttggtggatacacattcaaattttatatatatgaatttttatatagttaactaatgttaaaaaaaaattaagaaactaataaacaaaaataattaaaaatattaaaaccaaaactacttaccgcaaaccgttggtatatattatgttgttatatgtaatttatttgttttaatatcaaaaataataattaaaaaaatgtgagagaaaaacactcaaattatatatatatatgaatttttatatagtaaactactattaaaaaaattaagaaactaataaataaaaataaactaaaaataattaaaaccaaacctacttaccagttaccaccaaatcattaatatatattatatatataaaagcaattaaaatttatgacttgggacgaataagaaattatcagcaaagtatttaatttattgataaaaattaaattagatatttatttaaattgaaattatagtgtaaattatttttatttattattattattattttttaaatgtaagagggtcagacgtaaccaacagtagctgtgattttcgacttttgagcctgttaacttaacggaaggaaataaagaaagtgagagagaaagaaaggaaaaaaag

SEQ ID NO: 211756 - DNA, 639 bp, Cannabis indica
agtgaaatctctcccaaaagacttccatttgagtcaattataaatatatagaaggtttcccaatacttctcaaggaaatctctttgttgctcaatccaaattcttttcttccttaaatcattttttatgtgagacctcaattttattttattttttttgaaagaagaaatttcattaaaacaacaaatcaacggttacttttaacaaaaaaataaataaataaaaaattaatagttataggaacactaataaaatttaaattaaaaattcctataaaaaacttaatacatttggctagtaaatgagctaaaataatataataatgatgcaaacggttaaaacatttctaatgcaaatataattaagtggtggaaaattaaaatataacttatttaacaaaaaaaaatatactctaatagtgtaaaaagtgatgtaaatttgatatataacaaattttgtaatattaacacaatatttgatttaatataaaatttgaatcacaataaatgtattacttttttatttataatatttatattattttattagtatatttaagagtattgttattaggtactagtctaggggtgcccatcattttttatagatagcattcacgattggtttgcaatatttttt

SEQ ID NO: 211757 - DNA, 625 bp, Cannabis indica
catgaaaactattatacctaaatatcgatcagcaataagaagctaacacgtgtatcaagactgaaatatgaatcagttcaaattgtgcattattaaatgcacattaaatgactcgccttaggaaatatagttaataaaaatattcgaactcgccgcaacacatgcaagagcgagatatgagtaataactattgactaatgaaactagggagacaaataggttcattttaggataaacagaatacataataaaagcttttcaaaacgagtaaacaaagagattgcaactcattgacccacatactcatgagtaaaagcttacaactcattgatccacatactcatgagtatgtttaaggaatgaaaataacttcaacatttattcacctcgcttttaacgcattgaagtaaccaccttgctaatatatttctcaacggcaaaggagaaccgcgagatgcattgtaactcaacacttaatattttttcctacaaagatagttaagaaagataacatgtacacgacgagaaccatccaacacaatcagcataactgattatggataaagacaaagagcgattgaacagttatttaatattatactatgtgcacaaagatgaaatgtgg

SEQ ID NO: 211758 - DNA, 558 bp, Cannabis indica
tcctgggttctccttttatagagtctttgatggttgaattcccgtattctgaagaacgaacttgggaagtggtcttccccttttcaaggagaaaggattgattcttctgcttcagtcatagactcattcctaagctttgtgtcagattggtcttatagctgctgggctcgtttgggccttgtattttagcaaaagcccaatgtattttggatgagtgggttatatttaatgacttggtttgaagggttgtaatttcgatttgggtcgtaagaggcatttgggcttggtgtaatttttggccactacagtttgtccctaactctttgagtcaagtgtggttgacttgaagagtagtcgcgctgactggcaaaaaattgaaatatatgtttcgataattattatttttcaacgcatcaattggctttgagaatgtataaatattgagtttttattaaaaataatttgaatgagtagtatacatatatatatgagataaataacatatagtacaaaatggcaatagttgttatggtgataataataataatatgtttgaca

SEQ ID NO: 211759 - DNA, 541 bp, Cannabis indica
tatgtatatataatcacatttaattaaagaatacattaatatagctgcaattttaaaaaaaattctcaaagatcaaaattttaaaaattaaagaataaaaatacattacttaattaagaaaatgaacatatattgcacttaacatcacttaattaaatttaatttaaaaaaattaattatgcgtgcattgcaagtaatatcaacgtatagtataaatatatatgtatatatatatatgggtgtgctcttaatgggtattacccatgaatgggtatttaattattgaccgttagatttgatcagatagatgatatttatagttattaattatttattttaaaattaatattttttattttacttattacatgatgacatgtcagtcatcatatttttcaaaccttatttttggtattctattcttattcccgaatataaacaattaaaaaaatattaatttataaatattctcggtttctctctttctatttttgtcataaccatcctcaaactcaagctttctcatcggcatttctcatga

SEQ ID NO: 211760 - DNA, 506 bp, Cannabis indica
tttctttttaccaaattttcagccaggtttttaatgagacaaattttatagacatccaatggggagtgttatgaaatattatttatggatgtctaaatcacaaaattaattatcatcattaatgtttgcttgtattttcctttattacattgatttagtttcctattttttgagtcatatttttgtataaatagggttcactcctttggaataaacaactgagaaattatcattcagtttctctttctctcttcaacttcttcttcttttcttcttatttattttataacaataattacataatacactatttttagttaatttttttttttttacattttttacaagttttttataaaaaaataataccaaaacaataagaaaatgggctatttacaaaatatggaaaaattaagatatgttttgatatatatggcataaaaacttaattatatgtaataaccaaaatattcagtaattaggtagtaattaggtagaataagtta

SEQ ID NO: 211761 - DNA, 851 bp, Cannabis indica
ttcaaaacgcaagttgaatctcaccaatcaaatcatcattgagtgagttatggacgttttactgaaggctgctttgataccaatgcacaggttgacatatgacatcaacctggacgctggatgagtgagaaaacatgttgagggtgtattttttgatgcctaaatgatatctttacattcattactcaatttctttgttttggtaaagttgttcatcaagtctcgaagatgttgctgtttcgcggaatcgggactcaaaactactcgatttgtgactaagtcactttactggaaaagtgaaaatatgaagttgtgaatttaacttgtctaagttcatagatcttgtttactataaaaaactagactgatgctcaagacggaatcaaaatcagataagcagaactcaatgtaccaagtcatacgtttgttggtttttatggttcatattagagtcgcagcgaaagataataagaacggatttaataaaaaaaattgttaaatccaatatgaaccataaaccttagatctcaacacaataatacataacacaaacctaattattagtttagagattttacatttggttgcctattagggttttcttgctatcttttcgtattaatgaaacgatcatttaatctaataagacttgttgaagagttcacaccaaggtcttccaagtcagcctcaacactccaagaatatagtggactattagattaaatcaaatgaatataattttttgatcacactgtatactcaactcataagacattgtgatttgagattagaaaaagacacaatcaccctctagagagagagtgatgtgtgagcaagggatgagagagaga

SEQ ID NO: 211762 - DNA, 650 bp, Cannabis indica
aacttatttttttaacagttgatgtagcattgatttgagactacggtcgggcctggaattaggtgagttaggcttgtacttaggacccacttagtctaaaacttcaaaaaaatatgtttttttttaaaacaaatattcgtatgttttagtgattttaaaaaatagcacatatttttttaataaaaagacccaatttatttttttcttaagctccatctaattttaaagttggccttgtttgggactaatttgttacaattcaatagtttgagccatgatattatttacttaatacgtgtttaaagttatttacaaaggttaagtgtcacactattggaaatgattaagtacgatctagaatgaaagttctataaaacattataattatttttcttaaaaacataaaattgtataatggctaaccttcttcttggataaaagaaaaaataaataaatgaaaatgtaacatagtttatacacctcccacatcattctacaaggtggcattggaaaattgtcatatattattattataattatatataatattactattgatctatatatatatacacgagaagcgttatttatagttttttagtcaacttttatgttaaaaattatatgttattctgaataatttacagtat

SEQ ID NO: 211763 - DNA, 559 bp, Cannabis indica
acttcatttggaggttatgtaattaatggttggctccctgtgaacactatattgcaacaccgcagaatgaaaattaatatcaattgctactggtgtggacaagaggaagaaaccattgaacattgcttatggttttccccctcttcaaaacagatctggaagaattattcaatctggaagataatcaaacagagcaaaggtacaattattgatattctcattcacattaaatgacaggtggtgaaggaggatttggtttttttttttcataatcatgtcttggctgctgtggaatcgaaggaataagaaacggcttaatcaccatgtcctttcaaacgagtcttggacaaaatgggctcacatagaagttgactacctaatgcaccatgatccatcagtagacagatgcaagataacccctcctattaagcatatcggctgggagcctcctcccatggatagcttctgcattaatagtgatgctagtgtgctatgtactgaggctagaatcggtctgggagtggtcttaaggacccatactggcgaggttgttgctgca

SEQ ID NO: 211764 - DNA, 511 bp, Cannabis indica
attatatcctctacgagctacgacatgcttcttcctaagctcatcatccaaagtcttgtgttgttagcgctgcttttggttcaaactcgtcgcatgccaagcttattatgggcatcaatcgcttgttgatgtggcgctcaggtaagttcccatttctttctttttaatgtcacattagggatatgtgtcactttattagtttggaggtgaacttatatttttatttttatttggtttttaaatttttagtttttagttgtttctttgttttgagtcaatttactaaatgtgaatcaatttgaaagtaagtagataacctgatttgaaaatttcatttatttttcaaaaaattcgtgtgctttgtgatattacattcttgagctagttttaattttgtgctttaaaagaacacggaatcataataagtaaattttctagcaattgaattggtttatgtatgctaattgtgaaatgtgaaaagttatttaaaaaattctagaacttacttgct

SEQ ID NO: 211765 - DNA, 948 bp, Cannabis indica
gtagattatcatatcagtgaaatattgtgcactgataatcttgattactttttattatgttgacatcacaataatcaagaatatcaatgtgataaggatttagatgaatttataaattaaacaaatgatcatgaaataaacatgtgaacaaaataacacattaaacaagtaatgaaataaatttatttcttaattgataaataaatatagaagattaaattgaagttttatttaggacacaaaactcaacaaactcccacttgcactaatataaaacaatcagtacatttcaattaatcctagattctttctatgcttttcaaatgtagtgactgtcaaaatcttggtgaatggattagctaggttgtcctcagtatcaacctttttcactagtacgtcccctcttgccacatattctctgatgatgtggcatttcctctcaatgtgtttactcttcttgtggcttcgaggctctttactattggctatagcaccagtgttgtcacatagtagaactagtggtttttccattccaagaacaacaccaagttttgtgaattagccagaccagttccttagcagcctcattagcagctatgtattcggcctccatggtagagtctgatatcacaaatttcttgacactataactgctccaccccaaagatttaataacatcctagatgtagacttcctgtcatcaagacaagcttagaaatctgagtcggtatagcctacaggatttaaagtactacccttatagactaacacataatgccttgtagtctttaaatatttcagaatatgcttaactgtagtctaatattcctcttttgggttcatttgatacctgttcacaattcctactgcatagtaaatgtctggtctagtgcataacatagcatacattacacttccaattgttgaaggcataactgcccctttggt

SEQ ID NO: 211766 - DNA, 762 bp, Cannabis indica
atagataactataaacaaataggtcaatatttcttttatgttaaaacaagatttaacaaaaataaaaaaaaaaaaaagaacaacacacgtacacaagtaaattgaaattgcagtaatcaaaataaataattaaattgaaattgctttagtcttgattggatagatattagataagatagaaaaagataaaaaattaattattattattattattgatatgggattggaccaccctctgaatctgatcacaacaagtatatgggtttttataccactatacggtggaaaatataagctatccttattattaattaacaacttatacgtgtcacatttttacgtgttttatgcatgagcttctcaagctgtcattggttaaaattcattaaattaatttcattattctgccatctaattaggattttcatttctaaagatttgaaaggctagttatatattattacgctcagatttgaaataaataatattgatcagatatcgatcggaggagcgttttctctacttgtcacaaaaatctctctctgcttattcaaatcttacccatttgatccattttatcaacactaaaatatgcctattgttgttgttactgatgatgatcaaagaaatattatcaacaacaatgttctcaagaatagtaaccatcatgactccattcccttccctctttggtacgtaaatttatttatatatataatctttcttattcttcttcttcaaataaataaataaattcacata

SEQ ID NO: 211767 - DNA, 1535 bp, Cannabis indica
aacaatgatgggacaggtacatacaaaagaaaagaaataaccaaacaaataaaaactaaaataaaataatagtcatacagacaaaactaaaacactcaaaaaccatgtacccaagacaaaaactaaataactgaaaacatgtcacatagacaagacaatcgcagttgcaaaaatcgaatcgcaatagcaaatacaactcccgaccaaactgtgcctatgcctaggaaaggtcggacaaacttggaccaaagataaaagacaacattcggtaactataaatttaaatacaagaaattctttaatttttaaattattttgcaactctaagaaaaagcttgagttgctaactttgattctgttctagttttgtttcaagcttagagatgttaatcttcttgttcatagttcagttaagttggctttggagtctaaagcttcgactagttggaatggggttgtcccttgattgcttgtattgagatggaccagcctattcctttatagttgctatgttgtttgatgttttacctttttttaaaaaaaaaagtaaaagaaaaagcttgagttgttacatgttagttagtggatttaatctattttgacgtttggttaggtttctctttcatttgtccctgaaatattaaaaatgcagatgtgaagaagtacttaattagaaaatgaaaaatgaaaatattgtgttatattaagtcatctccaatattagttttattggggttgcttgtcaaaagatgtgtccttcacaacaaaatatttgactttttaaagaaaatattaacatagttgttcctcaatagcacccatactttctattttttttttatctttcatcttattgggtaaattaatattaaattatataagtaataataaattggtgattacatgcaacactactagttgcttgcattgtagatggcatctctaatgttttttttttttttgaaacaacgtagatatacaacgaaaattagactttggtcatcgtatcaaaagttatatcggcatcttcaatgttaattttgtgaaaattacactacatattacttttaattgatacctttaattttggggtaagttgaaaaatgcctcttttattaatcaattaaccaaatttgcctctaattttatatttatttgaaacatacctctttttatatgtattgtacccaaaataccctgacataagagagtcacatggagagtatcttgaagtgacaggggcaaaattggtacaatgtttaaaaaaagaggtaaaaatgatagactttaaaaaagagggtaaaaatgaaagaggacaatataaaagggtatagagtgtaatttcctctttaattttttcttcttttctaaaatttattatgtttacctccattctctctaatcaaattttacccaaattttcccataaacctacacatctatctccaaagaatcaaatctatattatgtttgaaattatcttagttatgtgagagtgtgagaatatttaagtacaatactcaataaaaagaaat

SEQ ID NO: 211768 - DNA, 1002 bp, Cannabis indica
tactggcgactggcgttctcatttctcagttaacgtaagtcgtaaggcttaatactgatatatatgttattattatatatattatttatttaaataattacttatctattatatatttattatatgtacttaaataattacttatttacttatatattatatatattgcttttgtatttgtttagaatagtatgtatgtatgaattatattgtatattgtatatattatatatagttatatactattagttgcttatatataattatattatatatattatatattgtaaatttgtaatgtagaaatgcagaaatttttacaataatattacaaatttacaataattaatatcatttacaataatacttggttaagttaaagtttaaaatgcaaaagattttataggaaaatttaaataaattagttcttttaaatctatcaaagaatattaaaaaatattatatacatatatatatatatatttttttatatgatttttttagtcaatattgtatataaattaacattgtaaaattctttgttaatacagattacaaagagaagatttgaagatatctattttggactaaaagagcgaaagtgactaaaatttaagacaaaaaaatagtcaagacattatggtaaacctatgctctcatattttatttttaaattaagattaaacatattgcaattgatggctattagctaatacatttaatattttgttaatttgcataaatcttttaattttgtttggaaataaattttgtattgagtgatatcacgatttggtctttgtatatcgttataatctagtctttgtattaggtactaaatgatgataatggtgttaatgaggaacaacctcctcttgatgagaatcctacagataatggtatggataagggtaagggtaaaggtaagggtaagggtgctaaaaaaggggtaaacctcctacagtgcctattcctaattctaagaagaagggaaagtctgat

SEQ ID NO: 211769 - DNA, 884 bp, Cannabis indica
caggtacgacaccacttctgccatcttcgtattttagagagagtgttgagtttctatctaagctacaagaaatgatctagaggttaattcataagagacctttatatgtgaagtttgacatttttacatctcataccaaatttctttactaatgcaatctaatttttgcatttattttgtagataacacacacactttctgtttcactcaacaaaattggagatcttaaatattatgaaggagatctggaagctacaagaactttacaattttcggtctttaaatgttcgacgtgatgctgtcaaggacaatccaaatgttccttctctggtaatcagtttcttctgccttgtagtttatgttatcatacttatcactaactttgtttggtttgtgttaaaaattaagctttcatcatttttgcagttttctagtttggtatatacatatactacagtatataaatattaccattgagcatcatttgagtcaatttggttatctgcctgaaatttatgatatgtcgtttgttaatagatgaaaattggcgttggatttgcaaaatttaaaataaaaaatcttgtgttcagatatgtacaactcatcgtaaattatgatcatgaaatgaccagcctatttgtcagatttaccgaaagtccacccaagagggatagctcaaatgatcaggcatgtggttaactcccacatggtctgaggttcgagtccctcctggggtatctacacctataaaactcagtggaaatctttcaaaatcatgtaaaagctctctgcttaacttgtgtgttccttccttttcattttcatcaaacattcactatgttctgcaaaaaaaagaaaaatatattgtaggggtaggcgggaat

SEQ ID NO: 211770 - DNA, 540 bp, Cannabis indica
agtttttagtttcttttagtaagcttataattgattgttcaagctatgaggttgaacctgctgcaacaatttctattgttgtgttttctaaatggtaaataaaataggatatagatgttcttaagattaaccgtgatgctttgaaaattaggcagcttgattatttagtttatttttctaattataatcctaatcgtgtctccaacaaaagagatgtcgcgattcgattgcaagctattattttatttaattgctattaataaaatttcataatttgttcaaaaaaaaaagattataattttttatgggtttagtttgctataagacttctaactgtatttatgtgtcacccttttaatttgattcatattttgaaaattttgtacaaataaagttaatgtcatgccaaatcatgaaaaaaaaaattgtgtcttgtaaataattttataaggtaaacctaacatgactcacagcgagatattttcgtatagtatttcacttgagatgaaccattttcgtgcttgaattcattctctatat

SEQ ID NO: 211771 - DNA, 744 bp, Cannabis indica
cactatttaaaacaaaaaacaaaaggcaaaaaagagttcatggctcttaaacttgatatgagcaaagcatataatcatgttgagtgggattatcttcatattgttatgacagatatggggtttcattcgacgtggattgatacttgtcatgtcttgtattacttttatctgctacaatgtaatccatggtggtcatgttgttggccatatcataccgtctcgcgatattcggcaaagtgatccactttcaacatatctttttattatgtgtgctaaagggcttacggcgcttatcaacaagtttgaggcaaatcaaactattcaaggttgtaaggttactcgtggagctccctctataattcacatgctttttgcagatgacggttatctcttttgccaggccacaaaagaagttgctgaaagcgtcaatactctcctccataccttccaactggcatttgggcagtaagtaaatttttccaagtcatctgtttttctttagtcctaacactattgctcaaaactcgatcagatatctgttctgtccttgaaatgcttgaagcgtctgatggaaaacctctatttaggtttgcctaacatcataggtcagaacaagacttctatcctcggctttctaaagaattgggtcatggcttgcatcaacagttgggacagcaaatttttatcatgtgttggtaaaaaaaacttctccttaaaaactgtgattcaaatccttgccaacct

SEQ ID NO: 211772 - DNA, 614 bp, Cannabis indica
tttatttttattttaataaattctataatttttgtatgactaattagaatgtttatctcttaaattttgacatgtaccaaatcatatcccttgactttagtctaatttcattctattttactatttcagtaattatttatgtactaaaacatgatcccttgactttatatctaccaaatcatgtccctcgaactttgacatgaactaaagtatgtcccttgaatttttatccatgttagattttttttactaaaattggaaaaaactccttaaatctaataatctcaatagtttatgagacatttttaacgatcagggggcataatttaatacatgttaaaattcagggggcaaaaatcctaattatcattttttttatcaaacaaattaatattttttatttatatcctattttaaagtagaaatttttttttgcaccctaaggttaagagctggttcggccactgttagtacctaatagcaatgttatattgtaaaattgtaaagtgtaatattactagtacttcatttaaaaaaaatataaaaacaactctaattaatcatagtgatatattaactaacttttcatttccactacacacatgttatgtcag

SEQ ID NO: 211773 - DNA, 849 bp, Cannabis indica
aaacaaaaaaaaaacaaaagtaccattttagattaaaaattcttttattaagaaggccataaactaaagaaaatgtagctctgattttttgggggggtcaaaattgaatgtcattatattataagttttggaaaattacaaatcttataatgtttcatgcattattaagtgaatatattcaaaatgcaagcataattaaagaaattataagacaaggaataatgtatttaattttgtagttaatttttaatttatgctacttctttttaattttttctaacttcttatattcttaaaaacatatatatataaaataaaaataaaaaatatatattttaaatattaaaacaaaaatataaaatataaaattttattaaaaaaatatacataattttataaaaacaaatatgaaaataaaattaaataactattaaatttaatacaaaataatgtgaaaaaataaaatttttaaaaaatattaagagtactttttttaaaagttaattttaatttattttttaaaaaattattacagtgtaacaaaaaaaatcctagaaaagaagaagaagatgatgaaattcatttataaaccaaatctaccattttattctaaaatatataacatcacacatatttttcattatatattatatacaaaaataaaatctcttcctctccaaatactgatctaaattgttggcttgctttggcacttagtcaattaatactaagaggaatctagaatgccacttgcagacctgaaaaaaattaaaataaaataaaaataaaataaaaataggtagtactcaatctgggtgagaattaataaattttagtgacattgtctgt

SEQ ID NO: 211774 - DNA, 521 bp, Cannabis indica
ttatttttaccctttcttttttatatatttcatttataccctcttttatttgttataactcgattatacccttatgtaatgaaaaaaatcttcctcacctccctgaacagtacctttatgtaaggtataatcggtgatagacttataaaagaaagtacatttcaattgaatttaaaataaggctatttttagttaactgattaaaaaaaaaggtatatttcaactttaaaaaaaaataacacaagtaggcccattcactccagtgattagcccacactaatttagcccaattccttcagcccaattcttttaggtgaattgggaatgggcttgagaaattcttaatttgttttagatagtttataaaaatacctgattttatacctttttcttggatttgtacatcatactttttgtgcaaaaaaaatgatcgtagtttctttaattgaatacggttttattttatcattatttcctaactttagtttcatttataataatagtaaacatatatatatata

SEQ ID NO: 211775 - DNA, 1018 bp, Cannabis indica
ttggcctggtcgctccaggttgaggaggaaattacagattcatccaggtcaactcattggtggaatggagtatgaaatctcaatctgccaccaaaggtgaaagtgtttgtttggcgtatgttctatttggttttaccattagcaacacaacttatctcccagaaagtttgggtacctctttgatgttctcagtgtggagaagaagatggaactcctgagcatgctctatttttctgttctagtttgattccagtgtggcatcggttgggagtgtggtcggtgctccgtcgatgtgcgtatgggccgatgcaggaaattatcctattactttttgacatgctatcctgtgatgcttttgaacatgatgatgacaaccctttggtggctgtagtatgataggaattcagtattatttgacaacaagcagtcaagattggatattattccagacttagccaataactatttggcagagtttaaggagtatgatcagcgaggccttcatttgggattgggccttacgaacccagttgtaaactgaactactcaatggatgccacctcttcttgaatcttttgctctagcgacggatgcttcggtgattctgggtaggggctttgttggattggggggagtggtacaggatgcagaggatgtggtttggttggcttggtcatcaggtgtattatgtgatttctctattaatgtggcggagctgctttccattcgtttgggcttggttcttgcacatcaatttggtttcaatatctctattattaatagtgaattccactatggaaaattagtttggattaataagctttacattaattttagttttcagtctattttaattatatatttattctttattagctgttgttggtggtagttcttgcagtgtcattctacgattagcgaatgatgttgccctatacactgccaattctttgtcactaatttagaagattgtgccaatttttaacatctgtacagcaaatttttctaataaatttcg

SEQ ID NO: 211776 - DNA, 644 bp, Cannabis indica
ggtgcttagtaaattagcgagaatccgtatgacgctgaaagcgaatagagaggcatcaaggacagtatacataggaagacgaaagcgacacatatcaactgcgaaagcccttagtatataatgtacaaactaagtgcaatagtcggatcgactcgagaccaagtaagcgaggtgcccatctcgctatgggaaggattcctgtaacttcatccatttaatgtcagtgagacttacaaccctgacaagtcagaagctaacattcaaacaagctttgaagatctctttgtaaataagaaccacgatcgtcacaagacatgcatcctcgacctcagaaggaaaaatggccccagctcgctattgagatcattggaaccaagtgtctgtcgagacatccctagatacaacaattaaagacgtgtttaatacacgatcattttgacctagtaaaagcgggaaaatcacaactatatgattttcaaatcacacccgcatgtacactacgtgatatgtaatcaaaccccgtgatttaaggggatgatcgttgtaaacagattgcagtcaactttgtaattaactgcccactatgtaattataaacattgggaaacaagatcagaaaagtgatggaaaaactcatacaaaaga

SEQ ID NO: 211777 - DNA, 583 bp, Cannabis indica
ccctgatggaagtatgtcaaagtttaaagcttgccttgttgtaaaaagatttcatcaacaacttggatttgacttgaatgaaacttttagtccagtggtcaaaccagttaccattagagttgttctttctttagaaataataaggggttgggacataaagcaattagatgttaacaatgcatttcttaatggtgatttgcaagaggaagtgtatatgcaacaaccgcctaggtttgttcttccctcatcccctcatctagtgtgcaaattacacaaggccttatatggcctcaatcaggcccctcgggcctagttcgataagttgcacacaaacctcattgttgtaataactacatgatttaggtatggattagtgagattataaatactaattttattattatttatactactattgagggataaatctgaacatttataatttctgtaaaatatcctgttcttgtaattttagctcggttgcgatggaaaatgcgacggaggatattttagtcacatgggtaaatatagagccttttagttgtccccacctttggtttacaactgcatttaattaagtaag

SEQ ID NO: 211778 - DNA, 582 bp, Cannabis indica
ttttttttattgatgtttggtgataaatgatggaatagaaaccttgaaatgatgccacatatatatatatatatgtaacactttatagattcaccatcataacactcactcacgttatatatataactaactaattactgacagatcatcatgtaattaacactttattattattattattattattattattattattattattattattattattattattattattactacgtatctatcaaaatcaaaaagtactataccaaattcggctagtacacacacctaagaaagagcttgtaaaaggttgttaatttaagcagacttatctgcagtttggaatattcaacaaatattttaatttttttttttagattattagaaaaattttaaaaatttaaaatactaaaaaattatttactacacttataaaaaaaaatcacatttaatgtgtgcaattatatcttttaagtttttaaaaatttataaataattttcttaaataagttcaacaactataatcatttaaaaaattgaactaaaacattttttaattgcgaaatgaaataatctactaacata

SEQ ID NO: 211779 - DNA, 943 bp, Cannabis indica
gttagaataggtttttttttttttgaaacagaatgttagaatagtttatatataaatgagtaatttgcggtataaatacttaagtttgtcttgcagttgcagaccaatacttaagtaaaaattttggcggtaaaaataccttctgttagggttttggaacttccgtaggtacctcaacgttaagtgacagatcattacacacgtggcagtatcttattggtccacatcattaatttttattattttttaaaatttcatataaaattatataaaaaaaattaaagattaataaaaatgctaagaacttaaaattaataaaaacataattttttaaacagataaaaatcattaattaataaaataaaagattaaaaactaaatcaaaatttgaaaagtaaatgaactaaacctaaatgaccaaaccctatggttaacccagattcactaacccatccctccttttcttccttcttcttcttttcttcttctacaggtcagatcaatccagaacaaataaactaaaccatttcatccttttcattttgcgaaggttctgtcgggcacgagattttttgagttgtgtcagatgaatttctgtttgctcttcagcgttggtagcgagatctggtgttggtatcgctgacatcggcagcaacaccaacaatggcagcggagggagaatggctgactgagatcaccgatagtaccgaggataatgacataccgattcggaggagaaatcacggcggaggagttggcctttggcgatggaggaggttgaggagaaattgcggcagaggacttcgacttggcctcattttctggctgtggagatagagagagaaaatgggtttggattttcttttaattatttatcaaagaaaaagagttgatgtatttagatttggggtatatttagatctatcattttttagagggaact

SEQ ID NO: 211780 - DNA, 568 bp, Cannabis indica
ttttttttttttctttgtatcttgagatatttttttatgcagatatttttatagaaatgtcaaaatggtttattgtagtaaacttcttagatagaaatattacttttttaagtttttaataactttgataagcaaggaattttttacttttaaaattatttttataagaactaacacccgtaataattaaaaaaaattagggagtttttttatttttatacaaaacatttttttttatatttttaagaaattttacataaaaatttctatggcaactagcgctgcaacatatttataactagggctgcaaccactttagaaatccaaaccgtaatttaaaaaaaaaaaataaataaagaaaaataacatataaggtaatttccaaaaaaaaaaaaattaatggaaaagacttatttataaaatttaaaagacttgggatcccaaaaataaagtttaaaagttaatttatcaacataaactcaaaagttgacctatacgacaaaattaagacttttgataacagtcttccaagaggcccaatcacctaggtgaagttggctgaatatgt

SEQ ID NO: 211781 - DNA, 547 bp, Cannabis indica
tgtctgggtgcactaggcgtagctgcgtggggcattaatttgtcttgagcaaccccttcatgaaattaatcaaaagagagaggaaagttttaaccaaattctatttttaattatttgtaaaagaacataatatcccaaaaaaaaaaaaactaaacattcatttaaaataataataacaaaataagatagggaaccggggcactaattggtcttgtgtattaaattgtgtttatgcaattacgaagatcgatttgatcagaatcaacatacaaaatttaagatccataaatccaacttagctctaagactatagtctatacatataattacaactctaggatgggtttcccgaaagctacactcttggggagaataaatgaggcacatagcatccattttccaggagcaactaggcggacccttcgcatttccacgtcaactgctacttcagttagtgcaattcttattctctgtattaaaatattcaaattcaggaattaggtaaaacaagaaaaggaagaaaccaaataattacttacacaagtat

SEQ ID NO: 211782 - DNA, 789 bp, Cannabis indica
aaaaaatgcaaagcaagttgctaaacattactaatcatcgtgaaaatttgaatgtaatttaacacatttagcagtgtgttttagcgatgttgtgatttagcgacaattagcgatatttaatgacattaatgtgaaaatcagaaaaaaaaaatatagaaaataagcgatggattgagagctccagtgatgagtgggaattttgagggtttcggggtggttgagctcgtgaatttttgggcttcaaagtggagatggcgagacttacttagagtgtgagaattaaagagagagatttttttgaaatgtaaggtatttttgggagaaaaatatattaaaaatatagataccctatttttaattaggtggtatattaaaacatcatgttttacatttaagcatactaagtcaaattttcccaaaaaattatataagactacaattccattactagccatttttgcaaattatgtcttttcaggaatgtaaagccatgttggctaacttaagtaatgtttatttttgttttattaagcggtcagctaataaattcactcatgagtttgcaagagcgtctttattttatcttgattgtacttttagtatgaaaaatattccaactgagttgttgcctattttagtgactgaatttgaaggttaataaagtttgattttcctttaaaataaataaataaacaaacaaaagaaattggactttacaaaaataggggccccttgtgtaatgatcctgttcaatgcttgggtcggcgacactattggtgccttatagca

SEQ ID NO: 211783 - DNA, 689 bp, Cannabis indica
aaatctcataattcatgtaatttttacatattaaaatgacaaaaatattacacaattacattaggtcgatcatataaacttttatacaacctagcaaaaaaattggcaagaatacctcttgctataagctgcacgaaccaccatcttcaacaacggtagctttgaacaactaaaactaacacactcacccagatggagaatacaaaatatacgcagaaaactaatacctcctaatatcaattttcatattcataaaatgtagatctcttatcaatagatttggagttcacaatcaatccaaatcaagtatgatccaaaaaaaaaataacaaaaataactataacaaatgtatatctcgttgacattgacgttgttttccaaatttccagtgtgaatttgatcatatcaaataacgaatagtataaaaaatttgcatacatctacagacacatacatcaaaatatcgttatggtttgttaaattttcgaaaagttacattgaagttttgctaacgctcttaaacttgatatatcagttattacaaactgataacgatacaatgatatttatcataattgcagatgattcatattggcagagcaaagaaaaaggagtgtaaaggcaaggaggctatatagcgcttaagcttaatcttagcaaagcgtatgatcgtgtggatgggggttttc

SEQ ID NO: 211784 - DNA, 1277 bp, Cannabis indica
tttttaaggggcaattgttatacccaaaattcggctgccatctcaatggaggacacgtgtcaagataaagggaatatggatagatgcaatcattttttatggaataactcattaattacataagtatcggagtatatttgtaacctgctgactgcaaggtcttatgtgaggaatcaatatacaaactattgctcagtatattagcgagaaaccacatgtcgctgaatgcgaatagcgaggcatcaagtacattacgtctagaaagacgaaagcgaaacatgtcaactgcaagcgaggtgcctatctcgctatgggaaggcttcctataacttcactcagttaacttcagacattttctcagtaaggcttacaatccctacgagtcaaaagctaacattcaaacaagcctcaaagaactctttgtaaataaaaaccacggtcgtcacaagacatgcatcgtcgaccttagaaggaaaaatggtccaagctcgctattgtcactactataaaaagtactattcacgtcgatcaacgctactgttcattgcgttgaccgacgtgaatagtatagggaaacgttggggcgtcgttttcaaactgaagaaaaaaattattaattagcgttatttactaaaacgtcgctaatataatacccgacgctaatatcgaattttctaaaaaaaaagttactttcacatcagtttaaaattgaagctaattttcctagcttcattcctaaactgatggtaaaaggatttgattctatgatacgccgacactaatgttctataattaccctaactcccatatcgatttacacggactcttcacttcgtcttcaaccaccgaatcctctcctccgctctggcaattacgatttatcctcacttcgccttcgatctgtccaaccccaacgagattcgacgaaaaccccatcagtaagtctttccccctttctcttctcttctttcatgggtttcgacaaaaaaccccaacaaattctattttctttgaatttcatgggtttcttgtttctctctaagatctctcttcttttggctctacaccgatgtgtcgacggtgcctctggtgcgtctgggttttcagataaatactctttctttatttactatgttcagtagaataagattctctttctttcccactgagttcagataaattcttattagtgcatagcactgagaaacaaagagcttgattgatctgaaattgtcttttacattggggctaatatatgtatagggagctagagatat

SEQ ID NO: 211785 - DNA, 842 bp, Cannabis indica
ataataatataataatttttttataatgtatacactattcgtaacactaaacatgtatttttaaaaacttaataataaaaacttgtgatgactctaaaattattatttattctaaaattaatgttatataattttctttttaaaaaaattaaatttataaattattgattaataattttattaaaataaaaaattaaattttaattttttgtctaaagtctccaaaccggttaaaagaaccctgccatacatcaaagtgaaaagacaaatcaaatactaataacaattaatattgaaataacaatattaattaggataatactacaaaactttgaatcaaattatacttcaaaagacaaaagataataataaaatatacccaagtacaactaattcatatactttattttattttatattttatgaaataatacatgtatgtacactttattaaaaaactatataataacattatgtcagtacatattatgacagaaattattgtaaaataaaattagaatatgaatagtgagtgacgtagtttatacctgagtataaagtatataccaccatttatttattttaatcattttatacattattgtataattaatataatatataactctcgtagctgtgccattgtgctattctgtggaaactattttatgaatttacattataatccatagtaccaaattacaaaatagaatgataaaaaaataatcacatttcctataaaataaaagaaaacagtaactataaaaattgatttatttatagtgataaaatacttacattcgaagtgatttaaattctcaaaattatacaaaaaaaaaaaa

SEQ ID NO: 211786 - DNA, 591 bp, Cannabis indica
ataatgtttctttattttttttaggctaattttggatttgataatgattatctatataaccatgtctatatatattaattaataatcatacaatataataaagaaaattatgtgtatgtataattaaatatttgagacaatatatattgtatgatttatgtgtattccattttagtattagatataatataaaattttaaaaataatactacctcattaattaaaaagtatactataaattattttttaatatcaataactaataattattattttaaaaagtaatattatttttgtaattcttttaaaaaataaattattttgtaatattcaatctaacatcatattcaattaatgattaataattattttttctacaaagtaatttaaattgtgtacctttaaataattattttttaaaagaattaaataatatttttcttacagcaaagaatcaaataatattttaatccttagaatggtttatttataattttttaaataacaaaataaaaataattaagaaaaattatttaaaaaattgtaacttataataatcacagatgcgaccttctatattttgtaataaag

SEQ ID NO: 211787 - DNA, 774 bp, Cannabis indica
catgcctttaagtttattatggtggagagtgattgaggatagtcatcaacgctctgaacaagattgagttcaggtgggagcttgagaactatgtctcattttgtattaggtcctcttcctcttttattagttgtattttctctcatactagtagaaattgtaattttagcgcccataatgggctaagtgggcgtttacccaccggaggtttggatgtattcctattcaatccatccctgaacaacttctatgtagtgaccgtcaggtctaactttattttgtctaatatgtgaacgcttttattcaaaaaaagaagaagatagaagtgagaatataatatttaattgatctaaaagaatatttatttcagaaatattattaaaaaagaaagaaataatctaatacagcctaatgtcaattattaatgtacacttattcatttattactatctgatcaaatatctagggctgtgaaaacttctctaccataagaacaaaactaatgtacctactatagatatattaatcatttttaaaataagaggtttgttgttaaattaaaatttaaatatatatatattttatatatagatataattatatatatagatgtaatttttatttttaattctatataataaaattaataatttttttttataaaatatctacaaaccaaaaattccgttacataactacattttatatagagtagatatatatatatatactcctcttgaataaataacaaataaaaaataacctttttcactc

SEQ ID NO: 211788 - DNA, 802 bp, Cannabis indica
gacatatactaaattatgtctcctgaatttttgttgccgttaaaaattccccttgaactattaagattgttagatttaaggacttttatctaatttcatttaattttactaattcaatgattgtttatgtactaaatcatactccctagattttgatgtctaccaaattatgttgctcgaactttaacatgtatcaaatcgtgcctcctgaactttcatccatattataccttaattactaaaattggacaaagtttcttcaatccaacattctgaatagttcagggagatgtttaaaggccttaaaagttcaaaagacataatttggtacatgtcaaaattcgagggacaaaaatcctaattagcttaaatttaatttaaaaagccaattctatatatataaaaaaaaaatcaattcaaatttatttctattaaaatataatatatttcattttttagtaaactaaatatatataagaaaaatatgtagtgcactctaggagaacactcctatatgtttcaatatttaaaagtgttttttaatctatttttttttttattacagtcgtgtatgtcatagctatttaggatcacttgaaatttttaattttttttttaatagtttaagtgtcaaaaataaagttcaaagaattgtttaccacacgtattagaaaaaacagtcacacgtgtaacaaaatatttgaactttattttcggtactgtatactatttaagattttatcaaaatttacaaataaacctaaataagtataacacatagaatcataaaaaaaaaaaaaaa

SEQ ID NO: 211789 - DNA, 512 bp, Cannabis indica
aaattggagaaattcaagatcattataacccaaaatttcaatgccgctggccgtaaatttcttaccacataatctcatttcgtttcattctaaaaccaaagctattcacataaaagactttggaatggttgttgagatgagattatctagtaagaaatactatgaccgacttttttgtgtaaataacatttattttggaatgcaaagacaataaaaatttgagaaatgctaaaaggcgctactgatgtctggcaccctcctacgttttaatattattagtacaattaagtattaagtaccatataatttaatataataacttttaaagaatatcgataaccaactacaaaatgacacgtctaagaaagtactaaacaccactagtgcccaatgacaatgttctaaaattttagatgacagtaaagctggtcatctttatgacttgacatttttttttcgagtttttagccctaactattcaacgagacattccagtggccccaagtttgtag

SEQ ID NO: 211790 - DNA, 773 bp, Cannabis indica
gttgcatgtgttgttagggttttattggagaaattgttcaggttgttatgggcttataggacagatctttttgctcgcgcgttataggaaaggatgcacggggtggccaaaggtattagattatagagggcttcaccaaatcatatgttgatatttttctcattgacagaggaaaagtgaagagacgatgcaaccttttcccatcataactgtacgaacgtttttgctcattgaaattttttacacatataatttggtaaagccttctataatgtaataccttttgcaaccccatacgacctttcccatatgacattttagacatgttatggccattatatcctaacagtccccataagacattaacgacttgactgatctctcccataagactcaatccaacatcgatcaaagatcgtaattttaaactttagctaacaacatcaatcatttcaaaatatcatattttatgagaaagtaaaacgactattccaacaatgtatatcttcatggaaatgaaatgagcaatcgacccaattcagaagttcaattgtcacaattaaaaataaaaagcaattctaaattgatgaatttatgaacttaaagaagaaattaaataataataaaaaaagcaatcaaatttgattttattcaatatccatagaaatcttgacatttataccaaattagagagggtagattatttaaaaaacaatcaaattttaattttttgaatcttcataaaaatccaagtaattataccaaattagaga

SEQ ID NO: 211791 - DNA, 687 bp, Cannabis indica
acggtgtgttttgttccttggttttgtggatgttttttgattttattgtaacatgaataggtgttcatgaagcttagggtctcatggccagttgtagcatctactagttggtcgctcattggcaataggaaatagtcctttggacaagccttattcaggtcagtaaaatctttgcacactaaccacttattgtttggtttagtcaccaagacaggtctggatacgcaaagtgggtaaaaagcttcaatgataaagtaattggcctgtagcagtctgactttatctttcagagcttatgctcgctctttatctagcaacctctttttctgctgtacaggtcgaaaatttggatctatgttcaaggcatgagaaattactgatggatcgatccccaccgtgtctttatgtgacctagcaaagacatcaaggtttttctttagaaatttaatcattgaggattttattgtagcgctaaacctttcccgatctttagtttcttgttagaagggcgggattgatttttacatcttttaattcctctaccagtccaaagctttctacaggatccccaaagcaaggatccaagtgtgcctccctactttcagctgaactttgttaccttttgcaagactcttggctagagctcttggcatgcttctattcattcttggctttggacaaacccaa

SEQ ID NO: 211792 - DNA, 581 bp, Cannabis indica
agcactttggccaaaagggagcaatttggagaacataaccctggagaactctccttaagtattgagatcaataacactccaagtggactagcctattaccgctgaaagggggtgaaccactataaattctcgtgttcatctttgttaaatttacttttgcaaactggtttactttgattaactattgtttgtgttcatcttgcttgtttacgatcttcttagatccgttgatgaaaaatcgcgtcaacagtttggtgttttcattaagagcagtgaacacaagtattaatcaccccttaccatcatggtgagtacaagatggatgaactatgaggaggaggaccatgatgaccccatgaacgaagaaaacaccatggaacaccatgaagagtttcaactcagtgagcccgctggcgaagggacctctcgacgtctaggcaaacaatctatgcctgatgatgaaggtcaggtccacgatgcgggaggctcatcatcaccatcccatggtgtacgacgaactaccaatgtccatgaggtgttcatgaaaaatgaggcatcgcgccagcgtttagatgaaactc

SEQ ID NO: 211793 - DNA, 1024 bp, Cannabis indica
tactataccccaagcaaccttggctagacgatcgaacttcgttgtatattccattactgacatgccttctccctgaaccaaattagtgaattcttttcgcttagctatagactgcttcattataatatttagcgttgaacaattcccaaaactcttcccaagtcattgtagtgacgtctcgggtgagggataccaactcccaccacacaagagcatcctcttggaactgaaatgtagcgcaggtcacctgatcattcccggtgacacccatgaaattaaagattctctctaaaacagtgagccactgctcggccttcataacatccaggcctcccagaaagattggaggtgtctgcttgtgaaacttctcatacaatggctccatacggttgctagcaaaagattattctactagacagttggaaccaaagtggtcgacgcttgctgcggaggcattgcaggaggaccctgctgtgttagcctctaaatttctttgtcttgttggaggattcgaacttgcactcccgcaaatctttgctcccaattcagaggagcttggggtggattctcatgtctaccaccctgaaaccttccacggctactaccgcatccacggggattcaggggatttcgacctccccaactgcctctggtcttgaccatgtcgccctgactcttcgtattttgctgggcgtccatttattaggacttagccttgcaaactcataggtcaagtaggtcagacattgatcatatatattctatgtaccacacttatagattttaaggtaatgcatttaaataaatagttataaactattatgcttcctaacatacttttctaattacaacagttactaaacaagtaaaggcttactaaaccgtgagtcgagcttttctctgacaataattatacatgtcttgatgatcttcggtagataaacttggcggctctgataccaaaaattgtaacgtcgtgatacttaggcactacagtgatttcctaattactgtggccgccctt

SEQ ID NO: 211794 - DNA, 535 bp, Cannabis indica
ttaaaactttaaacactgttgctagtggggttgtacatggagatgaggaaattgctaatgaagtcacttcctatttttcacaattgttcaattctaatggtgttgattttgaagctctgaatttggttttgtccactatccattcggctataactcctgaaataaatgctcttctgttgcaataccatgtactgctacagatgttgaaaatgctcctcattcgatggcgcctgataaattcccaggagtggatggtatgtctgctatgtttttccaaaaacattgggatattgttggcttgcttgtgactcaaagtgtacttcaaattcttaatgagggtgcggatatgacatgtattaattcagctctgattacattaattttgaaaattgaccagcctaagtttgtgagtgaattcagacctattagtttgtgtattgtgatttacaagttggtctcgaaagctattgcggtcagatttaaagaagcgctgccctttgttatatctcagcatcaaagtgctttccttcccaac

SEQ ID NO: 211795 - DNA, 633 bp, Cannabis indica
agtctaacatatatcacaaactagtttaacatgcaagatattaattatcttggaaaatgtgaagtattcatttgtagtattttaaagcttattgtggagcaagtactagtagagaaagtgcatgagagttgatcatgtgtataataatggagtaagtgtatgagaatggcttattttaagtgcatgagagaaaaattcatcatgtttagttgtttttagttatcgattaaaaattattttttacacttgctattcaatgaggcccatataaacacacatatatatacaaatgtaggtaccataagtaagagttgctctgttttacatctagaaaaaacagagtatattcttcttgctattttcttgttcatagttcttctttgctctcttgagtcttgtgggtacctagcatttcttttagcttggtaagtacaataattctatttcctttatgtgtactagccttttctaagaaattgtatggttgcttattaattttttcaaagtgttgttgttggccatagttatcgaaggtaaacgtgactatatatagtgaaggttaagtcaatgaaagatgaataaaattgaaacttgtatctaagaagagattagcgtggccatataaatgtaaaa

SEQ ID NO: 211796 - DNA, 527 bp, Cannabis indica
ggcagtaggcccgttgcctcaaggggtagcagggggtgcacccggagcggtggcacccgtggtaccccccgggggaacgatccctcagcagacccttgtactgccaccaagacccaacgggagagtggctatgatctccggtgggccccacattggcgggacacgacgaagtctgggaagtcaaccagcttccagcacaaaggccctgactcatggttcaacctattaccttcacggaggaagacgcgaaactggtgcgtttccctcttcatgaacccttggtcatagagactcccattggcaattaaattgtgctagaatattgatcgataatgggagttctgtgaacttattattcaaagatgacttcacagccataagcctcacagactgggatctattgcccagcggttcccaactcactggattcaatgaaaccacgcttatcccaataggaaaagtaaggttgccagtcaccctgtgcccagatacacctcaaagtaattttaagtactgcacctttgtgg

SEQ ID NO: 211797 - DNA, 507 bp, Cannabis indica
acaaccacatacactattatataagttaatcttaatatttctctccaattaatattttgtaattaatcctttaatttttttttaataattttctataataatttttcttcctacaaaataacttatattatgttatttaaaatacctcttttttaaaaataaaaaattatttcaatccatagaaaacgatttatttattattttatttaataaaaaacacaattttgcttatacaagttgaagtttatatatttacttatatttaatttgatacacatattatataagagtagaaaagataggatttgtgagtctgagcattcaactcacgatagaatctgcttgctttaacgacaacaacagttatgagatttttcatgtcaacattttgagcaccccggtctcaaatatagtcagcttaataaaaaccaatcccaattctcttaaggaggcgtttggttgggaggaataaaatataggaataggaatgggaatgggaatgggaat

SEQ ID NO: 211798 - DNA, 1232 bp, Cannabis indica
attggtatcgggtttttaatttagattttgtagattagacaatccaaactaaccgataccaatccaaattagaatactacttttagcatccaatccaatccaaattgtaattaggatatcctaactttaataattgaattggattggatcggttcgattcaattggaatggggttggattataaaatccagtaaaacacataatttagagagagagaggagactaaatcttttttttttatatatatatttttaattttacatctacattttatggcatctataataatagcgggattagtggataatgatggtggtagaaatttaattatgaatgataatgacaatatattatattcatatataataaacccaaatcactatggtgtattcatgtttcctattcctctagcagaagtaataaaagattatgggagagacctcttttctttctaccaatgtgcatttggggacaagacacctttataaattcgatcatttatttatttatttatttattcataatgatcaaagaagatatgttttgacaataatattaaaataataaaaagaataaccagaaaggcctagagttccagctgtcttgtgtatgaggtgtctccacatttgaaaataatataatataaacctaaaaaaaaaagtattgtggtgcatataatgtgatttaatgtgataaataagtaaatttgacaagattatctcctatatttaatagatattaaattatatttagaataaaaaataattttatgatatttttatattaatttttattattatgctttattatataattataaattttttaataatttattaaaaatataaaataataataatacaaaaataaatataaaatttaataataataataatgtaaattatttaatacaaaagagcatgttaattaaaatttaataataaaatattaaaaatgacataatataaatataaaaatataacatttattgtgatgtaaattttatatcatgttatattgtgatctaaatttaaattactttttgttatgtgacatatttacatcacaatttggcataccattagagtaaattttaacaaagtgaactatattttacatttgcattttcattaaagatgctctaacatcatctaaattttatatcataatgaatattactttataatttactattttacccctaattaatattattaataattttttatatt

SEQ ID NO: 211799 - DNA, 765 bp, Cannabis indica
taaggcctattaacacttaaactgcgtaaaaagtactcatctaaacacctattaacacctatttagtatctttaatctaaatattaattatgctgaaaatcttgatcaacatatacaaatttgatttatactattgttgttaatggtttgatgccaccgccacagaaattatttttttttataaattacacaggtttttaataaaaaaaatctacaaagctattaacgaattgatttggtctgaatttttattttttaactaaactagtatacatgttttttagaaatgccaaattaaactaccaattaaatgctcaaaccaaactaatccacataagaattgattggtttagtttgaaaccataatttttataattgtttttttcttgaaaaaatagtaattgtttctttttaaaattttacatttcaaaatttataatacataaataataataacaacaacaataataataaactgtataaaattgttcacaaatatcaatttttcataaataaataaaaacacgttaagtttatataaaagaattaggcagatcgatttggtttgaattactggcaagaaatttagggatggtaattatacccgcgagttcgggtacctgcccctaatgaggcagggacgggggttgactttcaggagcaggggcagatatgggtttaaatattcatactcgagtcggaaatggggcaggggcgggggaatacatacccgccccaataagatatatgtataaatttaagttt

SEQ ID NO: 211800 - DNA, 545 bp, Cannabis indica
aggggccatagaatgtagagcattctcaacttcagcaggtagaaaaggtttgatgagttcgtcattcatgtcttgtgtaaccatatttggaattgcatccaaggtttgggaaagagaagcttcatcaatagtatcaacaccaaaaatggaagcaaaataattatgaattgttgcagccatgtcaactttggaatgcacccgaaccctagcttcattaataagtgatttgatcttgttgttggactttcttgctgaagctttagcatgaaaaaatttagtattgcggtcacccgaacttagccaatccacccttgaacgttgctgccaataaatttcttcctgctctaaaagatcatcaagaatagtttcagcccttttcagctcacgcatattgtcattatcccgatgtgtgaggttgttgagttcatttactcgagattgagttgctgtgatgtttttcttcatgctgccatatttacgctgatgccagttttaaagaagtagcacaagaatccaaactggacaataaggtctgaatcgggtca

SEQ ID NO: 211801 - DNA, 985 bp, Cannabis indica
tttagaggaaatagggtcttcaacgttggtttataaaacttgaaagaagtattgtgaatgtttataattgacagtattgtaatactcgacttttataaaccgacgcaaataaacatcactaaattttttaatttttcctgtcagttatgttattagcgtctaatatataacatacacaaataatatcttttagtgtcagttccaaacacttacgtaaatacatggcctactattaacgtcggtcaacaaaatgaatagtagtgttacccgacgtgaatagtataatttgtagtagtgaaacttttgtgaagttcgtggagatgtgtaagaagaaatttaggcgtattttcttttttcaagaattttggccaaatacgtatcttatctccagatttatgcttgggtttaaccttttaggggagaattcaagcgcacttatctcagagagacttagttgaagacatgtcctatttgttgcatgcgccaactggggctagtcatttttggacattaggagttgcaactatcaccaatcaaacacaccatatcgtaccccccaaaggagctgggaattttgggcttcaaattcttggtcattttcttggattctaacttgtgtccgcttctagtttccaaggagtagagttgagtgtggttttgtccctgggcaacatactgttcttccctgaagcttcatgaatgtaatacgataactttcaggctttagtgagaggaggccatgggtctctttggaaaaactcagtttatatgatatgtcccaaatggtccctttttgacttgaacctcataagggtagatctataggcttcttccaaagtggaggcttctgtttctagaggaacacagtcatgtgtccttgcacgagctaattccttttatgttgcggtccgaaagtcatgtcaagccctatgtgaatgtacttggtattttctagaatggtcaaagtgtcaaaggactcaatcat

SEQ ID NO: 211802 - DNA, 558 bp, Cannabis indica
gcgaattctaacttttgtagtagagtttcattttgaataataattaataagtacccctatttccaaaaactaccaatttagtactcttcgtgtgattatttttttaattcctatattagccctttttttttaatattatttaaattttaaatatttttttttaaaaaaaaattattagaagtcatttacaataatagtaaaaataggatgaagaatttctcccatcctacaaatatctattatcaacctatattcaattatagagcatatttagccagttcataggcagcttgattagcattcctacgaacatgagaaataataactctagggaaaaagataaaagacagcaaacatttaaaattaaatctaaaaaattagataaatcaatagatgtggttaaaagagccaatgaaactctcatagtatcagtttcaatatgagtaatggggagttgaagttggtgtgcccaattgatgctgtggaaaagagcttttccttccatctcatcacttttgaagtaaccttgtaaaggctttgataaggcagcaattactt

SEQ ID NO: 211803 - DNA, 726 bp, Cannabis indica
ataatgcaacaaggtatatttttgattctataaattaatcctaataagtttaagatcaatctatgtgcttaaatcaagggctagtcctaagttgaaatgggccttaaaaaaaattaatccttattataagaataaatagtatttttaaaaattattaaccaaatatatattttttttatttgggctcctaagatagatggactttaggtataaatctagttcgccttagcctatagccagccctacttagatctagtcctaacatgtaaagttatttactaacactcatcattggctttaacaaggatattttccgaaaatatatctaacttatttattaacacttaaatatgttgagaaaaacattaggctattaatttttataatcaatgtttactagtcaaaaaaaaaaaaaatacataataaaatattaactttgccaaaaatatataatacacgcaaacaaaataatatagcacattgactttttaacctatagctagatcattgcctaaggcctctctaacccatgttagaatgcataagtgtattattgaggaagtagaaatgagtgtatgacaaggtgcatgtagtttcatctacaaaactaattgacaatgagaggagtgttggctattttgtgctcactaatcttgcacgactcgatcacaagtggctctttcggctcacagtgacttttttagctcactatcctcgaatcacaag

SEQ ID NO: 211804 - DNA, 616 bp, Cannabis indica
ttctcaatgttgatcttaacagtacaataataaagaaggttaaaacgctatggtagttttttcttaaaaggaggaggaggaggaggagggttaagcgtgtggggtagttcctatagtgttactagcaaataataagcccttgtaattagtatagcattgaaatgtggatcccacagtagtatactatgtgggtcattcattttcaggtttacattttcaaataataatgtaaatttatatatataaaacatgaaattctacagccactcatttacttgatcaatgaaattaataaataataatctatggagagaagcagctttctttacgtcccattcctacagcaaattattaacccttagtatgatgtgatatgatatatacacacgcattatgtgcacgaatagcctattcgatataaggcgaggccaaaaactatatatccagctgcctcatttagtatataatatcataattatatgtatacatatagcaaaaggcggcttaatattcaacatatatatatatatatatattggcgactctgattttttatttttcattacaaaatttatacatgttaagtaattttaaatcagtgcgcatctgcatgcat

SEQ ID NO: 211805 - DNA, 964 bp, Cannabis indica
aatataaattggatcgtgcagattgaattgaattaagtactttatgaatattcctcagtaagtcctatatataagttatatgaaaaaatggctagtacacctctaggcatcctcttgatgtgttttgattttttgattagtttttttttatattgtttatattatagttatttaatattatttataaatttaaaaaaaaaaaactaaataatttataatgtcgaaaataaagttcaaacagttacttataactacgtacataaaaaaaaaacagtaatacgttcaaaattttattaaaatttataaatagtcctaattatttacaacacaatcatgaacaaaataaattaaaaaaaaaatagcgaagattaaaaaaaatttctaagtaataatatttacggtttcaatatttaggaagttttatactttttttctttttggatatgttatagttttaaaattacattttttagaaaattctaaataatttatgatattaaaattaaaatttaaatattttgttatacaaatggttattactttttttatacatctaattaataattgtttagctcttactttcttcattataaataattcaaaaaaatttaaaaataataaaacatcttatatataactacaaatacacatgattataagaaaaaaaaaattatattaaaaaactctacttgatacagaaacaaataaaaagtgtacaaatatgacttttttgaagagtgtactataaatttttttaatgatttttaatctctctttattcatttatttatttaattttttttttttttttttgtaaatctctctctttctattttgtcttgttctattacttgttctcttaaatatataaatagttatagatatttcttttaactaatcatcaccaaacaaattacttgtgataatttttgtatgacaatatagattctctgttataaaaatt

SEQ ID NO: 211806 - DNA, 1821 bp, Cannabis indica
acgatatatttttttttaaaaaaaaaacaagggtcatgatgaaatattacattctccctgggtggtgtactgggcgggacatcatcgttgtcctttaatcaagttagaaatgcaaatatatataaaagttataagtttttataaaataaattagagaaagttaatttaaaaattgaataattattaggataaaaaattaaaccaattaatataataaatagttagtctagtttgatgaagactaaaaatttagtatttaatttaactgtgatgagaaaaactatgtaatatattttgtctttctctgcaaaagtagacaagtgcagataatagaaaagaaagatgaacaaattacattaaattagaaaagtcttttcttttcatcttgatctctaaagccctaattaataatttggagtagacaaaaaatatcagaggaaagtggaatgaaaagttagcctaaattaaaaaagaaaaacgtttacacattttcatctaataaagtgatataattatataaattgattttaaataaaattacttttaaaattaactaacaagtacatatctatataattgtgatatatatatgtatccattaatttatataaaatagttaaaatattttgtagttaaactactattttaaagattcacaaaaatatgtgatacacataataattaattgacagtgttattaagaaatacacaacaaatttctattcaataagccttagttatatttatatatatattaccgcttcaccatcaatagtactggaaggagtatgaaaagtctgttttgatgatttagaacgatcattatttgtttgacgtgctgttattgctgctgttattgttgtcatggttgcttgtatggtttccattagatagtaggagttggagaatggtgttcaagtatagtaattcaaatcacttcaacttagtagtaaaacaatgcaagagagaaaattaagccaaatgaggactgttataaagaaaaatcaagtttgatgaagactaaaaatttgacatttaatttaattgagatgagaaaaacaatataacatattttgtctttctcgacaaaagtaggtaagtgcagataataaagaaaaaagattgacaaattaccttaaatttgaaaaagtctttcggttcatcttgatctccaaagccctaattaataattttgagtagacaaaaaatatcagaggaaagtggaatagaaagttagcctaaatcacgaaagaaaaacgtttacccatcttcatctagtaaagtaatataataatataaattgattttaaatatgattatttttacaatttactaacaagtacatatataattgtggtatatatatatatgtatccattaatttatatggaataattaaaatattttgtagttaaaactactattttaaagaatcgcaaaaatttgtaatagagataatagctaattgacagtgttattaagaaatacacagtgttattgcaccatcaatagtacttgaaggagtatgaaaagtttgtgttgatgatgtagaacgatcaagatttttttgacgtgttgttgttgatgctgttattgttatcgtggttgcttgtatggtttccattgttaagtggagttggatttggagttggaggatggtgttcaagtatagtaattcaaatcacttcaacttagtagtaaaataatgaaagagagaaactaagccaaataggatgttataaaaatagcgtgcacgttgagaaataataaaaacaatttaatgagtgtcaggattctctttagatgagagaggagtgcttc

SEQ ID NO: 211807 - DNA, 1410 bp, Cannabis indica
caacaccgcccgagggggttggagggggttggtgtgcattgtacattgtgattctaaaataatataacaaagtggttaaactggtttcatttggattctagctacaaacaacccccagaggggtcgtaaggaggagtcttggaaaatgctggtagacatttgttccaaagctcgaatccccacaggctaaaaaaaaaattgttggggccatatcccggtcgaactgccaggttacgctcaaaaaatcaattctaacatgtacatcattgaaagttgctattacttgcacaaaggttacgcaccttatgttacattacaaaaaaccatactaaaatattcagagaataataaacctaagaaaaagtgaagagtcagatagaatagtgagccaacagcaatcaaatatgtactagctggttatttttcatcataatttataatcaagcattggcctgaattcattgtacttctagagaagcaaatcgctagttcagaaactgaaacaatatcataaacccaattaaagcaaaatttcagcacataatgcaccagaattgcagaaaagaaaagaaactatatattgaggagaaaacaaagtaaacatgaatcaacctactttgaaaggatcagctaagatattattacaatattcaacattacacaagtattactatacttgtatggttccacactatcctaaatcaccaaatacatttctactctctaagtcaaaaagcaaattattaaggaattaaaatattttctgaaaacaaaacggtaataataatgatgtcaaatctaactataatgcaaagagtatctaatagaatggaaaacgtttaaaaagtatatgtgaatgaatatctccagtctatggtattcatgctcaacaaagattgctattttttttgttaatcaagattcagtctatagtcttcttggctcgatacgtaaggaagaattgacaagcactaaagtgtacaagtaggactggaaaggaataaagcaaactttagcaagagcaagctccaacctttactttttaagttcaaacaaaatgaactggcgaattgcacgaatcgtttagattccagatgaactttctttctaaagtgtcaacttgccaacatgggtcaattgggtgaggatgaattctaaaagagaatataatactatggaaagaatacaagcttttctaactcctttataaagtttagaacccatgggcttactactagggtaagttccttattaatgacagtacgacacaaacaagtgaatttactctggttttttcatcttcacattaagttggtgtcaaaaaagctccctttaccattctcacaatgatttttcagacaaaattcatctacatttcgactagcctatgagaccaactccaactattaa

SEQ ID NO: 211808 - DNA, 714 bp, Cannabis indica
gacatccttgttcattcctaatgccacatgaccttacgccgtccctaacataaggtccaatggacttaattttggactctattaattcagccttgaaagtgactgtaggatcctgaggggtcttagatttacgagctttttgagccattatctcaaaatctaagtcatctggtgaaaaagcaacagtaaccagaggtaaaaacatgggcctcactaagggtatatcaactaaattggagggttcgggccaagctgcttctcacaaacactggcgcctaccctcaataacttcttacaataattgcttataacggctagaggtttcatcttgactagatttaatgaggtaatccctaattttcttatcatttatttcaagaatggtttgaggtcttcgagttttaggcttaaattctatggcagaaagtttaagacaaacgaattctaagggttctgtgattgtatattctaggataaattgggacatgattgaaaaataatgccccaattcctggaaaacatagcacaaatgaaacccaaaaaatatgtgaattgtataaccttaaattttctagctctagaaatatccaaacactcgaaattaaattacccaagcagtaaaataatatagacaagaaaaacacataccaagaaattaaaacggaaagcacggagaaaaaaatcaacaaacagaaatgccacttactggttgga

SEQ ID NO: 211809 - DNA, 1306 bp, Cannabis indica
ctgatcatcttcgtatatataaacgtctgatcgtctatatatatataatatataagttatgttatatgtttgaaacagtaaagaatgaacgaaacccttgttctttctcattcgataaaattttctccccatatatctactttcttcgatttttaatttggaacttagcgatctaagctttggtagtagtagaatagcgaattctcaaacaaggaaagcttaaagtaaggtttaatttcgttttaagttcaataacaattagtttcgtataggggttttatgagttagaatagttacgaaggttctgaccttaaggattgttcttggatagtcataggattagttttgatgttttcttgttgaaattgaggtgattttgagttagaaatcgagtttgaaactttttaaagcttagttcgagcgttaatggcgtttttcgtttaagggtccaatttttaatttctgttacgtaagaatggcagtattcgtggtatatatattctctgtgaagtttggagtgatttggataagttttggtagtgtttcagtgagtgcgaaaattgagatttttcgtatttcatagtgtttttgaaattcgtaagagatctgaaaaacgtatttttgtcataacttttcacccgggtgtctgttttagacattagaataccattttgaagtttgtgacgagttctaagatatggtatatgttttagagccaaatgataagttttattttagtgtatttataccacggggtttgatagaaaatcataaattgtcttacacaagtgttaagtagtgttttgggataaacacttattgatttattattgttatgacatagggtccaagattattgatctttctccaagcaggtcggccaacatacctgatccgaaacttgaggtaacaaaagtataatgtaccgcatagcatgacaggttctgaaattatcgattttttgattaggcaatgataatgtaatgatactatggacataatatatgggctcacctaattagttgagcgatatacctggcgacgtatcgaacataggtacgggcgttagtgacatatgatgagtaccaagcgtaggtacaggcttcacctgattagatgatgtaataattttgacaatgtatcgggtgtaggtacgggtgtcagtatgaaatcacctggttatggcatagattgaaaccattgttgggtttttttcctggtgacgtatcgcgcataagtacgggcgttagtgacatatgataagtaccgtgagcgggatcgtatgattagatgatgcgatatatta

SEQ ID NO: 211810 - DNA, 531 bp, Cannabis indica
aagcagaagagaagaagaagacatacccactctcatcccttccctgaatcgaatctcatcatctcctccggcgagttctcatccctgcggccggctcagtccggcgaggcactgctgcctcctctctaacatccagtcccgtactcctcctcgtgtgtcttaggtatcatctttctctcttcttcaaacttcacttcagttctttaagtttaatgttaaattatatatacaatgtgtatatatatatataatatgattaagacagtgttatcgaatttaacaaaaaaaaaaaaaacaacagtgttattcaatcggtctggtagttttctgcattgtcaactctttgatgattgaactattggaacttaaattcatactgtgcactatttgataattgggagaaaatatggaaaaggaattttatttatttaggtcatgcttgtgagcataattttcattcgttaaggaattttggataatgtgattgttcattggtgtgtttttagtttactaatagtttcaattttgagt

SEQ ID NO: 211811 - DNA, 707 bp, Cannabis indica
tttttttttttttgaggacgcgtgtctatcgtgagaagagatgtctaagtccaaccttcgtattttggaaaacaaaaagtagatgtagttagatttttatatgaagttatatttgaaaataaattaaattataaatacaaaaatgaaaacccccaaacatttaaatgataaatatgcattattaattacacataatttaaataaaaaattatgcatattaaatttatataagtaattaagtttttaatttggaccgtttgtatctcttttatttatttttttaaatagtaaagttaatattggtagtgcatatatatttttgaataaaatgtaaggtaatacaattttggtatatataatttaactaaaccatattttaaactctctcttcttataaatacttattatacttattataaatgtaccctctaattattaacaaaaataaaagaaaatcttctaattataattttagtcaaactaaattttaaaaatgctgaagtacattaacttttatttactttttcatgaataaataaaacttttaccacttaaactatgactcttgcaaatctttgtctttaattctcattttatctttttattttttttatttttttcgcaaaaatacctcctgaactatacaaatcattacaaatatctctcctagagttatattctctcatttatttagttttatttttctt

SEQ ID NO: 211812 - DNA, 918 bp, Cannabis indica
tcactaatcttaaattttggtgtcgtgtgatgatggcggtcgaccatgctgctcttccaccgttgagcagtgtcgtgtctcacccatccaactaagaacctccaaccaacataaatcgagtaagacaaataagttaccagtgttagtgtcctccagtggaacgtcgatcatcttctgtagctccagtgagctgcggtttgactttgacggcgtatctcgaagagccatcctatggtgcttgtctagaagtgttcgcaagatgcttttcaaatctaaaacctcgaatgcttcatccttatcggcttcgtctcgttgttcatccgcctcgatggtagtcactattgttgttaattatggaagcatcatcttcaaacaaccttgtgccgacaccatcgagtcaacctcagtcgccattagagtttcgttggtgtttcgtgcctctttagatttttgtatccgaacgatcattaggtctaaccatttcacgatgggaccaatcatagcctcaagagctagtttcatcatttccaattagtttggagcttgctgaaactctgatcgaattttcgtcacacctcgccccaaagaatcgacgtgctttgataccatttgataggaattttctataacttcagtgtaaacaatagcaaaatagagataatagagctgatatattgatattggaatgaaaagggaacaagtttgttaagtattcgagagacccagctctctcccaagagctaatgctcactttaacaaaataattctcaaccttttttacctttcctactcacttatatatagcactaattcctcccattacaattacctaattaccctctttatttactatcctaaggcctaacaacatgttgagaagtgtaatactacatgggtttgtgtttgtacatattttta

SEQ ID NO: 211813 - DNA, 757 bp, Cannabis indica
gcatattatattttatatttttgctcacatactcggatcctagatccggaccgaatagattcatattatggtatgatgttaaaatattgattttttttagtaagaaaaaaattaaaatagttttaaaaaacttgtgccaaacaccattacatttttaaaatgacaaaaattgttttctattctcaattttaaaactaaaaactgaaaacataatcaaacaagctctaagagtgtgattgtgcgtgtaagagagagatatagagcttgctctgtgatgatcgaatttcttataaaaatctttcagaaactcccactaagttcatgtcattcagtctttttggtctcaaatcgttggctccatctttaccatactttcaagtccaccatctttctccaacttacccttttctgttactggtttattttggtattgttttaaggttgtttcctttcatttttttttatcacatttttcaaaatattattatattgctttattttaaataataatatgaaaataatgaaatttgtatgtaacttattttcttcaatatcatatgctccaatatatgtttagttttcctccgttgtcccactattgttttttcattgttctgcttctttttatttttgatgtcttgtcatgtatgttctcttgttgtgctacaactcccctatttgttgcatttgttatgttattttttttccagccagctttcatcctctttgttttaggtcttctagatttcaccacttt

SEQ ID NO: 211814 - DNA, 474 bp, Cannabis indica
aaatcacagccaagtaaacaggtggaggttagggttgaaccttcggtttacgcggtttactcttatttgataactagtaaacaacctgcgcttcgcggcgggtatttgaatttttttaaaattatatatatgaaataaattatatcttttatttaataataattaagtaataaaattgtatcaaattttaacgtactaattttatttaatttttctttgaataatataaaaagtaattaggtggacaaacgggttaacccgacctatatttacaaaatgataaactaaaactattaattaatatgtcaaattaataagcgaagagtcaaaatacacatgactaaaaaaaaggttaaataatctctctcattcatttagacattacttttatcttgttagccattttttgtaatgtgttacatatttatatttaaagtcgatatcatcactgcaccttacttgatgtaataataa

SEQ ID NO: 211815 - DNA, 707 bp, Cannabis indica
gtacaattagttggggatgattccccatttggtcgttttttgctaagatcaaattcctaaaactaccaccttttttttcttcataatatattattaatgggaaatttgaatgcttacattaccttaaaaaaaaaattctaaacttatacttaccaatatttttaatatatgataattttattgttttccccaaaataccctctcccaattacgtcaactcctctcttctcatcttttcccctaaatgtaaatcggacccatcgaccccaaggcatctgacccatcgggcccaaagaatcggacccgtcgggcccatcgggcccattggaccctcctatatcgggccatcggacccatcagggtgtcatcttcaacctccagccatgcctccatcggacccgaccatcagacgggcattgagcccgatctaaaaaatcccattttcgaaaaatctcttcctaatcttcctaaatctaaccttaactaacagatttcacacaaaattgtaacatattattctatttcatgaatttaagcacaaaaaattaaaggaaaaaattgaaaaaaaaattatctcaagacattttgggtggtttgggcgatcggcgtggctgatgtgggttgagggggcggtcggccgtgggtggtctgccgtgggtcacatcggccggtcgactgcatggatggtctgccatgggtgggtggtc

SEQ ID NO: 211816 - DNA, 1019 bp, Cannabis indica
gtagagttaaaaccttcagaaagacaaccattaaccaaaaatttaaatgagactgtggagacacatctgagcacaagggagacaaacctagaaagaaaaccaacatgcttgagaatggcttctacaaagttccactcaactctgtcaaaaaccttctccatgtcgtgttcagagcagcccatcatagctttcctttcttcctacaattaatggcattaacaattttcttagtaataaaaatattatcaaaaatcatcctattagataggaaagcactttggttgctagaaatgatagtttttagaacaaacttaattatatttgttaaaaccttagcaaacaccttgtaaagggtagaacaaaggctaatgggtctaaaatccctaattctagaagcattttttctcttagggataagaacaatatatgtatcattaataagagagatattcgagttattgttaaggacaaccaaaatagctttacagaaattaaacccgagagtggaccaatttttctggtaaaagaaagcattcagactgtccaaatctggagccttatccctagagagatgaaataaagcctccctaatctcatcctcagtgaaaaggattatcaagtaaggagacctgagaagggaaaatacaactattggcaccaacaagaacatcataatagctgcatagtcacatccttgagtggaaaataaagaagtataaaaattaacaaaatgtgaaacaatagtagaagttctcctaacaacagaaccatcctcaagtgtaatagatctaatgaaattgttctttcttctagcagaagccttgtgatgaaaaaacttagtgtttttattctcgctctaagccattcaactctcaacctttgctcccaaaagatctcatctttataaagcaaagtatcaagaatttatttggtactatacgaagtatttgaaatacgggaaaaaaataccattcaggaagcctgtaaagccttggttctcacaacatcattgtcactta

SEQ ID NO: 211817 - DNA, 1170 bp, Cannabis indica
caaccagaaaaaaaaaattatatttaatttctaactgcctaaatggtataatataattttatacctacggtttttatcaaaaaaaccgcctctaaatgtcaattttcaaatatagcgggattttttacatcctttagctttcctttttataaatgggggtgaaaaaactgtctctaaagactaacatagcgtgtataatgtgaaagcttgacttttgccatccacgatgtatcttttgtttttttttttttgtcaattcattcatatgggatttgatgtgtgtggttaataattaattaatttgcaatacaaataaaaaattactaaaattgatttttttatatataaagtaaaataaataaaataaataaagatatggcttttgagtgggtgggggagatcaaattactttacatgaaaaccatgcattttatatatttcttttattttagaatatgcatataatacctttaaaattgattaaattagcatacatatatctttatataaaaaaaattgtataatattgggtacgtacgttcattcatgcataaaataaagtgagacatatttattatattttattaactaaatagtcttattattatcaatcattactttattcgaacacaaacacaatattaatatggtaagattccaattgtttttggattttttgttcttgattaatttgattctatatataatatttatataatatctttttttatatatataaagcatatatgtatgatgctattgtaggttacaaacaagcccacttcatgctaatttaaaaagggaaatttgaatttctatgcatgcattaggggataatttttttcctaaactaatacttttttacattgaaaatatatgactacttttttcaaaaacccaaaaatacctctgtcaaaaactcaaaccctttctctctccttccctcaaactctctctgcatcgatctctctttctctctctatctcggcatctcttcgccgtcccacaacctccacggctcaaccaaagagcacggctccgacgacctccgcgacctccgaagaccaccgaggaccacctagccccctctctcttcctctctctcaacccgtgaggaccacccaaacgcaccaccacctccacggctcacctccacagctcacctccacc

SEQ ID NO: 211818 - DNA, 600 bp, Cannabis indica
taattcttgtacagtgagttgtataggaaccactactgaatagtaatgttttataagttggtcactggtagtactttctgagatgttctccattccagtacctcggtaagagaactaatttcatgttctcattgcacccatcaagcttatatgtacctttatttgttatctctataacatgttatggacctttccagtttggtccaaatgctcctgctataagatctttgatattaaggaatactcttcgaagcacttagtctcctaaaaagaattttctctcgttgacttgtttattgaagtacctggcagctttttgttggtaggcatgcaactttaagttggcttggtctctttttctgctaattcgtcaaagtattcggccagcaaggtgtggttcacttcttggtcatagtaagtcaaaagtacccttgcctaagtatctttttggataggcgttgtcccccgccatgattgtcaaagaagcattcatgcacttctattaataattgtttagcttctgacttggtgacacatttaagaagtggcgttaataaaccacatctgtacataacctcgtccaggattagatacctagca

SEQ ID NO: 211819 - DNA, 594 bp, Cannabis indica
ttccttgaagaagttctgaggggtttactctttccagatcaattcatttctcttataatgaattgtgtccgaacgccaaaattctctctctcttttcaatggatccctccatggatttttgaatcaaagagaggattaagacaaggacatccactatccccactcctttttgtcattggcatggagtatttgacaagaatcatgaagaaagtgggctgcaaaaaggactttgcattccatgacaaatgtgatagtattaaacttaaccatttatgttttgcagatgacgtcctactattttgtagaggatacttcaagagtatcattcttatgctacaaggattgaaactcttctcagcaacctctggattacaacccaataaagccaaatctgccattttttgcagcaacatggaagaacatgagataagaagagttttagaagcatcaggttttacaaggtagcataccccttttagatatcttggtgtccctatatgcaccaagaaaatctcaaagcaggaatgcaatgttttaatagaaaagatgacagcaagaatacgaacatggagcactaggaatatctcttttgcg

SEQ ID NO: 211820 - DNA, 1000 bp, Cannabis indica
ttattattatttttttgtttggttcattttaaagtattgaattgtcattttaatggaatgacttttctatccttttagtagaatgataattttattttaaaataaaaaaaaaataatcatttcaatgcaagatggaaaaaatttaataattttttctttaatttttaatttactttaaatttaattttattctatttatattccttttctcattcttcacattaaatttttatgtttttattcattctaactgaacattgttaaaacataacattctcaaacaacacgtgtaagtatcctacatcatcattttgttttgaaattggaactatttggacttgtaaagtgggctctctctcaataataggtgcggccccaggccccatattcaacatatatgctctctatatggctggagaatttttacttccacttttatttttttggatatactatatattgattatttataataaagtaattacttgctgcaactaataataataaataaaataaataatcataatgtgcacatgagtttcattgaatctaattctaactttatattacataattgagattagagaacttaccaaacaatattatgaatgtttacaaatttattttatgccttaaaaatatatattattaatattattttacaattttatttgtttcagtatcaataagttaattaacatttgaaaaatactttaaaaaaaaaaaattatcaaatattgaattactaaactaggcttatttaataacttttttaaaatactagatacttattctattaaattatgaatattaaaaactaatttgacaaaaattatgttgaataatggtgtttttatattaaattgtcaaatacaaaatactattttggttatattaaaagataaatgagaaaataataaaacactatataggaaatcaatgatcttattattctattgtattcaacaatcaacattaaaaaaaattataaattaaaaaa

SEQ ID NO: 211821 - DNA, 786 bp, Cannabis indica
gtgccaagatggcatgttacaagttaggtgatatccacaagttggccaagtggtggcacatattggtgtgcatgctggtggcatgttgatgcttagtttgtatggtagaggcattttcataaatatattcaatattgtctagattgggacgtgatttggtattcgccatttatttgggtctacgaatacaatggtgtaatcagatttgagtaactctgtgatttggtatatggtttgaccatatgtctacagacccaaaattatatatgttcctggtggaaggctaaaagcatagaattctctttaaggggggagtacctggtgcaactctccaccaccccctggcaccttagtgctaaatgagctactactagtcagtgagactagtagggcagacatatgaggaccacgagaggactcatatgtctccatgagttggaatgctcatggacattatcgggccaacccggtagtgcgtctaagaatactgacaaaggttaacgggtacgtttccattggcttgtcggtatgtcgcatgcacgagacgtggcctaaacctccaagagatgtcgtggtgcgtcttggcaacgagtctcaacatgagatgacatgggtagtcattcatgggctagtttgcatgcacgcatgagatgaatgcaccatgctagaaagagagagaggtctaacgtatgctactagtttagtggcttgtctcgagggcctaccaacatgcgtgggggcatggtgtcgtaaggactggtttatggacgtatgggagtccttggg

SEQ ID NO: 211822 - DNA, 579 bp, Cannabis indica
atttatggagtatacattggactggaccgatattgcaactaagttaagatattacaaacttaccgttatacatatctttccaagtcaatatcagtagttgatcttaagattaaaagaatctaaatcctgatatgcttaggctcaactcaggagtgctattcatgttctttgatttattagttaagcctacttttgggtcagggtgatacgtatattttgggaacatgatagtatgattgagtgggagtgctgaacataaatatggaatctatagcttctactggtgtatagaagtcaagtgatgattcccttcgagcttagcaaatagaagtaaatggatgagctcttgttttaaactgactaaattaatttagtaagtactacctaaaacctaaacccaactttaacttaacggtaaggtacgtaacgttaggtttttaagggggtttacgggaaaactaaaactaacttagtagggggtaggggtaggaaacgggtaaaaacgggtaaaaagtaaccctacctacttccgtacgtagttaggtaagtactactacttacttaattaagtaagggaag

SEQ ID NO: 211823 - DNA, 632 bp, Cannabis indica
atggattttctgtccaagtattccacaaacattgactataaaagaaaatggtttcttttcaactggagggcaaagatccttttgtttatgttggatctgttcaaggttcttagatcctaattatttcaattttaaaggctaaagatgtattacacaatggatgtgtaggattttttgcagtcgtaattgactccagcaagcccaaaacatttgggcctaaggatatcagagttgtgagggaatttcttgatgtttttctcaaggagttactgggattgcttccacagggagaattttgtaatttatttggcacctgcggcaaaacctgtttcaaaggtaccatataggattgcctttaaggagctaaaaatacaacttcaagggatgttggacttagggtttacccgacctagtgtatcgcccgggggcgctccagttttatttgtgaaagaaataggatggatccctctgaatgtgaattgattaccaagaattaaacaagctgatgattaagaataaatatccattacccaggattgatgatttgttcgatcaactctagggtaagactgtatgatctaagattgacttgcactccagttatcatctgttgagaatttgagaggaagata

SEQ ID NO: 211824 - DNA, 976 bp, Cannabis indica
attattatgtgtacttttgctgatttgaatagaaagatggatactcttattaaggtattattttttgtttcctttttaagtagtttgtttggttgtttttgtattgttttttattcaagttttctttttttcctagtcttcgcattctgcttatagccaccggtcgagccaaacaacggatgtgctccgctcctcaaaaaatgatgatgatcttgttggtgatggtgaaaaagaggatgaggaagaaattgatttcgaggatgacgatgagcccggagatgatgatgttaagagtgatgatggtgttgattataatgccaattacgacactggtggtggtggtccagatgatgatgatgatgattgtgggggcagagatgatcgtggacagtctgtgtccattgttgctattgatggtggtgcaaagcctgataaagatgtagtagatgtatctactgcacaagagtgcataaaaattgctgataaattagttgatgctttagggatttttggtgatttgaaagaggtttatttttgagttgttttgttattattttactggttttcttgtcttgctttgaatttttttttttgttttatttgtatttttttattttattaatcaggatttattttcttatgatgatttgattgatgttggtgcttctatggcttgtggtgttcaagtttttgaaaagatggtattttttttatccattgtttgttttaaagttgtttatgtttgtttttaaatatttattatttttattgttttgttattttttgacattagtttttttttttaagatagagtcttcctctactgctgttgttgctgatcagtcttctgtttcctctggtttgtaaggtttggttcaaaatgatgtctgtgacattgttgtttttgaggagacaccaatcttaattcctagagagagggacatgaagaaggggttgtgttaaagtctccctttat

SEQ ID NO: 211825 - DNA, 728 bp, Cannabis indica
ctctttcataggatgcaaaacatggtacaagcacgggagtgtcagctcgtgatagggcaacaacagtattggctcttgcttccggggattctaaacctgatgacttcaatcgaccaggccatattttcccactgaaataccgggaaggtggtgttcttaaacgggctggacatacagaagcttctgttgatcttgcagtactagctggtttcaatcctgctgcagttctttgtgaggttgtggatgatgatggttccatggctagattaccaaagcttcgcgaatttgcagcaagggagaacttgaaaattgtatctattgctgatttaataaggtaaagctattacctcacttggtcaagcgtaattcttcattgtttttttttacctggattttgtatttattatacataaatgaaccaacaacctctaatgcttttagagctaagtgattgctaactacaatattttaagatcattgaatggcataaacattagaataacataaagaaactatttattttctttttttcttctctatcatctttcatatttctttagagttcatgtagtagtctgttagtttttacggacttgtgctaaattcttaatactcacaagcatttaaattaatagcctgttttctctcagctgattgtgatacaaacaaggtttgtagaaaaacttgcttgaatctttattggtataagaacagaaattacagttcca

SEQ ID NO: 211826 - DNA, 716 bp, Cannabis indica
ttttttcaattttttttttatgtggaattagaattttttttaaaagttactatgaaaattttatactgtgtactgaatttaatattcatagttattctagttattttttagttattattattctgttttgttattttacggttattttataaaaagatagtatttttgaaaaaaaaaattccgtatgacattaaaagtataaatttttgtttaaaatctaatatttttgtaaaaattcttatatttatagggctatttacatttacgggaaaataaaaaaaagaattatattacaaatacataaaaacaatattacaaatacataaaaacaataaaaaaaattacaaaaatacaattgtacggaattttaaatatttttacaatttttatgattttatttacagaaattacagtctttttatgttgtactcttgttaatttgttgttaattttttgtaatttgtatgttactttttgttgttattttaatgttatttgaatgttattttcttattacttttatatagttttctttccgttttcgtgttgtttttttatagaatattattaaaaaatatatataaaaaattctttaaatataaaaatataattttttttaccaaagtcttatctaattatcccatacaaaaatatactaaatatgatacttaaaacacaaaacttaacaaatatgagagatgacatttctaatacta

SEQ ID NO: 211827 - DNA, 610 bp, Cannabis indica
tgaaaaaccccagtccagaagtttatctcttaaagtttgattccatgcgcggggagcctgctttaacccatagagggctttatgaagttgacacacatggttaggtttggtgggatcaacaaacccttcaggttgactcatgtagacggtctcatgtagtgcaccatttaaaaaggcattagaaacatctaattgcttgacatgccaattaaggaaaacggccaatgtaagaataattcttaccgtagctggtttgacaactggagagaatgtatcctcatagtctattccaagagtttgcaaataccctttagctacaagtcttgacttgagtgtgtcaagagtaccatttgcattgagtttaaccttgtgaacccacttgttgccaatgacttgcatgtaaggagagtaagggacaagagtccaagtaccagccttttttagagcatcaaattcagtattcatagctttaaaccaccttggattgttgagtgcagcagtagtgttcttaggttcagatgggatgagtgactctggtaagggatatttggttgcattgaatgctttgggttttcgtatgccacttaaagaccttgtcttcatatggtga

SEQ ID NO: 211828 - DNA, 564 bp, Cannabis indica
agtattgaggtatatctttaattacttttatttgtataaggataactattaggcaccaataatgtctagtattttttcgatatgttacgtagcgattgactagcaatacaacttaaaaactattatattaaactatgtgggacccgatacttagttaaaccaatagcaatactaacacataagaagctactaagcaccactgataccatttaacctttctccatactcaattagtcattacatctattttcccataatcttctctacatttgtgaaaattggtctccctaacatttaatttagacagtcgatgtgatcatgtgatacacgtgcatggcgtgatctttataacatatttttgattgaaacatactcaaaaatgatcttgaaatcccaactacaatattattaaactattctttcattctttactcaaaatataaaattaattcatacttataaaaccacgaaatgtaaaactaataagctacttaatataattttgctggtatacttaatttaaaaacaaaatttaatacaggtagtggtattggaatgagagga

SEQ ID NO: 211829 - DNA, 793 bp, Cannabis indica
atttaaaattttaaattaattataaaaatacatcaataaagaaaaattttcatttttatgctttaaactctttttatttacaaaatatacttcaataaaaatattaaactattttttttagttgttttatagtttatttatattgtcagtttatttttttagttgttttatagttatctcgtagttattttattttatttttttgaatgatctcgaagttaatttttagttgttgtttttttaaatttttaccgagtaaaatttattttttataattttaaaattttacaagaatacttttataattaaaaattttaaattgtaaaattattaaaaaatatataaaaaatgacatttttaccaatttatgttttttttaatgttatttttatattaccgcaatattatactatatcttcacaacgtgaacacgtacaacttaaaaacaatggtctttaagaagaaaaaaaaaatccataaaaatataaaaagaaaaacgtaaattttttattgctttttttcttttgaatgaattttttattgttttttagtatttctaaaataaaactttgctaccccaactctcattgtcaatacctctcttgaaatcaattaataattaaaaaaaatacttgattatgattaaatttaggataaaagacaaaataaacaaacatgtattttcaataatcatataattccaatgtattttacaaaaaataccataaaataatacgaaattccaagtttatatgcaaatcaactcattttcaagcttagcttttggcctcgc

SEQ ID NO: 211830 - DNA, 983 bp, Cannabis indica
tgattctcataaaaaatgctcctctgcgccatataattctgcatgtgcatgttctcctgaataagataattcggttgatcattcgtgtattgcatggctgggtcgagaggccaagcgatacgttgcgatacattttctttacactcttcttgttgttccgcaggaggatctcttcgagtaggcggttgaccatggggatgtggtggtttaaatctaaacatcgtggccatgtcaatactgcgttgtggtgcatcctttgtatcataggagtattgtagtactccatgcgcctcacacaaagtggtgataatgtcagcaagcccgagtccacccccacaagatcctttaaccatagtatcaatactctgtttaattatatcccccacatttaggttgaagcccttcatgatggcatagacgaatttcagcatgtctatttgagcatcagagtagtgcttatagggtaccagcctagcactcacgaaatatagccatgccttggccaccgggtttaattcacacctatacaactggtaaggttctccattgtattcatgaaacctaagacctgggtaacctaaagtttcagctatttcatcataattcaacctcttttcttgaataagctttttcagtggttgctcctcccaggtgaaggttggcaagtcatatacgacatggatagctgttgtggaaaactgcactttaacacccttaacttttactttttcaccctctctttctggcctattggcaaagaattctagagctagagtttggttattccttcagtaatatccacaaattttgtccaacccctattgattacttgctctctaatgggctcaaatatagaaggaatgccaattctagggtgtctaaggtcaccaatttccatgcccctatcttctatgaatggcctatccttgagttgtaaaaagcgctcttgtgcctcggcactcacaaatctagccctatcaaca

SEQ ID NO: 211831 - DNA, 664 bp, Cannabis indica
tatatttatagaaggctaaataggatttttggcctctaactttgacttatatcattccaaatcatgttttttaaattgttaagatcgttaaaaatgtcctttaactgttgagattgttagatttaaagacttttttccaattttagtaaaaaagtctaacatggatgaaaattcagagagcatgatttagtacatgtcaaagttagatagatataatttggtggatatcaaagtctggggagcatggtttagtagataaacaattgatctttgggcgcctattcttagcaatagtttgtgtggttagagtatttctaatggtagaaggatgctaaaaatttacatatttattttattttatttctcttttatattatttttagcactcttacttttaaaaacattctttaaaaatgctataatttcacacattattatttaatatacatattttaatttttagctacgataacttttcagcttcaatattttattaaaaaataataaatagcatcaatgttatgaatttactcttctcgatatagcatcttaatattttgccatataatatctccactttatcaagcatcctctaaaattttattattggagatgctcgtatagatgttacaataagtcaactaatcctaagtaccaataatga

SEQ ID NO: 211832 - DNA, 720 bp, Cannabis indica
tcaagttgtttgattttccaaccattggagatagcaagagagagcacaattcttattgtcacgggtttgacaaccgggctaaaagtttcagtaaagtcaaatctcggttgttgatgaaagcccttggcaacagacgagctttgtatctattatgagttccatctgagttctctttttctctaaaaacccatttgcagcctatgggggttctgtcctcgggtagaggaaccaaagagtaagtttcatttctggttaaagccaacatctcatctgtcatggcttggttccattgttcttgctgcatagcctctttgactgtccgaggaattttggaaattagatatgctttaggcttgtgaatgcctgactttccccttgtttacatagcatgcttgttggtagttacttgttgtgatgctactgatttggaagcagtgacaacagtaacagcagtaacatcagtggcaggtgtagttccagcagtggtagtatttggtgcaactggttcaacagcaacaaattgtgttgtctcatggatatcagcatttggagagagtagaggattagaactgatattgttgctgtgtaaagaaggagtccccagaatattggtttcctgttgaatgatagcagcagtggtatccctaacatgtgcatcaggtcttgattcctgtataggacatgaaaagcttgccacagatggcacaacattagtagtaa

SEQ ID NO: 211833 - DNA, 524 bp, Cannabis indica
agagaggtgcattataaaagctattttttgatctattgtgtgtaaaattcaatgtaagtattataaattattgttatttttaattataatttaaataaaaaattattacattttgtcaacaagtaaaaataaaaatttaaacacacatttaaatttaatgttaatttctttattatgaatgtaatgtgtcgtttttagtaatataatatttatgttagtgcaatataatattttaatttatcgagtttcattaattttatagaattattattattaaattaattagaaaatttatttaaattataatttagatataataattgtgatgattttagttaattaagataatagtaattttttttattttattaaaaaattaatataattataagaaatattttctcagtgtactttttaattttatggttaaagtggagataaatttggacactagatttagtgatattgtgacactaaatttagtgtgctctttcaaaatgctattagaaaaaaaaaagaaaaaa

SEQ ID NO: 211834 - DNA, 835 bp, Cannabis indica
aaacatgtattagaaggaaatgctttgtataggcgattgatgagttgagaaaggttgtttggttggagctggttggtgaggcttgtttgttattggttgttcttgattaatgaatttcttcttgtaacaaaaaaaaaaaaaaattacaagaaaaaataatactcacgagaaagtttttggaaattagataaatgctatttagtgtcaattaaatttataaaaaaaaattgagaaaaaatatttaaaatgttgctcatagttcgaaaagtaatatttttttttcagccaaaattcaggtacaaaatatctattttttgaattacgacacaagaacattttgaacttttctaagttttgtatcaaactagccaccatcaccatctccacaaaatagttagtttggagttaaattgtaaatttggcaatagtttcagtttattctcaataaactgatatgcttgaatgagtatagtagtaatatggagtccaaaaatgtgggaagaaacctcttgggtatttacaatattaaatccaaaaggtctcaacatcatgagccgatccacgtagaggtaaagggatagttgctacaaaaaaaaaaaaattaaaaaaatatatatgtattttaattaattacaacatatatttgtaattaaatgtaataaatataaatataatattaactttgacatgttaagttattttatacagatcaatgatttaagttgttacaaaaatatgttcatttttaatatttagtttaatttttgttcccctcacaaaaaaaatatatatatatcatctcaattttagctctggatcggtaactgccatacat

SEQ ID NO: 211835 - DNA, 1157 bp, Cannabis indica
catatccatatgccatggaaaatagagtttgttcggttgtcgttttctcaattgttcggtatgaccttagaccttcaggaagttcccctggccagtttcctttagcatcctcaagtcttttctttagtgtgtccttcaatgtcttcttgactgcttcaacttgaccatttgcttggggatgcgccaccgcggagaaacttttgatgataacatggttcgcacagaaatcagtgaaggactggctgtcaaactgtttgccaatttccgagactattttgtacggcaatccgaaccggcagattatgttcttcaaaacaaagtcttgaacttttttagacgtgatggttgccagcggctcggcttctgtccacttggtaaagtaatcaaccacgactactgcatactgcacgcctcctttgcccttgggcaattgtccgatcaggtcaattccccaaatggggaacgaccaaggactttgcatttgagttagctcattgggtggtgcacgaggtatctttcaaaatctctagcattttcacattttttaacgtaggcctttgaatcttcgatcattgtcggccaaaaataaccttgccttagaattttcttagataaactctacccggcggcgtggtttcaacaaaatccatcatgcacttcagacaaaagtcgtgcagcttcttcttgggtaacacatttgagcaatggcatagagaatcttcgtctgtacataattccctctactatgatgtaccgtgcaaccttccttctcatctttcgagattatctgggagttccccagtgctcaggtaggttgcaattggcgtcatccagtttggagatgtatcaatcatttcaatatctttcgtgctggtgatgctaggttcttcgagaaactgaataggaaccagatttgctctatcacttacattactactcgcaagtcgagctattgtgtcagcagtcgtgttttcttcccttggaattttcctgagagcatagcttttgaactatgcgagcagatcctgtatttttctcaaatatgctatcatcttttcccctcgagcctcgtattctccggatacgtgatttaccaccagctctgaatcactgcagatctcaatatattcagccttcatctaccgggctagttttag

SEQ ID NO: 211836 - DNA, 500 bp, Cannabis indica
agaaatttgatatttagtttattattagttttggctaatggtttttgattatgttttggaactattgattttttttttgaaactttgagtattatgaattaatgtttggattcaggctataaatttctttgttatggtatttcattaagacatcaaagagttctacacttggtgcaagcgattccgaattccaaacggaatcaaacaactttgccaggtactcatattatgaccattttgaaatttttgataaaaatgtgggtttttgaattttattctcaaatgccgaaaatgaaggaacccaaagtctttcggtatgtgtttgtttggttggttagtgttctttccttaaaaattaaaactttagtctaatattggaatctaaaaaggtgattgttgagcttcttcgtttgttttgatactattttcaagttatcatttgggatcttttgtttggaatttgaagtgtccaggaccttaaagcttcccaatggtgtgag

SEQ ID NO: 211837 - DNA, 1035 bp, Cannabis indica
attttcttaaattatataagaatatgatacttaattacactaataataatataacatcgagaaaagtgttacaaatcagcagagaccttttgtaaattaaaggtaaatgtcatctcctctaattgggcatatattctgtaattgattgcataatatgaatcaatatctgacaataaatgataaatattatgagcttaattaattgctcaatatacatataaactgaataatttttgccaataaatgctgactataaaatatttatgagctagctaggactggattaagtactccaaattcatcaattaattagcttttgaatacagttgtattaattttagtttgtgttaatttaagagaaatgtagacatttgtatacgtatttttagataggtaaatttatgctactaatgacgggacggttttgtccaggcctccttgtcaaaatctaaactgataaagatgtaaatgtaatgtgtatctaacattggagacatggtatgatggataattagatagttaaaaattgttaaaatctcattttcttctgttaatttatagttttccttttccatttttgccccatatgtcttgaaatagttgcttggttttggttgtgatggccatcatatgactttaatgtgtactaattaagctgggccttcataataagtaaattcatgtctcatcacaaggtatacatgagcgatgtcgttatcgattcatacatatacatataaattgtatatgtaatatcatcatagcaaaaattgatggcccttcataacaaactatacatcaattttactattcgtgcctatatgtcttattaatgtaattttctatctagctaattagaaccgttgagttttacgacatttcagataatcataattgtatacatatttcacgttcgttaaatgaaaacaacacataaaaatgattaacgttaactctcaagatttaaaatcatataagacttgggtcgtgatcagggcccttgtgacttgagaaggtgccacatatgattccgtc

SEQ ID NO: 211838 - DNA, 195 bp, Cannabis indica
aatactttcatcattttcctttgaacgtacgagaagaagagggcagtaagtcgagtacgataaacttcaatgtcaaaatcagcaggaacatcttttccatggatgaagaactcggcaaatgcagccgccacaaatgctctgcaatcactaataactagaaaggaaaacaaaacagttaaacaactataatacaac

SEQ ID NO: 211839 - DNA, 1038 bp, Cannabis indica
ttcgttctataacataatgaatacaaacaaataacatagaataactcaaatcggttataaattaaaaaaaaaaaaaaattgttccaacaacattgagacataatttaaatatcggttttacacacacaaaaaaaaaagaataaaaacatacaacaaataactactcaaaaatcagttataattttttttaaaaaaaaaagaaatataaatcataccacatcacaaatactagtgcgtttttttaggagatccatttgaaactagctgcaaataacaccaataaaatgtaacacgatctttaactaaatcgaaaatcagcttagaaagaatacaaaataaatacaacacgatcttcgcaacataactagcaaaatcataatttgggtcaatattcaaatatgttggatggaaaaaaaaagtataacaatataaaaagtatttggaatcggttaaaattaataaaaaaaataaacaaataaaaaaatatatacaaacaaggagtcaattctaaaaatacttatacataaattaaaacaaaatcggttccacaataaaataaataaaaacaaataatacataataactcaaaaaccggttataattcaaaaacaagagaaaatcagtttaaaaaacaatggaacataaatctcgatcttctattctcagttgtaattcgacaatcacccatctgattcttcatcgagtacaataagcaaactactttccacacaaaacatcaaaacaacaatgcaaaattaagtaaattattacatgaaaaaagtaaacttaatatttttaatgtaatgtatgtatatataaatatgttgtctaactaatttactaatcacaaaaaaaaaaataaaaaaaaaaaaaaagaacaaaggaagagtttgagtattctatttatcattcaagagcatgataaataaatacaccaaagatccctttttaaacacatattaaacaaccaacaacaacaagggtttggatactttattttttagccacattgaactgaaaaaaacaataaaaaaaaaa

SEQ ID NO: 211840 - DNA, 748 bp, Cannabis indica
ttttttttttttacatttattatgtataaaaggatgaaaaaaaaggtcttttaatatgggggccctgtgcaatggctaacactactaaaaactcccttttaagtccataaaagttggactagataaatttttcgagtatattttgtgttgaacatgatagctcgggacataataaaatgagtatttttctagtaatatgacccataaaagattttgctagtagcgtctttgtgaatggatctgttaggttatgttttgacgtgaccttcaaaaccgtcacatcatctctctttactatatatttcttagtagatgatgcttcctctcaatgtgcttgccttcttgtggctctttagatttcttggagttggccagtactctactctactctactttagtagagcaccaaaaatttttctacttctagagcagtgtaattttttttttcaaccaaattgcttccttagctgcttcgcaagctgctatatattcagcttccatggtgaatatgcaatactagttttttttaatgcttctccaaactacagctccttcaccaagagtaaatactgacccagatatcgactttcgactatctttgtctaattaaaaattagaatcagtatatcccgtaggattcaactctccaccaaaatatacaagcatgagatctctcgttctccaaagatacttgagaatgtgctttatatctatctagtgttccaacactactacaaaattgagtttt

SEQ ID NO: 211841 - DNA, 670 bp, Cannabis indica
gactgtctagcctaaacaagaggcgatcagggagggagatgagttagatccccgagtagggatagaaagaatgtttgaaccactcgaggatgttaaagaaggcagcactagcgaaactaatcccactgaagtcatcaaggtgggacgaaatttgtccctagtggtgaaggaaaaaattgtttctacagtgagaaagaaccaagacatattgtgctggagccatgtagacaagcaacgctagttcatcaaaaaagaaggccattagatctagtctaggtagaagttgtgaaagtgaaggttgataagttaacctccatagagttcctctaagaagccttgtatcctgtttggttggaaaatctggtgctggtcgcaaagccaaatggaacatattataccccctagtgatctttcttccaggaaaaacaacgagcatgcgagagccatgttgaatatttatgaagcaagcttcgacttccacgaaggaagattgaagttgcataaaaaatttaggcttagacttcacttgaaaagatcaaagggtgaaagagtcattgggtgtaaagtagacttcaaagtgtccttcccttccgggaaggagagttgaagatgtgcggtaacccagtgatctccatgtgtagtaaagcaatgcgcatgcactatcctaagc

SEQ ID NO: 211842 - DNA, 614 bp, Cannabis indica
attatcaataaaaaggtaaaataaatctataattgtccactaaaataaattatatgatgaaaagtaagaaaagaaaaaaaaaataacaatctattaggaattataggatgaagtaaaaaagaaattttttaattaatagagaatataaaattgaaagagaaaagctaaatagaaatacataaatatgtattaaaaataataataatagcaataataataataataaaataataacatataagtgagagtggtcgtgtggtgtgtgtggtatggtgtgtggtatgtattatgaataaatatatagaaatattaggtagatattttttaaattggttatgaatagataaatttttaagtttttattattattattattattaattgatagttttaaaagtatagattttttattttttttttattattattaattagtaatttaaaaaatgaataaaaattaaaaaaaataaagaaaataagataaagtgtttagaagaattttagagtgtcacatcaccgccttatacttctcctttatatatatatatatagatattagaaaattgaggtcttgatactatatatggatggctgtcgaagtgcgatgcatacat

SEQ ID NO: 211843 - DNA, 525 bp, Cannabis indica
ggcccattccttgagctcctcaaaaaacttgcataccaaaccaaaagtaatagtagcaaggatgatgttcctcctcgtgtgagttgcattattagtgatggagtcatgacttttgctattaaggcagctcaacagcttcgacttcctgtggttcagtttttcacagttgctgcatgcgctgtaatgggcatggccaactaccgccctttacttgaaaaaggaattgtaccactaaaaggtgagtctgaaatttatatatagaatgtgaaaatctgaaaaatgtcttggtaattctaataatatatagtttaattaagtttgatcaatatatggcttcatttttgataataaatatttgttgtgtggcagatgagaatgagttaaatgattttctagacacaagtatggaatggattccgggaatgaaaggtctccgatttcgagatctaccaacattttgtaggatcactgattccaatgatattatgtttaattgggtaaaagaggcaattgagatggcttcag

SEQ ID NO: 211844 - DNA, 704 bp, Cannabis indica
ggacctaaattcggactgagaccgtaacccaggcccagacattgacccgcacctgggacccgaactcggacctgactcgaacctagacctagaccgagattttgccctagacccagactcgcacatagactcagaccaggactcatacctagacccaaaccccaacccaaacattaaatcaaagtcgatactgggactatgacccaaacacgaatatggacccagatcgggacctaggacccggacctggattgaggacctagacttgggcctcagaacacaaacccagatcgaaactcgggactcgaatttgaacctgaacctagactcgaacccagatctgtacccaaacatagatcagaacccaaaccaagactcaaactgggacatgaaccccgatcgggtcgtggactcgaacatggatgtgggaccttgaccaaggacacgggcatcataactaggactgggacccaagccccaaccccaaactaggatcctgacctaggacatggaccaggacctggggcctgaagtggaactagactggaacctgagactgtaacccaaatttggacccaaggcttggaactgacccgtagtaagtgtttggatctgggacccatacccgaactcaaaccgaaacctggactcgggccctaacccaaactcagacccgcacctgagacttaggtccgagtccaaga

SEQ ID NO: 211845 - DNA, 524 bp, Cannabis indica
ttttattatgtttttgttgcattgtttgtattatagttttcattttcacatttgtgaaggaaaattactaaaccaaaagagaattgttgagagtttggttttaggtaacattgtaagagatcaaagtttataaagctgtgtgtgtagagattttactgtaagttatctgtgttaaaaagctttaattttagctatttggcttacttattatgctttcatttggttttttatagcttgcatctcggaacttgtctagaaatggcggatagatctgaattcgtcgaagagaaagtagaaaaagaggaaaaattacatgtcaaagtcaagaccaaagatatagatatagaatcagatgagaagagtgaaatggaagttgaattgaaatctaagtcaatggagaaagtaaagccgaaatataagaaagaaaaagaggataaacatggcaacgatgatgaggagaagccaaagaagaaagaaaaagaggaaaaggagaaaggaaaagagaagaagaaaaagaaagatga

SEQ ID NO: 211846 - DNA, 939 bp, Cannabis indica
aggtaagagtaaacacctttgctggatcgggctttgtttctgtcttctactcttctttcttaagttgcgggcaatctctcttgtagtgtccacaaaaactacactggaagaatcctcgcccttcacactcacccagatgatgcttcttacagttgggacattctgggtaagtgtatcacgtttcagaaccaccttgatggtttccatgaccctggtgcagatcgtgcctttctcttctaatcggtggtcgagtcactaccacccctaccgtaactagaggtaggaggagcagtggctccaccaacaacttgtgtccctcgggactcttggatgcactcaactgggccatcagcttgtagtgtttttcccaccatatcatcataggtggtgttatcatcggttgtgatcatcaggtcatgtttgattttagggtttaatccatccagatacttttctttcttactaaagtcagtgggcacaattcccaaggccaacctagccatcctatgaaactaagttgtatattcagtaacgaacatattttctttctaagttagttgagtaaattctttcctctttgcacttcggactatttcgttgtaatacttcacattaaataactcctgaaactcttcccaagtaatggtagtgacatcccgagtcaaagccaccatatcccaccaaaccagtgcatccttctgaaattggaatgtggcacaagccactctatcgttatcagtgacacccataaagttcaaaatctgtgtaataactgccagccactattcagctttcttcacatctagacctcccagaaatactggaggtgcccgcttgcagaaccttttgtacatgggttccatctggttcataacagtaactggcgctgccggcagagcagggccaggagccacctgcattttaggagcaggcattgca

SEQ ID NO: 211847 - DNA, 650 bp, Cannabis indica
gtgtgctgaatgtataaactcttaaaaattagatcaaactaagaattggtcttgtaatattcaaaggatgcgtaggttactgttttgattttctttatacatttttttttaatgtagacatgggtctttaatctttcttttgtgttcggctaaacacttgagacaacttacatattccaatcctacaactcagctacaaactaacttaagtaacagaattaacaaacattctgttatgacagttagtaccgagctagctttcctagtttagttgagattgagagagaaagactagtgtgtctgatctagctgtaaggaagcaaagcttcaattgagtgatctagctgtaaggaagcaaagcttcaattgagtgatctagctgctgggattgctttataattctctctcagattgctcaataaaattcactagcccttggaggctgttctggccgccgagtagacaaaataacacattgttatcttgattgcaccacgttcttgtctctttctaatttcgtttattgcttgttcatagtttagttcatgttttcattttcattgctcttcatttgacttgttgaattttgttttgttttctgttcatgttgagctatatttcacaacaatgcctaaaaacttgagatggat

SEQ ID NO: 211848 - DNA, 304 bp, Cannabis indica
aacataaataacacttttgagatcgaacataaccatattaggattaagatcttttgatctaagatcaaccactgatattgacttagaaagatacaacggtaagattataatatatctttacgaagatcaatattgatcccagtccattgtatactccatacatctgatactagcatactttgccaatgtcctagaaagaacataatacttatccaaggtgtaagtaaactttatcgctgactatcacatcagtgtaaattcagtgtcactgatgaatagtaggacataaacttttaaagcatat

SEQ ID NO: 211849 - DNA, 1090 bp, Cannabis indica
tctctctctctctctcaatcccgcaggcgacccaacgctcaccaccacgacgacgacaacgaagaccacagcaggcgacccacaacgatgacgaccacgaaccaccgacatcaggccaccaccgagagaacccagattcaaaccgtcgccaccatcaagcttagtaaaagtaagttttttaaaaaaataaacaattagatttttcatagatttggatgcaaatttgtgtatgttcatcaaattagttgaattttttgtatattttggataatgtgtgtttttctgtatgttctttagtggtatctgtgtgttttaacagtgttatcgttgagatatcgataggttatcgatacaatgtcgaccaaaattaaaaatagtttgagcataagaaattactattttgttactgtatatcaataggttatcgacattttgattaggatatattttgtaagaatttattggttatattgacttttgtcgatgaaatgtcaatatgttgtcaatagtaggttttgtttgaatagaattggtttttttcaatttattaagaatatatcgataggatggcgacgagatatcgatagtttttcgacaccctatgtgcaataatttcctgatgtaatctatcaataaatttttgacaggttatcgatatattgacaatttttttttatgacattagtaatatttttttgttatatattttttcagatggctctacgactcatagttctagcatccgagtattttactggtcgcgtgacatatagaggcaccggagcttttgcaaaaatcaagtctcgatttgaggagcataatttgaataacacggcgaaagaaagcagtttcgtcaactttggaattatgtacccctgacattctcctcggtgttatttcaccaagtcatgttgcacaagatgaaggttgatgttgaggaggatttgcacttgcgattttacattggtcggaaggagctcagattcggagtggttgagtttgcactcattacaggcttgaacttctcctcggggccaacgacggaggaaaaggttgcgtaggttgcccactcagggtcagaccgattgat

SEQ ID NO: 211850 - DNA, 597 bp, Cannabis indica
atagtgttttttcttttcttttcaatattagaaaatgaaacacgtctttttctccttattattttttttttaaaaaaccatatatgcataaacggtttttcaagcatattaatttatataagtagccaaacaaaataataatatatagaggtaaattgcggtataaatatcaaatgttttagattttatacacttaaatatttaatctttatttttgaaggtaaaaatatcaaatgttacaattatcttatttttgttactttcgttaattcatagatatagacacgtggagagttcggatgcattacatttattttttttttattttaacatttaatatattcttaatatcagaaattaaatgctacttgtttcaaaaaaaaaaaaaccagatttcataacaattttcacatgatattggcacttcaattcgataatcacgttccatatattgcactggttcactcagttatggaaatttcgtagaatattctttgattcttgctctctgctaggacaaaatatttctttggtgtttctgtattatctggagatggaaattcattgaattttcgtaatctgcgatgtttgaggtag

SEQ ID NO: 211851 - DNA, 506 bp, Cannabis indica
gttaatttacttgttaccttttacaataccccataaatacttaagtttaactctcagttgtaaataaatacttatgtttaattttttacggtaataatacttaagttgtaattctagaatatttgtaggtaccttgcagttaagtcttaagtaaattgtcacgtgacaattcctagttagtctaagtcattaaaattttgatttttaaaaaagtaatttaaatataccaataagaaaatgacttatggataataatttaatatttaacggtcagatacctacaaagttcaaaaaaatataacttaagtactattaccgccaaaaattaaacttaagtatttatttgcaactgagagttgaacttaggtatttatatcgcaaattactctttagaacactatagaaaatattaaaattttatttttgacattaaaatctttagatttgctaaattatttaggtattattagtgactttcaatagcattacaaggtgaaattttggaa

SEQ ID NO: 211852 - DNA, 538 bp, Cannabis indica
tatatatatatatatatcgatcaaccatgttcaaaaagaaaagttgttagttagatatcaaagtttgatggaatactactttttttatttttaagaatgaaatactacttcttatgaccataatgcattaaattataaattgtgttaatttgaattttaatattgcagctgatcttgattaattatacatttatactatagtatatataaaggcaaacccatatagagcataaacggaggagtcttcatcctcttgaaaatatatattttaattatttacaatatatatttatttttaaaagttttatttatttacaaagtattagctttagtttaattttaatgataaagttattagagattaaaagtttaaatcccaacttagacatttttattttttgatttttgaagaagattgtcttaaaatttaaactcataccaataagacttgtatttattatcttaaccattttattattatatctttttactttaaattatattcaatactatgaaaatatcaatttgtataatgcac

SEQ ID NO: 211853 - DNA, 839 bp, Cannabis indica
gctaatgagtcctcttgccttgctcttaaaagatcattggatgtctaccacaaagcttcaggtcaagttctcaactccgacaaatctgttatgtccttctcaccaaatacaacactggcggctcaagtctttttccatcgacatcttaacatgccaatctgtgaatgccacgaaaaatatcttggtttgccttcctactctgggagggataaaaagaggatgtttagtgacattaaagagaaaatatggcgacttatgcatacttggagtgagaaaattttttcagctggtggtcgtgaagtgcttctaaaagcggtagtccaatccattcctacatatgcaatgagttgctttcgtctaccggtttacttttgcaaccaacttgaatctatgatggctaatttctggtggggattgaatgagaatggtaacaaggttcattggcgttcttggaagcttttgtgtaaaaggaaggacagtggtggtatggggtttcgctctttcatgcattttaatcaagcaatgcttgcaaaacaagcgtggagactccttaagcaaccagattctctacttgcgaaggtgctgaagagtagatactacccaaataacgatttcctttaagctaacattggccactctccctctttaacttggcaaggcatccattggggtagaagccttcttattgctggtttgcgttggaaaattggtgaaggatgtaggataaattgtgctgatgacccgtggattccaggacattccacttttcgaccttaccacttttctggaccacctgattcgactgtttccaacctcataacagaagaaaggcaatggga

SEQ ID NO: 211854 - DNA, 488 bp, Cannabis indica
caaacgacaccatatctttttcaaattaattaaaacattagaatacatggtcatttgtaaagaatacattttgattcatcaaaaacacatatcaccaaaaacaatattttacaattatatccctcaaatttaaaagttaaattgcaaaacaaataaatccattaaaatattatttctctcaccaatcaatgggtactatccggttgtaaaacttgcaattctaagtgaaaaagttatttactacagtaaaattctatttgtcttatttgaggtgtgtaaaacctcaaagtgatgtgaggttttacataacaccccatatatataaatatatataaaggtgagatatgacactctatatactatctaaggatcaaaattctaatctatttctctaaggagatttatttaaaagttaacaataatttattttatcttaacaatatgtataatttgaatttaaatttaataaatcttttaattactttttt

SEQ ID NO: 211855 - DNA, 624 bp, Cannabis indica
atataaaggtgagatatgacactctatatagtatatactatctaaggatcaaaattctaatctatttctctaaggagatttatttaaaagttaacaacaatttattttatcttaacaatatgtataatttgaatttaaatttaataaatcttttaattacttttttagctataagttttttaattattttttattttttaaataattttagttttgaatttgaatttttaattatttgtttgtttaaatcatttatttgttgaaataaacaaatataaatacagtaatcaatagttctggtaaaattattatagtatttatacataataaaaaattgattcaaacgattttataaatttttttctttattgattttggtaatatttggtaaatttttgatgtggtgatgatatcgattttaaatattgtgcgatacggtaatgataacaggtttgatgtagtgatgactataagtgagatacggtactgatgatgttggttttgaatatagtgacgactacaagtgaaatgcaatgatgataatgattttgaatatagtgacgacagcgagtaagatacagtaatgacaacaattttaaacttttttttcaatctacacagcta

SEQ ID NO: 211856 - DNA, 720 bp, Cannabis indica
gcgcccaagttgacgttcaacctggttcacataggtttactactcaaacacaaattctgctctgggcatttttcttatcttggtccaaaatggagtaggagacatcgttcacaattttgaatgccatagaagtaccaaaacgactgtaaaaggggagctccataagctcatttttcacattttggtaagtctccataaggttagagcatctctttataatttctctctttaaaaatttgagctctttcttaagtcaattttattgtaattctcatgagcaataaaaacttgaagtagacatacatctactaatattgcgacatcagaagtgaactattataaatttttgtatcttatttaatttcttttatctattacttttctcaccaatctagcaagacggtgttagtcaattttcagatgtcattctatttaaaagtattttttaattaattatttattttctaataattaattcaaattaattattgtagtttttttaattaattaattaataaaagattaaatattagtaataaatgttcatttttaaatttatgtttagttagatgatttttaagggattattagtcatttttaaatttattaaaaattatgtaaaaaaatattcaaaaaatatgaggagcaaattattatttgccaaatcattttatctatttgaacagtttttatctttagataatattgtgatatatatat

SEQ ID NO: 211857 - DNA, 618 bp, Cannabis indica
catggaattaataaatatgattaattgattgatgagattgaataaataatctagtttattggagattagaattataggtacatagtctccggatcgccaccttgaaacactatcaagggtaggaataaaagttctatatggaagttcggaaaaagctatttcaatttgtcaaaatagtaactatttatttttcaaatttattaattaaataaattggagaaaagacaaagttttctggacaaaaggcaccaccaatgtcttgttaagacataggtggtgccactattactgtgccctaacacggtgataggtgcctatcatataggattatccccactggattagtttttggattaactaattaattaatttaaaagataaatatttatttaaatttgaatttgaaaagtagttatggatatttttgttagttaagatattctctcaaggtagttgagagatttccgcagtcaaatataggaaataaatatctataacaaattatttattcaaataattaaatatgatttaataaatgatttgaatttaaataagtaattaaataaagcctttattggtttttatatacatatatcgtattaacaaaaaaaaaaaaaa

SEQ ID NO: 211858 - DNA, 732 bp, Cannabis indica
ttttttttagtgctttactataattgaatctttgtggttgataccaaatgggacccactctagagattcacaaatgtcctagtagcaacaaattgttggattacgacataaaataaaataaattggtagtgacgtggcattcaattagtggccacctataataatggaccaaattattaaaaaaaaaagtttattatttgataacaaaaagagaaaaaattagcaacgtcgtttcgcagcttccaccatcaaaaaggaaagattttgcggtttcattttatttttcttataacaccttttcgaagactgcagagccaaattaaacacaatataataactctctattttgtcccaaattattcaatttaatcttatctattatatatctaatattgttgcatattcattcatatatgtgtgggctggaatctttgatactgcatagcgcgatacatttaggattcgtttggtacactatgttaattatgttatattatattatttaatataatactatgtttagtgttgatttatattaaaaaattgtgtaaaattatattatctttatcataaatccgactcttgctccaaactcgaacctcggctcgacaccgaccatagacccaaaccccaaccttagcctcagaggctcaaacttgtaccctgacccctgatcctagaccctcaatccggatccaaatgtcagattttcactttctaaatattataata

SEQ ID NO: 211859 - DNA, 945 bp, Cannabis indica
aatgatactgggaagcattagcaatgtagagatcagagaaataatcaaaaatgacagtttcaagacccaaatcccaatcttttagaaccccacggctatcttgcaagacattaatttgattattgcatttttgagtgcttgcagaagcatgaaaatatttgctatttttatctcctccatgtaaccagtgttgttttgaccgctgcttccaataaagttcttgttgggccaggatttcaaaataattagtttgctcagtaatgaaattctgcacattaatagcatcagtactacttttcaaacgagccaaattctgcttgcttttagaaatacgagttttgaaattacctataagagttcgaccccaagaatccaaagcaatgccacaagctttgattctttcaacaagagaaagatgttgattattgttccagcaatcttctaccaacttggagcaaaggggctcacgactccaacagttttcataccaaaaatggtatgtttttttaggcccccatggaggcttcggttcaaggaagatcggagtgtgatcggatgaagagaagtctctgttggtaagagtagcttgtggaaaagattgaagccaaagatgggaaacaagagctttatcaagccgaatttccacacttgaagaagttcctttgctgcgttcccaagtaaaagggtatcccctaagatcaagatcaattaaatcacagctttgaaggacatcttggaaaccggcaataagagaggggggataagggcggccacctttcttctcggcttggcttcctatgttgttgagatcaccaattaaacaccaaggaagctgagaaaagtagcaagatcatgaatgagcttccaagtattgaaccgcaagcttcggtttggttcaccgtagatgcccgtaagatgccatggaatcgtattgtgcattacgat

SEQ ID NO: 211860 - DNA, 625 bp, Cannabis indica
atcttaaagagaaaattttattactaaactcaaaattgtcataatgaattgtctggataaatatgaaatagggaataaaatcccaaaccaataattgaaactaaattgttcataaactaaaataattaaatcaaaataaaagtagatttcgagcttcatctgcacttggacaatctccacccttctgtccaaccatccgactcaactcgctaggatagcaatccaagtttgagtagggagctgaaataagaaaaaaaaacaaacatggttagtagatctagaattaataatccaagtcgataataattctctaaaacatgagtttatagcatagatagaaataccttgtttcattgctagaaacttagggcactggagtttccagtggcccttttcattgcaatagaagcactttcctttttgctttgcatcgagattagcagcctttactttttaattgttttaacatctttaagaggcttcttgctattcttccaattcttcttgttgctgggtctcgaagtagaggaaatgcttgcctcagccttggccgtaccattagcactgccagaactaggagctttagtttctcctttctatggtcctccagtcaaattttcaaatg

SEQ ID NO: 211861 - DNA, 1004 bp, Cannabis indica
tttttttttttttgaaataatcctttatttattcccactagtaatgtttggcagttattttttttaaagagagaaaattgaaatattcattaatagacaaatttgacaaaatttattgcatgaacatatagctcatagagcgaaattaatttaaaaaaactccaaaaacaagctcaactaagacggaatttgtaaaaaaacatgtacaatattttataaaaaaataatttgtgatatatttgcattaatttttagtattgtgacttcaaaatgacacaattataaaactttatataaaatttaatatttaataaatgactctaattaaataaaaaaataataataactttattattaatttattacatgaaataataaaaataaatgaaaaaaaattaatataataactaaatttaatagtaaaatattaaatttggatcaacttttgctaagtgacaaaaattgacacattattgaaacaaatattttacaaggggctatattttggcaataaatcaccattttgtatttctattggtgatgttctaaggatctataaaccaccagtaacaattatcaaaccagtatgaagtaaactaaatgtccaaattaaatgaacatctaataaagtctacctactaatgacttcgaccgatcttccaataaatattaaaaaaataacaactccattaatcaaataataaatatgaaaataacaagttcagtaatactccattagtaatttatagatattcttttagaaaatttgaattatttcaaaaatattatcgttaatgtttcaaaaattaataactagcttgaaaaataggttaaagaaaataccaatttttgccataagcccaaataaaaaaaaacaagctagtccatttaacaaaaagtggtaagttgaaaaatgccttttttattaatcaattaatcaaatttgcctctaattttatatttatttgaaacatacctctttttatatgtattgtacccaaaat

SEQ ID NO: 211862 - DNA, 650 bp, Cannabis indica
atttattttgttgtgtgtttcgtgtgggcataataaaattgaagtattataatgatcatcgatccaaattattattattattattatttggctatcaattaaaggaaatttctatttgcttacatcaatatatttatatatatatatatatatataaaataatctcatatactatgaaaggatgttaaatcatactataacaatatcaaaatctaactcccagaactaattatctaattatctaatctagaccaattgttttattatatttttatttttgttttaaaaaaatactaaaaacatcaatttaattagtcaggtggagatatataggaggctttttatattctcaatgctctaatttaagagcattgctattgggtacttacagtggtgtttaatactttttagacgttgcaattggttaacgatactctttaaaaactattacattaaactatatatatatctgatacttaattacatcaatagcgatattaacacgtaagaaagtaacaccactagctagtacctttcatcatttctcttaatttaatacatgcaatatcacccaataactataataacttctaaactcatcttcttctactgtttagaaaatatctttacacattcaatataaaaaatct

SEQ ID NO: 211863 - DNA, 1154 bp, Cannabis indica
atgatagctatcaactagttatatatattacaataattaattatgatataatttatttatttattctcctatatgtgctgcaatattgcataattaattatgattaataagataagataataatattggatatgtaaggccaaactattaaacttaatataaatcatataaaaaaattaaaaaattctgaacaaaaggaatgaaaagttggtagcaagtcactgtatatatacttcttctaaaagccagctaaagatgtttggatattctctaaaattatacgggtgcaggaataagtaataattcaataaaaacctcattaattaattatttacaataattcaagatccctaactttaaataaagtaaataagtgtgaataatatttaattttcatgttcatttggttattttcagatgtataatcgtgcattacatgtgcatagcagaagctcatgataactaattcagtaattctacttgtaattagtcacccaattaaaaaagtggatctctacttacagggtctctctcttcctcatggctacatagcttttcaaatacctagtctggactttcttgaatatatatattaaccaacaaaaataggcacttataattaattagtatgttctgaaagggtcatagggcatttaaaaaaagaaaaggggggctggtatgccctcaatacattgggctttaccaagaggcaagggcccaaatattggaccaagaaatgcaaagtcacgtgtcaccaccatgtatgtgtttgagtttattataatttataggatatatgaggccaaactctctcatatttacaactgttacacatataattttaataaaaaaaaaaataacagcaaaaataatttatcttataatattattacattcatattattttttagtcattacgatatattattagactatatattaaataaattaaagaattatgttaatttatatttttgagtcggtacttaactgacttaattggcacttaataactaaaaagtagcataattgtaacaaaatcgtaaaatttgctgtcactttttttgatgggtaaataccattttggaccctctgttttgcaaaagttaccaattaaaccctctgttttgttaaataacaaaatggaccctgta

SEQ ID NO: 211864 - DNA, 1064 bp, Cannabis indica
ctgccaactcaagaaaactttgcactttcgtaattgttcttggcctcagccaatttttaactaactcgatctttcccagatcgaccataaatccatcctttccgacaatatgccctaaaaaggagacttccaacaactagaattcacactttttaaattttgcatacaacttatgatcccttagttgttgtaaaaccatttggagatgttgttcatgctcctcttctatctgagagtacacaaagatgtcattgataaacactatgacatagttatcgaggaaatcgttgaacattctgttcatgagatccataaaggatgtcggtgcatttgttaatctgaatgacatcaccaaaaaactcataatgatcatacattgtccaaaatgcggtcttcagaatatcttcctctcaaattcttagctgatgataactagaacgcaaatcgatcttagagaatacagtcttaccctggagttgatcaaacaaatcatcaatcctgagcaatggatacttgttcttgattgtcagcttgtttaattctcgataatcaatgcacattcggagggatccatccttctttttcacaaacaaaactggagctccccaaggcgatacactgggtcgggtaaaccctaaattaaccatcccctgaagttgtatttttagctccttaagttctgctggagccatcctgtatggtgccttagaaataggttctgccccaagtgccaaatcaattacaaagtctatctctcgctgtggcaacaatcccgataactcctcaggaaatacatcaagaaattctcttagaattctgacattctcaggcccaaatgtttcaggtctgctagagtcaattacaacgaccaaaaatcctacacatccactgtgtagtaaatctttatcttttaaaactgaaataatctagatctgagaatcttggacagatccaacataaataaatggatcttcgccctccgcctgaaaagttaccatcttacgtttgcagtcaatactagctgcatatttggacagaaagtccatctcaagtatgatatcaaa

SEQ ID NO: 211865 - DNA, 636 bp, Cannabis indica
taaaatttgtttaagttcatctttttttaatattaccgttaaataataactggatgaccaatgtgtacacctttatatatgggacagtaaaacttcgaagtctatattaacgcctcaaatttgcttaatcaaaacgtataaaaacataaaaagagtaaaggagccttgtatataagtataaaatcaagggtgtctacacatttggtaccctgtgttttatttaaatataagttttataccctgtatttttaataatgcttatttagtaccctgcattttaaaatcatacctatttagtacctaaattcaaatttttttaataaaattttatcaatacaactaacagtttaaaattttattaattatgaattcaaatttaattatttgattacatataactaaaactatttggttaaattgataaaactgtattgattaaattttactttaaggtaccaaatatgtacaatttaaaaatatgaggtaccaattaagtattattgaaaatacatggtaccaaatatggttttcatgaaaacacaaggtagtaaatgagtatattccctaaaatcaaaacgcaaggtttcgccgccaataactctaaaaagtgtatctatgtctctaatcaaattttta

SEQ ID NO: 211866 - DNA, 525 bp, Cannabis indica
tgtgatggagcagtagcacaactagagcatgtgttagatgtagtgacagtaataggaaaaatacatgtagcacaaggtaatgaagttgaagaatatacatgtgaagaacatgatgttttgaaagcaggaaaacaactttcattgaacacaacattccttgcaatgtaaattcttcctttcgaattctcacatagatagcctttgtgatgggaggaatagccaaggaatatacactgatctgatctgaactcaagcttgtgattgttgtaaggtctcaagtgtgaaaaacaagcacaaccaaaaggtttaagaatcttgtaattaggtaggcttctaaacaaacattcatagggacttttaaagtcaagaacagctgtaggaagtctattaattgtaaaaacatcacttaggaaggcatacaaccaatatgacaaagaaagaccagattaagctagcaaaaccaaaaacgtttcagtgatgtgcctatttttctttcagctcttccatttgttgggttttatgccc

SEQ ID NO: 211867 - DNA, 553 bp, Cannabis indica
ggactcaaacacgagacctggacccgaacacaaaccccggcccgagcgcgggtgcgagcccgggcctggacttgggagccgagactcttacccaggccgaacctaggacccaaacctggactgagactgtgacccagacacggactcgggcccgagcgcaagtgcgagcccaacccgaacttggccccaacaccaagattgggattgcgacccaaacccaaactcgaatctagacccaggatcaggactgggacccgagacacaaacccagaccgcgacccaaatcgagacccgactcgaacctgggctcggacccgtaccagaacccgagctcgagcacaggcacgagcccaaacctgaacccaagttcgagaccgggacagggaccgagacccagacctagaccaagacccagactcagacccgaatccaaacccagacccagatccggactcatacccgagacctaaactcgcacctgaacccagacccaatcctaaactcggacccagactcggacctgaacacgagacctgagacccgaactcgggac

SEQ ID NO: 211868 - DNA, 1134 bp, Cannabis indica
caactagtatatacattcacatataaagcaaaatatataaataaaaaggaaactaaaaaaaaatattaaaaatgggctgtgtttggataaaatataatcacggggactcttgccaattattaggttctataatagcgagcaaattaatagcatatagataaagctattattaaacctcacgttttgacttgaaacatttgtttggataattacatgtatagaatatgtatagttcaacaataaatcattatcaacttgcccatgaattgcttggtagaccgatctaaagataatgagttacattttgaatttagtaatgtatcataacatacatcatgtgttgctgtcttctttatttaatttatcttagtaaactaggaaattaaatcacaattagctgggttttcaaacttttataatgtttgtatataaatatatattgcatgagtaacataatttaaaatataacatttttatgtgtgtattattattaattattataaaaaaattgtttataaatttattaatttatcattatttataattaattattttatttaattttttttggtaattatatcactatataattaggttatattctatcattatataatttattgtttcataaaagagaaataaataaaaaaataatggaaaagaaaaaaaaaatagagaaagcaataagttgctaacttacattttttggcatataaataaatcactactacaactattagtattcgcggcatttctaaaaacaatttttttaagagatcgtcgctaaaagaattaagcaactgtttaaaaccgtcaggaaaacttgatattcttgaaagtttataatagtcgctaaaatcagaggcaacgatgttcataaaaaaggagcaaaattaataataatatactcctatacccgatgatttataatcgtcgaatataatccctttatatatttatttttttaaaaaaacatatatctcgccatacacacacatacactacacagtgtttggaatattttattaagatctagattaactaacaagtatgttgaattaacatcctaaatatgaattctctaaaaccatgaactacacataagggtttaagaaaaccttacattgattgcag

SEQ ID NO: 211869 - DNA, 816 bp, Cannabis indica
ataataataataaagaaatgaatgttaattgcattctcccataacagtgaaaaggacaaacaatatatattaatcgtatatgcatgatttgaaaaactgtaattgatttatgaatatatataccacaaaacataattggcagtacatatataaatctattataaatcaattgcttaattgtttcatacaagtcaatataaatacataaaaaacttcaatcgtaaagcattaaaaatgctcgctttgagtcgtaaagatatattatcgcatatgtatacaaagaaaaaattttaatggtataagcatatatatatatatcatacaacaatcaccaaatgcaggaaaaataatttaatagaagaccaacactaccatatattcacaagaactaatttagggatgttgttgataccacatgttaggaatactgtaaaacttaatttagtcctaattaattcatgacaatcaaacaataagatgaaggaatagcggaagcgtaccggagtctattgaatcgcttgaagaagggtatgatcttccaattttgtatcaaaacttttgaaaccatattttcctgatgatagggatttaggaactctgaaaaatgacgatactatgcaaaatagggaccaatacctgttatattaccaattgttacaattgttagtaatatttattaattatttctaatttggcttctcatcaaatcagaaactatctaattggtatccacatattaacatcatgacaattatacccttaagtcataaactttattacaaaatagaacacaaaaatttgacttatttatttgat

SEQ ID NO: 211870 - DNA, 927 bp, Cannabis indica
atgacataacagattgcacacttgaattctaatctttaatcactcattggtttgatcaagtttcgaagtaaccaatttgcatctaaacaagttataattagctatcatatgtaaacaaacatctgaataaaacagatcaatgaaaagtgaaaagataaagagaacaaacacaagatttttttcccgagattacattcttgtttgagcttgccatagaaaactgtcttgcacttgcactataattaaatcacgaattacatcagttgtgtgaaaattaatttcaagtctcaacttgactggtaatttcttgatctcggttctcttctaatctttctttataccactttttcactttttctctctaatcctcttaaaattttctctcttgaaatcacttctttctctagctctcttagagttcaattcttgatcaacgatcatctttttgagttggagagccttgctatttataacagtcatagcatttgagtgagttggttaggacagtaaagttgcaaaaacagattcaactaattttgagtgagatgagtctatgcagttgtccacgtgttcaatgagggggatttcatctaacaatctagattgttttttcttatatgagaataagatccttcttctacaataaaaaaaaacaagtcacaaccatgaaatagaaaaaaaaaaaaaaaagtttgcctttagcaacatgacttatctccaaattacctttcactataatttttttttggggtcaatgatgactttttgtttttttggaaacctgttaatgatgactttaaagtgaatgaaaaatatcaatattgataaaagttgatgcctttcaataattgttagctagtttacataaaagaaaaatgtggaaatgaattaatgctcatcccatccctcatatatatatatatatat

SEQ ID NO: 211871 - DNA, 618 bp, Cannabis indica
ttcacatttcattatcaagacaaaatcttgattttgaaatatagaggaccaattggtctctataatttctcttaaatttaatttccttcttgaaattattttcaccaaaatttgacaccaaatatgtcaaaatttcacatatgcacatagccaaacttgatttagaatttgaatttaaaatcaaataaattaatcaacaatgtctcaatatattttgattaaatttgtggctcacccacacatttttaccataaaatgtatataaaatatcacttttgtatattttcctcttcaaatggctctttaagtcactttgaaaaataccatttgacaattttagttttctcaacaaaactaaaataccaaactcacattactactcacaaaataatgtgattatttttatccataattttaaagttatctcctcattgagattagcccaaaattataccaaagttaacaaaattctcatcaatttagttcacaactttgattaattaagattcaaaattgcttttccaattttgttatcttttcatatattttttttttgagagagtgatttaaatcacactatgataatcgttgacgcagaagaacttccagtcaacaagc

SEQ ID NO: 211872 - DNA, 673 bp, Cannabis indica
ttataatacactaaaatagtaataaattaataatagactttaaatttaaaaaaaaaaatgcataaaaattcatttacaataaagatctatattaatttactttgaataagatatttttaaatttgggtggtggtggtcggtcgtctccttctttgacaggtcaccgacggtggttgccggtggaggtcgctgacggtgactggcaaaatagttttggttggggtatgggtaggaggaagaaaaaagtagagaacaaagatgataaaaatagattttcttttaaaaattattttttagtgtctcgagcgtaataagagaaatatgaaattttcattaaaagaagatgtcatttaatcaaaagagagttttatttgcattattttatgttaatttcaatacttattttggttttatttttataattttttttaattcatgtatattttattaagataattttatataattttttattttaatttttttgtcataatatttaaaatacaatttaattttgtttgataagtatattttttaagaatataaattaaaagaaaagagttagtataattaaagatataaattttatataaaataaaaattattattaaaatggagtgtgaataaaatttctccaatcaatcaaatacttttcaaaagggaaatttgaatt

SEQ ID NO: 211873 - DNA, 1019 bp, Cannabis indica
aggacctctagcattactggttttgtctagacgactactactagcactagtgtttggtgattttctctacggggcattcttttccgtgtcggtggcttgggtggtatttggtacgatagtggagtcaagttcaaagctacaacatcagggacctctatatcttggtcgtctcttacgccatcattaccctcaacatagcattcagggtctgaaccatcacaaaaaccatcaataaagggcatttgttctacattgtcagcactcggcatcatagtgtttaactcaggtaacatattagtaactaatacctctggatttgtttctggaacaaaactcccaaccttgctacgagtgtccttaataatacttagtgtgggactaggatcgatacaaacattcttctttaacaaagtcacaaataagagagtaaattcatctgccttctttgcaagcatagacaaaaagaatcttacacgcttatcatttccaataactttagggtgatacattaagcctttcatgtacttgtaatttacttccaattctaagtcatattgcactttgtcaacatcgatttcttcgtacaaaacatcaaccaaacgcgagtagcctacgttcgtatcaatctcaaatgtcaaatttttggcgcggttataaacccaatatctaccctcaagctcccaaacaccattatacataacgaacgcaataatagttgaacctgtcacatacattaaaaaaactcaattacaaattcagaacaaaaatctaatagaaaagtgataaaagaaagtcttaaaacccataaatctgtaaaccatcggacccaatcgtactccatcaggcctaacatcgtactcatcagtcccaatttagatccaagaggacaatcggacatgcatcaggcctatatcggatacaccatcgaactgatgatgcccttaagtcaaagttgaccatcgggcccctatcaggcctaatcaggccatcctattagatcttagtctctaagaactatc

SEQ ID NO: 211874 - DNA, 542 bp, Cannabis indica
aatatatatccatacataaaagtcgggatcttgtcttatagagtttacaacaatatccaaaatatgtttacgaaagtgtcgctccgcaactacaaaatgaaggcccaagtcgtcttgagtccgaaccctccatgtttaactatcctgatatatgtacaaccaccctcaagctctggactcactggtgctcatctttcaccttgccctacctacacatgaagataatatctgtaagtcgacaaactcagtaagagaagcacaaaacatataacatcatatcgacttgcatgtaggcacccatacacctatttataaggcattaaatgcatcttcttaacagaagtacaacccttataccacatgcactaagtactcgtctcgtactactgttggtagggcgtaataacacctcaagtaccactgagtgttgcaccacatgcactctgtacttgtctcgtactagtgttggtaacactgtgtcatacccttttaacatcatatactatagtaatgcacattgtaccacaaccgtactagtgttg

SEQ ID NO: 211875 - DNA, 738 bp, Cannabis indica
ccttacaaaatttgatcaatatagaaattaattaataattatgaatctcaaccatgaatggtcgagctctactgattacagtcgagtcatataattataatttttactaatctcaaccatagagagtcgagctgaactactctcagttgagctcaattttttaaaaatttgattaacaattataaatttgattggctccaatcttcttatataatttatccaataacatctcaaatgtagtgctcgaatcatcgataattatagatataattttcttattttttggcgaccacttatatgacccatgttcatccttccaccccccatcgttgaaacatagattactattcaagtcattcttgtataaaaaatagatggttgatattaaaaatagttaaaatatatcgatgttgaagttataattaacaaattcaatttttaactaaattcaattaagttttatcaatatgtccattaaagagtttaacaacaattgagtattaatactatcttgaccatgtttggtcgagctagttgagctctattaaaattatcatatctattgaatgtcactcttttagcaaacatcgatgaaaaaagtttaacaattaaaaatataaatcgggagaaaatttagttgagctctaccgtaacgtctgtcatctcgattgacaacaatcgagctctactaaaagtgtaatctcaactaacataatcgagctctactaaaatcaccat

SEQ ID NO: 211876 - DNA, 626 bp, Cannabis indica
gcctcttcatccaacccacctagctcatcggggcaatccaatgtagatagggcgaggtttgtaagtgccgaagcacaagagcgctatctagaattgaagaataggccattcattgacgataggggtattgacattggtgaccttagaaatcgaagaatcgacattcatcctatatttgagccaataagaaaataagtgataaaccggggatgggtgaaatttgtggatgttagtgagagagtgaaccaaacctaagccctagaattatttgctaactggctcgaaaggaagaatgacttagtgaaagttaggggtgttgatgttccggcctccactagagctatccatgccatctatgacttggaaagttttacccatgaagagcaacccccaaaaatgcttgacgaagaaaggaagttagattatgttgatatggttgagactttaggtttcccaggattaaggtttcatgagtataatcaggaacattatcagttgtaccattgtgagttgaacccggtggctaaggcgtggttgtctttgtgagtgtggtgaatacccaacaagcacttttctgatgctcagttggataggcatagcttaaccttgatggtcgaaggagcctg

SEQ ID NO: 211877 - DNA, 769 bp, Cannabis indica
  modified_base (711)..(711): a, c, t, g, unknown or other
ctaacccgagtcttacaaaaatattaaattttaggtaaatttttagtttttttttcttttatactgtaaaggccgaaattaaaaatgaggcctccatcttccatacccacgaacagaaccaccgtaaaaatactaaaatagccaaaaaataactattaattccaacgagataaagcaaaaacataaaaaccattaatattggggttgtcatggtttttccaatattatttttgggttgttccactattgtttcgtatgttttagcaaatgctagttttaaattacacaggttaaaccaaccattgaatatttgtttgaggtaaccagaatgaaagaatcatgtacattagacctcaaagagagaacatgcacgtgcaacaggttataacacaagttctgtttagattactataccaagaaaaatatgctagcaacttatgaaaaaatagtgtacccaataggacaccaaagtgagtgagatgtagcacaaaatgtgaaagatgtaatagtcttacctcccattgaaatggtaaaatctgaaaggcaaatgttacgttatttttagtattaaatttaattaagtttaatatatttttaattgagttttaatcgtatttggagcatttttacgttgttatcttttatttttgcagattttaaataaagaagatttgaaaaatatttagaggaaaaagtatgggaaaaaaagtntaaaaatatctcacaaaaagatgatatttaaaatagagaaaattgtccaagaaataaa

SEQ ID NO: 211878 - DNA, 591 bp, Cannabis indica
ctatgcaactgaatgtaacttatatgtattggtgatacctgatttggattgattaggagctcctgatcttttcgttatttcaggtcaattcttactaattgtgaaccctgtgtttttcattagttttatttgaatcagatcatttttccaaccattataaaactaatatgcaactatttgcataaaacttaccatgtataacttttatttgttggttcccgtcaactgaaattcctgcataatatttaaactatcataaaatgataatgcaactataaggcaaccacaacaaataataaatagacttatacgtaatatgttgtcccttaatttgaatttactcttcttatcgtgttttttaaaaaataaattccacattgtaaaccagcaatctaccaaaatgcaactgtatataacgtagatatattattcataagatttttttaaaaaaatttcacatcataccttgttttggatttgaggggagctcaagtctgttttgttacaaatctacattgtatgaatctggatttcgatattagagggagttattttgaacgagtaaaagcgaaaacaaatgtgtaatttcag

SEQ ID NO: 211879 - DNA, 561 bp, Cannabis indica
attttgttgatcaaatacttaatagaagaaattgagttttttcacaagaaaagaagagccaagtttcttataaaatagagtagggtgtgtgtgggctccatcgccaaccatgtacaataagtgagcatttttattaagtattagtggtgtctggcaccacctaaaaatagcactaagctaagccctcacagatttatttttgggcaccttccaaaaaagcctcattccaatagagatagtgtctatccttatatacccaagatccttcctatttttagccaatgtgggactttggttgtacacccaacaatcatcccctcaaacaaaggaccaccttgcctcccctcagacgattacagatttaaacttgaatctctcgattccaacacttaaaatccccttgagtaagctagatgaatcccttcactagctagattcgaaatcccttcgaatacctgaatctctcgattccaacactcaagatcctcttgagtaagctagatgaatctttttaccaacaagattcgaaattccttcgaactagatctgaacctctgacgg

SEQ ID NO: 211880 - DNA, 561 bp, Cannabis indica
tactaaggcataaacatacacgacatgcaaaaagcgaaaacaaaaaaaagggcgacaaataggtaaatacaagtatttaaaatatacgttatccaaaatggataataataagcccgggaaaaggccataaatatgtcttccctaacagaaattaaaaataataaaaactgaaaattaaaatattgtcctaggggagagaagtaagaggaaggtaagaaaggatcaattaaatagctttcagaggaagatggggacccctttgctcgatcaagacttgttccagcttcttgttctattcctagaaccgagccacggtagcctcaggatcaggcatgaagtggaggcgaggttcgaacttgttcgatttccagcacataaaaactccatcctcaaagcgcttctcatagttcttacaggtcactgaagcaaataaatcgtccttcccagcctttccaacctccttctgggtccgctcccggaactcatgcaactccttgagcttaaaagacatacttgcagtagtttctaagtcggtctagtgtagctcctcaagagtcttga

SEQ ID NO: 211881 - DNA, 577 bp, Cannabis indica
ttgttattgtagttttttttttatgttgcataatagtagttcaactatttttgtttgcctttttttaaaaatagtgattgaggagcatttgtggctgcttttgcggagttcttcattcatgggaaagatgtccctgctgactttaacattgaagtttatcgcactcgtcttgctgccctcttgttttcatatggtcaaaggaaaaatgatgaaaatattgatagtgaggatgagaagcagagcaagtcttcaaaggcttctaaagggaaaaagtagggtcattttataggaaactttgttgtgcttagttgattttcatattttaaaggattatacttttactagattttatattttttcggttttatgctcttctttaatttttgtatgacttattgttatcatttcatttcagacaatatttagtcttttaatgttttttggtactttatacgtttgatgttacgcaactgcttatcaactttttggatatttgaaattaaccattatattatgttcattcttttttatgtttaacaacaactgtgttttacaattaatattttttgtatatttt

SEQ ID NO: 211882 - DNA, 644 bp, Cannabis indica
tttaaaaaaaatatagataatgatatatacattcttaatttgtagttagaagacttataattataataaagcgtacaaattattacaatcgtatatatatcattaatcatttttttttaacaatatcattaatcatttttaaaataaaaaatttattgtaaaattaaggtataaatatatattatatatatagatataatttttatttttaaatatatataaataaattaaatatttttatataaaatatctacataattttttattttaaatatatataataatattataaaattaataaagaataaattattaagtaattgagatattttattaaagttaacgtagaaaactataaacagcatcaaacttagaatttctttacataaccacattttatatagaatagatatatatatatatttaacttttttaaaacattttctcattaaatatatatattcttttttttagaaaaaaagccatatttttattctttttcttatttctttaattatctttttaaaaccaaatgtaatgtttattgctctctcttctctttaattttaaacaaaaaaattcgatcacatgaccactagttggattctagagtagcaccatcatgcctcacttcacaagattat

SEQ ID NO: 211883 - DNA, 518 bp, Cannabis indica
gatcggttacttattggagtttagtttgattctaataccaagttaagactatcagacaccatctatttttcaattactatgctattgtttgttttaggtctaagtcttcacgaatttgtttttgaggcaccatcccaaaaggcttcattctaaattagaaaggaccacattgcttccactgagacgattagatatctaaatcttgaacaaccactcaagaatttatttctaactctcttggaaaattgcaaatcgaatttctcgattctaacactcaagatcatctttaagtaagctagatgaatttcttcaacagttagattttgttgaccttgcttttagccaacgaaaatgagtctagtaataagcgataagaaatatgatttatgtataatataagcaactaaataaagaacacaaggttgttaaagaggttcgaccccgttcagttcggtaatagcctactccttttgattcgtattaacttaagagcagagaacacagtgtttcctctcttg

SEQ ID NO: 211884 - DNA, 838 bp, Cannabis indica
atataccgcttagaagacacatttgtaaaaattgttgcagcatgttcattcaacctcgtagcttgagcacttaactattgtgcaagatatgtaattgcactactaactactccttcagtcgcagagaacttgttactcccaaccactaatagtaatttgatggcgagctatcgaagaacaaaataaactaataacgaaacaaaacaaaaccatgtcatacagacaagactaaaatactcaaaatcatgtcacgaagacaagactaaaatactcaaaacatgtcacagagacaagactaataaatcgaatcataatagcaaaacacaatcccaatcaagtcgcacctatgtctagggaagattggcgggcctgactagggaaaaaaaacaacttcctgtaactataaatttaagaacgagaaatcctaatttttttatactatacgtagcatatagtggttccttttaatatatattgttatttattaattggttaactaaatataattttgatcaacatctctataaaatatataacatttaaaatttacaaaaataaatggaaagaaaagaaaaatgggagagaaattttttaataatattaaaagtttattacatttttgcaaagttaaaaaaaataaaaaataattgaaagaagaagaacttgatgatggggtggggaggcatgtgtgatatatggatgaaaaatgaagtagtttttttttttttttttttttttttttaattttttattttaattaaaaaaacggtcttcgtttaggtatataaatataaattaccatatttcaaacaattaaatacccaactaactggatcaa

SEQ ID NO: 211885 - DNA, 786 bp, Cannabis indica
gtagtattagaagttaataatttgtaactttgtttctatttgtcatatatggtttacattttatcgatataaacattattatattatactattctatcatcatatcccaaagagaaatgctaaaaagcattaatgatgccaagtaagtactttcctacgtgtcaatatcgctattggtctaattaagtatcgggtcttatatagtttaatataatagcttttaaggagtatcactagccaatcgcaagacgatacgtcttaagggtgctagacaccactggtgcccaataacaatgctctataccaaaactctttttctaattgtcttccccatgcaccatacacgtggcatctaaataggtgttctttatttatttatttatttttttactttttaacatgattcgttgaaatagtttgaaacctctcataaaaccataacaagtaattaatcacatccaaacaaaagtctcaaattttccttctctcctttttgccacatgtataaaattacacatatacgtttcttatttaccaatataaaaaaggtaacataacaacacatcttcacattattattagaaataaaaaaaagaaaactcaaatcaaattaaaaataaaaaccatgaaatcttttctaagctctatgtttcctctagtactactactccttgcattatcatctatagtgaaagccaagcaccaagtctctctagtaaattttatcgatttaaacacgacgctaactctccattgccaatcaaaagacgacgatcttggtatgca

SEQ ID NO: 211886 - DNA, 528 bp, Cannabis indica
atttatgtatgtataataggacaaaaaaataggtcttttcttaaaaaaaaaaattgggccttaaaacaaaaggggccttgtgcaatggcccaagctgcccaatgcttgggccgaccctcacatcacctaaacatataaatgttttatttttaggttaattgcagcaaaactcccaaaactttcattttgcttccatataacccccaaaacttaaatttgggcgataaaactctcaaaacccgcattctgttagcatttagccatttccatcttatgcagttaactgccatattggactgtccacgcgtacataaaatttatccacgtggacacagttaacacatagcacaatttaattggctcacataattaattattaaaaaaattaatttaattaataataaattacaaatatgtaaaaataaaataaattttacaataaaaaataacaaaaacaaaacacattttttttcctcagatcccctctctaatacctaatcactcactctctctctaatattttgatct

SEQ ID NO: 211887 - DNA, 508 bp, Cannabis indica
gagatccataaaggctaccagagtattcgttaacctgaacgacataacaagaaactcatagtggccatacctagttcagaaggttgtctttggtatgtcttcctcctggattctcagttgatgatagccagatctcaaatcaatcttggaaaatactgtcttaccttgaacttgatcaaacagatcatcaattctaggcaaagggtacttgtttttaatagttagcttgttcaactcctgatagtcaatacacatgcgcagagtcccatctttcttctttataaataaaattggagctccccagggcgatacactcggtcgggtgaaccctaaatccagcatcccttgaagttgtatcttcaactcttttaattctgcatgagccatacggtagggtgcctttgacaccaatttcgctccaagtatcaggtcaataatgaaatctatgacttgttgtggtggtagtcctgttaattcctcaggagacacatccaggaattctttaacc

SEQ ID NO: 211888 - DNA, 839 bp, Cannabis indica
ttaaattatttatataaaataaaattatacttatatcctttatttatactaataaattttaaataagtaggcttatataaatacaccactcatttttaaattaaacatcattatatcattcttattactatttatattataattcattactatgacaattactaactattatcagggtcaaaaattggggacagagtatatccaaatcagaaagaaaatcatttaccatagtacaacttaaaaatatattttttactaattattctcatataaaattgatgccacatgacatgaatcgaaaagacgattggttagcgatttgacacgattagaaaaagtagcacaattggagaccatggtagggtttaagggcttgaaaatgtgggagagaacacacttagttcaacatggtgcaagtgggatgggaaggaagattgcacaacacaacacaaactctttctctttgacatttagtccaacaaaatagatgcataaggaaaaatgttttaccttttttttttttttttttttttttatattgtggggtctcaattctcaattaatggggttaaaacttattcttgaaataaattgtgtttgtcttattaggcacccatttaatcctaagttcttatgttatacaagtgaaatttaacatttttatattagatacttggccaaattaacaacaacacaagtagaggttagaaggaagtttgagtatctatttctctaatatatattaatatatatacattgacatgaatacaataatattataaatttgaaaaatttacctacaagccaagtcttcaaaaaaaaaaaacaaattttaaata

SEQ ID NO: 211889 - DNA, 776 bp, Cannabis indica
atggcaaaagcctttgatagagtcaagtggcagttcatcactaaaataatggaaaagtttggcttttcccaaggttttattaacctgatctaccgctggatctctactgtttcttaccaatgtaatcttaatggtagagtcatgggttctgtgactcctacgaggggaattaggcaaggagattctctctttcccaacctttttctcttgtgctttgaaggtttttcctccctcatttgtcaacctgagcaatctggaaatattaatagtctaaaaatttctcgtactactactaccatatctcatcttttcttcgttgatgacagtattttgttttgtcatgcaagtatccaatgttgcaatgtggtaaaagagattctcctgcagtacaaacaggccacagggcaatgtgttatcttaatagatcatctctttacttctcacaaaacactgccctaagggatcaaactcttatctcaaactacatgggcatgcttgtacaaaatgagtttgagaaatatctgggccttccccaatgcttcggaagaactaaaaaacaagctttaaattacatcagagagagagcttagaaccacatctccaattaggctcacaaatttttcatgaaaaggggaaaagaaatccttatcaaagcggtaatgtaatctatcctctcctatgccatgtctggctttcggctcccagatagtatttacaagtctcttgaatctatgattgccaatttctagtggggcacaaatgctcaaaacagacct

SEQ ID NO: 211890 - DNA, 536 bp, Cannabis indica
atataattaatataaaatatgtggttttaccataaaggccggctggtcttatatttatataaatgataatatttttcttcaataaataaataaataattattataatatatagtttgtccggattgattgctattattgcatgtgaatttattaaatgtattaataataaggcaatatatagatatatatatacgtatacatatatttatatatataacactatatactcacatggcagaacatgattggtcacaaagaaacaaaattctctctataaatatttatatatataaatgattaaaaaattgattcatccaattctacccttttcatcaaaacttcactagctcttttatatatatacacatatataaatataaccaactcactaccaataagttctcctcaacactcccaaattatataatctcaccattcaaaaaccctaactagctatattctctcccattctctctattttgactcaaaacaaatatgaaactaaagagctctcatcaccattgtttgattcttt

SEQ ID NO: 211891 - DNA, 749 bp, Cannabis indica
tatagaattcatttgatttttctgggtttgagattttcttatatttttttacaataattgttgtaattttgactcaatttagcaatagtataaaataggccagctgaagaaaaatagtgaaatattttgtttgttactgattgttttgtagtattgcaaatcacaacaaatagtgaaaaaacttgggcatatatggcctttagtgcttctgcaaagaatgtgagacaattaatttgtcatttgttaattaattaaaacatataattaatatgccagcaggtatttataaaatcctaaattatatatatacaaaatatctgcaatatatatacttttaaacccaaacgatatttcggcttccacaaaaaatggagcctttctgtatctaggaaggaagagattaggagtttggtccttttggcctccgaagaggtggctaggctgagctcgaggtgaatacggaatcaagttacagcgtcgtttccatggttactctgaatcaatgtgtcgttgtttatttccccaccactactcgctgtgatcaatgcaaagtggtttgtcactggtatttattttgacttgccattattagattttgataattaaaaaattgtgtgttataataaatgatttgctctgtttagtttttattcaattagaattagatttttgcgagggacgttttatagtgtcgagtggggactttgatacagttagcttaatcctcatcattcaagcactatacaaat

SEQ ID NO: 211892 - DNA, 1164 bp, Cannabis indica
cggtcagatgttacgaatgattgctttgtctaccagtaatctcggaccaaatgcaatgtttatcttgcagctgccgtttctgacttctatgttcctggcaaagcatggttggtgttatttaccataataataataataataataagcttttcaacaacggaattgtcgtgtctatgtaatatgttgatttatagaggagcaattagaaatttggtcgctcgttgtagtgatgatagaatcatggactaattcttttactccttaacattttcctgtctttttttttttattttcttttttacatcactttgcaggcagaacataagattcaatcagcatctggccctttgaacatgcaacttgctcaagtgccaaagatgttaccagtgcttaggcaagagtgggctccaaaggcttttctcatttcattcaaggtcactaccttaaatgcataaacttattattcaaaatttattagtattgtcatagaattcaatgattaaaatggattaattttggttggactaaaagaaaatgtgatggcaacagctagagacagattcaaagattcttttgaagaaggcaactgcagctcttgaaaagtacaaaatggatatagtggtagcaaacgagctgttaactcgcaaggaggaggttgtggttgtcacaagcagtgaaaatattacagttcgtagagacaaaaatgaaggtgttgatgacgtagaagatcccctaattcaacttcttgttggaaggcattcaacacatattaacaccaattcttcttatgttcaatgatatatcttggtctcaaaattactaaatttgtattggatttggggtttgtattatttgcagtgacaagcaactaagcaagtttgcagttattgtcactagcaacaataaaatgtttctctttgaatttattgagaaaataagataggggtttttattgtattttagacaaaagtttataattttactgtcacatgatttttttttacaaaaatactgtttttttataaaacaaccgtaaaataataaaataaaataattaaaaataacagtgaaaatttaacacaatacataatataaaaatacatagtatttcttagtattttttaaaatatatatatatatatatagtattttagaaaaaaaatt

SEQ ID NO: 211893 - DNA, 751 bp, Cannabis indica
gcttgtaagcatggacgatgttccacctaagacgcatgaagatatggagaatgcatctcaaatattaaattctctacaagccatgtttgggtagcagtctaatcaaacaagacatgatcctagtcgtagctacatgaattgtaagatgaataaggctgtccctgtaagaactcatgtattgcacatgattgaattaatgcataaggcagagacacatgaggctatcattgacaagaggactcaaatgagtatgatacttgagttattatctccttgcttcaaagctttcatcacaaactatgtgatgaataagctagagttcaacatgactcaattgttgaacgaggtgaccgtgtttgaaaaccttaacaaggataagtccaggaaaggtgaatcaaacattgttgaagcaaaatccaactctccttcttcttctgataagaaaaggaagtggaattataacacaacagcggaggcaagcccataggcaagaagtcgcccaaggccaagaagaacaaagtcagcgctaagactcatcgacaaaacaagtgtcaggatacacccgctggcacgatccatgatcaacccaaccttccgaatatttttagtactgaacaaggtttaccaatctctctctaatgccttaatctcaaataacatggcatcaactctcctcttcatgtccataagaggagcaggtcttttaaaatggtcgtcttttttcaaggtaatatgtcatgatgggagaacg

SEQ ID NO: 211894 - DNA, 538 bp, Cannabis indica
ttgtggcagattcgggtttatgacaatgacatctcttgttgggacaataaggacttagagacattatgacacctggaagtagctttttacacatctcttgtattcaactggttatttctcgctcaacaatgatattctcaatcacacacttggggatagtatccaattgaatttaatgcatgtgaaacgcatgccaagtgaggttgttcctcaaagtaagaataggtaactaccatacaactatcttaatttaccatactaatgtattgtcgtagcctattttgctaaaattgttctttatgtttttgtagtggtgattgtggaaagtacaccgttgaatacatcaaacacttgatgatgaaccaatcattagagcaacttaacgatgacgaaatgccggtgtagagagaacagtggggtgtggacctgttttaccaaaacctcacttggtgattaaagtacaaaagtaggggcttatcattaagtttttttatattttattggtttttctataagtatttacatacatatctccaat

SEQ ID NO: 211895 - DNA, 609 bp, Cannabis indica
aacaataccaaacatgctcttatcttctggatcggaatggagaaatccgagctctttacctaattattaatttaaataacaataataaaagctaaatctaatataatttgattatattttttaaatatataaaatgtaatctagttttaaatttctttataagaaattgtatttaattaattttactaaacaataaaataagtaaataaatttagatattttaagaaacaaaattactaaatatgttattgagtatgattaattaatgtctaatttaaatttaaattaagatttatataaaaaaataattatttaattttgttgatatatacttaaataattatctaagtgttatcctaattttcgcataggacaatgtgatacccaataaggtgacacgtaaaaattattccaagacttggaggggttaattgccaccaaaaagctcccttcagaaaagtctacactcaaaactagttatgtctaagtctccaaaaagcatctaccataatctgtgtgtaatgcctcgatcgagtagaacgtttttagccagctaagcagaatccaccgtgcagaaaagacaatatcaatacatttatgggataagtt

SEQ ID NO: 211896 - DNA, 828 bp, Cannabis indica
gcttgcattacataccgtgaaaattattcgtgataactaactaattgatgtgttagttggttagagtttcttagtgttagttaaagctattgttagtttcttgggttgttaattttaatagaatataattctcatgtgtatataaacacttaatcattcaataatgtaatcaagctattttgcatttcttctcttttgagcatactctgttctttcatcttcttcttctgttttgtttctttatggtattagagcacttgacttgcgtcaatggcttcctccgatgaccactcgtctcaagttggagcctttgatcctgctgctgtgccaactcagtcctcctcaatgacacaaccatggaaccccttctcaatctctttgacagcttcacttatcttgaaactcgattgcacgaatttcttttcctagaaatcgacagtcatacctactgttataggtcatgatcttgatgagttactcttcagtaaaaatgctcctccttcaaaactcatcaatagcgatgacaatcccctgttcttgcaatggcatcgcaaagatcaactattgttgtcctggctctgatcttcaatgactgaaggaatcttggctatagttgcttgctaccccacatcgaattccgtttgaaaggctttggaacagaaattgtaagtcagtccaaggcagactctcaactcaaaagccagttacaaatctgcagaaaggtaattgtcacttctgattatgttgacaagatcaaaatccgtgtgtgattcttggttatcgctggacatcatgtaaatagatttttgatctcattttacacctaat

SEQ ID NO: 211897 - DNA, 530 bp, Cannabis indica
aaaaagagactccattccatgtgtaggatcttactttgttaatattacatttgtagtaatatatatatatatattgtgcatagagtgccctttccaatagtactcatttattgtaaaatggactggttgttgccaaaacattcaattcaagaatatattacacataacaaccaatcactttcatattactaataattataacaaccaataagcacttttcgatcgtattgtgtgtagtgcatttttgctatgtagagatatggtggtcatgtgtgtgtggttccttatccaactcaagcatgccctatttaatttacaataaaagtatgtaataacatcttcactcctcaaattgaattgaggtgtttttattattgaatgcatgcataatggaccaatatattataactattgaattacgggctacaaattaaaatatggcaatatatataaactataatatttacataaattaagtcaatcttttccattgcatccgccaactttaattgaatcttttatattgaatg

SEQ ID NO: 211898 - DNA, 1542 bp, Cannabis indica
ctcatcatcacaatcacatataattgttagataaagataaggtgaaacataaatacttaacgcaggttttagtatcgaaattagacttttgtaacttaatatatacaagtcaacgaattttctgtcacttttccttacactagttgtaacctcactctttgccgactattgacttgggatgagaattaaaaaacagccacagcaaattaatacatattatatttatatatttataaaataagtttatctggtaatgacatatgtatatatatatatacctgtatgaaatcttcataattttataattccagaacattacatgtaaatctaacaagtctaataaatttcgatagctcaaacacgttcaattaaaatcggtcgataataacaatgagatagacacacattatctctctatctgaaagaaaaaactttattcaaaaagttaataattagaaaagataattgaaggtaaggctagaattggaattttgtttaaaagttggaaagaaaataaggtaatatataggataggcctaaaaaaatcagtattagaacaaacgtgaaaaggtgaaacagtgtcactttctatgagagcaacaatatattgcctagggtatcaaacactttatagttgggacttattaggatgtaccgttgatgaataaggatccattggtatccttcccattgtgaataaaagaagtacaaagggttagtgggggctgatgccaaatccttagcattaattatgctaacatttatatatatatatatatatatattgtcttgtcatcattacttttgggccatattaattgtacaatatttgtcccaccatgcatataatatatgttaaaaactaaaatgctattttgtctatagcatttctcatcttttaaacaactcatacctaactacctatgaaataatttgggaaaatataattttttcccaacttaaaacaaaaataaaaattatataaaaagccatagattagtgaaaaaatatattgctttttagtataaatttaatcaccatgtcatgtgtccaagtttttggtttttatttgggttttcggtggtgttgggggtgtggctcccttttgcaagcttcgttagtgttcattctaaacaaatctacaacgaagcttcctcaaccatggttcttgtgtttatgttttgttattttgataataaccaattattgatatgagggtaattaattaccactatcaaaatgttattgttcttttatttacaagtttggtttgaaagatgctagtagtagcatgttatataatcaataactggtaattggttatcagtgttttgtttaagttttctagcagtactagtaaccagttactagtccatcaaatctaaaaatacaattaatagagtaaaatgtaaaaaatatttaaatgttgtgctaactagttaccactatagaatattattattctttttatttcataaaggtgtaaccatgttagctaatcaataactagtggtaatcggtctattaaatttctttttaaag

SEQ ID NO: 211899 - DNA, 885 bp, Cannabis indica
acattttctctccaatagttagaaaaatctccataataattgaccaaggtagcaaaatatgaccttaaaatggatcaaatggatgtaaagacaacattcttgcatggtagacttgaagaacaaatctacatggaagaaccagatggttacaaaagcagaaaacgtaatcaagtttgtctattatagaaatctctttatgggctcaagtaagcaccaagacagtgaaatatgaaatttcatgaattcatggttagcattgggtataacaagagtgactatgacccttgtgtgtattatatctgtgaaccgattttcttactgttatatgttgatgatattcttattattggaaagaaaagaaaagccatagataaactgaaacagagcttaaatgcagaatttgaaatgaaaaatttaggtgaagcaaggaggatacttggcattgacataaagagggacataccaaaaagaatatctctcataaaggagctacataccgaaaatgattgataaatttttcatgagtgaagcgaaaccagtaagcacacccttggcacaatatttcaaacttacttaagaacaatctcccaaaacagaagaagacaagatgtacatggatgcagtgccttatgcatcgatcttgtgctggcagcctcatgtaccgtgcacaaggccttatttggcttatgctctgagtatggttagcaaattcatagcatatctagaaaaagagcattggtctgcaatgaaatagatacttaattaggtatctacaatgctctatggatgtgggacttgtctatgataacaaagtctaagaatgaggttgaagtgaatggatacgtggattctgactatgctagaagcatagacacaaggagatcc

SEQ ID NO: 211900 - DNA, 591 bp, Cannabis indica
cacaacaaaactattagttagcacatcctttttggataaagacaaaggcagtttgtagtggttatttcttttatccatgtgctgtaaatatgaaatatggggattgtccacgtttaattaacagatataaagataagatcaggcaggaataacaaccacccctaaacacctataaataggggaaggatttccaaactagggtgataattatttgagaagaagaataagaagatacaaaaaaaaataagggaagactatgatttcatttaactgcaagatcaaaaggtatagaaatacaattaattagaaagtcttatataggaaactaacataaaacactaaaataaaggaaaagactacagtaatcctaaataattatttaacaactgatagcaaggcccaaaacaaaatcccagtgctaattgacccaaatgtcttgcaccaaaaagaaggagtggatggaccaagccacttcttcagtccatgacactagcaatgaacaagcttcttcaaccaaaggaaacaagaagaaagacaagatggaagagaaccaggcagctacaatgcgtgaaggaagggtgcgcgtgaaac

SEQ ID NO: 211901 - DNA, 1070 bp, Cannabis indica
ttatatgaactaagtatgaggcctcaagctaatcaatcgataacaagtgcagccattttttttctaaaaaatccttcaacttatttcattttttactttttaaatatttaaataaaaaaattaaataattaagtgtaataatttaaaattaagattacaagtataataaaatttaaattatgaaattatatgtgtataattttaaattataaaaagttttgctataaaattttaaataatttaagtataaaaaaataaattgctaaaagatccttatatagtaataaattgcaaaaaattaattaataattataattaatttaattttaaaatataattaatcttaattaaagttttataaggaaataaatgattaggttactttcaggttacaagttatttattatttatttttatttaatttccaaattaatcacaaccatttaatagtaatccaatggcttaaaaaaatgtaaccatgatggttacaataaaaatgtaaccattgaaacctcttccattcgaataataatgtataataatatttaagatccatatacgagttttattctgagcattaaaaacgttagtgatccaaaatcaacagttggaagaccaaaagaatcaatgatcagtctctacttacatcaataatttcaaaaaaatgaaaaataaagagagagataagatatagaggaataataagaacacactttagccatcttaactaatagattgacattagtttaaatggataggatggctatagttttttattagtaatagtaaatattagaggtataatttcactcatatttctccaaaatttcttattaattagatcaaaagaatgtatgtcaaagaaacagaattcggctaagtaataaaatggtaattaactgatcataaaattgtatattatattctctttacaaatatattctgtagttacaaagatgaaatagtaagtttggaaattatgtctaaaataagtaaaataataatcaatgagagaaaagagaatgaattgtgctataaatcttgataaatttggaataagatgaatgagg

SEQ ID NO: 211902 - DNA, 687 bp, Cannabis indica
tggtaataaatagtgttgtgcgctgagagtcgtagcgtttcataacaagacaattaataatcaaactccttttcactagctcattttgtttttatgttgactaagtgtcttaagtcctacaatttcatttgtccatcttttaaatcatacatagaagtttatctgtttctctctctgctaattatactgttttttctttgaattttcctctacaaattaccgcaacaaaggtaaaaaaacgttttccattttattattttgataagttgtgtgacgtatatattatttcctatatatatccataattttttacataaaagttttactttttttttttgtataaattaattttattcctcaatataattaaattaccaaccacaataaaatttataatttataattgcgctctcataataattggttttaactatagtactagtacaaataatttgtataataaaaaagtggttaattagtgttggttttatgaaatatatattatgggaaaaaatgttagtaataatagttagtaagatatagctataggttttagtaattagataaatactatatttagtgtaattttatcaaaaaaaattagtaaatattaaataaaaacttacgcttctttcaattcctaattttttatatagtaatttttttactcaaaatttattgaataat

SEQ ID NO: 211903 - DNA, 703 bp, Cannabis indica
ataattcatatttagcataaatagtactcttagagattactaaaatctctgtaattgagaaattataactctaatgcccttttctaaaaatagagcccacaacaaaataaatcatgcataattataaaatattaataattaacgctaattacctttgttaatccataatctaacatgtggtcattacaactatcctcccgttaaaaggatttcatccttgaaatctaacctgaataactctgggcattgagtcctcatgccagactctatttcctggtggcttcttccatcttactgttcttctagagtaccttgaccaaagttatggtcttatttcgaagaactttttctttcctatcgaggatttgaactggctgttcctcataggataagtccgactgtagttctagagcttcataactaaggatatgggttgggtctgaaacatatttcctcaatattgaaatataaaatacattacgaatagttgataacgctggtggtaaggctagccgatatgctacctacctgaccttcccgagtatctcaaatggccttatatacctagggcttaacttgccccactttccaaagtgcttgatacctcttattggtgaaactcgcgggaaaacatgttctcctgcctaaaatgcaatgtctctgtgcttcgaatcaacgtaacttttcttcctactttacaaag

SEQ ID NO: 211904 - DNA, 734 bp, Cannabis indica
ctatgacaagtgggatgagcctttccctgatctcctgaacaaggcagaaatgacaaaaaggcttcgccctagggttggaactgacatggcttcattcttgactgacttgttggaccaaagtgcctccacaaactcgaagcggataggttcgccatgttggcgagtgggaatcctgttttcatggaaaactctctgaggacccaagtcaatgttgtaagttgattttacttaagataaaggatatatcttttccactagactgattcatttgtccttttctctcgacatgtgagtttaatagcgaagaggaactgttctttggctactcaactggcttacgaactcgaggtgacaagggcaaagcgtgcaaatgctgaataaaaggaggaggctgccaaagctctggacaacaccaggatggaggctaacataaagcaaagggtgggctggaatctttggacaaggtcctaacttgcgaaaagaaggcaaccaaggcagtgaaggagcatggagataagtataaggatcttcattccactactctcactaaaatcaaagacctagaagactgacttgaagcaggaaaagacttgacattgaagagaaagaccaaaagcttaccatcctatctcgagatatgacaaacaagttggaatcataaatgacaagatcattagtgaaactactccagagagaaaggtgaagcattatttggagttatagtagaaggagaa

SEQ ID NO: 211905 - DNA, 610 bp, Cannabis indica
atttctaatataatagtcatattggtgatctgatagtgaaatttcctcttctatattggtttttttcttgtagcttttacataaaataaataatgttagaaaataaaaagaaccatttctacaccaaaatagaaactacattcttaccatacaaaaaactttaactatgtgaattccaatgaacaacccatgaatatgtatctctaaacagaacaatttaaacaataaccagtacaagccacgttcatgttcaaattaatgtaacatcaaataaaattaactatgaaaaagtccaaatgatcttaactaaaattatattattagtatgtataaaacaattacaagaagtgatattttatctatcttgtattgcagcataacgactaactttatggaatctagcaatatcatttatccctatcttttatacacaaactaaaatcaatttctgtctagaaaacttggcaaagcagtaaattaagaaaacttcacgaaacatcatttgaacaaaattatatatagagatatgtttaaacaatagatctccataacaaaataatgactaacttatgaacaaatttaagatacaacatgtggaagcaaacgatta

SEQ ID NO: 211906 - DNA, 762 bp, Cannabis indica
acaccttgaaaaaagtacttgagcctataaaatggatttttaatctaactattcatatgagaaaattaaaaatatacaaagtgacaaaatctttaaagtatatttaagtttgcttaaggcagattataactactatagcgaggcagaatcgacaaactgctcaaaaataaaaataaaaagaagtttggtggataactaactatttaaataggaagattgggagcaatggaaaaacctaaaagtattgtacatttgatcgaaatatagtcgtttacattgtgaataaaaacgcaagcaaacgcaactgtattaagttcgaatgaaaatagtacaaggaatttaagataagaaaaaaccctagtcgggttacaaatttgtctttacaaaaatgccactaggggcaaaccattaagacaccttcctaaacaaagaatgaggagggaggggttgataaactcgagaaagaccgtctacacatagcttggagaaagaccagctacacgtagcttgagaaagacggcctacatcgagagagccttgatctctgcacagaccccattctaatcattagaagatcccatttcttggagccgaaacctcattcccagcctcaggaaatttctcaataccatagagaggttggcacaagggtcttctagtgcaggtttgggtcttgggtttgttggattctctaatagaaaccacgccaacttccctcctgaattcatccaaaagtgcaccaactttcttccgggattcctt

SEQ ID NO: 211907 - DNA, 547 bp, Cannabis indica
gaagctatgaatgttacttttgtttatggcttcaacacaggtgaaaaggaaggagttgtgggagggtatgattgatctcaaggttaatgctaaaccatggctagtcacaggggattttaattctttatttgagttggaagataggaagggtggcaaggatgtcaatcttaatgatataagggactccaccaattggcttgcacaaagtcacttggatagacctcttagaactggttcgggatttacttggacgaacaaccaagaaggggataagaggatatattccaaaattgatcacacttttgtgaatgaagattggaatgatagctttcccttaaccaaatcgcactatagttgggagacaacctcagatcactgtttgtgtgtgatttcaatggcaaccaatgtggatattggtttcaaaccattccggtattataatttttgggctgatcacccagattttaaaagagaagttgttgacaattggaacaagccgattggtagagagggcatgttgggtctatacttgaagcttatgagactg

SEQ ID NO: 211908 - DNA, 916 bp, Cannabis indica
ccaaagatgaccctttgttgatagtgtttgcaacaataatcgaagggttatgtctcccgtagattagattaaaaactttcacgatacaaaatgagataaataataaaataatttgcggcataaatacctaagtttaccttctagttgtaaataaatacttaagtttaatttttgaccgtaataatatctaagttataattctgaaacttttgaatgtatctgtctgttaaatgttaattaaattgccacgtggcaattattgattagtcaagttattaacttttatttttttaaaaaaaatagtttaaatataccaataaaaaataacacgtagataaacttaacatttaatggttaggcacgagtttctaaaatataatttaagtattattatcgccaaaaattaaacttaatttccttcgattaatgaagcctttaatgatttgttcacaccgttcgtctctgaaggggagaatgagatgctcaggagtatcccgggggaagagaaaatcatcaacactgttgctgttatgcatcctctcaaagctccgggcctcgacggtaagccaggatgtttctataaaaactactggaaaattactggtaaaagtgttattcaaatggtccaaactttcttctcggaagggaggattcagagccaattaaactacactttcatttgtttgatcctgaaaggggaagatgctacatctgttgaaaaattcacaccgatcagtctgtgcaattttgcgtataaaatcatttctaagattattgcaaccagacttcgggcggtcatgaacaaactagtgtcacctttccaagctgctttcatacccagtagatggattgcggagtcctcaattctcaccaaggagcttgttcagactatcaaaaagaacaagggtagtggagg

SEQ ID NO: 211909 - DNA, 514 bp, Cannabis indica
atctataaaggagaagtatgaggctgcgattgtcactctaaaataatttattctactctagtaattttctcctttatcatatttttaattacattaaatattaattaattcaaataattaataaaaaaattaaaaaaaaataaaataaaatagcattcctacgttttttaatcctttttttagttttttggttttttctttttctttaattttttttaaaattaacattttaaaaatgatatttctacaaaaaatcgtgagatttgtttattcttttttttcaaattaaaatttttaaaaatgatatattttatggctttttagttttttttttattcacttactatactctatatatatcctaaattatttatcttaaattcataattcagtttactacttaccttctcttttcttctcaagcataaagattagagtttgtaggatgtgagagtctcttaatactaagaagaatgggaaattgataaacctataatttttattgatgagaagg

SEQ ID NO: 211910 - DNA, 889 bp, Cannabis indica
atttaaggcacaaagcccaacagttatcgcatttggcttgctatttggcttggaacatttaagtcgtatttgttatgggaactccacgtgtccttatccgaaaacacgaataatattaaccatttcataaataataaaaaatgataataataaaatatcaattttaaatatatcttcaaactaccttttaattttaacaaccttgcttacaacttagaatttttacccgccgaactatgacctatgtattattgtatcccttgaacttttttaatcattaaaaatagtctttaaactattcatagtgttgtaaaagtatctttttctcaaattttgtcacatgtgataaataaaataatgacatggctgcttagtcaattaccacgttcgtatcatgtcaacgccatttgtaattaatttgaaaaaataatttttttaatttaattttacatatttttcttaaccattaattgatttttagtttaataaattttaaaaatgtataatttatattttcttaaatattaaattatacatgtagcgctaatgtaaaaactggctaaacagtcatgtcattattttctttgctacgtatgacaaaatttgacagaaaagccaatttacaaaactataaatagtttaaggaccatttgtaacaagccacaaaattttgagatacaatatatatgtcatacaaaaattctaaatagcataatatttaaatattgatatatatcaaccatacacatagatttttttttagttactaatcataaactaattaacaattgacctcatatccttaactaactccattaaaaaaaaaaactaaaaaaaattagtacaatctgtagctatatataaatataaagaaaaacaacaaaaggac

SEQ ID NO: 211911 - DNA, 1142 bp, Cannabis indica
cattagcaactgcagaagcgtcaatcaaattcatttcacctttaagagtatgagatttatataatttgctaattaattatgttctatactaattatgtcttctttattaagcagggtgggccctaagcgcgacctacaagaaatccaaatagagaaaaaattattttaaaaaataattattaaaaatagtatttattcttataatgaagactctaaaaaatttatttttcttaagacccaatacaacttaaggtcgtgattaagatacgatacaatattgaactagtcaataaacctaaacataactcgtttagttattaggtgatatatgatatgacatgcttaacctgttgaataattagatattcgcgctgtgttattcaaacatgcatgtgattgacacgattagcttattatatatattttatttatataattttttcttatttgattcatataatttgttaatttattatattctatactaattatgtcgattttttttttattgatgcggactataggctgcgcctagggcccacccagcccaagaacccaaacaaagaaaaaatatcatctattcttatattaagggctttaaaaaatttatttttcgtaaggtcgaatacaacttaaggctgcaattgaacgtattaataaacctaaatataaatcgtttagttaacatgccatatatgaaaccacatgtttaccttgttgaataattagattgctgttttattcaaacatgttattgacacgattagcttattatatatttaattttccttgaaaatattcaatgtagcataaaattaaaattaaatgtttacttaaattaattagataagtcaatcaagctcttttttggtgttacttccaaacctaaataaaatgcataaatataacatatatatttctttgtaaaatttatacaaaatatttaaaattgattttttttaaggattttttctcacagttgttcttctcacagttgttcttctactttactattttttttttttttaaaaaaaaaactaaatgctgttttcatgtagcaacaaagtgaaaacaatatttttttcaatccatattttgtaaaaataaaaatataatgcgtgaaaaagtaaaaaaaaaaaact

SEQ ID NO: 211912 - DNA, 1019 bp, Cannabis indica
gctttatatttcgtgtcaagcgtgtcgacccgttttttgactcgtgtctaattatctcaaccctaacccgacccgtaaaaaatcgtgtcgtgttcgtgtcgacccactgtgacccgttttgatattattaaaactaaaattgtagagaaaattaataaatttaagctccattaaaaaacttatatacatttatgtatatatagtttgttatatatataataaaaattaaaaaaataaaatatttttaatttcatgttaaagaaaattaaatttaaaattttttaacttaacattgaatcactaaatatatatttttatataattatattattattattaattttttattttattatatttaaaaaaaatcgtgtcaaacgtgtcacattcgtgttaagcgggtcgtgtcgtgtttgacccgtttttatttcgtgtcaagtcgtgtcgacccgttttcgacccgcatctaattttcccgaccctaacccgtaaaattcgtgtcgtgttcgtgtgccgtgtcaaaacccgttttgccacacctaggtgattgttagaaaaataaataaataaataaataaataatattactgtaaagtagttcttttcgtgggattaaaatatattgaagatgttgaactacttcaacaaatttagggttattttttcaaattattaaaattttattatttaattttccttgacattttttttttctctactacaattatgttttaatattgatgctaacaaattggctactaacagacattttattatctttattattttaacttttttttgaatgaaaataatttttattatacagaactatccgctaatacaaaagactgaagagcaagaagaatatcactctaaaaaaaaagacattaataacaagtatcacgtgccatacagtgtgggactttatatagtgtttaaacatactaatatagtgttttattattttaactttaaacgtactaatatagtgttttgtattttgaaaaaaataattaata

SEQ ID NO: 211913 - DNA, 618 bp, Cannabis indica
taaattaatcataattattaaagggattaatatgcattaattttgagaattaataaataaaatacattaacctaaaatagtgagtaggagaaggagtacatgtcaatgtaacctacgggctccattattaattatcactgaaggagtatagactggcctcgggatgactttattttgtccctctaaggaaggtatttttttatactattgttcaaggttaatctcttgactaaggaggaagtgatatattttagtgcgacactgaccctaaggcagtgttactaagttaagtcataaaatataaaataataggtcacactcacaaagtgcaattaagcttccatgttattagttgttaacttgaccaaacaatggtactttatattttgaaaaggaaatatgagatatttaagtttcaaaattataaagatgagaactatctcataggctcaatgaaattgacttgataccaatcctatggcgatgatcaattgtcaaagaattttatcgtggaataactcaaacattattttatgtattttaattgtatacgctcatgcatcacgtttatagtcattccaaaatggtatttatttttcaagtatatttatcatgtta

SEQ ID NO: 211914 - DNA, 703 bp, Cannabis indica
ttcccaagacgctcatgcctcgagaggtatgtctgcaagcctctcaacttttcttaatggaaaatttataaaatacatatacatgtagtcataaacatatctatatatttgaccacgtattcagttatgtatttgtgcttgtattcctttctttcaacctcattctttccttgtttcttttcaaacactttgttttcttcacttttggctttttgttttgtttttctcttagttgctttattatgaatattttcactctagtcttgttatagttgaattttcttaattgtaattttttcttaattataaatactttccttttgaaatcattatatatgttctacttgtttgtatcaaatttatgtttcaaaggatatggttggctggtcccttggtggccttatccataataacacttgatactcgagtgtagctggcaccacctatcatcatgttgttctgggttctgctagttactctgttttctttttcactgcagcaacctcatatgatcacttgacccaaaaagtttttcttttccttttttgtgattttcttcattggctttttctatatattcttattatatcatctgctatgctacaaaattactggctggggtataaccggactgaaaactttggattaagtccaccacttctgcaatactcatcattactttcctgcataaagctccaaaact

SEQ ID NO: 211915 - DNA, 637 bp, Cannabis indica
ggggggccagggcctccttagatgtatatatacatccgcccctgctcattgctatttaattggttagtagctagatattgaaataccattttaattggtgaacaaaatacattttttataaaatgatgatgatcaacattcaacactatatataaacaaaatatcatatacttttcaatcataaaatagtgcattgtgaaaaacaataataataaagagaagacttattataaaaatcatatgagaactcaactagctagattgtgtgcaatatataacctatcattatcttatataaaaatggataattccccccaaaaaattgtcttctatctatttaaaaattttgttttctaacctaagtgggaggatttttctaatagaagacattttttttttggaattatccctctttttaaacataattataggttataacttatattatcaatcaatatgatgttctccatcatagagatatgtattaaatataaataaaaatgaaataggatttgtccttttgaatatatatgactctagtggagttttatcctccaaatttttctttattattaaattttttcatgaaaattatatataaaaaaggcggactctacaattacattctactcatttt

SEQ ID NO: 211916 - DNA, 720 bp, Cannabis indica
acatcagacgctgattcctatgttgtctttttcgctatgtctacggtttcctgatctctttcatcgatcacaattttattgtaaaaaaaaattatatatgagaagaaaacatctgttaccatctttttctttttaattgtttttttttactgaactttttcttttcttatttattgtttccatgaatataattatctctttttccggtcatggattgttctctctcttctggtactatgaattctcccatattgtaatttcttattcatttctggatcaatgattattataagtttgatttgaatacatttggcgttaaaagtatttatttttctatcacataggctttattttatttttttttcgtttccttccttcggataaagtgaaaatgatttagttttctcagttagtgaagaaactacctagatcaactagatttgctaataaaaggtcttcctattttcgacataatagaatttttaattatgtttgttttctagagagaattttaattattgtatttttagtagagactgaatatgaaacagattaagatcaataaaccaataaatttatgttttcttttttcttttttgttttcttcttaataagaaataaatctatgatttaattcattcatgaagcaccacatactgtcaagcatgactaaccgtaatattcttttatgtctttttaaaactacgaaggaaacatcat

SEQ ID NO: 211917 - DNA, 640 bp, Cannabis indica
ctcgaaacatgtaaaactgaatgctcagaagtacaagaaacagaatctttattgacagattgtttattacaagtattgtgtgagaaaccacactttgtagtacaagaattgtctatattacaagtacaatctgaggtattgaaggcagatgttgcaagatgacattgcagagtggtttttgagtgactggaggaatcaccaagcaggtaaaggccatccctagctttccctttgagtagcacagctcctgttgtcttgtccttgacaaaacaccagtttttgtgaaattcaacaaagatatcattatcttcagtaagtttggacacactaactaggtttttagtcatggaagggacagttaacacagactgcatatggagaggacaagatgaagaataagatggaatagaaacagatccaacatgggaaatgaataatttcttaccatcaccaatagcaagagtgtcattgccagagaagggctttgtgtcatcaagagtattgggagtaaaggtcacatgtgtggtggctccagagtcgacataccatagattgtcctcaccaaaatcttgaatcatggttgttgaataggcctgagggtcataatcacaatcaagttcagtgagaaaagcacgattgg

SEQ ID NO: 211918 - DNA, 691 bp, Cannabis indica
atatgattattacaacaactattacaacaacaacaatagtggtggtggtgatgatcatgataacaaagctcataataattttcatgagcaagtgccctgcttctccaacaataataataatatgatcaatttgccccaaggtagttgttaccaaacccatgaccaaattttcaagcacaacactacccaaatggaaccaaatttgggcataagaagcagcacaagtagtaacaataatgctcatgaggccacaggaagacttggtcatcatcatgggaatgtgataccaaacatgatggacactagtacgagtagtactagtactattatcaacaacaaccattgtttgaacccttgtagtggtgttgaccagtctggtgataatgaagtgttgagagctgttttggaccagatcaccaagatagaaaccaacccaaatttggaggagtcaccattgttaagttgtggagaaggaagttcagagagttatctctctgaagtggcaatgaccatgcccaacatttggagtcactattgatatacttagtagtactatatatatactattactactgcaagttttcattattctcttctttgtcaaattttgttgactaagattattcatgtggcaactcatgggttcatggtctttttttttcagtgggattaggattagatattatcttgg

SEQ ID NO: 211919 - DNA, 1272 bp, Cannabis indica
  modified_base (1267)..(1267): a, c, t, g, unknown or other
ttcaagtaggggattgttggaactttttacgaaattatataaaaatagaaaagtgaagtgcgtgaatgataggggtcccacatgggataggaacacttcattagaagttcataaatagtgcatgtttaagaattgggtttgggacccaaggggtacccagttttgtgtgcatgggtgaggactcacacactagaccaccacagacgcgcgcgccgctgccgccatccgttcgacagaccgatccgagctgggccgggttgggttggagggcgggtgaggtgtcacttaattttttaaagaaaaattatttaattaaataaatatttattttttatttatttatttattaattaattttaacacgtgatcaaaagtggtaaaacgcgatcagtcaatggttcgctttttactcccacgatccaactcatccacgaacgataacattactgttttcttaccgtttattcttggatagacttctatataagtcgtatcagaacaacggaagagcacatcttttcaaacattaaaaaaaaaacttttctttcttccttacgatttttctcagagcaaactttagggtgtaatagagcgatatagttcggtgcagaacatattgtacgtatacagaggttgttttatcctggggacgccgtggttgctagactgtcgtacacactccgggcaaagccgcgaaacgtcttaaagaaagcaacattgtccgcgagtcagctagatttttctatcagtaattctttccagttttattgtttttaatttcgatctaacagaaattgtgtcttagttatgtaagggtgtgtgagtaatttgggtacaatacttataaaatgatgtatatttgaattaaattttatttgaatgtaaatttggttaatgtataagaaaaaatgtattcttcaatttctccctttatttggtctaaacgttattaatttaagaattattttaaaaatatacaaaaataataaattttttttacatttttataaatttacagttttttatttttttttataaaaatatagagtgctattttgacgttaatcttacgaaaaagaaatataatattctttttctataataatataaaatgttattttttattgtttcacaataatattatttttacattgctataggaaggcaaaacttttcctaaaaaagactaagtgaaaatatatttaaaaaagcagaatccatacaaatacaaataaaaaaaatctgtaaaaaatgttaaaaaaaaaanaaaaa

SEQ ID NO: 211920 - DNA, 605 bp, Cannabis indica
atgtggaactataggtttttgcgtatatgtgaagctaaacatctcaccaatgcatggcgtaaaatccaagtattgattcatgcatgccctcctattgttgtaataatcaccaatattaccataatcataagaccatccctcactggaattgatcaagaataataatgacaatgccaagacaataaatgagttcatcttcatgatgagaaattgtagagatatagaattttaatttggatacaatagttatcaaaatgtaattttatttatagaaatgtatacatatacactggtaactatcagccgtaaatatctcattttctgttgtagtaataaataataatattaataatatatattagtaggtaattacctttaatttatttatacatatatataaaagttagttatttggcaatatgcatatcatttttaaaaatcaaaacagcatatatttgttctcttcgtaactttgtattgagttagttttggttgacacagttcgatattttttaatatatagcttaataaaatttaatcatgtcagtaattaataattattattatcattattaatgagccaaaaaaaacctaatcaatcaaag

SEQ ID NO: 211921 - DNA, 1096 bp, Cannabis indica
tctattttgctccttttaggctgcgatctcattttcatgatcagtagccttttgcctcaagaccagtaactctatatatctaccctcgtcgtaagcgtcatactcgtcaaagttctcttcgtattcctcattgttggcctcactcactcctcagagcccacgtttaccctagaagctacttcttcgtcctttaggttttgagcatcctgaggaggacggggctaacgtgtattgttgtgagtttccaccattgttggtctaactttttagattgttctctgtttaaagacgcttccttcagctctcaatgaaagcaccaaaatgttaaccgaggttagcagaaaccaattaaataaaatatgagaagagctgtagaaagtttaatgcaggagattttacgtggttagggcattaatgagccttagtccactagtcttttgtattaatgagagtatttattacagagaatgttcttggtggatttctctcctattttctctcttcgattccttcaataaaatcgatcgatcccttttcaatctgtttgtggggtatttatagtatttttcttggcagatccctaggaatggatcacttgtctttctgtgttagccttataggggcacatattcctaggagatacaaaataggtaatacatgacctacaccgtaggtatcttaggagttaggtggatataatcttttatcccctcttgactgatgtgattcttcataaagtatcagtcactagactcattgattgttgtgtaatcaccgtaaaagaggggtttacgccatctgtcacgtcttttatagaagttccaatacgtctccccccatgcggcattaaatgtgaaatgattgttcaagtaatctctttacctcccggacatgccttctcatggccttagcctcccggagggcagagatgtgtcttatgctctcctccgggaagcaccttccctgaggtattccttttttgtttaaaacttagttgattttcgtgagtgatggttctttcatacccacgtgtcactcttatccgcgtccacgtattttgggaaaaaagaaaggcaacaaattttttaaaaaaaaa

SEQ ID NO: 211922 - DNA, 685 bp, Cannabis indica
tgattctgaaatgaaaatttgaaaactatgactgaaaatatgtttctaaaaatgtgattggttcaatatttgtaaactttttttaaattttaaaatagtgaatctgtgattggtacaaaagtatcaaaatatatgagtagtttaactgaatttgaaaacaaatttaattttaaataaataatgtatgatatcaaactttcatttatatatatataaataaattatataattttaaaatttaactacattaaaattaataaaaatagtatcacaacattaattttttaaagttaaagttacattttttttttttaaaaaaaattaactatgctctatttttattgttataagtaagttcatttgtccagcaatatcatctctaatattttctatctgagccatataagtttgattaaaattaatctctggcgtctcataaatttctactgttagattaaaaatcctatgtgggcacatatgcataatgtatatgctactataaaatgttatacaaaattaagtgaccaattatgttatgggtatcaaaaggatattaaattgtcatggaaataatgtgtagataccataagttaatttataatttgttgaggggccaaattataaatacccaaaactcattatataatgagcctagtggtccccaagaaacactagggtttttgta

SEQ ID NO: 211923 - DNA, 672 bp, Cannabis indica
gggtgtatttatcattttcatattataaaatcacaataacacgcttaatctagtatggtgttacaatttggtatcagaactgccaagttgtcttctgaagatcgtcacaatatagacaattatcatcagagataagctcgactcacagttgaataaacctttattactttagtaacttgttttattagtatgttataagaaaagcctaataggaaccaagttagtagcttgatagctgaataggcacatgttctatttttttaaagtgagcagtaattagtaatctactcttgatcgcgatctgaccaggctagttcttggttttgtaggatgttctattagaatggatgttaggcgaaacacgagaagccagggtaattcggtcgaatccagtggggttagggagtttagggtgcccaccgcaagctgcccaggattggaaaaacaggtttgcagtaatgcaagccataattaatgaacaagatgaagagattagacgtctgaggaaacatggtgctcctgtaatgcctgctcctgtggtgcaggtggcccttgtccctattgtgcagccagggccagttgctgttgtgaatcaaatagaaccactgtatgaaaggtttcgtaagcaggcacatccagtcattctagaaggtccagatgttatgaaagctg

SEQ ID NO: 211924 - DNA, 536 bp, Cannabis indica
tttttttttattttattttctcctctttttatgtattaactatgaaacataaaaatattcatagttttctttagtaataaaaaataaaattttctctacatttttcttctaaaaaaaagtttaaaatatttttttaatagtaattatttgagtttaaaaattatactatcattatctactttttgaagaaatcgttttaacatataagaagtacattttttttttttttggattcttacaaaaatattagattttgaatcaaagtttacaattttactgccatgcggaatttttacaaaaatactatttttttataaaacaaccataaaacaacaaaatgtaacaattaaaaacaactcttgaacgactaaaaaaatatttatctgcaaatacaaattatacttgagtatttttattgtaaattaattactttaaatataaacatcaataatatcactttacctacttcttgtataaatataaattttaaatgacttggttaattccgtcacacatgttaatatatacaagtatac

SEQ ID NO: 211925 - DNA, 610 bp, Cannabis indica
tcaaagtactttagtttatttatgagggtgtggttaatgtataggtccatgatgatgggcttagaaggctaccttagtattatgattcaagattacattgtaataaagtagatcgttttgctttgaagaattatccaagatgtgtttggtatggccaggaaacctttattttttgtattttctgcaattaaagtagatttacatgacctatcacaatgtttatttatagtaataaagtttgtcttttgttaggaaagccatggaaggccaagtaataaattgttttaggggacctgagatttttcatattgagattaattttttggatgtaccaacaagatctttttcttttttttttaagaaaaaattagactcttcaaaatcttaagagcaaagtttttagaatattaaatagttaataattgttattgttgtttgttgtaaaattttgttaagagtctattataggtagttagtgttagttagagttttactctaaattgtattgtatccaaatcagtataaataaagctctactaaagcttttaaagattgagcattcatttccaatgtatctaccttcattctctctttcatttctttttcttgc

SEQ ID NO: 211926 - DNA, 643 bp, Cannabis indica
caagattgaattatatttcgcaaaaattatattccgcaagagtacgagtagtacctcgagaaaatcaagaacataatacctcaaaaattatatgccttggacatgctattgacgaggatgggaaagtcgagcttgttgcaagattgaatatatcttcagatttaataaagcacaaaagatacaatttttttttttgtaaaaaaaacttataagattgaacaaaaggtatccaaaacctcattacaatattaaaggaaatttgtcttgcaagccaaaccatttttcattaaaaccgcaaatagaattatacaattcgaggagaagatagttttttttttttttttgagaaattttccatattattataactgaaagtcatttacaataatagagaaaataggataaggtatttctcctatccaagatacatcttcatccaactctagagcgtactttgctaagccatgggcagcctgattagcttgcctacgagcatgagtaacagtaactccagggaaaaaggataaaagacaacgaacatcatctataagatcagtaaaacaagataaatccctatgagaagaatttaaagcagaggagactctttgggcatcagtttccacacgagcaatggacagttgat

SEQ ID NO: 211927 - DNA, 657 bp, Cannabis indica
agagctactgagttgttttgattacaatttggagaataagatgcatggggttccatctcaaaaccaattggcaatgggaagagtacattagcaatgtgggactaactcttaatagaatgcaatgcatttatttggtttagtggattttttcttagcaaaaaaaatttgaacgttcttagagctactgagttgttttgattgttttgatattggtcatattagcgagttatctttagaagtgtgtaaatgaaataggacaccaagaagtgaatttggactccatgcatgtatatgatgtaaaggaaatttcattaagttttcaaggaagctaagtaatagatgttagaacagtcccacatggaaaacatatattctaaacacaatacccttattaaagaaagggtaactccacttaacactaattggttttaagcggattgcttgcaatgctaatatatagctctatacaaatttgtggattggattaagagtattcaagagtacgctcttgatggtcttaaatgtcctaatttctgtgagttttatactttttgattttatctgatgaaatcggatttactggtgtgttcgataaattcaattatgagcacttcaaaggtgaacctgttttgtatccaatgcaggttgtgcagttat

SEQ ID NO: 211928 - DNA, 785 bp, Cannabis indica
gtttgtttgtgtcgttgttatctcatttggttttggtagtttttagggttaatctgtatttaggtccatactagggttcaggaaatatgtaggttgtttcaaaatctccaactcattacctttgggtttgataaaattctccccaggaattggaactgctttttgcctgcagcaatgtcccgctctggttcaagaatttatcgtccaaaagttttagaatttgagtttcctacaaaatcaatcccgtataaacctaatccttcaaaacccactaccaaattagagttgaacgatcccagggttagggaacacgtagtgagaacccaccaggaagatattgctactcgttacaggcgtttcttacaagaaatctttgaaggcaaacgtcgattcttgtgagaaagagtgcttggctagaacctccgagcgtgtcctttattcctgtggcaaagcctttatttttacccaacatcacgattgcttttgaaccaagtgacttggattttaaaataatgcctcctaagccacgtacatcaaagactccccaggaccccagagtcaccttttaagctgagttgatagaatcgaaggtgcgatctatctcaggctacacaggtgatatactgaagacttgtggaattgaacttgggcaatcatgccaagttagatcagtacgagagggtgagtgcagttgattccctcctgcgtgttttcaagcagtactccagggactagtggtgagactagtaccagtggcttgagtggtatgggcgcctggagccttg

SEQ ID NO: 211929 - DNA, 813 bp, Cannabis indica
agagaagacatacatacacaaactacaacatacataagaacaccaaataaagaatagagacggacttgaacagaatttaaaaaaaggaaaggaaagtagatagaatagatggatagatagatagatatacctgtctattcgttagtttctccacaatcttactagggagaaaaaaaaacacaaagaagaaaatagggtacaagcttaaaaaaaaaagaaaaaaactaactgtaagatctgatcaggatgaaaagaggaaaaaaaaaaaaaagagagataatggaaaactacgagtgtggaaattctcgcagttccaaatatctcaaagcttcaaagaaatagggagctaaaacccaaatatataacataacgtactctctctctctttcacacacacactagctagtagctctctcactccttccttctccttagcggtccccaccccaccttttttttttcttttttctcaattaagaaactcagttcacatctccccgcatcctctctccttctctctacctttctttttccttttccttttttttttttttttttgtttttgtgactttggacgtgaattctatctgtacattaccgcaccaccaccaccaccaccatgaggcctggatgaaatttgttccaccgaacgacaatttccatgaattattttatctatctattttttaataatttccctaaaatggttaggacaagaagtatagttatttggattggatggtaataatttagatgtataatccaatcctaattacataactttaaaaataagcccttagtggtgagacattt

SEQ ID NO: 211930 - DNA, 571 bp, Cannabis indica
ccaaatagatctttcttacaaagcttagtactgttttagttttttttttttgaaagaaagtattgtttcagttaaaagtattgtaagtaataagttgtggctactatgaaaggcaccgggggggagggggggaattaaaaaaaaaaaaaacgaaacctatcaaaaaatgtatcttttaacaaattatattataataatatattaaaacattgttaagaaaaaagaaagaatttaaattataaaagtagatttgattgtttttgtttgaaataaacacaaaatgtggtattattgtgaattgagattagaatagagttggaaggaaggggtggtggagatagcataaaaaaggggtggccacatggaaaaacttctatcttatatttctcataccaaacacaacacaaggacgatatagcatttaatatttatgtatgtgtactctaaaatatggagttgatttttcagctctaaaagatttaaggtctcctcattcaaacaaagttaaggtcaagtttgtcactattagggatttacaatttctttgcatttttgaaatatatatttatat

SEQ ID NO: 211931 - DNA, 506 bp, Cannabis indica
gataaagatacggtcattaccgtctattgtgtatgagtaattactcgcttgaaattgcagatagattacttacttatcgtctgctttatcgggcgatgatagtgacatatgcagctcgtagatgacgagtggtaaggatactttatgacacattaataacagttcgtcttattaaacgaatagttgatctgaatattcgtttatgtgatgtataagtgttaattgtacatagtggaattatatgttatgcattgctttactatcttgtattatttactgttgtgatacttgttttcttgctggatctttgtgactcacgggtgctttgtggtgcaggtaaaaggaagggtaaagtggaccaaccatgagtcagaagtctcctggcgatgtacatatcaaccgcggtgtctcggcttccagtggacatgatccacccttttgattgtattttaaaaatgtaatcctattttgtaatactaattttagaacagagtgtaaaagtttat

SEQ ID NO: 211932 - DNA, 519 bp, Cannabis indica
atctaaactcattgtacatatttaaataatatctttctattattattttatttaccataaaaaatatatttttattattattatttaaaaaaattagaaaaagtgttatcatatgccaaaaagtattatggtaattaaattaaaattataattaagaagcctttttaagtatattattatgttttcttttataaataatacttacaattaaatattttttaataaaaataattttagttattgaataacgtccacacaaaaaaaaaattatttagttatattcttagctaatttttattgcggttctgtatacatatattgtacatatattgtacgtaatattaatttatctagtatataataaaagaataattaaaaggagaattattctatatactattttttttaaattttttttttaaattttaagggtttgggtttctaaagtggtggcagctctagttgcaatagaggtttctatacgatttgttgcagcttgcaataggggtttctatgtag

SEQ ID NO: 211933 - DNA, 499 bp, Cannabis indica
agtgtccacacacagcaagtggtacctcaatcataaattggaagactgtgaacgatcacattcaaagagaaggacattcaggctcagatcttgataatactttgtgacagaaaggatacaatggttagagatctgagtggaaggagacatattattctactgcaaccaatgtaaggttttcttaaatttatatgtgtttaattatcgttttagaaagttcatatttaggatgttaaacaacatacttgtgagtagatctaagatcctggtaaaataatttctaacatggctaaaccctaaatatcacccaggagatacgaaccctaattgctaaaccaaacaaagcactgtgatgtaagacaagccgtaactcaaataaaaataaaaggagaatgagacacttactgtgcgaagtcgaaaagtcgaacgctgaagatttttgcaaatgaagacgtggtggtcggcaggataaattttttgaacaccgggatttgtaaag

SEQ ID NO: 211934 - DNA, 469 bp, Cannabis indica
atttatttgccaaaaaaacctccaggttttggtggcaaggtaagttttctctgtgtttgtgtttgtgcttgtgctttttgttttattggttattttttgtttgtatggtttttagttggtttttctataattttttaatgttgttattttttgtttgtttgtttgtttttagtttgctgaggtcgagtctgctttagtttgtattcaagaagactaaaagaagataatgtttagtattcaaagcttgagagatgagtttaggattaagtttgatgaagttactaatcttttaaagagtaagggtgggtcgtctgtgcccaatgatgtggatgatatagttgaggattcttgttctgagaatgtggatgtcgatggcagtgatggtaacttaccggatctattttttcagaggtattttgcttcattttgtttttgttcagctttataactggttattttgcttcatttt

SEQ ID NO: 211935 - DNA, 716 bp, Cannabis indica
aatacaagtatataaacatcaaagcaaatacataagagattacacagatcagagaagagatagagtgagagagaagagataaaccctagttgaggcttctactccaagatctagagatgagaaaccagttctcatggtgaggagataggaggatgaagtacacgcacaaggaaacaaaaaactgagttagatcgagaacaaatcagaaagaaagaaaagcagaaatgtacaaaagagaaaagcgagtcttacctgatcaatttgtgacaggaagctccaaaacttgtaaatcgactttgttgatagtggatatcaagcttcgatctctgagatgagcttgacagagatgtagcccagattttgggtgaactctgaaacaaatttcttggtgttttctctcccttactttgtttttcattttgctaaaactaattctgtgtgtgtgtgtgtgggtgtgattctaggtttttcaggcttagagaagagaacttgctctgctagggtgtgttttgggaggctaagtgttgtgtttgagtgctaggatttttagactcttctatcagagtctttaaactatgggatccaaacgcacaggttttggtgtcgtgttggttatacagtgccgttttggtctaagggttaaattagacaagtaaaggtcgattttgacctttgatactgatattatatagctttgttggtgtaggttaaattgg

SEQ ID NO: 211936 - DNA, 509 bp, Cannabis indica
gtaaaatatttccaacaagtgggatgctggacgttacagctggttgctagttagcaacttggtaggcttttcgtatcagtacggtagcctatcttgttcggtcgttgatgactgcctgttgagccttcaacgtttccatttccctatccctccattcaacgaattgacgcctctactcttcgaatgccaggttcaccacaacacggagctcttccttatcatgatgcaaggtattagtaagaccttgcataagtccaagagcatgcggaggttctggatctcagtatcatctcctatggtcgtctaaacattggttgcaggtgggattctagtactaggagtacccagatcggctgtcgagctggtgtttcaagtctcttgcacactgagtgtgatcccagctagaggagatgtcacacctttacccatagtaggtggttgcgtgtttggttgctcaggattggtaactggtgggacccttgtatttccaggagtctgcagtgtaggat

SEQ ID NO: 211937 - DNA, 725 bp, Cannabis indica
tcatatggttctcctcaagaaatttgtaattttgcataaatgttctcgtatatatagcatacatacatacactcccccttcatcacctagcccgtattggaaatatccaaataaagtttggcatttctcctcacagtcttcattatgcttgtgaaggaattttatttgagcatccctttggctctttcgaaatgcatgttgataaattttataaggtcgtcaggggcttctcgaacacggttaagtgcaaacttcaaacttctcggtatgtggtggtgaataatcatggcccatggttggatgttctgtattacatgaatctacggacttggatcagtcgtggatggagatgggtggaggctttgagggaaaaagagattgtagctagtggaagatggatttaatttaaacctctcactgggtatataggtataattttttttgagataattgaatgcacaaacacattccatgatcttacctctaagtttaaaaatgcaacagagctaagaaaaaatacaactcaacaataaaataagtttacatatctactcaaatatatacatattttcaaagtcaaattaaaaggtttaattttatttttttcgacacaaaatagtgtaacgttaaattgaaatacggctacaataagttttaaaactggaatgaatagtacttttatttttgtcctacttgaggtgttaaaaaccccaatgccaagtgag

SEQ ID NO: 211938 - DNA, 739 bp, Cannabis indica
atcttataatcctcaaccaacacgccgaaataagaggacatgcaactctcctcccacgtagataatcgatactgaagtgcttgcactacgaaaagctagttcatctcgacaactattcttattgatactgaatccagctcaacccttctttaagcccaatgactttcgcaactttcaggctaacaaccccatgcctacatcctatctgagcctcaatcaattggaaaataatgcaacatcaacatttactttgaaggtgtcttcaattagtagcatccacttctcaggaccatccctagcacaaacgagatcatggagataacatgttgatcttgagcacttacccattattcaagagtaattattgctatcatgataatttacttttgcttccaaatcaatgaattacgagctccctacctatattgcccaacaaagcatagccactttccaccaccttatatctttatcaaattgttggaaaatatgctccaaccaaccagtaaaagatatcccacattgtttgagcaaaaatacattgccaataaaaatgtaatatggtctcattaatatgtactaaaactttgaataacttttatttttaaattttttatttaaagtaacaaattaaataaaattaaacttaactaaaattgtgaaaaattaaattgataattgacactgaaattataattttactatattaagtatttatactctatatcaattacatggtggg

SEQ ID NO: 211939 - DNA, 886 bp, Cannabis indica
actgtttttacttttttaattaagaattatattgaaaacaaaaaaataattactttcaaaatttttttaaacagttttttttttcttaataattattttgaactccgactatgacccaaacttggactttgacaccatggacctagaccttggccccgaacaccgaccccaattgatcagagtcgatccccggcctctgaatctgaccttgaccctaacccggaccctgacgctggacctaaaccccagaacctggcccatgatccaaacaccggacccgaacctcgacctcgacccgaacttcgacctcgacccgaactcggacctggacccgaaccccaaacttgaactcagaccttgacccgaactcggacctagacactggacccagaccctgaacatgaccttggatctagacactgtgcccaaaccccaaccccgacccatatctagacccaaacccggaccctaacctcgaactcgagcctgaactcagctcgcactccagacccgaacctcgaactcgaacctcaaccctgacccagacccaaacctcgatcccaacccgaactcggacctggaccccgatctcaacccctacctcggacctggacctcggaccccctacctcggacctggaccttagaccccagcccccaaaacactggacccgaaccccgaccccagaccctggacctaaacccaagagtcaacctcaaatacaacccgaatttggccctagattgagaccctagactcgacccgagccccaaacccagaacgaaccccagatcagacttggactcgaacttaacctcgaaccctgagcttggacttggaacctaatctggggttcaagattggggtctgggtctaggtctgagtt

SEQ ID NO: 211940 - DNA, 552 bp, Cannabis indica
gatagatttcaaaattaagagagcactatttagcacttggaaaatcatcatgttagtaaaataaaatgaaatttgatagaatttcttgaatccaataacctcagtagtttggaagaattcttaacggcaaatttaaagggaaaaagtcttatgttatgtgaaaataaaatgagtaatttgtgtcataaatacttaagtttaacaccccagttacaaataaatatttaagtttaatttttggcagtaattaataatacttaagttataattttggaacttctgtaagtactttattgttaagtattaagtaaattgacacgtgaccattcttgattggtccaagttatttaacttttatttttaatttaaaaataaatttgaatctaccaataagaaaatgagacgtgaataataacttgacatttaacaggtaggtacttatagaagttttaaaaatataacttaagtattattaatataaacaattaaatttaaatatttatttataatttaaatttaattatttatcacacacaaaattaatagcatttg

SEQ ID NO: 211941 - DNA, 1709 bp, Cannabis indica
aataaaaatatatggctcactatctctaataacaagtggcttattttaggtagcttactatttaaatgagattttatctcaaaactaattgacaatgaaaggagtaactcattcattttatatattctattaatgtgaaaaaaaattaagagattcaaaatcttctatcttctacaaagcaataatacaggtacaaactttaaccaaacaaagctatgtatatagacatatggcatatgaaaaaggcaatccagattttgtgcccataataaatcaaaatagaacataatcaacagtgcattataaaatctagcttaaaaaaacattttaattaataggtagtcatgcttacacatgctactagcatcaaatatagttaagttatttattattaatatgaaggctatatactttctccatttttagtatagtgagttttttttttcttcttcctctgttttttaggagtactgctgagattttataccttttacctatgtacaatgtctatatgtctaattcaatagtagtagttgtgattgtacaataaaaaaaggtctctcctgtctagccaaaatatactttcacatatctttatttatttatatttattttttcttaaaggcatatgccagaccttttattactcatgtatattcacatttgaaatcaacgcaaaagcctagagaaacggagaaagggaagaaaaaaatattaagaaaattatctactaatttcaacggttttgcaatccttcttcttggacttttaaccaaagtacagttgtaaaactaatactataatataatctagcatttttttactgcatacaattagtcatggccagtattgattacattcatgcatgatgatgatgatcatgatcatcaggccaaatttgccaatggaagttaaataaaagagaaattgacaggaaagaaaactcagctcaattgtagctgatcacccttgatttcattctaattatgtatatatttatagccacaaatgagctggtgctctattacaattagggatgcacacgggggagtgctcttccggttctcatccccattaaggattttaatccccattcttacttattcttcatcggagatgggtagaaaatcccctaatggggcaggacggggacgggacgggaatctcttaataaaaatattaagtttataataaaaatttaaatatataaaaatattaaactacgtaaaaattaaaatatcaaaaattaattattatttattaaattaattattatctaaaatacagtttaaaatttataaaaaagatactaatatactaaaaaaatgcaaacataaattataaaatataaaatattattagatatataaaataaaatactaaacagcatagactctcgtttaacattcagagacaaaaaataatctccgtttccatcccgttctccacttagacaggaaattctcaccccattaaaaggcgggtctcgcggagccatccgaatgagagaaaaatgcatctctaattaccatattagccatttaggcaattaataattaacacgttgcaggtttacaacagtaaaaaaacaaaaaaaatatgatgttcagtacagtagtggtcacaaaggtaagaagaggtggtaatgacattatgtctttacaatagaaacacgagaatatataatattgttaaactgttttttaatt

SEQ ID NO: 211942 - DNA, 1430 bp, Cannabis indica
agagagaacagagagaaattgaccaattgaattgaatgaatcaagttgtgtacaaacaccaatgctttgctacttatactaagcaacaaggaaacaaaacaatgcagcaaaaataatagaatgtacagctggacaaccaactaacctaactgattcccaactaactcaaaactaacataactgtcacaacagttcttaaaatatatagccatacaagggttgtattgaaaagatgaggccattgaggccattacgcctataacaaattacataagatctcattggaattccagattagaacatattagaaattagatctaaaatatatatgaattccagattattaaaattactttatgaatcaataagatagaagacatacatgatcccatggtattggatacgagatgagattgtgggtatatggtcttccatacactaatcttctctatggattctcactcaattaatgggaatggaagaaaagagtggttgggattagtcttgaggaccaatcttatgtttatgtagcaaactaattagaactccataaatcttaattaagtttactattggttattacacattacaaagctgatactaaataagatgttgggctcatttaattagatcacttattttgctcaatataaaatattagctcacctcctgcgacgtctggaggaggcaaatcgacaaaacgctgagttggaatgggaggtagccgcaacagggacgacacaggaaaacaacacacaaaaccaacctgatcttgagtgagaagggcccgacctcggggctcacgaactaggacgcaggagacggcttaggaaaacctccagaacactcaggaggagcaacctggggaaactggggatgttcctaaggatgaacaaccgaatgatgagccacctcgtcaagaagtgccacggagaccccagggatacacaaccttggggaatggaaaccgtgatttaccggaatcttctcacagaaatgagagcaaaaggcaatcctggactagggaacaggaaatccttcgtggtaaagagagaactcctgggactcaacctaggacaagcgggttgccaccaagacaacgtcaacttctttctcaaactgatagggaggaggcacatataaaccccaccagagggcatgtatcaacccgttcgtaaaggagaatgtcggtacgtgacgaagcaagttctagcttgggacgtactagatctcgagatcacagttgatctgtgcgaggaggagatatacctcgatgcagtaatgatcaagaaagtatgagttacacaaggagtagccaatctgagagttactcaggtacaagatctacaagtaatgatgatcgaggatggccagatcttcgtgatcagttgaatcggaagaaacccaatttacgtaaacaactcaattcc

SEQ ID NO: 211943 - DNA, 731 bp, Cannabis indica
taatacttataaacaccacttatttgtaataggattgttctatatttatatgggatgttatgggaaagtaagtttctttagttttttttttttatcaaaaaaaaaaaagttactttaatttcatggaaacacagtgaaagaagatgtcttttggggacccttaattgatttcattgtctttgtccttatccatcaacgccaccacgattgtctttttgttttcttttttgcttggaaaatattataaataagtgttctattttctaaccaatcatatcattaccttctgcacataataatgagtagccctgttttgattggtcttcgatttttcttacaattaaatttaaattgcagcaaaatttcttaaattattacaattgcaactaattcttaaaattaatattttaaccctaaaatcttttaaatttatattttgttagcaattcattatttttatttactttttattgttaattgtcatattagaatttttaagtattgtctacatgaacacattgcatatgtgtcacacttttattcatccaacaatttttttttcttttatctcgatttctttgtcacctaaactctatcaagaaaaaaaacttctctctctcatcggaacaccactgtaccattgaccacccaataaagcatcgtccgtctccttctctattcgacagagctagacgccttattctccactaagtgtgtgagaaagagaaaga

SEQ ID NO: 211944 - DNA, 519 bp, Cannabis indica
ttgaaacctaattatattccaatactaattagttacttttaactaaaactataccttatatgtgctaaaatatcatgagcgcactggaactctttaaaataagtttaaccctatcatgagttgttgtagcccaactacttacttactattgacctttaacaatagaataaccatacaatcttatactatattaatcaaccaagttttccacttccaattgaatgaaatttaattatttccaagatattggtttttgtctaatttcgactcaggagagtgctttcaagaatttctgttagcggtcctctaggttaagaaaacttccaatatatttgtcaaaattcatagctctcgacgattttatcttttaacagatttattatcattctattgtcaagccacctcttttgctcaaaatcaacatattttgtgattttttttcttaatcattttttaagacgacacttgaacatacttattgttactcaaattataactacgcaagtgtacgtatttatt

SEQ ID NO: 211945 - DNA, 588 bp, Cannabis indica
tggttggcatgagaaaattaacccagctgataaaaataaaaatcaatcttctcatgatagtgtaagagcattaacaataaagaatatatacctaccattatcagtgagaagaaactcttcccaacttaaactgctctaagaactcttcaatataatgatatcattactattaatggcatccaaaatgttctagaagaagtatataaaatatatttatttaatttttaattaattaattagtttctttcttagtgtttataattattttttgtttcacataatattatatacttaatttcaataaccatatcatgctttattagcaaactactttttggatcaatgcatcaatcttcgtcaaaaatttaagataacccttctggtatatggcttgcacaaaataccgtcaaaaagcacatcttgacaataaaatttcaagttttaaatgctatgaatgcaacgaatcatctattgagacaattctaagatttatattaactcaatttagtacaaatcttattatcataatttgctacttaaataaattgatttgtatttgaatatattagatgccactttcaagctcaa

SEQ ID NO: 211946 - DNA, 565 bp, Cannabis indica
aaagttgttggtgcattcttgtgttacaaatttcgaggataagtttctgaacttggatgggacatcttaacaagagaataacaatccaatttcaagatgaaactcatcgaaaactaggaccgtctggaacatggcaagcctaggccaccattttatactcagaacccaataaacggaaaggccaaaggttgggaaatctaacgactgagagtgagataggagatgaaaagacagttcatattgacccttgaaaccgtacaactgccaaaatcaaaggacgtgtttttccaaaaaaaaaaggattatgatgaaaatgccctctgtaattattaaaaagcactttttattcaaaagaacattttaaggggcaattgttacacccgaatttcagctaccatctcaatagaggatacatgtcaagttaaggggaatatggatcaatgaaatcacttttaatggaataactcattaattgcgtatataacagagtatacttgcaattcactgactataaggtcttatgcgaggtaaagttatacaagctgttgccttgtgtattaacgag

SEQ ID NO: 211947 - DNA, 712 bp, Cannabis indica
tgttagtagtgcaattacgtacacaatagttgagtacttaagctacgaggtagaatgaacttactgtaatagtttctacagtagatgaaacagaatatagatgttcttaaggttaattgtgatgctgcaatttttttcatctaatttttttagtcaaacgatctggaaattaagcagttgattatttgactcatttttttaattctaacctggttgtgtctctaacggcagagatgtcccgattgtattgcaggctattattttagttgattaccattaataaaattctatgatttattaaaatataaatatatatatagattttaataatttattttgtgttttttgatacggtaaattatttgaacttttttaagaatttgtgagagattttaaataactataacgtacaatattatatattaaaaaaattgattttaatctatctatatgttgaaaatacgaaaaataacttattttgaagatattgtaaattattctaaattatatgaaaatttatgaaaaatcttacacaactaccaacatacaccatcatataaaataattcaatgtattattataaatatatcctatcggtttggccagaacgtatgctcatattggttggtaccttcaagcttcatgtagcggaggcaatgaccatgtttcatggcctatctttttgccttcggttaggtttcaggaatgttac

SEQ ID NO: 211948 - DNA, 556 bp, Cannabis indica
ttctttgagagaggctggttctcaagaagttaaaaaagccttgggtttgtaaatgccaatcttggaccttgttgtcatcttgtgaatattgtgtttaccaggagcatttaggcaaccagcaacaaaaggcaaagctgctggtgaagaacaagcaggaggagatcgggtatctgctatgacagtaggaagagtagtggttgttagtgaaggaatggtaggcacaccagtgtgaacagcagcctcctgagtgtgggaaatgccagggttgtgtgatgcagaaataggaggaacttggcctcgggacagatcagtatcagtactgacaccagaaggatcaacacatgctacagaatttgtacctgtatcaacaaataaaaactgttctggaggcagattgttagttgcagagttaggcacaaaggtattgtcaattaaaacattttggtcactgttagcatgcaatggaacatgatcagtcacagtattagaaccagtagggacagcaggtggttcaccttgataaagtaaatcaatcatggtgtaaggttctttgtag

SEQ ID NO: 211949 - DNA, 624 bp, Cannabis indica
ttgagcattatctctgacaactttttgaatgctctaagatctcaggaaaatccggccttgaacttgctcattacagaaattcagtcctacatagaagacaacaagtttcttgaagagccagaaggaagaagcttggagacgtcatcgctatcgagtgtcagtgtgcctgagtcagataaccgaaactcatatcaacacactgatccccgaaactcatactcttatcaacgcaatgatccccgaacctcatactcatatcaacgcaatgatccccgaaactcatactcatatcaacgcaatgatcattattaatgattgattattcctctgtgtatatatacgtatgcaaattacatactatttaggcagtgtttaccggtaatattgtattatcttgtacccaattaattttattattataaaacactgccaataacttgatttattccatcttttataatacagcctacatcaatttttagactgacataatatatgaaatcctttattataattagtctaaattcttgtaatagagagtgataatcaagacttatttacaaaatgtgtttcctttaaaaaggaaggccatgattaaaagatgactcagcctcaatcaggtat

SEQ ID NO: 211950 - DNA, 914 bp, Cannabis indica
ataattggtactcctttaatttatatatacaaatatctctttaattcatttctatttgttgttaataatcatataaaattgtcactattgctttccaaccatataaaaattacaataaataatatcaacataaatagtaaatactacttttatatcattataaaaaatattcattttgtggtgataaatttaggctaatatgtcacactattttattcataggtaaaatttagttggaggtaataaaattaaataaaataaaaataaaacaatcttcattctatttctttgtttagttacatgttaaaatattagaatattattataatagaatgtacctttttattattttaatggaatgacttctatttttaaaattaaaaaaaaaagactattctaatacagaatttatctaatttttatgctatttttaaattttattccattttattcttaattctattcttattcttatgttttcattcctcaaatctaataacactatcctagtatgctacattttgagattttatattatacatatattaattcaaaccttaatgctttatttggtagggtagattaaaggagagatgaattaggggtttgtaaatttgggtaatcaatttacactatctctaatagaagatctaaaatttgtgtcaaatttagcataaaaaataaatttgtgctatatttggcccactatttacaattatactctaatgtatgtacatgatgtaaaacaggaaataaatattaataatattgatgatcatttaatattttattgaaaaaaatttcaaaaactattattttttattaattttgtatttaaataatggtaatatggtaaataacaatgtaaattttagtaaaaaatcaataaatacataatattaattgtatattgt

SEQ ID NO: 211951 - DNA, 868 bp, Cannabis indica
ctgaaggatacgttatagatgagactttgacattttgttccatgtacttcaaaggtgtgcatacaaaattcaactgtcctgagcgcaatgaagatgctcctagtctatctcgatatttaacaatttttaaatctcaatgtcgtccacttggtaagcaaacaataacaactctcaatgagaagactcacaaaagagctgagtgatacatattacagaattgtatcaagatcgacccttcatcaaaatgtaagttaatgtaagaaaattattcacaacttctaaatttattcaacagtctaagaaaaactctctcaatcagtaaaatatgaaatactcttcaacacaagggtcgatgactacagctgcgactcttcatcaaaatgtaagttaatatattaaatttatattttatgaagtttactttaaatataattttctaacaagttatatttatcagcaaggaaaaagttacattgagacttgaaaaattgtcatacaaagaaaggcacacacacctttatcaatgaggctgccaaaaatacatatataagactttataaaataattatttttaaatatattcaaataatttggttgatttctaacttattgttattattggaagagatggtgacaacccaaaatagtgttcctgaatcttcacaagcttctgagctttagatacttcaacaaactcttggagagaggcatggccatcagcgaggagtgggtcacaaattaaagggcagtcatcaagacgatgctcttacgggaataatgttgagatgtagaacaaagtacagatgttagactcaacagttgtcacatgaacgtcgggaaccaatggatattgagatgaatgatgcag

SEQ ID NO: 211952 - DNA, 617 bp, Cannabis indica
attttttagcttattaattcctcaagagcccactatagattcagaattacactcttgattacatagaatgctctatataccaaatatagatacgctatgaattattcattgtttgaatctaaataatcaataatcctttatagatggtctacatcgagtggggataaatttaccgttttactcttcgatgtattttatctttaacatacttagctaattataaatgatatttcaataaactatattaattatcgaaataagagctcttccatttatatcgtttagccaagctctaaggaaaatcatcgtttcacttctaaatagttatagaagttatagattctatatctataattaacggctctaactcaattatatcaaatacccaacatctaagtatgggatagtcctacaggtaaggtagtaacaaacaagtctaaaaacccgtatagtacaattaagctaaaggttaactatatcaaaattaagattaattgatctaagatcaactaagtgacattgacttagaaaaggtataatggtaagtttatgatgtatttttactgtcaatatcggtctattatgatgtataaatgatacatccgatacaagtttac

SEQ ID NO: 211953 - DNA, 1356 bp, Cannabis indica
  modified_base (1327)..(1327): a, c, t, g, unknown or other
aaatcgtccaaaccgaataacccgcccaaaccgaaccgaaaaaatcgataaaaattacaaaccgaaataacccaaaaaaattacaacccgcccaatctgttaattggacgggttgaaaataggtccaactcgcgcaattaaaccaaataacccgaccaacctaactttagcttttttttttttttacttttttagtttttattatatataacataaatgattaaatatataataatataaaattagtatacttaattgttggtttcaaagtcatatatattgtgttgtgctttggtggaatttaatatttttaatttatttttttaatttttatttgactttgaaaccaaaaaaaaaaaaataggccggtttgggcaggttaacccaaccaaaccgcgaaaaccgttagtcagtttacaattttttttttctaaaatgggtgggttgcacttaaattttaccttatatttttttactattattttctataataaaaaaaggtaaaataaataaattgtaaaattgttaaaaaaaagtattattttgttccttcataaaattgtccaatgtttgtggaggttttaatgagcccatatttttcaaaaaaaaaaaaaaaaaaactaccaaaatagtgcagtcccgcccaccatttacatcctatatgaggttgttcagtatgaattttgatggttttgaagttttcaatcaagttttcattgtgttttaactgagttgtaaagctaagttgttgttttgcttcaattgtaaatttgtaatgggatttgttttatatggttgtgcattacttgtttcttggtggtgactatcaattcggaagtgagttacatacagaggagaggaattaggattaacttgatgacaccgaacacaaactccatgaattgattataaaagagcgaaagttgaaataatgccctttctttgtgtgataattttgttcacaaaactgactttgaggattccctttcaactatttaaatttgtccatgagaatggtatggtgcttgctaaagagtttaaaataaccctgtcaattttctctttttttaatatttatctaaaaagaggcctaaagatattattttagaagtggaaaatttgtaatttaacttgcaataatgttgaaatgaaaactacttattcttaacaaattacgaaatataagactaccaccaccacgagagccaatatattagaaatttctgcccaatgaattgcttatgatttgaaccatcctttgtcataattcatgatacatacatgtataccgtttataactatgtatataaaacaattttggagtaancttgtatgctaagttacaagtgcaagagc

SEQ ID NO: 211954 - DNA, 1084 bp, Cannabis indica
ctatgattagtgctctaactcaactctaatattgtgttcccaagatgtaagtattaggccgatccaattggtcaactttaacaaacaagtgaaagaatagaaatcatacacttaaataaaaacctaaccatctcaggattgagatcatagatctaagatcaactaagtgatatttacttataaaagatattgcaataaattaatgataccttttttattgtgaatatcggtccagtctaatgtataaccatacatccaatacaagcttactttactaatgccttggaaaatatattctactataaaagtgtaaataaacagaattgttaattattatatcaatgtaaatcttgtgtactgataaatcatgggactaattagtttaatcacgtaatcttgattattttctactctgtagacaatacaattatcataaatatcaatgtgataaggatttaatagaatttatatatcatacataagatcatgaaacaaacatgtgaacaaagaattatattaaacaagtaataaaataattctgttcctttattgataaatgaaattcaagataactttgaaataggattttagttagggtacaaaacccaacaaaatctcacttgcactaacataaagcaatcagtacatttcaactaatcctagattttctttgtgcttttcaaatgtagtctttgtcaatgtcttggtgaatgggtctgctaggttatctttgatattaaacttttctaccaacacgttgttgagattttatgccctaaataaaaactattttaatataatcatatttgttgtcaataagagattagaagtcatttatgtttacatgtagttattaatatttatggtttaatatacagtttctattaaattcagaacatatatatagttattcacaattatagtaatgtcaacacagtgggatgtaattgtaattatatttttcaaaagtttatgttccatgattcatcagtgcactggatttacactgatgtgatagtcagtgataaagtttacttacacctcgaataagtgttatatcatttttaggacattggcaaagtat

SEQ ID NO: 211955 - DNA, 1085 bp, Cannabis indica
tgtactaactcttgctttgcctaaaggatgggaaataaggcagttggatgtcaacaatgcatttctcaatggagacttgcatgaagaagtttacatgatacagcctccagggtttgaggttcctggtcaagagcaccttgtgtacaaacttaacaaagctttatatgggctcaaacaggctcctcgagcctggtttgataagctacagaacagcctgacttctctgggatttgtctcatctaagtcagatcactctctcttcatattacacactcctacatctactacacttgttttagtgtacgttgatgatattcttattacagggagtgattcagcagctgttacaagattcattgctgctctaaacagtgaattctctctcaaagatttggggaaattgagttatttccttggaatcgaagtgacatatactgatactggtattcatctgtgtcaagctaaatatgccaaggacttgcttatcaaggctcaaatggcaggagccaaatcatctcccactcctatgactagtggacttcggttatcagctcaccagggagaccctatagctgatgttcacatgtatcgatcaattgtgggtgcactccaatatcttactataaccagaccagagttgtcatacagtgtgaatagagtatgtcaattcatgcaaaagccactcacaactcactggcaagcagtcaagaggattttacgatatattagtggcacaactacatttggtctccacctcacaaagccactgtcttatgatctgattgccttttgtgatgctgactgggcatcagatccagatgacagaaggtctacatctgggtttgcaattttctttggctcaaatttgatagcttggaaaagtaaaaagcagcaaacggtttctcgatccagcactgaagctgaatacaggagtgttgcaaatgtcactgcagagcttacatggttacaccatctcttctctgagcttcaaatccgaatgccacaagccccaactatctggtgtgacaatttgagcactattatgctcacccagaatccgattctacatgctagaaccaaacata

SEQ ID NO: 211956 - DNA, 599 bp, Cannabis indica
caggttgccaggagttgttttggcctgtatctgttgtgtgttttagttttatatttttgagatatcgttgtatatagtttttttgtgaaactttttataacagggatctctagaacacgtttttactacggtcatgctgtccatttttaatgttttattttagtcaagtttttattattatcacggtttttaattattaattaatttattagtattaaactagtcttataaaatcacacgtggcctccctatggaatagggcgttacaacttggtatcttagatttaaaacttggaaaacctcatatctggaggcttcgagaactcaaaaacctcgtggtgaggtcatttccctccgacggtggcctaaatggagcagggtcgagcggttgagcaacttttaaagtcgcgcgcgacagagaaaggtcggagatgcgtccttcatggttgaagatgttcgtggccgaagatgcatcgtttgtggccgatgtttcgctcgccaacgatgatgtacaactggattgacttgggcagaggcaactttctcttcacgttcaatctctctcccgatctacccatattattttttaacttattttt

SEQ ID NO: 211957 - DNA, 1498 bp, Cannabis indica
cgtgagaacaaatgaagaaatcaatccataaacgatcttgaatcaactggaatcatagtcaaaactactactggctaataattctacacaaaatcacagacaactaaagagtgcgaaattgattcacttgccccataacaaatcaaatcagatacaataaaaagacattcacatagtagaaagacacatgtttagcaaataataattcatgtaaaaatattcttgaattaaattagacttattcagggtgaaattgtcaaaaattttaatatatttataaatctattatcctcaaatgttctaagtgatatttaatttaaaagttggatatatattatatatatatttgaaatgaacatatattgaaaatgatgtaagattgaattttcatattctttcattgatgatgatatttaaattttagttttatctaaaaaatatgacagtattcttttataaaaaattaagtatcattaccaaaatactatagatattcaagtaaataaaaacatgctttagtttatagcatcttcaaactcaaaattactcatccaatcatgagggatttagaaaaagagaataaagactagcatgttaaactatttttcaaaactatttttatgggttgtgatttttttttaattattaataatatatatggtgaattttagaggtagatgaaatttaatggagtccttaatctcccgttagtttttattaaaagaaaaaaaaatgttaaaaaaataatctttaaactaagaattttattacatagccacacttaatataaaaaaattataaacttcattaaaaatgttacattagacaaaaattatttatataataattagagaaatgtttaaatgattttttttattttattttttattaaaaatgtttaagaaaaaaaagagagaaatatataaatcctattggagaaattttaaaatgtggaatagtttttttttaatgatgtttttcttttcattgataggtagatttttgtttttttttttttttctttcattaatttaggtaaaatataagaacaataatatgatcaagttaattaatgcttaattaataattacatgttcggctaccaaccaaaatttataaaacaaaatgttagtttcaaagaatatctcaacctcagttatgatcatgatatttaaattatgttattttttttatttttttttgttaggcaaatttcatttatcatgccaaatgaaggttaaaaaattagtaagactgtataaatacaattatgagaaaagaaattatgagcaccaaatcagtatgcatgtaaagaaagaagggtacgttccaatggcttctaagcagataagaagaagtgaattgaatgaatctttgagcctctcagtgcgacaaacgggtaagaagtccaatcattaagagtaatgctcttcagagctttgacttcatactgtgagtcattaagttgaaaatccggcaagcatcgtcaacaaatccc

SEQ ID NO: 211958 - DNA, 2217 bp, Cannabis indica
gctgtgtatgtatcaaaaatgaatataaggattcacaacagtcctattaggattttcatgattatactgcataatagtctcttgtctagcatcttctcctaccaatccaacatcaaaatgcttacccaaatcaccatcgatcacctcaccacgatcatcagcatcaaagattttcttcgcaccatgctgaattgcaaacaaataacttgtttggagactaaggccctactctatcttgaaccaacattgaaattaaacccttcaaaacccccacaaatctctgaccccaaaacataaatctactaaaaaaaatctcaataacccagaaacgattttctccaattgggcctctgatcaagctctcaccatgaaaatacttaaaaagcttaagtctttatcttcttcgtcacagagctcaccttagattcgttcagattgggattgggagagtgaaattcttcaatcgtcgagtccaactgagaagccacatttgattgacctccgacacttcttcatcacaaacctcaccttagagtcgtttagattgggattgggagagtaaaattttcaatagtcgattccaaccgagggaaaaaaaatgattgacctccgaactcaccttagagtcattcaaattgcgattgggaaggtgaaatggaagagtctattggttttttaaatttgtttaactttttttaatagaattaataacttaacggcgttagaagagatccgtttgaaaaaaaaaaattagtcctggcgttaaaaaaaaaagaaagaatcgttaaaccaagaattgccgttagataggcacttttaatatataaagatatgaatgtattttattgaatagaattaccagtaaaataaaatatttatttttttttaaaaaaataatagtttaatttaatatcaatgctaattaaacaacaatactatggcaataagagctccaaaaaagacaagttcaataaatagtcatctcactaccttcttttgccaaaacgtgttggcaacagttggctgttggtgttaatttgacgacaattggttcttttgccaactggtttgttacggttatacagcaggcggatggggagaaaaggaggttgatcgcaatgacatgttggacaatttagaaacatcgaaatgagctagtatggcctgataagtcccccactattgcgagtgttgctcacttagctcaagcttcactcgcagattggactcgagctcaagattcaacatttaatcctacgtctgcattccttactgatgtcgatggtgctaaaacttgggccaaactagctgaaaataccttgaagattaatgtagatgctgctattttttcaagaactgccacttatagctttgcagggggattagggatgaaactggtgcattggtggaagcttttacctgctgtcggtcaggggtgttgcaacccgaaatggtggaagctttgggtgttaaggaggcactgagttgagttaaacggaaagattggaggaaggttgtcattgaaattgatagtcttactgtggtgcaagcattacgtagctctattcctatggtttcatactttgggagtattatttttgattgtaagatgttgttaaatgacttgcgagatgtttatactttgggagtattatttctgattgtaagatgttgttaaatgacttgtgagatgtttatgtcaattttattagacgttgtgcaaataatgttgctcatttgttagctcgagcatcctatttagttgctcatcgtgttatcaggagtagtgatgttactctagattttaatcatgtaatcactatgaattgtaattaataaagatgatgaattttttcaaaaaaaaatattcacatacataataaatatattagaaataattaatagtactacttacctgcccttaattggtagcatagacgaaaaaaatggtgagataaatgagttcaagaacaattatagccacgattatagaaaaagttaaatgatatgtccaatttttaaaataatttagatattatgccacaattatagcctaaaccctatatataactaaaactttaaattttaataattttttattttaaattttaaaataaccaccttttaaaaaatctgtctatatatatgtgataaccattcttactttataattgcttttacttaaaattttatccttttttttaaaaattttttttt

SEQ ID NO: 211959 - DNA, 775 bp, Cannabis indica
tttttatttttttgatttttagtttaagtcgggtttgggtctgagtctgatgcaaggtccgagtccgggacgtaccaggaccaagatcaagtttggatctgggtcagtacagacattaattagaatatcgtttaaaaaatataaaatgtatttttttttttatttaaaaattttaaattttaattttaattaaaaattaaaaagtgaaacaattttataaaatatattttttaaaaatatttttatttttttaatttttaaactgattaagaaaatattactaacaaatacttatcacaattgcatagaagcacccatatgttttgttattgagaaatctttattaatgtgtctgttatattaattttattcaaaatgaactgcaaagtcaatatcaaacttctcataaatcatttaataggtattaggcagcgctctttgaaatggtcaagcaatctcaaattatttatttctcctatatctataaaaaagaaaataaagaggattaattataccatgaaaacatgaatataatatgagattattatatatcttaattagaatatatttttgctcttaaattttaatatattctaaatttttaaatttttaaattttttgttcaattttaattaataaagttagatgaaaatttaaaaacataatttagtatatattaaaattcgagcgacatgatttaataaatatcaaaatttaaggagcatgatttagcatatggacaaaaacggatcaattaataaaattaaatgaaatt

SEQ ID NO: 211960 - DNA, 558 bp, Cannabis indica
ttcccaaaatggccaaacaaacactgcacctgctgcctcttccaacccgataatagcacctgtctcaatcaaccccaatacacatcccttaaatactgagccatcccatttaccacaaagcatcactgaccaaccaacaaatattaccataccacctacagacacaaatacacaacccctcctagagaccaatggtccatctgtaccactgcctgtacctacccgtactcatcccatgcgcaccagactgcaaaatggcattaccaaaccaaagtcttacatagccactaaacaccctttacctgaatccttgttaccctctgaaccaaggtcattacaagcagctctagccaatcctaaatggcacagtgccatggatagtgagatatgtgctcttaaaaaggcaaaaacatggaaactggtcccttatgagcccaatatgaatgtcattggttgcaaatggatacacagggtgaagctcaataaagatgggtcattaaatcgatacaagtccagattggttgctaagggatatttacaagaggctggaatagactt

SEQ ID NO: 211961 - DNA, 456 bp, Cannabis indica
tgagatattctataaatatatgtatgtttacatattaaggactataatacatacatatatttataccatggattgagattggtgttaagagactttgtatgttttctgtttcatattgcttgtgtaagtgatttgtggggtttattttgcacttactaactaccaaaccttaatgttttagtattgaggtaaatgttgtgagattaaatttatcggtacaaactctgttttgaatttgtttttagaagtgactgataatacatgtttctgtctagacccaatgattcaaaatttagaccttatatgtggcttgtttaagaaaataacagaatttgtactcatgaaattagagaaaaattacatttttacaaatattgggtatttatgccactaaaaatttacattgagtttatgtcacttataaacttaaaactttaagtacttatgccactattt

SEQ ID NO: 211962 - DNA, 1089 bp, Cannabis indica
tttcttacaccttttattttttgtcgctaaaaatattattttgcaatttttaaaatcataatttttaaaaaattaaatttgtaaataaataataaaaagaacgtactcatgaaataaaaagaaaaccctattatttattaaattaaaaaaatatgggactcaatattaaattgtattaatagcgatttaccacatctagtagtgtttaacaccttaaggtacaccttgacatttatttttaataagtgaatggtggtgccaaatgcagtgacaaacacacttatgggatatgggggttgtaaccccactgaaaaaaaatttaacttaaacaaattaaatatttttgggtacttctataatatactccatcaaaataggtgtactgatgcaacctctaactatttcggtatctataagaattttttagtctaaatttttttatagtcgtgtacattatagttatttaagacatcctataaaattttgagaaatttgaaataatttacaatttaaaaatcaatgtttaaactgtctatatcacacacgcataaaataaaaaagtcacgcgtgcaatagactctttgaacactgttttcgatgtgttaaatttttctgaatttcttaaaattttattagatgtcttaaataactataatatatacaaccataaaaaaattggactaaataattttttaaataccgaaatagataatggtgcatcgatacacccattttaagggagtgtattgtagaattttacaatatttttattataatttaataactatataccaaaatagcaaaatagcccataagtaattttttgtagcaattaaaccttctaaaattaaataaatttattaagaatggttatatttttcgtttaaagtaagcacacatatattttataataattattacttaaaaaagatattttataataattaagcttccacaaactaatttttttggaaccctcactggcgagaaggcacttataagagatgcgctagcaatacgtgcacttctggcaaagagaattgccctatttgtagggacaggtgaggagacgtatagagcacctttttt

SEQ ID NO: 211963 - DNA, 516 bp, Cannabis indica
tgacaaaactatagattaaaattgtcaatttttttatatttatataatagtcgaccggtttttaaattataaccatgataatcgaaaactaaattttaatttttttgtgtaaaaaactgactaaaccaattgttgctcaaccttacgcggtcgtaaaataaaattagattagaaaacttttttctatgtcgaaacaggcattaagtttaccaaaacactacttaaagggtgtactataaaaatttcctatattttttattataaaaatagtgcacaaataaatataatgctaactcaacattatgtttcacattcaatactcaatatcttagcatcctagaaaattatttcgcaaaacaaaaaactaatagaaattttacgtagaacaccgttaaagagatatttggtagatcttttatctatttggttaaccaaaatatattctactctaactttttctatgatcgtgtacgttatacctatgtaggatcacaaataaattttctaaaaaattaa

SEQ ID NO: 211964 - DNA, 897 bp, Cannabis indica
agttttctgcatttttcatttttatattttggctattctagattttgaggcaaagatttttctcaaagaggttttttcttggtaaaagtgaacgtttcatctgaattagataaagggaatctgagttcttcactttatggcagttgtcttgtttgtgaaagtaagaaattttagcaaatgatgtgtataatgcagacaatgtgtatgattgtagattatgaagaattgtaaaaaggttgtttatgtgatttacacttttacaggaagctttgaattaaccagatttgatatgtttaggtgatcaagttaatgccagggtgttattcaccatattaaagattactgatatttacaagtgttctttacatttatgttgttatttttagtgaacccaattgacaatctagttgaaagtactagcttttagcacgatgtttataattatgtatattagttctttcatgatatttattcgccacatgcttatttacccaagtaatcaagaaataatcacaagtctactttaccatcttgccataatggcaagtctaattaaatttgtaagctttttcatttttcacaggatggcttaccaagtaacaaaccagaaggtaaaactaattcttaggtgaaagcatcttgcaataggagctcagctttaatgaagccaacaacaagtaagcaaaattgacctgctcgtgagttggtaggtccaagtacttccttcagatcaaagtgattatagttttcctcacttaatcttatttgtctttataattacaatcgaaaagtaggagaaataatatttgagctaaaattattaattttatatgtatgtttattagattgttcattgtgaatttagttactcaaggttctatgctgaaatagtatatt

SEQ ID NO: 211965 - DNA, 1381 bp, Cannabis indica
atctttaattcagccaacaaaagattaagaaaattcacataagacaaaactaaaattatacatggaatgactattttacccttcccccctaaacttaaactaaacacattctaggggtattttggtcattttctaactttcctgatcaaacatactttccaacattttaacctaatccggtataattccaatataacacaatttcaaccatcgtgacatttctgaccattctgtcaaattccacaatcgcaggcccgaaaatattttattcaaattatggtatctacgatacccacatattccaatacaatctccgtaattaataaattacgctttattattcattaattcatatttcctaatcaactcgtaattagctttaagtaggattataagcctactttaatatccatataatcacatatttaataaaatatgtccaattaaaatatcagtatatttttcgggatattacagaacaagactttggtcttggttctaagatctgaggacaagaatgtgatattattcaaatggattctaaaggctaaagaagtggtgatagaggatgagctagtaagattcaacaaaagattagtttccaaagatttcactcatgtggatgtgataaattacactgaggtattctcacctatagtgaagtataagaccatttgacttatgtggtcaatggaaactcaacaaggtttagaagtggagcaacttgatgtcaaaactatgtttctaaatggttatatagaagaagaagagatatacatggagcaaccacctgtattttaggtggaataagatggaaacgagttggttttttaagttgaaaaagtccctatatggccttaagcaatctccaagacaatagaacaataaatttaacagctatgtttagaagattggtttcacatggtccaagttcaatcactatttgtatttcaagcacctagaagagttaacaattgtttatcttctactctaagtagatgacttgttgataatgggtaaagacaaggcagtgatcaaaggaattaaagataaactcaaggaagaatttgacatgaaggaattgggagaagtaaagaagatacttggtttagaagttcatcgatctaagagtgatggagtaatgcacctaaagaaaaagaactacattgagaagatcctaacaaagttcaagatgcaagattctaagagcactttagtacctcttggaggacaatttgtattaaccaaggagaaaagtcctatgatagtagaagagatggaaaaaattccatatgcaatggctttggggtgtctcatgttgtcatggttagcacaagacctacattgctcatgctttaagtatattgagtaggttcatgtc

SEQ ID NO: 211966 - DNA, 537 bp, Cannabis indica
aaatttcttgttgaaagaagttatattttaagtgatcatcgtccatatggtgttcttaacattcttcaagagagaaaatgggtaggttctttagttaattttactggttatgtggatcggattgttaaagagttttatgcaaatctcaataatgaaattgttgattctaactctcaaatgttttgtaaagtgtttgtgagaggtcacttgttctctttttctccacaagatgtagccaaagccttgcatcttccttctcttgttgttccagatgaagaggagagagaacctcttgataaggatgaggttcttgttgagattatgggtcaaaagatggtgtggcctcaaaatttttttatcttggtcactaatctcactttcatttatttggtgcttcacaagtttgctacaacaaattagaaattgatttctcacactgcaactatctcctttgatatgtcatctttcttgtacaaggttggaactgggtatgatattgatttggccacaatcatctttgatcaaatcattagtttt

SEQ ID NO: 211967 - DNA, 979 bp, Cannabis indica
cgctgacaacacaattcgatcgaatcttcccactccatctgctgttcatcgccctcatcaagccgacagaccagcctatgaagacattcgattaccatactacatcagcaccgctgatcatcccgaattatctctggttactccggtgctttctgacaagaactttcaaccttggaaaagggacttcaagctctccattggagcaagaaacaagacaccatttctcgaaggtactctccctcaacctcctgaaaatgattcccttcttgattcttggattcgatgtaatcaacttgtaatgtcatggatattacattcggtttcccctgaaatcaaaagtagtatcatgtattttgatactgcagctgaaatgtggaccgtgttaaacaatcagtttaaccaaggcaatggtccacggatctttgagttgaatgaaacactaacatatctcaatcaaggagatgattctgttagtgcatatttcaccaaactcacagccatgtgggatgaaatcaaccaattgaggcctaggattccatgcacatgtgctgctggtgttcagcacttggatcatcaaaatcatgatcaagtacttcagttcttgaaaggtttaaacgattcataccaagctgtacgtgatcaaatccttcttcttgatccatgccctcccttgaacaaagtcttttctatggtaatcaaccaagaaagacaaagatccattggccatcgcatgctaccccccatggctgcctcgagttcctctattgcaccagaagctgctcctgcagcaaatgcaacctctaaaaacaaaaggccaagaccccattgtaccaattgtcaaaaacctgaccattacaaagacaaatgctattttttaattggctttctcccggttatggctctcgaaaaccatcacactccaacatcaaaaaaatctgaccctggcagtacttcaaaaaacaaccctcaggcatctcaa

SEQ ID NO: 211968 - DNA, 523 bp, Cannabis indica
ccaaatgaggtaacaaaacagttggaatagacgctaaattaaaacgacaatcaggtataatatagtagctcttgcaaatgaatgagccaccaatttgttgatcgtttaacaaaatgaattgaaacacttctcagagaatttagtatagccttacaatcattaaccacttggctaaatgtggaaatcataacaatggagctacgaatggcttgcacaacaaaaagacagtctgtttcaagaatatcacccgtaaccattgatgatcttttatccaactcagcgcttctcggatccccattgcttcgacaacttcaggagaattcgacccctggaatagctttgtgcaaccttctatcaagaacccacctgaattgcgtgccacatacccaacaccaaaactctgggcctcctcaaacaacgctccatcaaaattgatcataagagaattaaaatggctagtaaaagtatatgaatgtgtgtttattggatatatatgatgttagtaaagcatataaattttatg

SEQ ID NO: 211969 - DNA, 414 bp, Cannabis indica
tctctctctctctctcttttgtaacatcatcaaccattagagactctcccacttgaccaataatcttgaacaaagattttttagtccagtatttttgtaaaacaccctaactagcataggcgtgttagcgtgattttaaaatataatgtgcagctcgttgctaattaacgaggttatcgaaaatcgtgattaattaaaatttgcaaattaattaaaaacttaaagtattacatatataatatttcgggatcccgtttacaaaatactttacaaaagtttgctatacatataatcaaaagcttgtcgcctagcgactatagagcaaaagcctcgatgtcccaaagatcgtacgctctaggcctaaccgccccgacatgtacaatctttatctgctcgtcctcacaattcctcagc

SEQ ID NO: 211970 - DNA, 1395 bp, Cannabis indica
atagcaaattcataataacgtagacatatttcataatttcacgatgatcaaatatttagctagctaatctaaaagtcaacgaattatatatcatcagttctgaagaggcattatttatttatttttgaagaggcgttattctaatttaacaatgaaaatatcgaatctaaaataattaacataacaccttataatctttttaccatatatttaagtactagttaataatctccaaatgagtaatgctacaagtgtatactatatttacaatttttctatataagctttacctttaaaagtggatgcaacatacattattaagggtttttcttttaaaataaataaataagtcataaaccaaatcacactttacttgattaatattccatgatatattattatattatttttctgtcaaattaattaaaagagaataacttacattaaaatgggtttggattccttcgatcagatgaacatgaaaaccaagaagaagaagcaagtaatagtaaccatttgcatctgctgttgattattattaattattgacatataattaaagataattaatttggttttggacaagtttttaggtacaagtacagcaaactaatcacgaatttcaaaagtttgtattatatattttgattaaaaaaactggtcacttgtagtcaacataagttttgttagtacatttctacatgagcagaagtacaagccttcatctgtgaagcttatattccctttccaagaaaatataatattatactaactaattataaaggacgtgttttgtggaattatatattattatttcctacccatttctaaatgttttattgcaattttaactgtgcatttacagtaaaataataataaatgtcgtttttaattatcacctatactagcaaaaaattacgtgcgaggcacgtatacttaaattttatgctaatttttttctacgttattaaaaagtgatacaattaaaaataaataaaaaaatattattagttattaggttcaacatcattaccctgtgttcatttttaaggaaaaaaaataatatttatgaaataataatttgttgcaacgcatgtacaggcaaaatttggaaaatataacatttattagtagagtattgacaatttcaacagtaaattaactgattgtatacttttttgtctgctaacattaagtatttgatatttgagtggtgaactcttattggtccgcttttcaaatttttcttaacactctcattttattcttccaacttttttgtagtttggagtgatgtccttacactacaagaaatgtcacttttgtcagcacatttttgtgctggcaaagttggtattgcgctggtaaaatagaatttacctatgatgtgttggc

SEQ ID NO: 211971 - DNA, 610 bp, Cannabis indica
ctataattataatttaagtattaagactgccaacaattaaacttaaatatttatttgcaaacgtgaattaaacttaagtatttataccgcaaatttacttttttttataataatattattattttaaaattttaaagtatttactaaaataaaacctaatttatttattagaaatactatattaaatatatatatatatatttttcaaaacactatttcttttgaagttttgggtaagtccatagtttaaagaatagcaaatggtctcaaattataaggctaagactatgctagtaaatgtcttcatttcaaaacttgtaaagaaatagcctttttagactatattatcttttgccacataaaaaaaaaaacaatattttttttcattatattttattcaaaattagaagcaaattacttaaagattatggtatatttatattagttttttaaaatcttttttatttgaaagtaattataatttttttaaaaaaaaaaaacttaattaaacttggttgttggtatataaattttgttgttacaacatatttctattttgttgtatggtatattattatgtttagattgatatttattattttattttgtc

SEQ ID NO: 211972 - DNA, 810 bp, Cannabis indica
attccataatatcttagatattaaatgctgtaatattcaaaatcctctagcttggctaggattgtaaaaaattaaaaatagattagactataaggttgagagttgcatacataaagggcttggttacatagagtcttgattattgcatttgtggataaaggcctatgtatggaatcttgattgttatgcttatacatataggactcaactagagcttaactaaaaaaattattttgagtagattaaatacatgattgagacttctaattacttgcactggttgtaaacttgtaatatttctctgtcacataggtcataaattaatctatatttggtagcataaagaagggggagaaaagaaataatagcagggaaaaaaaagtaaggacacatcattttaagggaaattttaaaaataccctttttatattttatttacaatttcttacagcctaaagtttttatttgtttagcaaaatgtaaaaagacaactaaaaaataaggataaataacaataaataaactataaaacaaccgaaaataataataaaaaaaaaaaatcttatgacagttataatataactataaataaactataaaataatcaaaacagtggtttattatttttattgaagatgtatttttgtaaataaaaaagtttaaagcgtaaaaaaaaaataatctgtattgatatatttttatatttttttttcaaatttctggtaattcatgtaaatttttctaattttaatattataagatattatttttttttttttagttagtaaattaataagatattattatttg

SEQ ID NO: 211973 - DNA, 610 bp, Cannabis indica
attcaaaaatgaaaataggatgattcaaaatgaatataaactttaacaaggtctcctctggtattctacttacaaggttttttatacaatgttgacgatctccgtgcgttcgatttagtgcatctgtaatagcagttacaaagcaagacgctgaaaaaccactcgtttcacgatcatgagtgccatttagtagaagtaccttaatttgggaacagggtgcaaaataaatgaataattataattatatcagaaacaatcaaaagtgaaaagacaaaagaatcggattcagatctccagcaggcaaaagggacattcttgagaagtcaaaattttcaatatataactagggattcaaatttcttataatttctaccaactataatatacagttcaacagttgatggaaacatgccttaggacaggaccttgaagatataatctccccaatgccaattaataccttcaaaagcaaatgatacaatgacatcttgagatccaaacagaaacagaaccaaacttgacgatgccagaatgcttgaagcaaaaataaatgccttaagcaaaatcattaagatttgacataaatttagactgcatcaaaagtgattag

SEQ ID NO: 211974 - DNA, 1251 bp, Cannabis indica
accacatcagtacgactagagttttgggtatagactggatttgcagttagtcatactttgtcgcgaatgttcctgacccagttatcagatcgtgagtaggtgtatgggcacctaattatggtctggatatatgtttatgtttatgattatgctttcttactgagtctgtcgactcacagttattacgtgcttgtgcaggtatgagctagaatcgaattgggatgagtctaaagctaagggtgaggattgtacatatcaagacgattagacctagcacgttcatggtctccaaaatagtttaggctcacctttgtaatagtcatataaagacaacttttgtaatgcaagtattttgtagatatatgcatactttaacgggatctcagacttataaaaaaaatatatatttattttaaaaagttttcaccgagatttttgacaactaattaaataaataaagttgtagaactagaaaagaaaagagaatgtggagaccatgatttttatgtggttggggcgttaatgagccttagtccacgactcacttgtattgagatgaagaagatgaatttctctctctagaatttggcagcatttttgtttaataccaatgagagagaaagagaagagtcactttacatgtaatcacatggtcctatttatcaggaaccattagattttttttatcatctaaatcattcatttattagagaaaaatacattgatagacataaataaagcattaattgttggcgcatagccttgtcttgtcttgtcttttcagctttattaggaaggcctcctaacatgtcacatcaactttattggcacttatgtcagatagtgggtggaccattatttgtccttgtttgacaaaaatttggacatttagcctggaagtctttatttggcctttggtcaatgaagacttaagacttatcttctttgctttggggatgtatgattgttgtggcgactctcaaaaaatagttggacagagcctcatggatattggtctcattcacaagttttttgacccattgaatgggtgttagaacatggagataattgcaccaagtctggaggccttagttttaatctaaaaaattctaagccttgccggtgttagatagtcaggagaagtgctccaagccgataggtcttagattattttctaggtgtctaagccatggtagcattaggacatggagagaattgggccaagcccggagccgttgctttttcttgagg

SEQ ID NO: 211975 - DNA, 580 bp, Cannabis indica
ttttcttgatttgatccttaattaatccaatgattttaataattctaattaattttaatgtatatttgaataaatatttatatataaaaaaagaaatatcctaaaaataagtgatgatgtaaaataagaagacaacttttgactataatagtggaagtggtagatttacacgtaacaaagactatttcgaaaaggaaaaacaaaccctcctgaagcatataatataataacgcctacagtagcaaccactaagcggcacattataaacacaggaatttgaggtgtcaataagttaaatttgtattttgagaatagatatcacctgtatctcgttatgttatttaataatgtaatatagattaaaatatgacaaataataagaacaatatatattatagtttaatagtttttggtgtataatttaaaacagtgtaattattttgtaatttatggatcataaatataaatgtataatttaagtaagtaaactgcacacatgctatgaaaatttaaatgttatagaattaattatagctattagaagaggataaatacttataaatatcaacttatgatgtat

SEQ ID NO: 211976 - DNA, 775 bp, Cannabis indica
tcatatacaattggcaatctgataccacatgttagataaattaacaattaaccccaagatcaatttgtatataacatagaacacaataataatatataataattaggtatgcgtacctgattgatccatagcaattatctcaattcgatccacatcaattacttcaattcgatagtgcaatactatcaactaagtcttcctccctagatctctaaatcagaagcagtttatttatctgattatcaaaaagtatacaattgtgatgagacaatatgtatttatagagttagggaggggacttagctacaaaaccctagttgggctgggcctgctcatcaaaggcttcagtcaactagaaaagcccacacttctgcttcacctagactttacacacagatgctaagcccattaacaattgatcaccaacaacatgggctaacacagcaaagaactatccaatcaacccaagttttaataaaaccaataaaagttaatgtaagcccaaataaaaagtctaacattataatcattctattctactgaggaaagtaccacagcacaacctcttttttttttttttcaattatgaaaattccatattaattaagattttgacatgtcttaaattatcttattgaaaaaaaaaatggctgttaattaaaacttttcttgaaactattaagattattagatttaaaattttttatttaattttactaattcgatgattgtttatatttaaatcatacttttcagaatttgatatctaccaaat

SEQ ID NO: 211977 - DNA, 786 bp, Cannabis indica
gacagacctcaactcctcctttggctgaaatggctttggttgtaatatgtggccaaccctatagtggaaaatccacagctgctctttctctctccgaggctctcaaacaatcagaatcagattccaatcttacggtaaaggtaatctctgagacttcctttcatcttgatcgaaatcaaagttatgcaaacatgcctaatgagaagaatttgaggggtgttcttaggtctgaagtagataggtctttgaccaaagacaatattgttatagtagattcattgaatagtatcaagggttataggtatgagctctggtgcttggccagagccgccgggattagatattgtgttctgttctgtgatgttgagaaaaccctttgtagaaaatggaacgaagagcgcagagaaaagggtcaaccttcttatgacgataagatattcgatgatttgtcttctaggtttgaaacacctgatagaaggaactgttgggactctcctttgtttgagctatgtcctcacaaagatggtgttgacaagtcttcaactgccataattgaggttgttttgcacttgaccaaaaagattgattccaaaacaagggatgttaaggttctgcagcccaccattgctactcagactgggaagttttccgaggccaattccctgtatgagttggatagagcaacgcaggaggtgaccagtgccttggtggaggctcagtctcaggctcttggagggcctttgaatggagtttctctcggtcaaggtttgcctgttgtcaacatat

SEQ ID NO: 211978 - DNA, 975 bp, Cannabis indica
ttggtttgaacggataggcacgtaattcgccagtttgtaaggagtttattattggaatataacacttaactgtgtttaattagcgcaaaaacttcatttattattgtattttattatataatatataatttagactatggaatgctaactacaaactctttctcaaaatttgccttcaaaaacacatgccaaaaatatttttctaattttgttcaggtaggtgtcatacaaacttacaatatcacccatgtaattaattttaactgtaaattaattatttaaaaagacgaaaacatttttttacagtacttttaactttttttaattaatagctagacttaattattattaaataaaatacaaataaaatacaaagtgcgatttattttctaattttaaataatttaatgtatcaaaaataaatttaagatcttttaacacgcttaataaattggaatatcaaaattttattcaaaattttacaaaaatttataaattcaatgttgtagctataataaacatcttgatgaaagaaaaatattttcgacattttattttttgaatatgaaagttttattttttgaatagaatataataattttattagataattgtttcagttaccaaacaagtaacaaatcagtaggaatagactctaaactgaagctacaatatagaggcttttaacaaagtttgtgaaccactattagctagtcgtctaacaaaataaatagtaacattttttaaatcattaagcatagtctcacatacattaacccatttaccaaacatggaaatcataacaataaaactacgtaaggctttgaacaaccaagagacaatcggtttcaagtataacatgtgaccattttcgttccttgatccaacttagtgcttctcgaatccccactgacttcggctgttgtaggagaaaattgtccatgaaacatcttcgtgcagccttcaatcaacaaa

SEQ ID NO: 211979 - DNA, 547 bp, Cannabis indica
tgaaagtagatgtagatgccctcttgggagccaaattaggatatatcttagtataatttttagaagatatatctttcttacttattatataaataatacggtaaatagtggtataagtactcaaagttttgagtttgtaagccgcataaatctaatatttttttttagcggcataaatacctaatgtttgtaaaactgtaatttttctctactttcgtcagtatatactctgttattgtcttaaacagattacatataaagcttagattctatatcattaggtttcaacagaaacatgttgtgtcagttactttcaaattttcttttaataaattcaaaacggagtctatactgataaaactggaggaaaaatacagttttacaaatattggatactcataccgttaaaaaaatcattagatttatgtcatttacaaattcaaaactttgaatacttatgcaacaatttatctttatataaatgtctatctaatactaattacttttttttttgttatgtcttcaatagtttttgttgcctcaacag

SEQ ID NO: 211980 - DNA, 558 bp, Cannabis indica
ctaatgttgctggatggtttattatcttattgtaaaattattttaaaagtaataaattttcaaaaatttaattacatatacatttaattttttattgctttaaaaaaaaatttgcagtgtaatttcttaggtgcgggcatgatttctaacttgtatgattttctatgtatttacataactataaccttttaaagtaaaatatgtatacattaatgtgtgactcatatgtgtatctttggtgatggtagaatcatgaaaatgtatctcttaacatgatatttatcacatgttttaataataattattaaaaagtttataatgttagttttaaataactatataaattaattattaatttcaggaatgattccaattgatcattagttaatttatatattagtatataatgcaacatttacaatagtagaaaccatgtgggattgttttttagagactcactaaaaaaatataaaataaattaaaaaatgtaaataaataaataatatagaccaattcttttttatgccccatttacttttttattattttcttttatat

SEQ ID NO: 211981 - DNA, 631 bp, Cannabis indica
aaccacatttgcagcagtccaacattttcgctgccaaacaaagtcatttctagcacgccaaatggcccagctgaccatagcctcctcctccaactcgccttctcttcctcagcattgcagctccagcagccaattgctgaaattgccattcatattaccaccgacatccacacttgtcttgttccagcaggaacgagcatgaacacacccaactaacgcatgaaaaatagtttcagctgtagtgagacacaaggggcatgttgggttaactggaacatgtctttttttcaattgaacacaagttggtaatgagcctgaagccaccctccataagaagttgctgactttagggggaacttttaaactcaataaatccttccaaataccagtagctccagtaacaggccaagctccttttgcttcttgtaagaacatgtaggcactcttaaccgagtagagccccaatcgttcgaaccgccaactccaatagtcgaatattgcagtagaactcaattgtatagaagaaatcagctcttgatctctatcatcaaagagatccttaattacctcttcatcccactctcgtgaattcaatttgaaaaggttgcttaaagtctgattaacaagtaca

SEQ ID NO: 211982 - DNA, 614 bp, Cannabis indica
aaaaaaaaacttcaaaaaaaaattcatatttaaaaaatattaataacaagagatatatagagttataactttattgtgcgaaaaagaagcattaaatattgaaagaaaaaggatttataatgaaagttttgtatttttgattatttattttgtaagtttatgatatgaaattagcttaaatgacattctcatccaccatttacctaaacataaacattacattcctatatataaagtccttttaatttatatgattttagtttacattaataaagatgaattgattatgcaagtctatggttatcttgaatgatttattaatacaaatgaatcatatgtatgtagcatttatagaatttacatatgcatattttactaaaaaaatataatattggaaattaagtttggtgggttgaaattctagtcctttatttaaagtgtatgttgaataattgaaagatattttggtatttttagataaattaactttggtctaactttcttgatttcgtcatcaataattgacttgttagttttttggtttttagttttagttttatttttttattactagaggacaagcaatagttcaagtttggggatataatgggtgc

SEQ ID NO: 211983 - DNA, 907 bp, Cannabis indica
aaaataatttccaacagttgcaacaggaaagtcactgacagtgttgttttcttgattttcagcaggtgcgtcaataaacctatcaattttttcttcaaaggaactttcagaaaaatccttagagtcatcaatgacaacattagcagactccattacagtttgggttctcatgttgtacacaggataagccctactgttagtggagtatcaaataaaaataccctcatcacttttggcatcaaacttaccaagatattctctatctctcaaaatgaaacaagcacaaccaaaaacatgaaaataagccacacttagttttttacctttccaaatttcataagatgtttttgaagtacctagacaatgaaaaacacgattaatgatagcaagtagtgttaattgccttagcccataatcgtttggtaagtttcttgctatttagcatcactctaactatttcttgaaaggtgcgattttcctttcaactactccattctgttaaggagttttgggagctaaaaaactcatgagaaatacctgcagacttacaaaaatcatcatacacagagttctcaaattctttaccatgatcacttcttatgtgcacaatctttccaatattaaaatccttttcaaacttttcaatttcaaacaaagagttgtaaaagcattaaagatatcccatttttctctcaagaaatctacccaggtaaaatctagaaaaatcatcctcacacgacaaacgatataccttttttccatttaaactctcaatttgaattggatccacaagatccatatgaagcaattctaaaaactttgtaagtgtttatattcataaacacttttgtgtgtggtttttaatctttccaagttaacaagacttgcacttaccatcagattcttt

SEQ ID NO: 211984 - DNA, 629 bp, Cannabis indica
aaaaaattagttggtgataaataattttttcaaaaataaataatattgtcatacagttattactaattttggacaataatattcataaaaagtttgaaatattgattaaaatacatatggcaaagacgactcctggaacaacttttatttatagatgctcttaacaccactattaaaatttaattttatgaatgtagactaaaaaataacatgtacttggagatgcacttatatatcttcatatgtgaaataacattaataatattgttgagaatcatggattccatctcaaaataccatgttgagaattatgggattccatcttaaaatcaattggcaatgagtggagtagtcatgttcttatatatgacttcattctttaccatttattttatgtgggacaatatccacaataaatacattatactataattagagtactgtttttcattttaaaaaaagcttttgtacaataatttttattttaaataattatagttaaggaaattagtttatatattatttttttaacttttttttttttaatttacgatttaggttgttccgatagtttttatgtgggttgttataccaattttggttgccatttaaattactctgttagttgt

SEQ ID NO: 211985 - DNA, 650 bp, Cannabis indica
atgtcttgttaagacataagtggtgtcactagcactgtgtgctaacatagtgataggcacctatgctatagggatgcccccactagatttatttttaggttgattaattaattaattcattaatcaaaagattaatatttatttagatttaaatttgaaaagtagttttagatattttagtggttgagatattttctcaaagtagttgagagattccctcaatcagttataggaaataaatatatatatatataatacaattcgattatattatgtattaaaataattaaatatcatttaatatatgatttgaatttaataattaattaaataaaaattttattgaatttatttaaatataccgtataaactaaattttgaacagaatttttaaagtaattttttggaaagcctaaaaaggattaatctgatttaaattttttctccaaaaaatactatataattgttcttgctcatgtattaagaatccaacaagaaatttatatacattttatcctactaggccatactagtccttgtgtgggtggaagatcttgaagatcaaggtgtgagtttgacgtcgccgttctaagaatacaacatacaaaaaaacctgtgcataccctaattggcttcaagaggtaaacaat

SEQ ID NO: 211986 - DNA, 987 bp, Cannabis indica
atcatagacttccttttcccttgcaaattctagagccaatcaacctttagaactcattcacacagatgtgtgggggccatcacacattacttccaaggataattacaagtactatattgtttttattgatgacttcagtaggttttcttgggtttttcctatgactgttaagtctcaatcatttgaactgtttatttaattcaaaagtttagttgaaaaacagtttaatctccctattaagaaagttcaagctgatggtgggggtgagttttgggtatttggcaaatttttaagggatcagggaatatggttccaacactcttgtccacatactcatgaacaaaatagaagagtggaaagaaagcataggcacataactgaaataggtcttactctcctagctcaatcgggtcttgatatgtcatattggtggcatgattttcaatgtgatacctatagtataaacataatgcctactcctattttaaatcatttaagtccttttgagtgtttataacataatgcctacataattcctctaattttcaatgttatttctgttaagacacttgtaatcattttaccaattcggttataactaattgtcttgtattgtttcagctcttttgagttatataaatatcaataaagtcccttgtataggataagctttgcttctcaatttttctctctgttctcctttgttctgtttgtttcaagctcatctcaagccaattgagagctttgggccaaaaaattaaactagacttttttatataattttttttatgtctatttgtatgtataatggtaaaattttaaaatatagtattttagaaatataatttagccttttttctcaataaaaatattaaatgtagtatcttaaaaaatattattttaaaaaatgaatttagagccttttgctaaatgattttttgggtcatgagtgggggcttttaggcgtgagctcctactgcctcaccc

SEQ ID NO: 211987 - DNA, 780 bp, Cannabis indica
atagaaatagtacaagacaaaacgttaataaaaatacataatacacgaaacatcacaagtaatgaaataaactgaaaataaaggcataatatatcaaaaatagtagttaatgctagattatacttaattttctctggcatcacagccattaaactcattattatcatttaaatagtctacgaagtcggaaacatctagatgagttgaatcattcacaggatcatattgttcaattaagttcacttccttctccttttcttttacagaaatttgatacaaatcacaaaggtgtttcggcttacgacatgtacgagaccaatgcctttttgtaccacatctataacatgaatctttaggattttgaggatagttaccatgaacattctcatccgtatgttgtctcttcctttggtggtcagaatttctttctgaggaattatgaccatttcgtccacatccttggttacgaccacaacctcttccttggctttagccacgaccacgacctcgtccataattagtttgtggcatttacttttagaagtgccattgaaccagtaggtcttgattgatgattcttcattaatagttcattatttttctctgctacaaggagacatgtaataagttcagaatatttcttaaaattacgcatcctatattgttgttgcaatgttaaatttgatgcatggaatgtagaatactttttttctaacatttcctcttttgtgattttctacccacagaattttagttaagaaacgattctgaacattactg

SEQ ID NO: 211988 - DNA, 579 bp, Cannabis indica
taaattattttttaaaaaaatacaaatttaataactttggccaatcaaaaattgtcacgtggtaatttacttaacacttaacattaggtacttacaacaattcaagaattataacttaagtattattaccgctaaaaattaaacttaggtatttatttacaactctgagttaaatttacgtatttataccgcaaattactcaaaataaaataacaacttacacacaaatgagaacatctgtaacacatttttaagtaattatttttagtcaagatagattatacataatattgaaagtcaccgcatctttttattaggtttgtatgtaatttatatgtgtgctattttagtaacttagtttaacaagtactatataaagactgctaaattactgtctagcagtagcaacaatactgttattaaaattatcattatttacaagatgtcacttcaatgagttttttttttattaaaaaacaaaaaacaaaaaaagataaacggaaaattgtttctaaaggtgaaatttggttattaaatttgaattttaaatcagttataaatgtgccgtttggtaacact

SEQ ID NO: 211989 - DNA, 513 bp, Cannabis indica
tgagtatgggcgttcgggaagtgtcggggtgcatggtgcatggattcggtgcatgttagcaaactgccccattttgtcatgctgatgtcaccacaagtgggcaaagagtcaaccccaaattgatgggacacttcccatacgcccaagtgggctgagctacttggaggaaacccattcacatggttttgctttatgctttatgctttaatttgttggctgcaaataatcaaggcattactcttgtaaagtttagttgcatttcatttgtaaaggcccccatttttaatacaaagagagtttctttggttaaccaagtgttctttattttgttcttgctattcttcatatttttctgctgtctttgttgtttcgattgctgttgcactcggttggttggctgaacctcgcaagcggacctgtggggcgccgcacactccttcgacggatcgttcggagcgtgtcaagtagctttgtgtttgcttgctcatggttcttgtttgcactcaacatgtg

SEQ ID NO: 211990 - DNA, 670 bp, Cannabis indica
tatatatatatatcaaaattattatgtttgaatccatctatgacgatataaaattatttacctaattaattaagtgaatctatatataaataatgtggtaatctaacatccagtccaccaaactaaacccaaagttgaaaattatcatgtacaatccaaattaagatgaaaaattaaatatgaattctacatatatatacaaatataatagccgcaccacatattggtcagttgcgtgaggaggaggaggatcggagccgaggaagcggtggcgccgctgacgcctgcagctgcagagatttgagagatttgagagagagagggtcgagcgagaaaacctagagagagagtgtttttcaatatttagagagtttttatttagtttttcattccttttgatatagaaaattagggtatgttgaaaaatataactttattaatcaattaattaaatttacctctaattttatatttagagtaaggtctttaatattttggcctaatttactctatcggtggatagagatttttctaattgaaggattgtccacctttaactttgtctattgtattacattttatttgaatgattaatataacagtactttttcctctcaaacgttttttaagtatgtttttaattaatatataatacacttgttaacatgat

SEQ ID NO: 211991 - DNA, 841 bp, Cannabis indica
tcgatgtactgaatgctgatatttttcaatgaaagttcgttcattgttaaaaaaaaaactgatatcacctccaatatatgagcatgtaatattttattttcttcaaatatatttaaagatgtatatattttatgtaaaaaaaatgtatattaaaatgggatgtatttataagtttttaaggtgcaaataaaactctcttaatttaattttttttatttaaatttttacatttgggtaccctctcaagtaaatttcatttatgtcccttttgtttgtgtaaatgaatttataatctttaaatatatttctttctaatttcccacagtgagcattttcttttttatataaacgaataaataattggaaaaaaaaaaaaagaaaatctgagtataaaccgatctaattaagcaaagtagtaaatgagtttgaatcgaaattcaccgaaggcgttgcctataatattggctttaattgaaagagtgttggcgtctaaaacacaatatatatttgctcatatatatactatttataaaaagtaaatctacatcgaattcaacaaaacagtacctcaaattggatctgtcatagacattgtcgtgagatctaaacaaaactttgacgactcccacgaacacaacaaacaccagataataggtgtctgcatgcttaaaaaaagtgttttttctttcttttcaatattagaaaatgaaacacgtcttttctccttatatttttttttaaaaaacctataatatgcataaacggtttttcaagcatataatttatataagtagccaaacaaaataataataatatagaggtaaattgcggtataaatatc

SEQ ID NO: 211992 - DNA, 769 bp, Cannabis indica
aaaattacatttttacaaacattcggtacttctaccgctaaaaataaacattaggtttatgccgcttacaaacttaaaactttgggtacttatgccgctatttacccttatttatattatatataataattaatttcagaaattaattaataattaattgtgtagtgaaatagtttaaaatatttctatttaaataattaagtaaatttgaattatttaattatttaattacaattaatgaaaacacaagataaatggattgaaattaattcattaaaataaatttataattagaaaaagcacttctagttatatgctggtggattattgaggatggtatgaaatttctaaagctacattgaggaacaacaagaagagttcttaatgagagatattgttctagtgtagtttattttttttttatttcaaatgttgtaattttagaaatacctaatttttagtcggttcatatttcatttagtgtttgattaattgtttgctaataatttattagtgcatgcatattaattgttatacataaaatcttacacaattttcttttttctccataatcatgcatctcatactagtgacatgattatttaagattgtcttgtatgttttatgtgcattgcattttaggaaatcaataacataaaatgttaagttgatttaaatagtttaataatctagtagttcacaccaattgactttctcctaaagctaatcacataaataactaatattttctaaaaagtttttttttttt

SEQ ID NO: 211993 - DNA, 766 bp, Cannabis indica
tgaactttggttgttcataacttctcaacctgaactccatttgggatattctgtgtatcattggaaagcttgttttgagctctatatatttatgagtattaaagatgccaattatatgattgtgtgaaagtggatttagggattagccctatttgtgaatcccgtgaattgtgaataggattgccagtacttgttcaagagcacccagggatttagaattttcacgtagttgggacattaggtaagacaatagttagcacgtagacactactacaaaaaagcccttttaagtccatcaatgttggactagataaagtttcctagtctattttatgttggacatagtagccagggatataaaaggggtacttttctagtccaacaattttggactacaaaaacatttctagtccaactatattagacttgataagcggtctcactacgacaattcttttcaagtccaaaaaagttagacatgaaacttgattattggactagaaaaacatttctagtctaacaatgctagacttgaaaagcaacaaatccgctagagttgaaacctaattttttcttaaaaaaataataatgaaagaaaaaaaattaattatttatatatgaaattataaagaattatatatattatataatataatttttccttgtaaattatttataattattttaattcaattaataaagataaaaagaaaagtataaattctaaactatcattatttcttaaaatttacaatatttgttagac

SEQ ID NO: 211994 - DNA, 663 bp, Cannabis indica
tatgtagttgttacaactcactttatagacaatgcttgtgtcacgacccgaaccctagactgtgacagttatgtaatatctataacttgggtggttaaatgacacactttgaaccccacaacaaaataatacttacaaatgataccctaatatatattacaaaattacataagacctataattaaaataacagagtaattccaataataaataaaaaataattgtaataaaataagattatccatcagaatagacatagaacaataatattttccacaattatgtaatcaccaaatagttaaaattaataagccaaaaaataccaagataagacttatagcattcatcatattccacattccttacttttcatgtttatataaatgaaagagaccattcattaataattagatacatactcaatctttaaagaagagttaattaataattaagataggaataagctactctcgtcgttctccatcaacgactttctcacatccacaagtatccaactaagttcctgaaaggaaatataaggggtgagcttataaaacccagcatgaagacaactattatcaaaagaccagtagtttaataaaaattgttagctctttaaaaacaaaatatctcaatcatcatgtataaataaagtagagaaac

SEQ ID NO: 211995 - DNA, 697 bp, Cannabis indica
attgaagatccttctaacccttactttctgcaccacggagacaaccctgggaatgttttggtgtcccaattgttgactggacaggaaaattatgttgcttggagtagagcaatggagttagccatttctgttaaaaacaaattgggttttctgaacggttctatctctaaacctcccattactgatcatgttctttataattcttggattcgtaataacaacattgtgatttcttggatcattaactctgtttctaaagagatttcatccagtattctgtacgatgaatcggctgcagctatatggaatgatcttagggtgcgatttcagcaaagaaatggagctcacatctaaaacctgaggaaagatttgatgaacctgaggcaagaaactcaatcagtgagcatgtattttacaaggctcaagactgtttgggagcaattatccaacttcagacccaattgcacttgcaatggctgctcatgtggaggagtcaaaaagttgcaagaacatcacaacatggagtacatcatgtcctttctcatgggattgtctgacctttatgctcaagtgagatgtaatatacttgtcatggatcctttgaatgaaataaatagagtttttcacctagtttcacaggaagaaaatcaaaggggaggaaagaataccactgttgaaccgaatgccaacatggcct

SEQ ID NO: 211996 - DNA, 520 bp, Cannabis indica
tggagtcggttggtggggttcgcgatggagtggagtcgactgtagtggatcacaatggactggagtcgactccgatggttgtggagatggtctcgacaacgtggtctagcggtagggtcagctaaggttgttaatggaattcctataattgtggagggaggtttatcagatgctaaaaatcaggacatatctaataatatcaatgagaaaatatctaatgaggatgcttgtctgttggtccttgattcgaaacagagaagaaccaagttggagagagttgatggggcccatgtgaggggtgaggtggcagtaggtaatgaggtagatggggcaaaaaacttgagcttggtgggtgctcgtatccaagcccaccaatcattatgaatattttatcttggaatttccatgggcttgggaacccatggactttacaattccttaaggatcttgtgatccaaaagaagctcagtattgtgtttctctatgagacactttcgagtcgttctcagatggagagagt

SEQ ID NO: 211997 - DNA, 633 bp, Cannabis indica
ggtagatattattatgtatgaaactagaggcaaagttgaaagcgaaagaaaaacaagagagagagagagaggttgtggctttgtggctgtgtatatatatatatatatatatatatatatatattgagtttttaatataagaaataaaaagaagagaactttcctttcctttttggttattgggacacgattatcacttggtgcagacggataaacagttctgggaagatcgtcaactgtacttcttgcttatgtacactctcatttcctttaacaacaatttcttattattattattattatgagtaaggaaaattattttatatatatttttaaatatatggtttggattacttcaatattactttagtaatttctatatgattttgtttctctattgattgttgttatgtgaattttaactatgatttagtttctctattgattgttatataaattttttgtaaaaataaaaaaaaaatggttttgaaatataaaaataaaaactttttattattattattactattattatttatttataataatattaataataaaaaaagtactacaaaaatgatattaaataaataaattaagcattattatttaacatcttaaaatgtctaatac

SEQ ID NO: 211998 - DNA, 1078 bp, Cannabis indica
ctcaagttgagagcccaaattgtttaaatcccccataatacaccaaggaagcgtactatcatttttaagagaacgaaggagagtccaagtcttgaaacgcaaatcccgttttggctcaccatagatacccgtaaaccgccacggcaaggaattttgaagatggatattggcgtcgatatggttgaaagagaagccttgaatcaccacttcatgcgataccttccacaacaaagccaatcctccactgtgaccccgattttcaacgacaaaacaacaatcaaaacccaattgggctctaattttctccatactaactttactacaaattgtttcacacaaaaataacaagatgggcttcttttggaacacaaggtccgctaagaattgtctggcccgcgggttcccaagcccacggcaattccagcttatacaactcataactctgggcgggtctggaaaccagagcccgccaaaaagccattttttgaaacccccaccgtgtcatgatccatggcatcaattccatcattacgttctttgccttctaggcccactatatctcccagcccattatcaggccttttcctttttgaatcaaccaaagagttaagattagaatcaaaaaaatccccatttttgtggacatttaacgccacctcatgaccattatcttccagattttcaaatatgctatttcggtgcaaattgattgccaaattaggaggaaagtcagccccttgattcttgtcattcgatccccaattccctccgaaatccttgggatcacagtagcatgctgcattgaattattgccggagtaatcttggtgaacctccccgcgaaccaccgctcctgaacggagccattgtcccccgaaagtcgtctgccgtcgttggggtaaagctttcagttcaaggctgtatggcttttcctagaggtgcaaaggttttagaaaaagtctaggacaaaatctttccgagtgtccaatgattccgcagatgaaacaaaaggtgggcaacctttcgtacttaaaatttacccagtaccatgaggaatcgtctatgctaatcttcattct

SEQ ID NO: 211999 - DNA, 572 bp, Cannabis indica
aaatcatgccccctgaactttgttggctataatttggtagatttcaaagtctggagagcatgttttagtacataaacaatcagtgaaacactaaaattgaatgaaattagacaaaagtccttaaatctaacaatcttaatagttcaggagaatttgtaacggccaaaaaagtttagaaaatataatttagtatgtgtcaaagttcgagagaaaaaattattaattagccgattttaaaatgttataatacaatcaaaaatcatcgttacaataatcctaacgtatataatgtaatactttgaatgaattattggtaattagtcaaaataaacgtcaacatatatatattgaagtagaacttttaaatgttgaagatgtgtgtgttgtttttttttttgtcaaatcatccattttattattgaaaaataaaatatatttatatctattccatataaaatgtggctatataacaaaatttttggtttatgaaaaattattgggtgtacttttttttttttttaaaataaaaaaaagtttgttcatattgtttataattaatccacctaaagtgt

SEQ ID NO: 212000 - DNA, 513 bp, Cannabis indica
ggcttcaatcgattcttactgaactgtccataaatatgtcctccattcctatattatggtgtgacaacttgggggcaggatctttggcttcaaatccggtttatcacgctcgaacaaaacatatagaaatcgatgtccactttgttcgaaacagagtcctagaaaacaaaatggaggttcgatatgttgactccacatatcagattgctgatattctaacaaaaccgttgccaagctctcaattcatgtatctgcgagacaagttaacactcaagtcaaatgagtgtaacttgaggggggatgttagagatactttagactgaccttttatctctgctctgttagttatgactgttactaatttctgttatttcagttggaatgccaactgtcttttcttgtatttgttcattctgttgtaacctcttcagagcctatatatattgtatttggctctctattcaacacagatcatcagttcacatttttcacaccttcatttttctccacctt

SEQ ID NO: 212001 - DNA, 647 bp, Cannabis indica
ctcgcccaagccgcctcagccgcatcgaactgccccgtcccaaccactccagttgcttcagccataactccggccagtctcccagaagcccgaaccgtacaagcattaatcaacctcttacagctattaactccttcattcatcttttcctattccctgtcaaatcccatcagagaaatgggtatttttttaggttattttagatacaaatttagcttgcccattaaattacctctgcatactcgattcctgtaagggattttgggtaaaggaaatgtttttataataattttcagaaatgtcataattccttttgcccaaatttttcaacttttagcatttatactaatctgcaagtgtgatctgcctagtacaattcgtaatcctattgcgcagcaactctgttcgaaagtaaatgctcccaagtgatagttaccaaatcggttcacaaccttttcacaaggttttttctatataagggcagaccattcttttggtcttgcacttacagctttatttctcctaagctttattctctgcaaaagagtcttactattagccgtatttacttagatatacatcttattcactgtagcagcccaaagtcactcattcctcacatacacttgagtcttgttttgtcattt

SEQ ID NO: 212002 - DNA, 813 bp, Cannabis indica
cccccaggtgtgagtaaggaaaatccctgcactaggcagttgatctcgtaaccgacccatccacgtgtagtttccaagtaggtttgtcttcattgttgttcgactgaggctcttgtatttgctctgggttgccttttgaaatgctttctactttgcctgtgcactcaactacaaagtccgctaaagcctatcctttgactactattcggggttgaaagattatttcgtattgacccaattcccctgcccatttgagtaaccatccaaaagcatcgggtttttgtaatatttggcgtagtggttggtcagtgtatacacgaacaggatgagcctgaaaaatagggccttaacttccttgttgctaagattagtcagtaagtaagcttttctatcagcggatatcatcctttagcttcaacaagtcttctgctgatgtaatagactggatgctggatgttattttctgccctgatcagcacgatactcataacatgttctgtaacaactaggtatattcctaattcttttccgtctagaggttttgagagtacaggagggtttgcaagttgtctttttagttcttgaaattcattcttgcatttctctgtccattcaaatttcttatttcctcgaaggatattgaagaaaggaacacacttgtctattgattttgaaacaaatctactgagtgcggctatccgaccagttaagctttggacttctttagtttttgttggcgatctcctatctagaagggcttgaattttctctagattgactttgataccttgggcattgacaataaaaccaaga

SEQ ID NO: 212003 - DNA, 374 bp, Cannabis indica
ttttttatatggcacccaaattttttaacaattgttatgacaatgttataaaactattccagtatgggaaaacttcttaatcttaaccccaaaaatgtaatgaacttataatgaacgttttgaatatattatttttggcattatatttaacaaaaaaaatctactatgaaacttttaaaaagtaatatgataagaatcttaataggaatatatttttagcatgacacacaagtgtgaggtctaactgttatacaaggttaaaaagaccatacctattacccgaaagttttcttagtctaaacaccaaatctgttatgaacttataatgaactttttaaatgtaatgtatttctcatacaacttaaaaattttat

SEQ ID NO: 212004 - DNA, 364 bp, Cannabis indica
gagtgctcttcctcttcgacagttgcatttaagaacacaaatctatcatcggcaaaaataagtgtgagagttggagtccatctcttccaaaccttataccatggattcgattagccctttctgcttcataaattagacaggaaaacccttctgagcaaataaggaacatgtacggagatagcaggtcaccttgccttagacctctttgcagagtgatgttgccactaatattaccattgatcaggagagaaaacgtaacccagcggagacagttcataattttagagacccatcgctcatcatacccaaacataacatcatagcttctaggaaaggccactccacacggtcgtatgctttcgac

SEQ ID NO: 212005 - DNA, 675 bp, Cannabis indica
gaggggacgatggggaatcgcacgtactagggagacagaaatctcggagttacaggtggttatgggccggtcgaaaatcaaggaggaaaaagtaggattgatattagtgagcctatatcagaaaataattttaaatttcaaaaagaggggttagttgtttatgatactaagaggaggcgtgtggaagagggtaaatgccagctggaggaaagtttgttgggccaagaaagtgagagggagatatttggccgaaattatacatgtgtaaaaggagagaaagatactagcccattacattgggctgaaggggtgatagatgtggatatggacccacaaggtgaccacgtggaggaggttaggaataaggggggtgaattagataaatcacatggtaaaagtggtatttttttttaaaaaaaacttgttattatcgggttctcctgttgggacccgccaagagttatgagtttgttaagttggaattatcgcgggcttgggaacccatgggttgttcaattccttaaggaaattgtctttcaaaagagacccaatttaattttttttgtgtgagacattatgtaagaaagagaaagttgaatgtgtgagagttttattgggctatgatggaagttttattgttggggtccgtggtcatagtgggggtcttgcaatgtt

SEQ ID NO: 212006 - DNA, 513 bp, Cannabis indica
gccccaaaccttaagagcagctaaatcaaaagctttcgcagcttcctcttctttttcatatcctcccgctacaccaaattatttaatatgtaaaataaaaaataataataatgagattgaatataattttagtaaatttattccgatcaacaacacaaattatttaatttttatttttaaatttaccattgtggtgtttgagctaaaattaatttgtacaaaactcaaatgccaaataattagttggattgaaattatattctactatatatggacccttagcattttcttattgtaattagtaaattaatatatttgtatttatataaataattaggtgcaataattattaaaacaatctaattaattggtacattacttacccacataaactatgcgtccaataatatcagatgaatcggaaaagaagaaaacaataatatatagttagtcacatgtaattaattataatcgaatgtgtatgcaaatatatacatgaaatagtataataat

SEQ ID NO: 212007 - DNA, 983 bp, Cannabis indica
gtctgttggtagtagtttttcccaccactattaataaaacggtcaaagaatcttttgtatcagtagcgggtctctgctagtaataacccatcactaatactctttgaaataataagttggaatttttctgcatttattgggttaataactacaagcgggttgtctgccgacattaaatcttcccgttgctaatactcattttttattattttttaatttttttattcaaacactaatacaggtggtcaccataagtctgctggtaacatttttttttgggaccaagaaaaaatcattcattcaataactttcagcaagtacaatagatttaatagcagaagaagcattaagctcattaaaaatacaatctgacataaaacaaatgtgctagtaacattaattcttatagtgttaaaaatataaattatcctattacttaattagaaattgaattttgtaaatcaaaatcaataatatgtaatgtaaaaatgtaaaaggaaaaaaattacaatttaaaataataatagttttcatcaataatttaatttagaatttatatttttaaattaacgaataataatgaaaaaacaaacaaaaaatgagaaaaatattttttttaactgccatggatggtgattggagaccttaacttgattgagcatccttgggagaagagtggtgggaggagagtaaccagccatgatactttgatccttttgaattttttgcaaaataccgggggactcgatcttgggtaccatggttgcaaattcacttggcaaaataatagattctcgggaggtttaacaagagagaggcttgatcaagcagtggtttcgggggattggattacaatttttcccgaagccaaagtttctaatgcgccaatctctgttttgaatcatgggtatattctcttgaacactaatggggggtaagacgatagggggtggttaaaacctttttagattttttgaagcttg

SEQ ID NO: 212008 - DNA, 707 bp, Cannabis indica
tgatgatcttggtcgtcttggcttattgtcatctcacgagcatgttcttccaactaagattggaactccctcttttagttagcgagactctcagttaaggctgctcaagtatgagtttgctcatggtgaacggtttggaactgatcctacatttgacctatcgtgtctcgttgatccatctctgggtcaattcctttaatatccacatggggttctcttcggggcctaaagatgccaggatcccgagtggtttgggtttggcttgtgtcttcattatttgggacaaaatttctggtattgccccttttggtggtgtcgtcagtagcactgcctctagtggcgacaacgttggtggtacgcctagccatcattttcccaacagtgatagttttgtcaattgtctcatgaccagcagtgtctgggtagtggcttgagctttggctgcaccacctataccaggatgtgggggttgttgtcccttttttccgttgagattgcttgttgatgaaacttgtcgagcattatccatctcctcatcagatcattttttagatcttttggtaagcaccatttattctggtgaaaaaattcaaggttttggtttatgctctcaatgaaagtaacaaaatattgattggatttttagccaatcgacacggaactataataaatgaaatttaaatcaaaaaacaagcaataaatgtaaa

SEQ ID NO: 212009 - DNA, 582 bp, Cannabis indica
tatttttgtaagttttgatttggatggaaattaattatgaatttagcccaaatcttttattttgtctttgtaatcttgtaagtttgctggaattgattatgtttttagttcattatttgtgttttactctaatctatatgtttgcccatttatgttttactctatgattttagttcattgggtagtgaggagcctcatttaattgcccttttgttatttgatttgccccaataataaatttattttttaccaagttgtttggtttataaagaattagataaaagttaagagtgcaaattcaattatatatttacactatttatttaaattttattttgttaatatataattctaaggattctaatttcttaaaactttaaaaattgtatttcacatatcttataatataatatcggataatataaatgttaattctaatttctttcattaactttatattaatacatctaaaattaaaaaagaaacttaaaattaaaataaaactaaaaaaatactgaaatgatacagaacatacgtgcaacgcacgtccaaaaactagtattatttaaatacattttgaat

SEQ ID NO: 212010 - DNA, 885 bp, Cannabis indica
gctagctacttttccactacttcaatacaacaccaagaaccattacttaaaaaataataatattgattaaattttaaaattttaccactactatcaatttttatatatatgtgtgtatgcactaaaaatacatacatacatatatattaccgataataaggagcctctctcataagtccgccaaaaagggaggaggagctcgacaaagtttgacaacgactaaaaaagtcaataatatatatatatatatatataaaatttcaatagcaatttaaataaaaacaaataatctaaacataaaattttttcataacaaattaataaaaacttaaaggaagatcaaactaatagctaaatatttaataaaaaatattttttaatacctaaataattaatattaccgaaactaaatattttttattacctaacaactaataatctaaataatttttttattacataacaacaaataatctaaactaaatatttttttaaaataactaaatctaaaactaaataattaaactaaaccaaatatttttattaatacctaaatttaaaataaattaaacaattaatctaaattaaatttaaaaatacgtattaaataaataagtatatgtatatgtatatataatcgtatatataaaatatttataaattaatttaataaataattaaaatatacacctaaaagaggtggtgggtgccggtggccacgaggaggacggagaccatggttgggaatagttggtggttgagtgaacagactgagagaagatagagagaaagcatcgttggcggtggagctcgaatgggggtttcttggtggttgtccttcgtcgatggtggataccgctcaaaatggggtttcttggtggttgt

SEQ ID NO: 212011 - DNA, 1106 bp, Cannabis indica
taggaatgagtgtacaaatgtatgctcatcatctctatgacatggtttgagtgttttattattgtctgtgtgacatagttttgttttgttgttagttcttctttgttatttaatgggtcgccatcaaatcactacttatggctaagaataacaagttctctatgactgaaggagttgttaatagtgcatttacgtaccttgcacaatagttaaattttcaaactatgagattgaatgaacctgctgcaacagtttctactattgtctttctccttctccttcttcttcttccttttatttctttttttttttttgtaatttattattctttagttcttcttcccctcgattttcggtcgacatgtgcagcaaaagctctgggacgctggtgcttgagaatggtaaaaaaaaaatgatatttttcaaaaaaaaaaaagtgaccccaacccagccaaaaaacttggccctaacccacctggatcccatcctaacctgcatttgcccacccaaacccgaaacctgaaaactgttttctcacgtggacgagttttgtacacataatccacacacccgaaacccaaactagaaaaactcgaaacccataaaacccacctaatgcgcacccctaattattactcattttaaataaaataaaataatagaactaattattagaaaaaaaaaagcatttttattgggcacatgtggtgcccaacaccttctataggtggcgtcttacgattagttagcgatatttcttaatagttattttcttaagttatatgagatttgatacttaattacatcaatagcagtatgtcattcaggacggtgctaagtactaataatgacttttaacaattcttttaaacaaataataataaaactaagatttgagtgtgagtgtacacgtgtttaaatattagtggattgctttttggtaagcaaatgggatgagtgtaacaaactagggcctagaactactaacaaggacaacactcttctcttattgcatatgtaaaggcatacaaccaactccactcctagacaatgattttttttttgtcaactggaccatgaaattgatatagaaagaaagatctatt

SEQ ID NO: 212012 - DNA, 697 bp, Cannabis indica
aattattgtttgcctaagaacttttatgagctatttaggggctttggcctttggtacttacatgctctgtgagagcaaggtttgcctcaaagaaggatctgattgttcctatatcttcccagtaatcattgaacaaatatgcctgcaaaggaattttatcattgaacattgaaacttactggacaaagtgttaaacataaattcaaattatgagcttttttgtttacctttttaaatttgttctataaaactatacacgtgcttgggataaatatataaaaaaaaatccatgagctgaagaaagaaaaaggtttaacagaccttaatgaagaattctttggctgaggcagggattatctctgatccaaaatcatttgcagttggaaaacgccatctgtttcaaatagtatgttgtgagtagttttctcctggtaaaagttgacatgatcttctaatatagacaaattctatgctttgtcagtacctaagaaggttcagaagtatctccttcttgaagacatatactcccatggaagcaatatatggcttcttttcagcctcttcctttgaaagtcccaaaactgttgtatctacttcctaaagaatttactgaatttagcattagcagttaagtacttaaattcatacataaattcaaattttattttggcatcataattctgagtattaccatttc

SEQ ID NO: 212013 - DNA, 539 bp, Cannabis indica
ttttctagtaggtgggtgtcgcttatcatgtactgtgtctcttcagtaacatataaggtcactcatgggggtcatgttctagggcctatcactcctagtaggggaattcgtcagggagacccattatctccctacttgttcttaatttgtgcagaaggcttttcatctcttatcaagttttttgttcgcaagcattggctatcgggttgtcgtgtggcaagaagtgctcctactgtttcacatatgttgttcgctgatgacagctacatattctgcaaagcaaatgacattgaaggggctaatgttcttcgtctcctaagtacttatgagaaagcttcgggtcagaaaattaattttgctaaatcttcagtcttctttagtaacaatgtgcagcaaaatgatcgggctcggttatgtggcttgcttggtatggctcctgcttctgaaaatagtacctatttaggcctaccttgtacgatgggtcgaagcaagaatgcaatcctggggttccttaaagagaagatgatcaagaagatcca

SEQ ID NO: 212014 - DNA, 1178 bp, Cannabis indica
cattacaaactcaaaacgttaactaatatcccttactacaacatcatagcaataagtcgtggcactgtaactcattactatttcgcagtcctattattgggttgcaaatcaccaccaaattgttgcttttctgtctcattcgacttggtctaagaaacaaatctagtgtttttagaaagctgtctttttttcttaatataacgacctctacttgtagactagagcatataatccttttaattttctattataaccttaaataaaaaatccttaaatttaacaatctcaatagttcagggagaatttttaacggccaaaaaagttcagggcacgatttggtacatgtcaaagttcaaagttcaaggtaaaaaattactaattagcctaatacttataaaagaaggtatatttaaattaaatttatttaatgtataagaaaaagattatttatggaagtatcaagatgctaataatgttgtgccaatttcaatgggtctggctcctagcaacgcgagtaatcgatcgacctcatcgaaatactgatctggttcttggtgagtttaatctttttgtggatgctggggtttgtgttgagaaccgaaaaataggaagggaggctttggtttccaatcgtatggggcatgtcctattctcaagtgcggctccttgtgcgggattattggaacttcacgttgccgaagccaaagctctgcttcatgggctttcttgctgcgtgcagatagggtatatggtgattactgttttctctgattgtcagcgggtagttttggctgttaatagcatgactctttgtctcaatgaatttggtattgttcttaatgatattaataatattaggaattctttcagtagcatatccctattagttgatttaggtaaagagagaaaaaacacatagagaaaagagagaaagaaagtgaaacaaaattaagatctttattgaatgaatacacctcttacaataccagtatatataactggtagaacaaaaagaacttaacagaataacaaacacaacaactctaactaactacctaattcttgacagttggtagttaatcacacctgtcattcttttcctcaacatgccccctcaagctgttcggggagtattccatggatagcttgccacatagaaaattgaatttagggaaagt

SEQ ID NO: 212015 - DNA, 746 bp, Cannabis indica
atcaatgacaagtgtggaagcttaaacattgtctaaactgatagtaggactgaggtcgaattcaattcctcctcaaaagcaatgtctctaaccttatttatccccccaaattcaacatcgtcaaaaaatgttgtgagtcccgtctcaaaaatatttctaacagcgggatcataaaacttatagcccttagatcgctcagaataaccaataaagtagctactaactattttggagtctaatttattttcatgtggcctataaagccttgcctcagctggatatccccaaatgtggaaatgctttagactagcctttcgacctgtccaaagctcataaggtgtttttgcagctgctttacttggtactctaatcagaatgtaagctgctgtctttaatgcttctccccaagagactcaggtaaggtagaatgagcaatcatgctccttaccaagagtcctatttcatctctcaacaacaccattcatgctaggtgatcctggcatggtgtattgtgggacaataccacattccttcaagaatttagtaaatggtcttggacgttgttcacctgagccatcatatctaccgtagtactcaccaccacaatcaaatttgacgttcttaatccttttgttgagttgattctcaacttcagctttgtaagctttgaacacgtccacagactgaaatttttcatcaatgagatataggtacccataacgtgagtaatcgcctatgaatgatat

SEQ ID NO: 212016 - DNA, 856 bp, Cannabis indica
tccaacttttttggagtttattgataattgatatacatatcacttcatttgtcatagcactactagcaactactctggggccacatatgacataatataattattttttgtttttccatcaatctgttatataaaataaataaataaataatttaattacttagaggtaatataccactaccaccactagacatattcgctggagaaggtttcgtaggaaaaaaaaaaaaaaaaatggagcaatgattcttataacatttcaagccaacttttacacatttctgaatttctagggaaattcaaagtggtgacttttagaatcagctgaaaaaagtgtcatttcaacttatttactaattttttttcccactaatttgacatttggtatggagaaaacaaatcaagaggggataaataatgtaaggggaatgaattaaaataaaatatttatcttctatcttatttggtgaacaataatgaaagaaaactttcatacaataaaatactatttttttttttatcaaaaataaaacttcattaatcaaacaaaggaatttacaactcaaacaacaccaaacatcaaaaatttcttctcatttacaaagttcaatcttgccttaatattttattttacaattacatctatacactgtggagcaagacactttcattcaaaaatacacaaattcataagccatgctaaagtttcctagtccacctctatcgtaagcctttttggcctcttgatattcacccatggaatcagttcatcaaaatgtacaagaccaaagataactacctagctatttcccaattttacacatcactctccatgatagggacatgaaaataataa

SEQ ID NO: 212017 - DNA, 521 bp, Cannabis indica
gggttacgcagcttgaacttgttagtgagttcggaggataaattagcatactactcccttatggcctgctagccatcaagcgccactcttagtctctcctcaagccctgcaagctcagactccagcctcgagataaaggtagcttgtgtggtgttctccttgttcttagcgctaagcatggtctccaagccagaaatcatgctctgtctctccataaggagagcctccatctcagacatatggcttcgtccttcgccaaaagggaagcctccatggtctttacctgctcttgaagagcttttgaggacccccgggagctatcgcgtacagagttcaaattcatcaaggcttgaaagcaaaataagcaaaagttagtatcaaactataacactagtcggctagtccttcttttgggactactatggccagctagtccctcacaggtacatccatggctggccagtcacatgcaataagtccctggccagccacttacacaatgccaaaaagatgaacaaagc

SEQ ID NO: 212018 - DNA, 759 bp, Cannabis indica
tattgcggaagaaattaaagtgtattttgttattgaatgagtgaaattacaatagggagagaaggcttatatagccactgatacaaagactgaaaaggaaaaaccagaaaaacaggaaacagttatgaagtataactgaaataacagactcaacagtaaacggaattactaactgaacccaactaacaagcttagaagactaagttctgttaataatatataaataataataaaatattagtatcataatcatattaagtcaatatcaatattctatctaaagttgttctaaaatattaacatattttcaaaaatatatattaggtataataaaataactatatagattggtttggtttgaaccgttaccgaaacttttaaaaccgtgaccgaaccagagaattttaaatggttcgaattgacaagaaaattcacaccggattcatttggtctagtctcaaaaggtttggtcaggattagttggagtttgaaactacggattgcacattctataaacatccctactgagcaataaccccaccttaatggccaaaatttcaataataagattgtttaaaggtctatgaaagattcaacttttggcacctatacaatctccactagagtctctcacagctgctgccacactacatacctcacgactctcttcggctgacatcagcgtttattccaagcacaccggcaactaggaaagtccatttggcacttgccctttgttcatgctgagatgtagcatgg

SEQ ID NO: 212019 - DNA, 815 bp, Cannabis indica
agtaactgttttttgtagtgatgtgcaggctggtttgaaatggttaaaaaccgcaccacccgcaccacgaacacccatacttgttaggatgaatatttctctcataggccaatttgtcatgagcgacattgtacttattatgtgttcacttgcaaatgtcacaggcatagactaagcagtcataccattctcttatctctttattaaatgaaactagcaagatatacctggcacgatttttatcatcatatatgccatcggttaaaagttcttctaactgcgtatctaaaatgtttacacaatttaatctaggaagtttcaacatatatagactagttgcaatagatggatctctttttacgagagaagttctatattgattctctattcagattggaagttatgatcaaatatagttactttataataggaatatgtcattcacatttgattgttgttctattttatatgttattagactgaataaaaataattaaggcaggaaataagtaattagatataaatacaatacaagtaatatatatattgggacacaattttgtttcgtgatgtacttttacagaatgtattccgtagtacattatacgggtcttagggtacattaccattttttaatcttaattacccctagatcaatcccagccctcagatcaaataacttccccatctaccggctgtacatcacggagtacattctgtgaaaatacattacgggacaaaatcgtgtccctatatattatagtgtgttgttcaaccttactcttatttaccttttaagatatatatacatctgc

SEQ ID NO: 212020 - DNA, 1148 bp, Cannabis indica
cttttcctctaactttactccctttcataacttccttaaaccctccatttcccccacaaccggttgtactgacgcctctccttccttaaaatctgcttctctattcacctcagaattctcttctaatctctctgtaacagccgaatcttgattcccttttagatcctttaatcacccatttttgttcttttcactgtcttttcttacaatccaccgtagcatgtcctaatcctttgcagtattgacaaagaataggtttccattcataggtaattaaggcataaacatcaaaacctatactcatcttcaaaaaggaattctcgctggaaaatcttgctgaatatcgacttcaactagcacctcggataattgagtttattcctcgccttagtcatttcatcaacttgaagaagcttccccaactgcccaacaatttttaaacagagatttttctccccaatacttcagttctaaatctggcaattgtatccaaatcggaaccaacctgatatcttctttcttgaagcttgtttcagaatcccaagccttcattacaaccggtctattgttgaagaaacatatcccccattaagtatttcatctctagtttcaatagaatcaaaccggactaggaacaccccataagacaacgcaccaaccttatcaactttccctttccaaaccctcctaataaatccttcaatcacagacaatgggggattggagcctagaacataacaaactatagaaggactccaataatgaacctcatcctcaatgtcctctatagttatcttcaccttgctagaactaccagaattcttaaaggtattttctaaaatcctcactacatgtccagatcgaagaatatgaggagaagtaggattaccttcttttagagaagccgcacaggatcggttagcctgaagaaagaattgaaaatccctgctaatttcctcttgtctcctgattgattgcagagaagatcttggtgataaagcctgaacaagatcgatatcctccgtcacatcttcatgcacctgctcagattcttcgttctcttcctcctcaaaaaattccactagttcaataccaataattgcatccagtgtcttcatctttcggaccttatcagatgatgaaggccc

SEQ ID NO: 212021 - DNA, 953 bp, Cannabis indica
aaagatcccttactcgcagaggcgccgaaagaccaacctagagaagtagttctcaaaatttcaagaggtatttaagaagctgcacattaacatcccctttgcagaagcctcggaaaaaatgccaagctatgtgaaattcatgaaagaaatcttgtccaagaagaggaaaatggaggactatgaaacagtggcattgaccgaggggtgtagtgcgatattacagaagaaagtccctcctaaactcagagatcttgggagtttcaccataccttgtaccatcgggagaatagaggggataaatgcactgtgtgatttgggagcaagcatcaatttgatgcctttgtcagtttttaaaagattgcatttgggagaagcgaagcctactacagtaaccttgcaattggctgatcggtcgttggctcatccaagaggggtcatcgaagatgttctagtcaaagtggataaatttatcttcccaatagattttatagttctcgacatggaagaagataacaatgttccaattattcttaggagaccattcttggcaacaggccaagctttgattgatgttcagaagggcgaattgaagctgagggtgcaaggggacgaagtgttctttaatgttcttaaggcgatgactttttctaaggcaaatgacaactgtttctttgtggatctcgtagacaccatagtggaaaagagaaagctaatggaagattcattagaagtgagtttgactgaagaagatctaaatgagcaagatggaactgaggcgctggaatacgtaaaatgacttgactactatgggccattgaatagaaaatactttgaagagttgggggtcattccaaagaagcatgtgccatttgtagaaaaactactagaactttagttgaaggtgcttccttatcatttttggtatgagtttttgggcaaggacaagatgctgc

SEQ ID NO: 212022 - DNA, 907 bp, Cannabis indica
agaacgcttcaagagaccaaaaagaaagatcaaggacagtaaagatgagacacacaatactgcatcagcaccaaccaagaaccttttaaacaaaaagaaaaagggattaatagacttaattaacagaaattaataaggtttttaaaggtgtttaattatggttaatttaagtaattttacctgaaagcagaggagtaagagtaacgagctttgaactgaagaccaaatagtgagatggtttgtttatcagtgagtgtaagagaaattgcagccaaggcaaaaacaatggctaagcttctgagacagatttgagctatgaaaatactactacgtgatgagcttgatgatgatgagattggaattgttgttgtagatttctcttcttctgatgaaagtggattcttctccattatttaaataataataaagcttattattaactttctatgagaaaataactactcttgttgatgagttgggttaatttatatatatatatatttatagtgaaaagatatacgaaaaaagagtggacttggaactgtatatagaccaatggtggtacacgtacacttgtctcgtcacatgggtctcgttgttcccgatcctatttgcaaaagtttggttaatggatcgggtcgggtttgaaacggcccatctaaatttcatgcatgtaattgtaagaatgtatactaaagaaaattttataatagtatgcatctttcaaaaatgggtgtattgattcaatttttttgtattataatatttagatagttataatattaatttttatattatagttatttataatatttataatttttttgaaattttagaataattaatcgtactatattatattgtattgttttttttatttttatacgtagtatgtaaaatattgttt

SEQ ID NO: 212023 - DNA, 816 bp, Cannabis indica
gtttatgtcgcaaattactcttagaaaaataagatcatatttaaggtgttgtgtggtgtattggtagagatatttttattgggattctcttttgtttaggttaaaggttccaattttactacagcccctcatgggaggaatatatgcttcgacctatgggaggttagcttgttgtagcgatgtcattcttaatggaatggaaaccctcagattgtatacggatgactcaattaaaatagatgaggtataagcttattaagtagtttttttttattaattagtagttatcacacgtattaaaaacagtcggcacatacaacatattttaactttagggtaagtttacagagcacctttttaaaggagtgtttcggtagacccttatctaattcggtatacgaaagagctttttagtcgaatttttttcatgatcacgtatgttatagttatttagaacaaggactagccctgagtaaatttgggtcctaacaaaacgaaatttttttggccatttataagaataatggtgttttgaaaattattaaaaaaatatgtatatatatcaaaagttttttttttttttatttgggccctaagatgagtgagtcttaggcgcggatctagcctgccttagcttagttgggccggtcctgtttagaaccacttgtgaatttttaaaattttttgagtaatttacaataccgaaaataagatttacatattttgttgcacaagtgactattttcccttatacgtatgataaataactatttatacataatttttgacattgaaaactattcgaaattttctaaa

SEQ ID NO: 212024 - DNA, 1427 bp, Cannabis indica
attttatcaaatgcatataaatttatactatagaaaaaataattaaaaatataataaaaaaataaaaaatttatataacatatttttttatatatatttgtaattataatgaactagattaaaatattattattatttgtaatagaatcttaacaactcacagcactttaaaaaattataatttaccaaaacactcagctcagctttttttcccacagttctgctacagctgcttttttccccacagcacagctacagctgcttttcccccacagcacaactgtgccaaactggcccttagtaggcttactcattaatactgtataaattagtcataaaaatagttatacaaatctaaatatagttagttgactcattaatatatctattataatttaattaaaaatttgtatgaatttttgtaaatatgttttcaaatgtgtacatttttaaaattattttttttttacattttttgtaattatttaagaaaatgtacacattcatctaaaatgccctaatttaaatgaaaagaaacaaaaggttatgtatcaatttggtactgattcacaatctaatactattaaatattaatagcgtgaaattttgtacacactaaatcattaaagtagaatgatgcgaaaattctacactaattttataaaataggacactgtccgagataagcaaattggtgttgaaatctttattttatgtttgattttgttgcacattgctatatgaaatgagtaatgataatattgatatgtaaatatataattacaaattttagcacacatatacattataaaatttgtgtataatttatgcctgcgttttccattattcaaatcaattagcactggatgattttttaaacaaaagtaatatgtttcatatcttacaatcctcagcagggccaacaaagcccttccaaaaccagtggctcttccaaacctcatccatcttctcaattggtacattctttgtctcaggcaaaaacaagtaaacaaaagcagtcatcaccaccacccaacccccaaagaagaagaagattccagctctaaaatggcaaagcatggccagaaatgtctgagccacgatgaaagtgaacagaaagttcaccactaccgtaatactctgcccagctgatcttatctccaatggaaatatctcactcggaaccaaccaacccaaaggcccccacgaccaaccaaatccagccacgtacactcctatcaacacaatcaccatatacgcaaacccttccccctccactcctccgtggtcaccgagcttcgccgccataacacctccgatcatgatctgagaaacaaacatttgaattcctcccgccatgaacagagctctacgcccaaacttgtccactataagcatcgagataaaagtcgagaaggcacccaccg

SEQ ID NO: 212025 - DNA, 681 bp, Cannabis indica
ttcctacaggtccctctgagtcggaattccattcagtacaggaaacacacaaaaccacaccacaattttaaattgaccccaaatcacaccaaacctgtaataccctaagattaagaaaattgattagcaaaccctaactagttaattgtgtaatattgtgaaattatattattatataatttattataagtgaaataatttgatatataacatgttaaaaccctgttggtgagccaggggcattttagtaattttgacccgagaagggtaaaactgagaaatttatattatgatgtgcttatgaactatattattatacagtatgtctgtttgtcctttttcaggtgtgttctgacaaattggcgcaatatagtcacaaccggtatcgggccgaactgggttcgacatcaaatacaattttgggattatttgctggcattttattaatagtgtgaataatttgaatttatttgagtatcatgaggttttaaatgacaaaattacccttgaatacttatattgtattatatggccctaagggcattgtggtaatttggccttttggattatttgcaacaaaatagaattatttgtaaaaaaaaagaaaagttagcttttgttctcagccctatgaaccgaacctctccctctctctaaattcatttttctagttcttgaatt

SEQ ID NO: 212026 - DNA, 1089 bp, Cannabis indica
ccttttttatctttttgaagcttctctttgggatccgaacaacttacatttatgtttgaatatctatttagcttctgactttattaaatttggtatttttacatttgtccgtgtgatatgtcttactaccccccgagtgagatgaaaatcaatttttaggccactcagtcttacaaaattaagaggttgcatatatttgtccggtataaatttactttacagaatggaaactttattttgcaactattggtaatactttcagaggtgatcagcgttccaggccctaggcaccatgattccatccattatttttagcttataggtcccagagccgatttcatcctcaatttcgtacggtccttcccaatttggcccaagtacccccactccgggctcttgggtagctaggaagacccttcttagggctagatcaccaatagtgaatttcttgtttttcacttttgagttgaagtgtttagccaccttcttttgataagctgccattcgtatttgagactcatcccggagttcgtcgatttgatccagtgcttcttgtaataaagccttgtttgttgttggatcgtaagtcgtcctcctatgggacgggaacaatgtttccaccgggaccatgacctcacaaccgtatgccattaaaaatgacgagtgtccagttgtggttcttggagtggtccggtaggcccataatactcttggtaattcttcaggccaattgtttttgcaggccagcagcttcttctttagggtgacctttaggatttaattgacggcttctgcttgtccatttgtttgtggtattcccaccgcggagaagcttttgataactccgtgttggttgcagaagtcagtgaattcctcgcagtcaaattgcttcccattgtctgagactatcatatgaggcaagccatatcgacacactatgtttttgataacaaagtctagtgcttttttagcggttatagtcttcattggctcgtcctctgtccactttgtgaagtagtctactgctactatagcatactttactcctgcctttcacgttggtagcgacccaataagatttatccccca

SEQ ID NO: 212027 - DNA, 725 bp, Cannabis indica
ggatggtttcatgttggtttatgggattatatgatgaatgtacgtgttttacgaaatttttccatgaaaatagttttttttctttctgaaaatattttatttggatccctgtgaaaaattaagcaattttattttctacggaactcgattccgataaaaattgagaaagttattaagatttgaaatttcgggttgaatgggtgctcaatcgcacgagacagcccctcggacaagccaatgcgcgcccgcatcttcagacgatttcttgtctgaaggcgctgaaggctcggacacggggcctcgcccaggacgctgcaaattggcctctaggaggctgtaaacgccagggcggaagtcggagctattcgattggagttgggtgaagccaacaagaagttgttttttgcctagaagatgataactcagttgactaaggatctcgaggtagctgaccgttttgaggagaccatcgagaccttatctgccgaagttaaccgtcttcaagatgagaggacttctcttcgagcaattcttcatcggatgaaggaggagaaggaagccaagaaggaggagctttcggccgaggtggcaaggttgaaagagaaggtcaatgccttggagatagccggtcttgagctcttctttgacttttggaaggctaatcctcaggccaactttgactacctggatgatgctaagggtatgtaccttgagttctgcgtgtc

SEQ ID NO: 212028 - DNA, 897 bp, Cannabis indica
gattgttatctataaaaaaaatattaggtggtcaagattatgtaagtatgaagaagcgagtggcatgcttcatggcttacgtgtttcgcgaggagctccgacaatttctcatctattttttgcagatgatagtctagtcctttatcgagctaatacgagatctgttgaagctattcgatgctctctaaatctttactgtcgtacatcgggtcaaaaggtgaatgctgataaatcggttctctctttcccttcaaacacttcattgccaatctaaagtaatttgcaacaaatattacaaatggcaattcaacattgtcatgagagatacttgggattgccattttactctggtagggacaaaaaagtattgtttggtgaaattaaggataaatatagaaatttctttcttggcaagaataatgatgttctattggaggcaaagaggtccttctcaaagcagtagcacagtccatcccaacatacgccatgagctacttttgccttttgaaatctctcaataaacaaattgaagttatgatgaataagttttgccggggttctaactccttgaattcgagtatcaattggaagatttggaaagccttatgtcaagccaaagttgaaggtggtatgagattcaaaagttttgtccatttcaaccaagccttactcgctaaacaagcatggaaaatttttcgatccaaactcactgctcagtcgagtccttaagcaaagatatttcaaaaatacatcttttttggatgtgacacaagcatttacccatcattgacttggagaggtatcatttggaaaaaaaaaaattattaaaacaaggcttaagatggaaagttggtaatggagatgatatatcccccaaagaattattactataggtgt

SEQ ID NO: 212029 - DNA, 633 bp, Cannabis indica
tcaaaattgaagagcactgccatgtccatatggcagtggtcagctagggttagtcataagggggaaatggtttctctcacttgtatgcactccttggtgttgaggaagcacatttgaataattttcccttcatggtttgtaaggagcgaccattgccatttccttgtggcagtgcccatcaaaattgaagagcactgccatttctttgtgatcgtgcccatcaaaattgatgagcactgccattttcaaatggcagtgggtgcgtatgccttttttcttgatggtttgatgccatattgactttatccacaaacctaagccattttcatgcccaaataagccaagtccttgttggtttccttggtggattgaggtttctagggtaaaaacgcttgcgcgggcccatgaaccctagtttgggcacacttgggtgtgtgagtcccggcacaaaatggttggttaatattttcgagtcctctagaaatgtcatagggccctcaagaaggatgtcttaactcatttcacatttaggtcttggtcaaaatcacaaggttgacttttttaatttttcaaaaatcgaatataaaagtatttatttttaaatacatagaatttttaactaattaaatatat

SEQ ID NO: 212030 - DNA, 660 bp, Cannabis indica
agtatttctgacggttttaaactgtcgggagatatagacgacgatttttaaacgtgccttaaaaaatcacgtgtagggacttgtcaacggttataaaactgtcgactaaatcgttgcctatagtaaaactgttagttttaagccgtcggcgattcccatacttcaatttcacccgtttcacatctgaaatttcattttctgcatgcatcttagattttaaatttttattttttccatcttaaattttatttccctcctcttaatatataaacccagcaaaaaaatcatctcttatttttttgaaagtcatttataaatttcatttcatttcatttctcggctctcttttctctgccaccacgagccacactctacgtccctctcctccactctctctcgctatgtccctctccttcgctctcttgtgacaacaaaaaggtaaacacaacattctcttattcattgttttaatttctattagccatgatttggtttgttgatcgagatctgtgtgtgttcaaaataagtttcgaagcttgcaaatcgaagaaagtttcgaggatcatcaagtgaaaagcaatctgaaacttctaaaagaaaacttcgaggatgaagacgagcacaacgacaatacagaaggatgaagcttgtaaaggtttt

SEQ ID NO: 212031 - DNA, 1269 bp, Cannabis indica
gagttaggtcatggctttggattcagacacaacagagttaggtcatggctttggatttagacacaagtccaatttacaaatacaataaaattaggccttattggtcctagaagagcgacttgcccagaagattacaggcccaacaaagtatatctagataccctcatggagtaatccagaaagggaaactaaagaggcattcgaagacattcggatatcattctatgtaggatctttatgacaccagatcccacgaaatcagcggcttgtcccctatgttaggcttgggaaatgcacaccgcaccaaaagggacatgcgttttgtccaacaccttcttctctaacgggtactgtgcccgatcgacgatgcatgccacctgtcattgtcaagtggtcctcttcgtgcctttatcgtcaaaatttcactttgtgactcactgtcacctatacagataatacatgcatcgataggggtagctggagcatcctcaataaggatcatacccgtcaagaaagacctcatcatctccacccatagcagatggtgatggtgatgcagctgctagtaggggtgatgcatctattgggggctccggtgctgaagttgtcgttggcgtacaatgcaacatgctcaatatagttctcagttactccataatcaggtttcgaccacccttcagctctatatggccattttaatatgcctcgttcagctcggtatgacaagcgtacaaacctttttggtcagcttcgatcatgtcaaacctccccactaattccctttactcgacaccaccgaggcttgatgaagatgatgcactaggctgagggtctgaagcagtgacctaaaaaaatatataccaaaaaaatacggtaagcatgcagtaatataaaaaatcaactacataaatatcgacaacatgttgatatgtcatcgacaatgtaacaaataacacaataaagtacaagtcgaaacacttatcaacatgtcgatatcatattgaaactaaaaaccaaacaatgtcgacaacacgtcgatatcatatcggcaacactcaatataataccacaaaaaaatgacaaacatagttgttgataacctgtcaacatcatgtcgatatcatatcgacatacatgtacgacaagtttaattaacacagtaaacacaactaactaagtaaattacaatctatgtaattcacaacaactaactaataaatcacaattaattccaatcaataatcataaaaaaaaagttaaaaaataggt

SEQ ID NO: 212032 - DNA, 713 bp, Cannabis indica
actcggctcggttgaatttctcggatgcactttgtggggaggttgtggcttgttgtttggccgtctcggtggcgttggaactaggatctaagtttgtaatagtggagagtgactcgagactagttatcaatgctctcaatgggaaggagtcccattgggctcttgagagctatgtctcattttgtactaagtcttctccctcttttattagttgtaattttattaatgttagtaggtactgtaattttgttgcccataacgtggttaagtgggcttttacccaccatttgtacggctctatctggttttttccttaccggagaacttattttgtaataactatgaggtctgactaattcattttatgatattacgcttttattcaaaaaaaaaagacttcaccgtattaatataaattaccgaaaaaaaaattattaagttttttttctcttcatattcttttttttcttcttatttatttatttattttatattattttataatattaaataaatttagattccaaaaaaatattatattttttgtgtggaaagttttttagccctattatataagttaaagaataaaaaaaacataattagatataaagtatctcgttcaattccattaactactcactttttcttcgcttatgatagtattctttaatgccgcgtttttttccggtcatgttcttttttgtttgcgctct

SEQ ID NO: 212033 - DNA, 613 bp, Cannabis indica
atttaagaaattcggtaaaatttaacacattgaaaatatgcttcaaacaatctattacaatagacatgaatattttattttatactcgtgtaaaataaaatactatttgaatactgttttttaatattgtaaatatttctaaaattttttaaaaattaatactatgcatgccttaaataagtataatcgatgatcataactaaagtttttctttgatgtcgaactattttcgagtgtattagaggagcactcgatattattttgttgagtattatatatataaaattatatatatatatatttatttttcttaatgtggaaaatcaattagttttacacttaatctataggtgatgatgatgaaagacaaggtgtcatcattactaaactattattataataagctcattgtttcaatcatttaaaatagaatgaaatatgtaacaaaggaaatatgtggataagcttggagcattatttaatttaagtgcatttttcttacaaaaattatgattatgaaaatataattaatcattaataaatataaagattaaaagcaataataataaaagagtttaaaatattagaaagtggatcactatcttatgtgtat

SEQ ID NO: 212034 - DNA, 629 bp, Cannabis indica
aatttaaaaaatatatttttattagttgatatatgatatatatattttaaaattgacttgatcatccatatttcaaatatatgtatttatatatttataaaatttaggagtagaaaagttttatatttttttaaaagataatgtggaaaaaaaatgtgtgatagttctatatcaggtgagataatatatatatatatatatagatatatatatattaaatttaagagtagaaaggttttattatttttttaaaagataagtgtggaaaaaaatgtgtgatagttctatcacgtgagatagtctgatattttttttcaaaattaattaatatttaatattataaaaaaatgtagaaaaaaagagaaaaagaataagataaaataaagtcattttagtgtgtaatgtcagcgcatcatatctctcttttaaaaaaatgtagaaaaaagagaaaaaaatagagttaacaaaaaccattttagagtacatatcactgtctcatatctctctattatacatagatcgctctaaaatgagcaggagcgaggcatttgagattgttattttttaataaaaaatattatacaacatgaaaataaaattaatcgtgaataactaccatataaaatagg

SEQ ID NO: 212035 - DNA, 514 bp, Cannabis indica
aaattaattaatataaatttttaaatataatatatttaatatataaaactataaatatattttaaaaatatataaatatgattggatgaccattggatgataattggatcggtttggtcagttatccattggatcggtgtctcatccaacaaccaatctgatctgattggattggattttcaaaatttacatctcatccgatccaattatgattgtatatacgattctattggatcggttaggattggatagatcgattgtaattggattggatgactttctgcacacccctagatgaaacctaatggaaggactaaattttataaatgtaaaagttcagggaggattcttaacaagtcgtatattttaggggataaaactagtattattgaaagttcaagaaaaaaaattgctaattattcaaataataataataataataatcaaagagagacaaaacaaattgaaaaagttaatagtctactacaacgaagagcattgtaggggcgacaat

SEQ ID NO: 212036 - DNA, 525 bp, Cannabis indica
aaaaagcactctggtttgtagatttgacgcttggcaatacaactttaagcctatttgcaatcaccttggaaacaaccttataaaggacattacatagcgatataggccgaagatcacccatttgttcaggactcttcttcttagggataagaacaatattagtctcattcaaaactgaagggaactcaccagtaatgaagaaagcctgaaccagccgcaccacatcgtcacctaccaagttccaaaatttttgataaaatcctggtgtcattccgtcaggtcctggagacttatctggatgcatttggaacaaagccgtcttaatctccttacgagtcacctcctcaagcaacacagcattttggtcatcagtgaccgattgggaaacacaattgatgactgtagaaaaatcaccaatggcatgtgtgaacaaatgctgaaaaaagtccaccacaaccgtaggaagtccatcttcccagccaacccagtcgccaatagaaatcttcagcttctggattaagtttg

SEQ ID NO: 212037 - DNA, 526 bp, Cannabis indica
attcttatataaatgtatactttgttagtacgtgacttaaataaactaattacaatttagaaattattcttaattataactagtccaaattgtgacttaatttatttataatagattaaaaattattcttaaatagaatattcttagatacatgctttaatatataaaaaagatgttgactaattatagggtactacgtcacaattatgttagggacctaggtgcaccataacattcatctatccttaatacatgattagtaaattggataatcaccttatatattgttttttttttttcaattttatgatttgggttgttctagtagtttttatgtgagttgctatatgaatttgaatagcaatttaaattgtttcattaattattatgtagattgctatataaatttttcctaaaaggaaaaaaaaactactttaaaaatgtgaaaatgataatttaaaaaaaaaaatgctgaaatggcccacttagcggaatacttacaactgaaaaataagaaagcacttct

SEQ ID NO: 212038 - DNA, 1146 bp, Cannabis indica
aaacaaaaaaaattaaaaaaactttttcccggcgcatgggtcgccggcatagataaatttaaaattaaatttatttttttaattaacgttttgtttactcgccggcaaaaaacaggctccaaatgtcctggttcgcgccaaaatctttgccagcgagttacacgtacttttgtcggcgagcttatgcgccggcaaaagtggcttttcttgtagtgtattatgtttgagattatcttcttttagatttagggttattttaaaactcgagacatgattcttgaatgttttgattaatattattattttattctttcatattgaattgtttatattcttctatacataattttatgattaatattttgatcttgtttagacggtcactaaattagactttacattattctatagtcattcttaaaatttctatcacctaatagtctaagattctaggtataagtgataaattatttttaatgatattgtgacaggtattattatttctaatgaagaatataacctatattaaataaattatatgctacattaatttgttgcttagattaacctgtcttttttcttaggttaaatagattacatgcttcgttgatctattgcttagtgaaaagatttaattattgagcgcttagtcataattaattgtaatagcgagactgagataagtgattaattatttgcggggttaatagtttaattttaaaaaaaatataatattaatcattgttgttcttgattgattgttcgaggtggagaataattattaactgtttttaaattcgtaattttcattggttgtttgttttctttttatgctattcaattgcaactaagagtcccctttaatttttatttgatagtgaataaaaaattaattgtagagctcgtagaatgacccgtacttactttcatactaaaatagttcaaagtattggaattaaattaattagtaaatttgatacgacatatgacagacattacccaataatttcaatagtttagagagcataatttggtacatgttaaaatttaagggataaaaattctaattaggcaatttatttattacacttacgctaatatataaatatattcatgtatacacacgataaaacaattctataagct

SEQ ID NO: 212039 - DNA, 440 bp, Cannabis indica
tataatatatagtactataaaatctcacctaaaaaatcagtaaattaatacagaacagagttggttctaaaataaaaaaagcatatatgcccctactttgatgcttctatttcgatgtatatgtctggtttagcagatgaacaagttcctacataccttaaaagtgaactacactaaacactatcaccaaataatccaaataatactgaaagataatacttcatgatatgcctgcaaagttaagaaacaaaactaattagtgcggaaaaatttatttatcgcttgaatagtaaatatatacctctaacatattctacttgcttcacaaaagttcctctaattttgaaatttgctcccttaaagattcactttcattgataaactttttcatctgcaaagaattatatttattagtacaaagtccttgcaaacaatgacta

SEQ ID NO: 212040 - DNA, 545 bp, Cannabis indica
atctggcttttttatatctattgtagtggaatacagagaaaagagttagttacaaagtttaacagactttatactaacttgctgatctgtcttaggtatttagaggccaaaaggccaccttagtatttttaactgtgtactttttgataaatgttctggttaatatgtggttttatttcaacaagatccaatgaatcacgagagtttttaaatcaatgtttacttaaataaataagaatataatatttacttaatttgcaagattcacatatataatttacaatattatatgacaatcaatcaaataaaaaaaaatacaaaaatgaataaatataatttctataaatataaatataaaaaatttatttattttataaacatgtaaaatattttgattaaaaaaattttaaaccaaaacaagattatataaatatttcaaaaatatcacgataaattaatttggttaattttatcaaataggccaataaaaatgtttacatgatctaaagtaaaaccttgcctattaataagttgatcaaacatgc

SEQ ID NO: 212041 - DNA, 551 bp, Cannabis indica
taactttgcgagcaaccctttttccatctctttttattttaattcaatgacatttgccacaaatcagacaaaaattattcttttattttcttccaaaacaaagcacaattgatcatgtttgcatatgtcaatcaattaataaactaaccctatattacataatataatctttaactcatattaggactttggtaattttatcctctttggaaataactcaacgaagatggatggtattatattgaaagaatgattgctccatttattgagaactttgtacggcatcaacttcactaaaacattatggctgatttttttttttaattataaatttaacatgttacaaaaatgaacctaacatattacaaaattaacaaattaacaaatttatcaaattaccactcaatgttaaactttttaaaaaatacattcatatctcaaatcttcaattgctacttaatttctttcacaaaaataatactctaaactttcaagacaactattctacattattttttttgaaattcaagtattaaacttctaaacaacct

SEQ ID NO: 212042 - DNA, 737 bp, Cannabis indica
caaaccccaagctcgactaccaaccgtccccattagctaatcaattaacactacttatgcaattgtatattatggaaatagcattaaataattgggaaaaattcttgttaactatttccaaagggctttttctattagtgtacaataaaaaaaatattatcacaaaaaatgtaaaaaaaaaatcaattttaaaaatgtacatatttgaaaacatatttacataaaatcatacaaattgttaatttaattatattagatttattaatgagtcaaattaccataattagatttttgtaacacaataatttgtttaaaatgtttattattaattttttagttgaataataatgttgttattgtttattatatattattatgatttatgtttgaaatgatatcaataatgttttatatttattataacagtagtttagtaaatattttaataatataaaatatttataaaaacataaaataaacaatagaaatagaagtggaatttaaataaataaatattaaacagttttatttttaagaaacaaaaagtaatataattaattattaaaaaatatatatttattattcattttattttgattaattgtaatttaatattttttatttgaaatataatatcaaaataatacatattaatgtatataaatttttgaaagttatgtttatttaaagttataaaaaacaataaaatagtgtattatatattattgtgattcatg

SEQ ID NO: 212043 - DNA, 529 bp, Cannabis indica
gtgcaacttgtccaaggctgcaataacaaccgttttagcagactcaacagttctctcctaacatgcagggaagttcctcccaatctcctcttattccaaacatgtttggatgcttctcccagtctcctcaattttactactctgatttgtttggaggatcacaatcacaacaactgatgtttggtcaatttgggagttcatctcaacagccgataatgtttgagggttcaattcagcgaccttcttcagatcaattttttagtacacaaaattcatatatttttcctggtcagtttcagcaacaatctctgaatttttcgcaacagcaacaatctctaaatttttcgcaacaacaacaatctccaaatttaccacaacaaccacagactcgacaatttgttgagattttatctttgcagcagccatattacccttcatcgctaatatcacaagctcaggataatgcacaaacaacccatttaaacttaaaccctgacggttcacaatttttagataatgtgcttgatga

SEQ ID NO: 212044 - DNA, 538 bp, Cannabis indica
tgccaaagagatggcattatttccaccatcttatggaaatctatacatcttgttggcggtggattatgtctctaaatgggttaaagcagtagcaagccccactaatgattcaaaagtggtgctgaagttcctccaaaagcaagttttcactcgctttggaacaccacgggctttaataagcgaagaagggactcattatgtgaataaaattcttgctgccttgttagctaaatacaatatcaaacacaagatttctactgcatatcatcctcaaaccaaggacaagctgaactttctaaccgagagatcaagggtgtacttgaaaaagtcgttaatcctagtcgcaaggattggtgtcaaaggctagatgactctctttgggcctaatggacatcataaaaaacacctttgggtatgtccccatatcgattggtgtatgggaaggcttgtcacttgccggtagagctggaacacaaggcctttgggctataagaagctgattttaatctccaagctgttggagaagcccgaatgctgc

SEQ ID NO: 212045 - DNA, 587 bp, Cannabis indica
gcctacttactccagtatcaaaacgtctaatgaatctagggtttaagttccctctccacgtatctctttcatacgaaatactcagagataaacaaaatatcccatttggaactcgatattcctacgctttaaatcagcgtaacttttttgtgtactcaatgaagcaagcatacaactcaaattcactctatagttttataagttccttggatcttttgggtccatcatattcttttttcacatgtgttactccagtgaataggtgtctaatatttctcttgtagcacacttattaaagtacttaacaaatggtatatttaattatcacttttagacaaatactctgttaggggaagagattattctaaggtaattcaacctttatcaaatatgtcgcagtatgtttctaagatcctcccaagttacctatcttcaggaataaaccattatactatttttgctttaatctacatggttctcaataaccttctttaattcttaacatcatagccaaagatatcaactttgagattttacaagattagactgttccttcgtatgaaatccatacccccatttattgaata

SEQ ID NO: 212046 - DNA, 1128 bp, Cannabis indica
ggtattgaatatacatatttgcttctaaatgggaattatttctttttataatctcataactatttaaagattattttggtagaggctcataaatattctcatttttattaagagggagttatatttacatcttaaaaaacctataaatgcactccaaaactaagtttaccccattttatttattaaaatataaatttttataactatacccaatttatttatcgaattatccttatttgaaaaaggaagtacattccaagttagcttatttttcttcataccagcattaatctaaactgtccttcttctcttctactcccactgctctttccttctaatttatattacattacttttgtaaatatagatctaataggtagttaaaaattagtaaattttgtacttatatatagactatattgattaaaagtctactgaagaaatgatattattttgcaaacctttgttaccttagttatatttctttttttcttttttctttttttctaatatcacattgtttatattatttttgattggagaagttttataaataataagaagtgggtgtggtgtatcggcaaaatgattataactcagtgtaaatttatatcaatctttgcatatgtttgagtaattatttatcgtgagtgatgttgttggtttttcgggaggtaagaggggtagatgcatctcatttaatgaggcaactatttttcttttgcccagtacttctactgctcaaattttgtctaagtattgtcttattggtaagcttctctcttccagagcttttggggaaaatgaagtggaaaatttttgctcaaagctttgaaagacccaggtgaaggttgatgccccattttattgtcaagttgcgttgaatgtttttcgctttggctttgataaagtttcagacagttaatgggtgcttgaccatggaccttagtgcgttaagggtgatttgcttgtgttactctcgtggtcctctggtttcagcttcaaagagctgactttcaactcaacccgactatggatacaaatccaccatttgccgcacgactattactccagatcaaatgccaatgttctagctgctcaagcgggtaaggtcatgtctatcgagtt

SEQ ID NO: 212047 - DNA, 763 bp, Cannabis indica
agttttttttttttttttgacaaaagtgtgtttatcattattgattattagtataaatattttttcaaattccgaaagcttactatacttgattgagttctattcatcttttgcaaacgataataactttaatttcctcattaggtaagaataaatcaatattaattctaggatggctgtacgtaattactaattaattaaattaattaatgtcataattctaattaggtaggacttttaatttttttgttatgaactatccttatttgtgtagctaatattggctggttcatgtactcttattaacaatgctttattatattacacgaaatagatcaatcttatgtgagattgattttgtcagcaattcccacgagtcacaatatgtatattatttactttcgtatattattacttgtattggtaatgagtaatgactcatgaaatgagtactaattattttattagtgtcgtggaatatttactcaaaagacttattcgtctgattatattgagtaatttactgtgtaaatagtaaatttaatttatagttatagataaatatttaaatttaatttttgataataataatatttaatttatatttttgaaactttaatgattaagtgtcatattattatttacgtgtcatttttttattaatatatttaaattgatttttaaataaaaaataaaaatataatgaaatggactaattatataagtactgttacgtaatcatttacttgacacttaataatta

SEQ ID NO: 212048 - DNA, 656 bp, Cannabis indica
taagtattgtactacatgcactttgtacctaaccgtacgagtattggtaatactggattgtactctcagactgtactacatgtactcagtaccattatcatactagtgttggtagcttatgaatcgagtaataacatgcatataatgcacatattcacatatataacatgttatatgctagtcttacctcgtttttgaatttaggtgtgccggtcaacctgagtgaaactgatgctcgacgatttacacgtccctaagtcacaatattcataaaactagtgagtgacacgctaaattacttttcgggaacttaaaatcaaagctaaaagtttccctatcgatggataacatgataataccctaaatatcgtaaaaacgagaaaatctaggtgccctaaaatgcccaaccggaaaactggttctgtgggttgacaggggatgaaccaaaatttcggttcctacaagtccatactgaactagtcaactggttggggcaatggggatcaaaaaaattctctgtaataaacactctcattaatacagtgactcgtgactcgtgaactaatgctcattaatgctccaactacgtaaaattcttctctcctagcattcattaattacttcacgcaactttaattaatagttgccaaaaatct

SEQ ID NO: 212049 - DNA, 672 bp, Cannabis indica
ttctcctccactaaggcctacaccaattggtcagccagtaatgatgatcttcgactaaagggaacgaccttcaggctaggaagctctatagcccagtcgaggagtaggcactgctacagggcagagagctatgcaagtggcttgtagacgcctagagagagtgtttccttctatggatgaggagcttcaagagcaaactgatggtgagccagacaaactctactccactggcctgtgggatctatcagtggtaagttgtacatttaactttgctcatctttctggcacttttgcatgctggtcggccaaggaattagttgcatagggctagctagctagggatgtatctttgaggggatggccggccatagcagcctcaaagagaggctggccgaccagtgttgtgttttgatactgactttgtcttattttgctttcagaccttgatgaagttgagttcttcatgtgatagctcctaggggtcctcaaatgctctttgggagcatatgaagaccatggaggcctccctcctagcgaaggatcagaccatatctgagatggaggctcgcatcgtggagaactagagcatgattttggcttggagaccatgctcgaaactaggaacaaggacaacaccacacaagctgccactatctccaggctagaggctga

SEQ ID NO: 212050 - DNA, 614 bp, Cannabis indica
tgctccagttctgaaaagcttttaaaaattatgtttctctcccatttctccaaattttcttcaatattatcctaaactttctctacacacacctaaaattacataaaattaattagtaaattaaaaataaaataacacataacatatttaaataaaaataactataaaaacaacacaaagataagtacaaaaacaacagaaaaataacaaaatattgacctaattacaatatgcaaaataatatcaattcatcaacatgtttttatattacgaaattctttcttttacttagtttatctttctgtactattacaatatttttttcatggaatttattgaacaacttcataattttaatttttttttctctcttcctttttgagttagtgacagttcaaatgataatttatttcttagaaattaaataaataattacattaataatagaaataataaaatcttaggattttttttttttaaagaaatcttaggattttaaaatgtggtatataatataatggataatatataattaatatgtcaatatctactactacacattgtgtcaataaaaaaacaaaaataagtaaatgagctaaaaaaaaaataaggca

SEQ ID NO: 212051 - DNA, 585 bp, Cannabis indica
gaggtaatttaacatacaagtttgaattattgttttttgtttgtattatatttaaagaaaaagtcacacatgatcattttagtgaaacgtcatctctatcacttaatcagtttaccctacttaccaaatattgatggcccatattttttcatcaatttgctccagtcattaaaatagacaataagtgatcattgtaccaggtttattcagatccgatccagctacatattagaggttaaattttaccatttgatccgatccaattcatttcattcatccaatcgatccagcatctgttggatgttggattggttcggttacacccattgaatgtttccttcaaaaaaaaaaatacccattgaatgtatttcatgtatatctattacagtaatttagatttatcaaatattttagacctagtattttttgaatcggatcagatctatctaatattttagatccagtatttattggattagatggatccaatccaatccaaaagaaaagtaaaattttaatgttaattttcatatatacatatatttttttaatgtataacaatatattttttttttttagttataa

SEQ ID NO: 212052 - DNA, 802 bp, Cannabis indica
gttcaatctcagaccacagacccgttcccccaagatcgctccaccatagttgacgacaacacaaaccaagctcttacttttcgatcggtcgctgatgatcactccagccccttcttcctcagcaccggcgatcaccccggccttgtgcttgtctccaccgtcctcaacggcaccaattaccaaccctggaaacaaggaacaaccatggcgctcactgccaagaagaagatcgcatttatcaatggatctctccctcgcccagaacctggtaacatctatcttaattcttggttaaggtgtaacaatatggtcatgtcttggttgattaactctgtttcgtctgagattgcacaaagcataatgtactttgacttagctactgaaatgtggaacgatcttgctgagcgttttaatgaaggcaatggccctcagattttctaattgcagactcaactaacccgacttcaacagggtgacaattctgtttctgcttattttaccaaactaaaatccctatgggataaactcaaagagttccagccaattactacttgcacatgtggtgcaatgaaagtattcttggattgttacaaccaaaatcaagtgcttcagttctagactggtttaaacgaatcttttgcctcggttcgagcacaaattctgctcaatgaacccataccttacctgtcccgtgtttttgctatgatcgttcaagaagaacaccaaagatcacttggttcaactgaaccaattccccttgctgctgctgctggttccatgaatccatcaagggccaagaaac

SEQ ID NO: 212053 - DNA, 1201 bp, Cannabis indica
gtttacgagcctcctcctcaatgagaaggcgagtgatcagactttcaaaaaaaatattcttttgtcttgtgcctaagaatatttttaaaatttttccaaccatgatgtaatttgtcaataataacagtaatttggaattgttcatctaaagacgtaccttcagaaattattttgtgagcaattttctgaagttcataagactgagcctctactaacttattgtcagtcatctggaatttgaggtagcggctgacagcgtacttcttagttttggcctccccagatttccttggcagttttgtcaaaattatagtagtcacatatatcatcagataagccatttagaatataatttttacataaaaaatcattctcgacctagcttgctaatcaccagtttgcttctacttttcatcatccttagaagtatcacaaacaacaggtttatcagtcatctgaacataagcaaccttttttttcatagtgacgaaaaataatattttctatctccatcttttaaaatagtttccctcaaaacaaaaaggtttgttaatatcaagaacaccagaattcatcggtagtcatggtagaaacataacatcttaaaattgttgaaaacaattgttgtagaaaataaaatgaataaatttaccgaattaaaatttgggttgagtcgcacactagatcgctctctttaagacatttgtggtattttccacaattgtgcaagcagactatcagcctcatcgttcctagaataaaacaatgcaatcgattacactgtatcggagctttattgcacgatagagaactttcgaaataccacacccaataatcgtactactgcttagaatatatatgtattataattatatatgttatcgtatatattttttgtgagaaaatgatgtctttctcccgttggttctgatgcattatataggaacgcacagaatgaagtaataggaagaaagtcattttttgatcgttgggatcgtgtgaacgatcatgtgaatgttaccgaaaatacagagtgagaaattgtcttactaattaactaaacacgtaaaaatattttaataattaataaaaataataatataataaataaattttctccaaaaaaataaagtgacaccacacctgcccgccagctcggacgaatggcagagcgcgtgtgtgtggtggtttggtgtgtgag

SEQ ID NO: 212054 - DNA, 478 bp, Cannabis indica
ttggtgatgctctgctacagaaaggaatcaagggctagagatctgaacggaaagagtcataatattccgctgcacccactgtaaggttttctaactttatatgtgtttattttcattgtttttagaattcatattaggttgttaatccaacatacatgatagtaaatagatcctggtaaaataatttccaatagttataatattctattaattaagaaaaaaactcaaaaaaattattaaaaaattaagataaaaatatcaaattaattaaaaaaataattaattttacttaaaataatattttcaaactttactttatttaataacatgtatcttaaaaattaaaccaaaattaattgagaatctaataaataatttaaataaattaagattttttgaagaaaaaatcaaacttatttatatttgtaaactcatatcttaacaaataaaaaaataatttaaaattcaataaaatatc

SEQ ID NO: 212055 - DNA, 594 bp, Cannabis indica
ccattgagtgacttctagaaggacaaggaagagaagtacacacgcttcaccctcttgaccagggtcgtctcaattgttgagaggcctagggcggaatttaaaatgagacattttctttttacaaaaatttaaaatatacattatttaaattttaacacaatatcaattttaattcttttatctctgtataataaatcatcacataagctaacttaaagtaatatttaattataacaacatctttattgaagtgtcatatatttaagcgcttttgtaaaaaaaatatatataaaaaaatttgtcattttttatcatatattaatagttgtataaaattaagaagaataccttttatttttatacattaaccaaatttatcttcgaataaaatttaattcaaatatacatctttttatgagtattgtacctaaattattctcacactctcacataaccaagacacaatttaaaaaataatagattgtgttctttgtagataaatgtgtaggtttatgggaaagttggggcaaaattttgattagagaagaatgaaggatattgtgaaatgatgaaggtaaaattggtagaatgatt

SEQ ID NO: 212056 - DNA, 621 bp, Cannabis indica
taaacaacaaggtaggtgcctagcattatcttgtccctattagatttgtctttttgggttaattaattcagttaggtagatatctaatttgaaaagcggttaaagatatttcaagattgttgagatattctctcaagtagttgagagattccctcataaatatcagtaaccgaatttagttatagatatttatttatttaaataattaaataataatttaattaaagagatttaactactataaataggagtctgatttgagaaattaaaaaaaaatagcttttatacaacatatttcaaattctatagagagaaaaagctaactttttttcctctctattgttcttgctcatgtgttaagaactcaacaagaacaaggttatacactttatcctaatagcccacaatattcattgtgtgtggtggatcgatttggaagatactggtgtgagtccaaatttcatattcctcatcaactagattaacggatacaactaacaagaagtttcgaggataccctgatagacttgaagaggtataatctaaacttactgctttttttgtcttgatttaatgtacacacatatggagatcatgtggctatggtacgatgataatcag

SEQ ID NO: 212057 - DNA, 668 bp, Cannabis indica
tgttcaaggaagggttcgagattagtgaatcaagccgtagtgcacctgccgttagtgtgtgagagagatatatataaaataattttcattaaaaaaataaaaaaaaataaaaagaaagaagaagaagaagagaacacgtgagagagagaaagagatatatgtataatatatatttataggtttagagttatatgttttttaaaaattagagaagatttaaagttagatatttaagtttttaattgatttattaatataataataaaatattaatttattgatttatgctttaataaaatattaaaattgagagaattaaggagaggagagaataatagttttagagtgattttagaccgccacgtcaccggatcatacttctcctttatagatatactagataacttagtcgccattcgtgcggcgaaattttaaaataaaaaaaaacttcaatataaataaaaaggaaaagaaaacttcattaatacaaattaatttaaaaataataattttgatgtataaaaattttgaaatcaaattatctaattatatattattattgattttaacttttttaataaaataaaataaaattatatatcaaaaaaaataaaagaactaataaaatcaatttgttagtaaatagatattttaaaataaatatatat

SEQ ID NO: 212058 - DNA, 596 bp, Cannabis indica
tagtgaactaaatttcagagcaggccaactaatatctttaagttgtgatcatttgatcaaatcttccatcaaagtaaactcgtttttataaaaataagaaagtcaaatcatgtgctaattaaattgtataatataaaataattaaagttttattgatgaatgttatatgtttattaaaccgataagtcaagagtacgtatgttatgtttagctgtctaattaattaatatcttaatctaattttggggaattacattggctaaacgccaaaaattaaataaaatgaaggctaatcagatttttcttctcaattctcacatttactaaatcctacccctaaactttttatctaattaaaaattcctttggaactataaaaattattagatttaaggtttttgtgtaattatattcaattttactaatgcagcgattgtctatgtactaaattgtggccccaaatttttatttactatatcatacccccaaaccagaagtggcaattcgtattcgcgggtcgtgttcgtgtcgtgtcgagacccatgtataacaggtatatgctcgacccaaactacatgacccgtttaataatcgtg

SEQ ID NO: 212059 - DNA, 1154 bp, Cannabis indica
  modified_base (66)..(66): a, c, t, g, unknown or other
aagcagaaccacaaacactcaaagcaagcaaaataaacaatgccatatacaaaagatacagggtcnccaaaaaaccctagaccacaaaagggtcagcaaaagaaatgataattagtatggatactctactgtacagagagaatttaaaatccactcatattatttaaagaaaaaaataacaatcactgagtgttactttactcatcatgatcatctaccacaacaagacttgtgtttttcttgttaattccttctccatttgctattatcttgttcaacattgcagatagagagctagttttttgatagacttaattaggtggcacttagcatttgtattcttaaaaattaaattttaaaaattaagaaaaaaaaataataatctctactcaatcaaactcaccatcaccctcaaaatttctccatcaaaattatcaatgtggctcataatatattatatattttaagctactcagtacattttcttcaattatatttaactaagagcaacaaattataataccatataactaatgaacataaaccctaatatttcaccctaaattttgtacccaaaatgaaagtaaaaacttttccacactaatgactttaagatgatgtttccaatgtaaatgtacaacggcaaatgtaggtgggcaatgggcggctgtgggagaggggaagagaagattaagatcattttttttaatcttgccattcaaaatgtaatagaaaatcttgtctattgaaccaatcccaataaaatctaatttaattaactttataaaaaattacttgactagtgtagatgtaattatttaactatttgtagttttgaaccgaaaaagaaggtatcatattattattgcattatttaaacgtaattatttcttctttgtcataataagtacaaaaaaaaaaaaaagacgtatagaaataccatttcaaagaattgatatctctccttcccaaaaaaaaaaagagtgttggatatctcacagaacaggacctatataatattactatataatattgagcaaaagaaaaaataactatataacaaaaacagagtgggggcatgaaagaaacgtgtcacctcttgacaccgatttatggcatatagcgtagcaacaaacaaattactaataggtgat

SEQ ID NO: 212060 - DNA, 523 bp, Cannabis indica
aattatgtaactattatattttacgagaaatttttaacaagacatatattttaggggtaggatcaagtagtgtcgaaagttcaggagaaaacgcttattattctatctttattagtagaaacccgcttaactatcactttacttgcacttaaccctctaagctcaaattttgacggtaaaaccctctaaactactgaactgctagcaaatttaaggttacatctatttttcactattaactgccaatatagagtgcttatgtgtgcatttaaccctctactatcactctgccaatttaaagtgccatccatttttctctcaactatcaatctacttgcaattaactttctaagttcaaattttaaagataaaaccctccagactactgaactactagcaaatttaaggtgtcatctattttccactattaattgccaatatagactacttatgtgtacacttttgtacacgtgtcacatttatattagtacacctagtattattatttagaaaatataaaaat

SEQ ID NO: 212061 - DNA, 569 bp, Cannabis indica
tcagatatagaggagacacacatgagtttcttggcccgtggcaaggaatttaactagcaaattgttcaagacaacctaaaaaccagaatgtaggtttttatattttgaaatacatgactgactttgtcgcacatgcaaaccccaaccgttacatacaagatcaaaaagtctgtaagttttaattattaattatagtatttattataataacatatatataatatacatatatataaactaatataaattattactttttgaaaaacagtttggggataagcggcaatacgatctaaaaactaaattgttgccaatacagcgacagtggatagaacggttgatggcagtgattcacgttgacgattgaggctgaaaggcccaagaatcttcgtcccccgaccttagaatgccaggtggcacgccaggtctctcacccctagtgatgttttttgaaattccctcaacggtttcgatcgtaccctccgtacgtacgacttccgtattagaggtagtgagcgcgttgcacgtctctataccttgcaactcaagggccacaatactattcgcct

SEQ ID NO: 212062 - DNA, 1369 bp, Cannabis indica
atatagtaacaacactgtaacaatttcaaagaaaatgaaattaaaaaagtatttgtcaatcgagaaattagatcaaacaacctaaaaaaaaattgaaaacaaacagttaaacgactgttgataacaaggctataaattactgtaaaaccaataatgctataaactgtttaatagcataaacaaccaaaaaacaactaaataacaacacaaaaacaacatcaacaagaaatacataaaagaaatacaaaaaaaaagtgacacaaaacataagaccgacattataacaggtaaaacatgacaaaaataaaataaagagttgctgaaaaattaaactcaataaaatgataaaaatcaaggtaataataccttggatttaactttaggcttcactcccccatcatgcacttcatcctcaaaatcagaatcggacataacctaaaacaagaaggagggaaaatttaaaacacaaaacatcatatgaaaaaacacaataaccaagaaaaaactaaacaaaaacctgaaaaataacataacccaacttacatccttggcagatttcgaagatttttctctctttgccttacgagactcaaccttatctggaataggtcttttcttagtactagatggctctgcaacatcatccatttctttcttcacaatgcgcttcaaacccatcttagaatcaactttagatgaatttgtaggaggtttcttagaatttttagaaatttttttagctggcgaaggtgacttcgaaccagacctagtggtggccatttataaaagaagagaagacaatgtgggaggaagaacttacagagattatggaagaaaatagagatagtggcatagatgggaggttgaaaaaaacgtgggttagggcttcggacgggatgatcgtgggttgtggcaacgaagaacgggggaaagagaaacagaaaataaaataaaaataaaaaaaaataagaagtgagcagttatggaggaggtggcgtgtaagaatagataaaaccatgacatatgcatggtgaaaggtatatttgtaattatgaaatttttgaaaaagtaaaattgaaaaataaaaattgtataaaagtttaaaaaacagagaattgacaaaaaagtaaaaaaaaaatggcaaataaagacaccaaatgaaaaaaaaaaatggccaaaaaaagacaccaagtgcaaaaaaaaaaagtagacatttatttagttactataaattatttaatacaatgttataaataatttaatgcaatgttgtattatgaattatctttcttaattttttttattttttttttatttaataaccaaaaaaaatagttatagactagtatattttaaattatattcataa

SEQ ID NO: 212063 - DNA, 849 bp, Cannabis indica
aaatatcactaatcaatgataaagtgttatctataaaaagtacttaaaccactaatactcagctgcttcattttaaaagatagagcactctaactcattctcttcattgtaaaaatctgagtagaaagaccctcctccaagataggttggttttcttcaatgtgattagagaaaataatcttttttcccttaatttaatcatattctctacattgttatatgtatcagactttttaatgtaacttttatgtgctgtgaacagattttggattgtaacaatggtgaatatgctgctgcaaaaacataaagccaatcacttgaagacatgcacaccaagtgtttgacaaagtgcctctaagaaactttttctgtgtttagttttgttcattgaaatttcctttcaatggtggcccatgtaacttgttctcgtttaatctcctcttcactattcaatttggaacatttcacccccaacaacccaactagaagtattctctgtcattttttctcatctaaaatttcacccccaacaatccaaaactctaatttatctctagtcaattgccttatacatacattcaaactcactaaagctcaagcctttgctatctcagttcctttctcatcacttaaatcccctcataagcttcaatcagctcacaaacttctcctagaacatggcttatcagaaaaacacattcaatctttgattctaagctcacccaagatcttgttttctgatgttgataaggtactcagaccaaagctccaagctttggggaagttgggaatggatggttatgatttgggcaagttcatttcgaagaatccaacggtagttgcgacgaa

SEQ ID NO: 212064 - DNA, 564 bp, Cannabis indica
ttgagggtttttgattaaccctacagcgtcgattattagagattaaccgacgccataggtgcactcattacacgacacgtgcacctatgcgtcggttaatctataataaccgacgccatagggttatataaaagagaacatgcctttgtcttccttacttcaccttcagcaagaacaatataaccacagatcagagaactcagaaaatacgacgaaaccctcacccacttttattaaaaatcgatatatctcttttattttaacagtatttttttttaaatcttccattttcaatatctaattacactaaaaaagtttagttttttctcctatttcactgtgctcgaacctattaaaaaaaggtggtggtataactccggccaccgattttggtggagaaaacattgaatctcaacgtccattaaggtataaatatgatttctattcattttattaatgcacattgctttattttcgtttttataaattttttttgagatttttttcattttattaatttatgttgttgtgtgcgttagacggccagatttttgtcgcaattta

SEQ ID NO: 212065 - DNA, 579 bp, Cannabis indica
ttttgttgtctttggtgtgtggtgtgtattctgtacacttatgctattcgttttcctttttaattcaaatttagctgctgtgttttttaactttgatgttctttgaatcaatcttaagtaccagattgggatcagtggcgccagcattttggtgagatcgacgagtaagaacgattggtatccatcttgaagaagttcaatttccgatgtcgatggtggtggcggaataagtggaggcgttttgagtgttttggcctatactatattttttatggtaattttatttattatattaattacatttattattggttggtattttatatttattgcatatttatttttttcttatttataacatttacaattagtttgtgttttatttgacagttttttttgtattaattgttttgaatttttatgaccatgttttagttcaatatgttattaattagtattaaattactttttaaatgtttttttttgttgtttttaatatttgaagtattttttctattgcaatgtaataattagtattttattccttttcaattttaattttattgtcagtattaattt

SEQ ID NO: 212066 - DNA, 1077 bp, Cannabis indica
ctacacttgatatggatattaagacaatcaattgattgaaatgcacttctagttttatgttagtacaagtgggagtttgttaggattttataccctaaataaaactcattttaatataaccttatttgttatcaatagaatagaagtcatttaagttagcatgttattttcaagattatggtttaatatacaatttctaataaatctaaaacatatagttttttacaattatagtgatgtcaatacagtggaaggtaattatgattatatgtttcaaagcttttttccaatgattcatcagtgcactagatttacaccgatgtgataatcaacgataaagtttacttacaccttatataagtattatggcattttcacgacattagtaaagtatgctagtatcagatgtatggcgtttacattggactggaccaatattgatcctggtaaagatattataaacttactattgtatctttctaagtcaatatcaccaagttgatcttagataaaaagatcgtaatcttgatatggttaggttcgatctcaagagcgttatttatgttcttaaaggtgttcattaaagcttgccaatttgttcgggcagaaacatacatcttgggaacatgatagataattgagttggagcactaatcatagatacaaaatctatagcttctatctagacatagaagtcaaatgatgagttcctttgagcttggcttaatagagataaatggaagtgctcttatttcagtaattatattagtttactaaaataacatttataggaagctaagtgttttaaggataaaatacattgaggggtagaacggtaaatttttccatacttaatgtaaattatctatagagaatctttgattctttggattagaatgatggataattcatagcgtatctatgtcttggaacatatagagcgttttgtataattaagagtgtacttccaaatctaaagtggcacaacaaggagttaataagctagagaatttatattgtaaattctagatcttcttattggaaacttgattaaataggtccatggtccccacacta

SEQ ID NO: 212067 - DNA, 510 bp, Cannabis indica
tattttagatttcggtatttatgttaacttggcacatcggtatttattcaataaattttttaaaggtatttttataaataaaattaattttaagtataatactaaaaagaccccttaaaaaagtacatcatctaaaaaagaataaatattatgttataaacatttttggtaaagagcaaagagtatatttagtaaacaattttttagaaattaatcttagtgcaatcaaacaaataaacatatctattgtaatactaataaataaatcaaatatttttaaaaaataactaacaagaatattatgacttaaataaaaattatatttattaattattatttatctccttaaatttataaaaactaataacatatatttaaaaaaattaatataatttttgacatactattgatttctttttcttcacaaaagtcctaaaatatataacacttcaataaagatgctattaaatataatcaaatattacgtttaagttaggttatgtgtgagaa

SEQ ID NO: 212068 - DNA, 1168 bp, Cannabis indica
ctacaggcagagaattattctccatctcagaatcttcaatgaagagtgagtggattcccgactccaggtgcatttatcatatgtgtccaagtcgatagtcattttttgagtataggtcaatttatagaggtagggttctgatcggaaatgatcattcttgtagggtcattagaatcgggaaggtggacatcaaaaagtattatgacagaatcaaggtgctgacaaatgtaagggacattctggaccttagatgaaacctcatatccctgggtgcgctcaaagatgaaggatatagatacaaatccatgcatagaaacttgaggatcaccaaagattctttgattattatgaaaggagagaagattaatggtttatatgttgtctaaggaaaaattgtcctagcaggaggagaaagtatggtgaaaggactagaattggacatgaagttgtggcatcacacacttggacatatcaatgaaaaaggcctcaaagaactacacaaacaaggtatcattaaaaatttaaattcatgtgccttaccattttgtgaagcttgtgtttcagggaaacaacataagctgaagttcactccagcaaggcacacaactaagacgatacttgaatatgtgcatgctgatctttgggggccatacaaggtgcctaatcactccaagaagcaatattttcttagttgatgattacaatcggtgtgttttggacctacttgctaaccactaaggatgagtgtctagaaagtttagaaatttgaaaactcaactgaaaaactaaaccgatgtcaaaggttataagaaccttaggacaaataatggtttggagtttgttaactctgagtttgacaaaatgtgtcaagggttcggaatcactaggcatagaagcgtagtgaagacgctagagaaaaatggtgttactgaaaggatgaaccgaaccttgttgaactaatgttagatgtttactgtaaagatttgggttagataaaccattttagtcacagtttagtgttaagcagttgttccactcaggttgaccggtacatctgaattcggaaacgaggtaggattagtaataatgatatgcatatgtgttttacatgtttagtgtgcatgttgttaagcttgtaggttacaattgatagcaggatcaatatacg

SEQ ID NO: 212069 - DNA, 862 bp, Cannabis indica
tgatacaatcttttatttatgtggtatctaatctaatttatatttatatttttcatttactatctcattattattttcaggttttcgaaaagattattcaaaagaattttttaattgcatgatactatctcacaatttaaattaattttacttatacaacattcttatttatttatagtctccattatctctattcaagatcatcatttttttttataaatttttaatgttatatttgtttttcaagtgaaatactgcaataattttaacgttaatgagttttaaataaatagtgacgagtgagaaataataatagtaacatttttaaaattgatgggttttaaataaatttatcaattatcgcattttaaagcccacaatatttaataacctacacttcagtcgctcttatcatatattacttttcatagtaatatataatattatattactaagataaataggaactttgaatattggtaagattaattataatgatcacttacattagtatgatcacgtaattaattgtgacatttttaattttattttgtcttttcttctttcaaacacatttatttatttattcttttattataatatattcacataaaatcttatactttttttttttttttaaatataaagttccaaaatgaaaaatccttatcacttgaataattcaaatatactcaataaatttaataattaatatttatttatatctatctattttatctatcttatatataaaagagatataaacaggtgatatgtcactttaaatatttctaaataacattatttgttctcttttaattctcttatttttttttattttttatttaacattttttttttt

SEQ ID NO: 212070 - DNA, 771 bp, Cannabis indica
atatatatatatgtgtgtgtttacctatgatgaaagctgctgatctccaaccgccagagttggttttcgaaacaggacggcctttgaagtcaacggcaccgtcggcgacggcgttgactagcataggagtttcgacttcctccgccatcgacgacagctctttttcttttaattagatgaaaaaatgtaactaattaaatgatgggaaattttgtttacactaacaaaatttataaaaccattttaataatttttattttatacacgcttcgctagcggcagtaaaattattatataaatattaatagattaaaaaactcgatattaaataattttgaactatatacgtttattaaaaacaatgataaatttatataaaaaaaccttagaattctaaaaaccaattataatacaatttcttatataagaaaaaaaaatacacaattttcttaaatgaacattatagtgaagaaaaattataaaaacaataaatttatagaaaattcatcatataattttaaaacaaccatcatcaccgtatttcatttttagttttaaaattgatgtcattaccgtatcccacttaacattcttttcaatggataaatacttacttttattatgtaaagagaaaaagagtcataaaaaataattgagtttaggattttgatatttttagtatattagctaataatttcttttaataaattatattagttaatattaactctatatctttctccgaaaaaattattgtatatgtagataatt

SEQ ID NO: 212071 - DNA, 732 bp, Cannabis indica
acctagaatagagaggagtttcgtaaaatctttatatattagtaagagaaaagaaagaaaaaatagagtaaagcaaaatgcattgtattgatcaaattgaattgaataatggtacaagagcagtatatatagagtgttaggtacaagaggtagttagaactaactaactgactgaattataacagaaaattaactaagactaactttaatatgccccttcaaggtggtgtgtaaaaatctttgacacccatcttggatataatgctgtggaattgattggggaaaagtagcttagttaagacatctgctaagttgttatgagaagtgacatgattcatttgaagtgtatcattggttatcttttctcgaactgtatggcaatcaatttttacatgttttgtacgttcatggtagactggattttcagcaatgtgaatagccgcactgttgtcataatataaaaactgagggaagtttaatggagacaccaaagtcttggagtattgatgtgagccaagtgagttcacaagtggcatgagccattgatctgtactcggcttcagcagaggacttggagatagtttgttgtttcttgaatttccaagacaaaagagagtgccccaagaaaacacagtaccctgaaattgatctcctcgaatttgggcagcccccaatcagcaccagcaaaggcatgaagttggaggggatttggtgttgcagcatggtaaaaat

SEQ ID NO: 212072 - DNA, 504 bp, Cannabis indica
tgggagcctcttgtctacatgttctcttaattcatatataataataaatatacatataattatattatatacatacatacgttttaaagttaatatcaatatttatatgtataaatattattgcattatgcatggaattggatgatcaccacatctttgtcttgaattaataaaagattgtgttttgtccgtatattatactccaactttgtacgggttcattgtattaagatgtggccaattgataagcggatcttccatccaatgatgattatgataaatcccaattaggatttgtgttttctctaactaattatattaaatcaataattaatactctctgcatatggacgtacgtacgggttttgcaagagatttttatcatgatgtgtatgaatttggttcactaatattaattaagagttttttaaaaaaaaagatatgttatattcatttttaaggtgattaacaagagagaagcaaaaagagaaaaaaagtgttttt

SEQ ID NO: 212073 - DNA, 835 bp, Cannabis indica
ggaggggacggtgcatcgaccagcgcgggggcgggttctagccaatcaggtgggtcgctcataacagtggcgttccagatacttgtgagcagcttgccttctgcaaagctgaatatggaatcggtgaatactgttaataaccttattggcaatactgtccagcaaatcaagactgccttgaactgtcctacttcctaaaattataaaccaaaaaagaaaaagaaaaaagatcattcataattaatcctttctctctctctttctttgtcactcagtactgagctacaccaactggtttttttattatcatccttaaatttttgtgttcagaaaaacaccctctttattctcattcattttctttttctctatggtgttgcttttgcttggtgggtattgaatgaggggagaaaatatgaagttagttgggttctttgaatgcactctcatcaagagctcaagctgtttatttactactgttgctgccgctggctactactgctcctgctgctgttgctgttttttgctgcgaagtttacaccaactacaaacattttctttttatatttttatttttgatggtcttaaaatttattttggaatttggatttttttacattgggaaaaatagtctttgaaaaaagagggggagtcaagaacgcaccatattcttgtaatgtttgttatggggttttgtttgtttggttttgattggttcaattttccatttagaagtagaaaaagacttgtcgagaaggacttcagacacagcaaaagaacattgtatgtatggttcgggcattgacttcctgtttaatggacttaaattccaaag

SEQ ID NO: 212074 - DNA, 513 bp, Cannabis indica
ttgactaaaaaattatttcagatagtaaaactgatcgagatatatcgacgtaaactaaattttatgctaggtattttctactaagacaatgtgtctaactaagcctaaattcttgacccgatcatatttgctcatcaagcgcctcaactgaaccatcataaccctgaaattccaacgacgaaaaaggttaattaattgccataaagtaaataaacatagatattcaacaagaaaatgaaaaattttgaataaaagaaaaaggaacctagcgaagattatgttcggtggtctggtgattgaggcgagcaacaaagagaatgccataagcgtctcggatgagttaggatctccgaaggggtcatttgtagaagaatagttaggggaaattagagagctagtgatatggcctcaccaatcggagcaatcgtgctccatcgtaacaatctatttaatagagaagttgtcttggatttgtagttgatgtccctcatctgaggctctcatcgctggatc

SEQ ID NO: 212075 - DNA, 549 bp, Cannabis indica
ttaacgacgccaatattgttcttaattccaaaaaaataagaaatcccgtaaagtatgtagagatctaaggtcaatttctttgtgtaatgtggtctacaagattgtttctaaggttatggccaaccgatttgaagttgtgctgccacaagttatctctgacacaaaaaatacttttatactcggtcgattgattttcgatactatcatggtgtcgtttaaaattatgcactatttgaagcgtacgatttttgggaaggagggaattatggtgttaaaacttgatatgaataaagtgtatgataggatggagtggaattatctcaggtttatgcttcaaaaacttagtttttttggcaacattaggtgcaactggtttcatgttatttttccacagtgaggtatcaggttgttcgtggtagtcatagtatggggactattgttccttctcgagggattaggtaaggagactttttgtctccttatctatttttaatttgtgctaaaggctttttgacattacttcgttggtatgagcagaatcaattaata

SEQ ID NO: 212076 - DNA, 706 bp, Cannabis indica
gaaaaaaattacaaaaatataataaagaaacttggaaaaaaaaatgggaggcaatgtacatttttccttgtggacatgtgaagattgtaattaatacttttatttttgaattactttctttacttttatttttttctaagaaaattttaccataaatattactttatttaggcacttttttagtaattttttttttaatttgcttccttttttttttcttacttagatctttctcttgactttaccattttgttttggggaaaattataccaggaaggtgcattatttttgtctctactaatatggaagtttctatttttagaatttagaatttaaagaaattataattaaattttgacttatatattgtgaaaattattatatggaaaatacaaattgacactttatatttatactttttatgtacttttaattactaaaatacctcttacactatcacttacataatcagacgatggttgttaagtggttggccgaaggttgcatcagacgaagttttcaattagacgaaggttgctgggtggttggccgaacgttgcatcagatgaaggtttcaatcagacgaatgttgttgggtagttagccgaaagttgcatcatacaaaggtttcaatcaaacgaaataactgttagcaaaatatttatgcaacttctgtgaaacaataaaaattagaacagtattttca

SEQ ID NO: 212077 - DNA, 925 bp, Cannabis indica
aactcagtattttgtcggttagactcgactaagcgttgtcgaagttgtctattctctaactccaccaatggtacatatctagttgggtcataagcatcctcactcctaggcacgtatctggcagaattattggcttcttcattcattcttccatgaattcgatcaccataaccatcgttcctccttgaacgtgatgtttcagtggtatggggtctttgagatcccattggctctttttcagggcgatgagttgtttcttcaggacgatttctatcattttgattgtaattagccattaaatgtgattacattaagtttataaggagggacttttttctgagttttattaccaaggctctcaatgaaaacaccaaactgttaacgtagattttcgttaaccaaaaatatatagccttttagtaataatttatctacatgaattaataagtaataaatgataaaatcactcctaatctttttacgtgattttgtagttaaaatctacatactccacaagttcttattattaagaatattttttgagtacagaacacaatatctgattttgaatattagtctttcctctcaaattttgtcgtcccttttcccatagaatctgcccctatttataggaatataggttggcagttatctattttgggattgattcaaatatgactgctaacgaaacgtggacaattaccacgtttcatttaaatatatatgggataatatcttataactacccaactactctttagtcttatcctttagacgattattcctaacatgtaatgtttcatctcgctcaatatgagtttttctccttgtccatattgataagaaaaaaatgctaagtattaggaaggtatccatcttgttatattctctttgtggctttagtaatgcgaggtgatcttctcgc

SEQ ID NO: 212078 - DNA, 648 bp, Cannabis indica
tttactgattttgagcttcctagcgcagatatctaggtcgatttccactttttccaattcttctatgggcccaacatttgcatttgtttccccaagtcggggatccatatctttgtccccgccttgggatacttcctattgggcaatgcttttccccctgtctaaactttggccggaggtattttctttcttgaccttagttagagcaaggttgtagcattcccgtgctattcttcaattccctttgagacatcctaccccacttcatgttaggaattcgactcacagatgaaaaactgatgtaatagcttttaagtcatatagggtcagtcagcctaacatcacattaaaagctaaagggacatcaattatcaaaaattgtgccattacggttttgctcctcaaagcttgtccaacagtgaggggtaagcagatttgtcgttgaggtgcaatgctttggctggagaaaccatatacgagttgcctgcagggaatcaagtctttatgttggagtcacatcttctcataagttgtcttaaacagaatgtttgaggaagctccattatctaccatggtccatgccacaatcttgtttgtaatttatacctctacgaccacggggtcgatgtgtgggaagatgacatggct

SEQ ID NO: 212079 - DNA, 469 bp, Cannabis indica
aaaataaatcatcaatttattaaatgcaatcctttaagattacattgtgaaaatgaagagaaatatcattatttctgataacaggaccaacaataaaataagatgctctagctaaaaatgaacaacactattcacagtgtcaaagaacaaaaacatcaattaaatcctctagagttttacaatcacatataacattcttaaaaaataaaacaacattacaagtcttaaaacataaaacttatttgtatgagaatttattaagatatcttctgtgccttgtaacaaaataacaaatgaaaaatatctatttttttatatttattaatcaaaaatatcttcatattttttttattaaaatatatctatttttttaagtaaattgcctaatatatccttactttttacttaagtctaacatataatttacataacctaatggtcaccatccatacaagtgggtatatctaaa

SEQ ID NO: 212080 - DNA, 626 bp, Cannabis indica
ctttaacatgtatcaaattatgtatttgaatttaggcctattacaataaataataagttaattagaattttcgccccttaaactttaacatgtattaaattatgtctcgtgaactattgagattgttaagtttaaggatttttgtttacttttattcaattttactattttaatgataatttatatactaaatcatgctttccatattttgatatctaccaaatcatgtttctagaactttaatatgtactaaatcatgttccttgaattttcatccatgttagattttctttactaaattgaacaaaaatcttaaatctaacaatctcaatagtttatgggacatttttaatgacttcaaaaattcagaaacataatttaatacatctcaaaatttcagaacaaaaatcctaattatcctaaataatattaaccataaaaaaaattaataaaagtattatccaacaaatcataataaaactaacctcaaaccttatctaaaaagatgtcctattatccccaccaaaaaaaaatcttacgatgagattgacacgtgggccctagcttagaacaattgtagaagtataaaattacaaattcaagaacaaacaatgcatgaaatttca

SEQ ID NO: 212081 - DNA, 653 bp, Cannabis indica
aaccaatttgggcagcaactagctcacctaacatctatagtgcaacaactcgctttaggctaaccagtgtgaccttgtgggatatgttaggttgtggggcatactactgatatttgtcctactctatttgaaaggccaacaaaagatattaatgctattggaggttttacggatcaaccaaggcagcaatattatccttattcgaacacatataatgagagatggcgtgatcatctaaattttagttatggaaaccaacaacaagttacaccaactagaccacctaggtttaactatcaacaaaggcctcaagcacaacaagcaaaccgtcaaatgccaagccctctattgaagacttgattaattccttggccacgaatgcactatagtttcaatagacaactgaagcaacgttgaagagtttggaaaattctatggggcaaatacctacatttatggccaagatagaagccaaactttttgaaagattaccttctcaacctattaaaaatccaagagctcatgctaatgctataacgttaagaagtggcacaacttatgcaccgtcaactccaccttcctcatccatccaatatcctcctacaccatcaccacaagaggatgaggttcatgttgggttctgtgccctaaat

SEQ ID NO: 212082 - DNA, 777 bp, Cannabis indica
aaactgccattaggaatgtcaatcgggtgggccggactggcccaatccgccacaaacccggcccgactcaatatcactttgaccaggtccgatttagcccgcaaaaataactcatagctgccatctctctccaatgaaaatcttgtctccaaaattctgtctccaccctgcttaagtaatgagcaaatgatacccatttaaattttttaaaactcacgtgatactttcaaacttattctaacagttccgtttctattcttccgttcagtttccatggctataattttttcttttttacttttttttctttttcttttttcttttaaggctatagaatatcataaaaagaagaaaaaaaacaactgagatagtacgagtaaatggtgactgtatttaggagtgtgtataaatcaatctaatccaataagaactaatcgattcagttacaactgactgtcatatattagatattcaattgtgatcggatcagattggatattatttttaaatatccaattagatcggatcgaatggtggatggagtgtccaaaaatcgagtacttccaacatccaatcgaactaattagtattttcatttattttggatgagtaattagattttatattgttatatgtaaaatctttatgtatatataaaaattaacattaaaattttactctttttttaagatttggattgtatacaatccaatctaatatatattggacctaaaatattagatggatacgatgagataccaaaaaaaaaaaaggtct

SEQ ID NO: 212083 - DNA, 1501 bp, Cannabis indica
attaagtagctaatttaagcttagaaatttaaatttctcttttattattcgttatcagatcaaaaatctaatgacttaatattttttaaaattaatatttataattaaatttatttagtactcatcaataggtaatacccattaagaagtgttccatatgttccatacatatatatatataaagaaaaagaatgaggggataacattacaatctaaaattactgtaaataattttttctattttttctttgattcttttaattttattattttaagttttattttatttttttcttaatattttattaaaacacatttaaattaagcctatcaagttctatttttaatccactttatttagttatatttataaataagttctattttataatattttattaaacaaaaagttttgaaaggaaaataataattttattaaccaacaatctcagttacaagacaatgtaacaaatcggtaggaacagactccataccaaaaagacaaccaggaaataatatagaagctcgtgcaaagttgtgagctaccacattagctgatcgtttaacaaagaaaatagaaacatgctttagttccgaggagagtcgtttacactcatcaatgatttgtccaaacaaagataacattttaattgaacttcgaaatgcttgaaccaccatgagacaatctgtttcaatactagcttgctgccagtttttcttcttaatccaactcaaggcttctcggaccccgattgcttcagcgacttccggagtagcagccccttggaagtgttcagttcggccttcgattaggaaaccgtgatggtcgcgagctaccataccgatcccgtggctggttccatcctcaaaaagagcagcgtcaacattgatcttgatactattttcacttggagcggaccattgctcaaccccatcacccgtctgaaaaccagaccatgatgactcaatgagagtgctttgagcatttgtccattgatcaagataacctctagctaacactacaattccgtcagcgtttaccacctttttttgccaaacaaaatcattccgggtactccaaatcgcccaacaaatagccgtacaaattctatttttagtctattttatttaattacttttataaatatcattattaattgaaaaaaatataatttaaataataataaataaataaataaatatcacatctaaactctaatagtaatatccttgttgtttatatatacacacacttgtatacgagtacataactatatacatgactctatattcaattttaatttttggcgttctagctattattgaggaaaattagacagtaaactttaaaaacatctaaaagagagcctaaatcattacagaaagaaaatctctttaagaaatgtttgattctcttgagcccatcataatccaaccaaaaaaaaaaagaacaacatctataaaagttgatacctaaacaaaaaagtaaaaagaaaacaaa

SEQ ID NO: 212084 - DNA, 899 bp, Cannabis indica
gcgtcaacattgatcttgatactttttttgcgtggagcggaccattgctcaaccccatcacccgtctgaaaaccagaccatgatgacccaatgagagtgctttgagcatttgtccattgatcaagataacctctagctaacactacaattccttcagcgtttaccaccttttttttgccaaacaaaatcattccgagcgctccaaattgcccaacaaagtgttgcaattaaacatcttttatttgagtcggcaccagtaaagacccgaatgcaccagtcaagaaagagagtgatgtcaggggtgatagttgtaccaattccaactctatcccaaaccagttttgtgtgtgaacaagtgaccaaggcatgtaatatagtctcttcttcctttctacagatcgggcagagagagttaacattaactctcttagtttgcagcatacaaagagtaggaagacagttcttacccgcacgccatagagtattcttcactttaggagggattttcagacgccacatagtagaccagaaagttgatacaacatcatcatcattatcccatctaccattaacttgttggaggagcttgtaggcacttttgactgagtaaatatccgaagttttatatgcacatgtcaatgtatctttagccaccgattgttgcaagggaattttctctatcaatcttctatctctttcctcaaataaatcttccaaaatctccatatcccaacccgtatcattcatcttcattaggttatggactttagcatcaattaaactaggatgagaagtagagacataagggttatcagaacaaggcagccatggctcgttaagaacattgatttcagttccatcccctacacaccatcaaagacctttccttacaagttgtt

SEQ ID NO: 212085 - DNA, 540 bp, Cannabis indica
tgaactctaattttaatattgcaacaaacaaacagcatcttattagaattaatgaccatcagacatttcattctcagctatttcacaaagctctaagctgattaggagtaaaggtttttctttaactcgtaaaagatatcaatttgttctggaaatacagttatatggatggtagtacttgatagctcacctagtattaacatcaggagagcttgaacattctgccaataatgaaacactacttttcccatccattgcatccagatctatgagagttgtgatcaacaactcgagctaatccaagtacaaagaatagttaagtaaaacaaaacattaccaaattgatatttcgaggctcagtagcatgaaagtaaagttggacctcttcaggatcagtgtaatcaattccatcagcttcagagagagcagatgccatactccagtatgcttcctacacattcaccaattaaaaacgaattaagtttacaaatttgtagagaaaattcagcaaataaggaagggttagtcatagagaacctg

SEQ ID NO: 212086 - DNA, 689 bp, Cannabis indica
agctaggccatctttccagcaataaaagtccaccattaaaaattcatggttgcttactcagaattcccttagcttcctcttgattcttaaacgttattcccacaaaagaatcatcgtcttcctctactaaaaccttaacttcccaacctccaatacctttccacatacgactaaaaattgttgtaaacagcgattccgtaatttctcgcttagcaatcattatccctaccaaggaatgttcaccaaaagatgaagcagcctcctcattctcctcccaatcctcctcactgttaactcccaccttacttgtcattgatactatatcctccaccgtctcactcagatcccccccacaacctccagtagccatacacaccagtaacaccaacagatcaatcatctcgcagttcaaacactgtagcactaagcagggtccttcagactatccttttttaattacatctaaaaaaaaaattaattggctataaacatcacttttgtaatattggatactttcaatagtagttccttggttacatccggctcaagtaaaaatattaacatatatatgcaatgatttcatttatatatgttattataagtattgtaattagacctatttaaaaggatctccaatgaaaaagtaaattattaaatgtaaaattaaatataattctattattaaaaat

SEQ ID NO: 212087 - DNA, 715 bp, Cannabis indica
atcacagattttaataattaattcacttattagtactaaactagtctataaaattacacatgtggcatctctataaattagggcgttacaacttggtatcaaagtagccacgattttaaaggtcttgaagactggttgaatatgtacatttgctgcaaagattggtcaactcatggtatagtaagggtttatattatttgctattggattacctacctagactattataaagtatattgagaaaactagcatagtgatgattataataagaatatgtgtataatatatgcatattgatattgatatatgtctgagttctaaatggttagaagatgtgaactataggtgtgataaattatgcagtcagagcaatcgaacaatccgactagcgagctatttgggctcagggctaatggcaaggaagagaatcttctatcacctcaacactgggaacaagtcattgctgctatgtaggatacgattagacaaaaaagggaacatatctgagacctaagaaaataataggctcgtcttgtgtctattcatgtaccaccaacatttcctgttgtgccagtagatgtggtgaaacacatggaaccgacttacgtgcatatcagaaatcaaaaactaaataaaactaccgattatgggatagaacaaaggttccaaggtgactaagatggcagtcaaggtgagacaagaaactgacgaccat

SEQ ID NO: 212088 - DNA, 877 bp, Cannabis indica
cattgatgaaattctggatttggggaaccattgagcagagtagcaggaggaggtacgccagtgaacaagatctcatcgagatcatgtccaatcaccgtgggaatgacctgagacttccaagaaaggaagtttacacgatcaagcttgaccgtaagtgaagaagacaaagaactggagaaaggattccaagatcctggtgcagcggtttgtatggcagatgccggaggagctcgagttgcagggttgggggcaggggcctgaggatctgtggttgacgaagacatagtctaaagtcaaggcaactgataccatgtagaacagagagaagcagagaggaaaaacaaatgaaagagctcaatctcttattatgaacatgtaccagtatttatacagaagagaaaaagaaataacaaacattacaactgaaaagaaacggccaaaacagaattaactaattactaaccacagtaacagtaaactaactatgattagtgaactatgttaacaaacaatacaattctccatatttttatttatataataagaaacttctatttataatatatatatatcatttgcaaaaacgcagaaaataaaagtttgtgaaggaaccacctaattgatttaataatacattaacattttgtttggtacatctgatgtatttttattgtattatattgtataatattatattggatttggttgtatttaattaacattatttaatccaatactatatttagtattgacttgtactaataagttatgtaaaattataaattctttataataaactcaaccccaacctcgaccatggcctcgactcagacttgggccccgaacttgaattcgaacccagacctcaaactcgaat

SEQ ID NO: 212089 - DNA, 490 bp, Cannabis indica
  modified_base (12)..(12): a, c, t, g, unknown or other
taatgacacaanccattttaattcggctgcagtattagccaaggcacgaaactcactctcagtgcttgatcaggccaccacattttgtttcttagctgaccaactaataagattgcctcctaaataaaccacatagccaccagtggactttcgatcatccacacagctagcccattcagcatctgagtagctttcaagggtcattgttgctgctggtttgagaaataaaccgtcagaaatggtacctttaagatatctcagcagtcttttgcaagcctcccaatgagccactgtaggagctttcaaaaattggcttaatttgttgatgacaaaggctacatcaggcctggttagtgtgagatactgaagcgcacctatggtgctcctatacaaagtaggttcgtcaaacagctcactgtcatttaacgacagtttagtggtggtactgtgcaattttactagcaagtcagtaatgtactttgtttgggac

SEQ ID NO: 212090 - DNA, 585 bp, Cannabis indica
ttattctcgtatcaagtatggaaacatgcaattcaatacaataaggttgaagttgtgattttacaattataaaaaatatttgtatttaatatataatttgctttgataaatatttttattgaaatcatcaattttctcaaaaggtgcttttaattttttttctattaattaaaaacatcattaaaatttttatacatttattcatttttagtttatataaacaactctgaagataactaaataaatatattgcacctatttaaaatgtgttttaatatttattatacatttaacaggatttcaaataatctaacaatattatatgaacaatataaatatagcctcataaatatttaagattaaaaagtaaaaactacatatgtgggacaataatttaaagttaattcaatcattttttataaaaaaaaaaaaaataaagagtaaacagtaaataaataaataaaattcttaagaaagtagtgtacctttaaggtgcttcttgttgtgggacttctcagggtatgtccaatcatagcatctgtagcagtatactttaccgacaaccttgaacaccaaagggtgtgg

SEQ ID NO: 212091 - DNA, 974 bp, Cannabis indica
tttgaaggtgttaggaaggtgtagattctttaattacatgaataatagtatggacactttacacattatgcatttctggttaataaaagaagtgcataggctgtcacacactagtagtactagagtcataaaaaataacgtttttggagacaacccaacgtggactcgatattgctatacatatttgttctctgtatttctttttcttctactcctattctatctactctgcacggagatcaattcgaattgggactcactcatcgtcaactttgttctctccctttaattttgtgcgcttaaaaagaatgaataataaagcttttttgaaaaaacaaaccaacaacaaaagtgataagatctatacccatatatacatatacatgcatctttaatagtactattcattccaaaatctaatcactttctcctaacataaagtagttgtatttatcaaactttttactctaatctccaaatcaagtactctccgattccttttctttaaagctcaagtcactctccaaattctaatcattaactcatctacgaattactatacttatctaaagtaatatggcaaatgattttcaataatagtcagggccggtcctaaggtatatagggcctaaagcgaaattaaattttgggacccctatatatttagtttaactacaatgaaagtgatagttttagtacttagtttaatagtaaagcttttaaaaactcttaagagctctaaggttcaatccagtaagaccttttaccactacaccaaacacttattattatattttctttttatttaatattttatctatatattaatatattttttttcacaatttcggagccttgagcgttcgggggcccgatgcgcacgcctaacccgcctaccctcggggtcggccatgataatagttattagaattaattagtttgcatcttttaagtacttaacaatataaattcct

SEQ ID NO: 212092 - DNA, 659 bp, Cannabis indica
cctgttagaagataaatgttggtaaagaaaaaaaggtgtaaagaaaatggtgaaagaaaataaaagtgtggaaaataaaataaaccatttttcatgttgtatattaaagtttgttcgcataaactttccgaacatattttttttcacacttttttttttttttgcctacattttgcttacttcctttttttctccatcaattcaacttatatgttaattttattgttaggaatatagaggagtggaagttaatttttttttaaaaattaggttgatatcgttttggattctatatttttataaaagttataaattcaattttcagttttattaaatgataaattgaatactatattttttaaaataatataaaataatattttactttaatttttgacaattttttatataactaacttgaaataatttttagaatgaacatatgtacaaaataaatgtaattaatgttgttataacacttgtagatcatgtattatttagttttattttgataaaatattaatttaagtactatttttattttatattatttttaaaaaatatatagtctaatttattattttaacaaaatataaaaattagaatctaattaataacttttataaaatacatattaaaaaaaaatatatatgagttga

SEQ ID NO: 212093 - DNA, 1293 bp, Cannabis indica
aaaaagaaattgagaaagaaatcgttcatgatgtgctcattcccgttttgttgttgaagaatgaaacattgattgcaggtccctgtccctagtatggtcgctgcaaatgatgtgactttttcctttgaagacttagaagttcccaacaacttcaaggatggccacagtgacttttgctccatagcggaggcgctacagattctagactttggtttgctagtgttaacttgacttgggattcatttgttctttcatgtaccaacattgccattgaggcgctgagcatatttacataccaacaacaatttctctatggtagaagataacagactaatgcagccagtacaacactacattgtagcaacttttcatcatcaagtataaacatgccaaagaaaaaatggaagtttaaaccatatcatgagtattaacaacaaagctgcataatgcgtagcatagataaagactaaagatacattacatacattcctataaaatatttttcaaaacatcatatctaaacaaaggtaagtacacaagtttcacacaaacaacattcacaagaacaaacgacatcaaacaacttaacaagaaactaaaatcaactgtgttcacaccattaaaaagcaagagcttttccaccatgaacaaccaaaaacacttttccggcatcatcacagtttccagcatcgatagcaatcgccccgaaaattagcccggaaagctccacaaacgacagaaggagtggaagaattggtcgtgctcttgtgagaaactctaaccaccttatgcaaccccagacgagtcccatctttggcacaagaagtttcaaccttggagacatcagtgatccgagtgttcaactcttcaggggaaatatcaatgtcgtttttcaaataatacagagaggctgatgtttcaatgatactggcaccaaaaatgttcaatgccctgttgttctcttccgaataggacgagtgggtcatagcccgcctgagcagaccaacactcttgaaattgtacctacgaaaaaaaatatatatatatattttactttccaacagtttcccagaaaccaaacagagatagtgatgcaataaaagcagaaaattacagatactgaaaacaaaagaattggtaaaaaaaaaagggtcgaaagtaaacatacccaatttggccctggaggaattcgagagcttttgagaacgaagacgaggcttcgaacttgtgatagcggagtataaaatctgggtctccctgaaaaaatgtaaagaaagacgatgatcacatcag

SEQ ID NO: 212094 - DNA, 896 bp, Cannabis indica
tgaaattaacacaacaatggttcgtccgtgcgcataatgtttagtaattatttatagataatactcattgaaaattgttctatatatatatatatgatgatgatgatgatgatgatgatgatgatgatgatgatgagttttagaaagaaaaaatgaatggttagtgtaatgacctaaaaaggaaaaataagtagagagtgaataagtagtgtatgtattggtatagtttgtttgtgctacattagtgggtgcatggcactagcattagtattaattagtggcatacacacacacaatctcaaatctcaaatctatatatgctttggttggagcttccatcagtcacctatcatcacataatatttaattatatatttattaaaataaaataatattaataattaaaaaaatattaatttttaatttgacttattattatttttttaaattctctcatatgtaaatcttcatagtttttcgcactaatattactgttgctctaatttttttctcactcgatattaaactagtgtgttcttgccattattatattttagattaatttactctcatattgttattaagtattttatttaaaaatattttattattaaactaattttattggaaaaaaaatataatttttatgacatatttggatatatatatatttctcattttttttttaaaaaaaaagtttttacaccacatactgaaatttataaccttttttttttatttttactgtgggccagaatttttttcaaaaatactgtgtaagtttcatactgtgtactgtattaagttttcactgttgttctacggttattttttagttgttctactgttgtttttaattattatatttttttattttacggttgttttaggttatt

SEQ ID NO: 212095 - DNA, 650 bp, Cannabis indica
gtgagatgtgtaatgaatatagttacaattatattcttactatcataaatttattgattgatgattaataaaatataaataattattaattaatactaagtttttttgttttttgaaagaattaatactaagttacactaaatgccacaactattggttgggaaaatggacaacataaacaccttaattttagatatttagtacaaaatatgcaccacaatattaccttaaattcacgaagactaataatatgtgttaaaatattacacccaataatgttacaatattatttattttgttttgttttagataaaatcagttattataaattaaggtgagtcatttacaataccaaaaaaataataaaaattatcttctctaactagatacaattgtccaacactaaaatttatttatctaatttataagcgacttagttagcattttgaatgaaaggataattgatttgtaatatcttagttagcatcttgaaatgaatgataactaagtatctcgtttaaatgggcaaattttaggatattgaattattgtaggtgcttgatgggttatagtatacttatggtataatatagtctaaaataatttttcatctaccttttacttaaaattacattacaaccgtgaaagtc

SEQ ID NO: 212096 - DNA, 1070 bp, Cannabis indica
taactctacctaatcatgatattacaaatatcaacataagattttcccagtaaataaaaggttctaatctcacctctgtgactaatgaccatccatcgcattttccatcattaccgagcacaaatcataaaaactataaattttatatatgacataaataatacactcagagtttaataaaatctccagaatagagaaattataactctaatgcccatttctaaaaataggtcccacaatataattaatcatgcatatacataaaatatcaataattaatattaactggctttactaatccataatctaatcatgcagtcattataattatccacctattaaaatgattttgttcttaaaatctaacctaaataactatgggtattgagccctcatgctcaactctagctcccatgtggcttcctccaccttactgttttccagagaatcttgaccaatattatggtcttgttccgaagaaccttttacttcctatcaaggatttgaattggttgttcctcataagataaatctgactgtagttctaagtcttcataactcaaggcatgagttgagtctgatatatatttccttagcattgaaatatggaatacattatgaacaactgacgatgctagtggtaaggcttgtcggtatgctacctacccgactttctcgagtatctcgaatggccatataattttaagacttaacttgcccctctttccaaagcgccttacaccttttgttggtgaaactcgcaagaaaaaatgttctcctacctgaaatgcaatgtctttgtgcttaacatcataattacttttctgtctgcattgcaaagcaagcattcgagccttaattttgtctattgcctcattggtcctttaaactaattcaagacctaatacttcatttccccattttttcccaatgaattggggaacgacacttcctcccatataacatttcatagggagccatccctattttactttggtagttgttgttgtaggagaattctatcagaggcaagtatttactccatgaatctttaaagtccatgacacaag

SEQ ID NO: 212097 - DNA, 645 bp, Cannabis indica
attgtcatgttgcatttgattttaattttatttttctgaccttctattttttcttccagccatgtcttttacaacatatacacgtatgactaagaggaagatttccacacctggtggctagtccccttccaaaatccaaaacactagttcgtacaaggatgctaagaagttgccaccttctattcgtctcgatctaaagatcactactggtgaccaagggaaagagaaagtggccaaagtatcactaagcaatgaggctttgcccaaggcaactgaccctccgacaaagactaccttgaacagtgatgccaatgcaatcattccatcaaaaacttcctatacgaccactaacaagtccctagccccttttgtgtatagtttagaaataaggtaggcaaagtggtggtcatgaattatattgatcgaacgcttggctagtcaataaaaagatggggcatgtagataacaagggcttggacattctaatcagtaagggtctaagggactgttaagtaaaaatttgacatttagagtattaaaaataaatgcaaaatataatttcacctatgccaaatttacaacataagagtttattaatttaagttcaacccatctaatatattaaaaataatctcttaattacaa

SEQ ID NO: 212098 - DNA, 547 bp, Cannabis indica
tacgtactgaacaatcataaatgtataagggtcaaaaattttacaatcaaaattaagtttgtttgaaagttagattttatgtcacgttttattaaactataactgaaattattaaaataattagtcagacaaataaataggttgaaacatataaaataatcagcaatatcttttattatgttatttgttaaattattttttaattattttgcttacataactaaacaaagtaatgaaattggttaaaaaagtgtaattgttttttagttatagcttttcgaaggatatatttatttttttattttttaattaataaaaataaaaataaaaataaaaataaagtggttaggaaaaagaaatgtattccttataaaaatgaggagaacttttttttggaaaacttacaaaaaaataactgaaatttaagttaaattttacaaaaatattgtcacatagaatttttttctaaatatactatgtttttataaaacaacagtagaacacaaaacagaacaactaaaacaatagtggaacaactaaaaaacaa

SEQ ID NO: 212099 - DNA, 743 bp, Cannabis indica
ataaatatactacagaaattaaaaaaacttaaaattaatccttatttttattacatcatatctttatattcttggtttaaagattcttagtttaacgatttttttttatttagcattatttactttaaaattacgtatgacatttgaaaaaaaaccataactataactaaaacctaaaataaaactaactatacgtggctagacacgtaaattctgcctagtatatatatatcactgaattttctatttcttttttttttttttttttttaatttaaaagatttttggtcatcgtttgctttgcaattatggtttcattttttatattatatcttatgttattttggacttacttaatttggttagtatatttttgtcctaaaatgacattttttaatatttatataactaaatgtaatattgaaaacttattctataaaatagtaaaataaataaaaaaaaatacaaattcaattttggatggaaatgtattacattttatcactataaaagaaattaaaaaacaaaatatttcacacaaattttacaacaaagacttaaaagggttgtttacagtacaagtaaaattaaaaaaaaaaaaaaaactaataagccaactaacatattagaagaggtgcaccattccaactagtgagacattcaagcattggatcaataatttttccttggcacattgcagtgaataccttgtcaaagtcttctcctggtgatttaacattctc

SEQ ID NO: 212100 - DNA, 657 bp, Cannabis indica
acatgtcatttcaaacacacacatacaaatcatacaaatttataattttccactcatcacataaatgccacaaataaatcccgaaactatatttttggccccgaacccagttctgtccaaaataccagattgtgactataccgcgctgacatgtcacaaaatacctacggatagacaaaataaacatactatataataatatagtccataagtacaataaaccataaagttacaattttacccttcttgggttaaaattatgaaaatgcccttggctcatgaaagtttgttttcatgaaagttatttgagtgttatattttggaattgaattccataatatttaagagaaatagtgaaatatacacatatgtatatattgtttagttcactaatcattacatacttttcttcatgatcaattgggggtttcaaatatatggattgaatttacccctttaaattttcacgatcttattgtatacatttatatatatatataattgacacatatgtatatatgaaaaactggcaatacaatattataattctttattttatatatatatatgtttttataaaatgtatcaagtgccactctagtttttttttccttggctaggttttttttgccaagatcccttttccatatatacata

SEQ ID NO: 212101 - DNA, 457 bp, Cannabis indica
gtcacagttattcttggtaatgttttctctaaatgggccaaattaatggaagtggtaaaagccttgttctttgcagattggactcctttttaagtcataaagaaagtttatctcgtgaggagttagaataggccagttcctaaggtggtgaaatatgaagaaggtggcaagaatcctatagccaattggatttatctagtaagggcaaacaccgaaaaaatcagctatggatatgaaccatggatgcaatgacaagtaagcacccgcattcatgtggaatctcaaccagacactacaacaagtgttttgggagcctttgggagcaccatgttgaggcttccagaaaacagcctcagaaagaccgtaagtcatcctaaattatttagcgtgaagctcaatgagggtgttagacaaagaggccttagacatgatctctcacatcatcaccttaatcgta

SEQ ID NO: 212102 - DNA, 1463 bp, Cannabis indica
gtatgttagtctattttatttattctcaaaaattttaaataatttataataccgataataaaatttaaaataagtaatttgcatgtttataaaataacacttgtataatatcctataataaattttaagatattttattatttttttcttttgaaaatgaataattttattaagcagccacacaaggtttatctgccaaaaaagaagcatcagcacaagggggcaaggaatcagtccaaatacaagaagaatgagtcattcgactccaaattgctacagcattacaatctctaggaacataagtaaactttaaagaaagaaaatgatgcttaagagcaaggatctctctacccaacatgccccaatctgaaagaagcagatcccgaatgcagaccattaataattcccaaataatctgaagcaacaatagctttcgaaacagcccatctgtgtgctagacgaactcccaaatgcaaggcagtagcctccgccaagtttactgaaacagtacctggtataaaaacaatttcagcaacaattaattcaccttccgaacctctaataacagcacttaagccacatcccaatttgtctagaattaaagaagcatctgtgttaatggtcacaaaatcgttaggaggaggaacccatttctgttttgctttctctaatctgacctgccgagggttctgaatctccccaaagaactcatccaactgctcaagagcccatctcacccaaatatgaacctcttgagctttatgttgaaaaatgagtttgtttctacgctgccatatgagccaagatagaccgatgagttgaagcaattctccctttggaagtttgccctataagtaaaacaaaaagtctggagctttcggcatatatataaaaaatctgagtatcaaaaccagcaagcttccaaatcttttgaactttaggacaaaaccataaagcatgacaaatatcctcctctttctccttacaccaatcacaagtagtatcaaaggacatacctctttttgtcaattccactttcgtaggactccattgattaaacacacgccaaatgaaatttttcatttttgtaatgagtttagagctccaaataaacttccaccaagcttttaaaagagatgtgtttgaacattcagcaagatccgggtgaagaaatctggttttataaccgcttgctaccgaatatttaccatgattgttcaagctccatgatatccaatcgggtcttgaagttatggggattatgccaagcacccaagggatatcatctttatgaaaccaactatagacttcattgactttccaattcccttcattattaatcaatttgtctagagtggtaccttcagggagcattgcttttgtgcgaagagagaaaggaattcctcttggaagccaagcatcttcattgattcgaatagtacaaccgtttccaacacaccact

SEQ ID NO: 212103 - DNA, 1400 bp, Cannabis indica
gacatcacttagtttgtttccatggcttagcgaagctggtcaccagttctcggagatgttgctattttgcagaaatgagagactcaaaactcttcatttttaagtgagcttcccatgttgaaaatgagaaatgcgaagttgtgaatttgacttcacagacttcatggatcttagttattgtgaaaagctagacggatggtcaaaacagaattagaatcggataagtagaatccagcacaccaggccatttttcaacctgggtgctgggtactcatttttgagctctcgggttgtcgttttgaacttctaaggttcttgaacttgaggacgaggtctcctaccccattttaaccgtttcagattcaatggtcgaatcaaattttgcatttgagcgatcgaaacaagcacactaggttgattgtcaacctgagcgctaggcccagtacaaggtcaacctgggcgctgggcctaacactaggtcaacctgggtgctgggccctatttctaaggtctcaagattgtggttttctccccatgtttgcttgaatctttattatttctgatggcaaaaaaaaaaaaatgcccaaaacaactttttcaagaacttggttggaaacaacccaaggacaatatgtcaacctgggtgctaggtcccagttttggccctttggaagttccgtttggtccctggaaataattgaatcttaatctttgttgaaaacagagaagatggttggaagagttcttagataacatcatcgaaattggcccaagttaaaaaaaatgtcaacctaggcgttaggccttgcttctggcacccataaaatgttgtttcttccctgaaagcacctatttccccagttttgatgaagacgaacaagatgcaaaagtcgaatgatggatctgatactttgaatgcgtctagactgacaaattgtcaacttgggcgctgggtgcccaagcaccgggtgctcacaaataaacttgctctgaatctgattttgatgcctcaaatatgttcgtggtatgtctagtttatgtcccaatgcaagttttgaccaatttgcactaggacggtcctaaaaactgaaaccctagttgtgaatgtcaacttgggcgttgggtgaaaccctaggtgcccaagttggcttttgaattgcatgttcatgtaatttcagccctcggggcttggatttgattgctccatgtctccataatacaaaataattaaagatagtgagttggattcaagttattaaagtctaaatttccatctcggagctcccggagtcaacctaggcgcagggctagggtccacttccaggtcgagtgctatgacccgggtctacttaacttcatgacatcatccttcttgtaacgtgtcaaacattgatgtccac

SEQ ID NO: 212104 - DNA, 668 bp, Cannabis indica
ggctccgaagcccccgtaattgtggttgggtgtctcctcatccccaggcagccggtggaaggtcccggaggctgagggtttgatgcctgccaccaccacaatcttttcaagatggtgagcacaagtcagtgtggagtggagctcatccgcctcccatccgttagcacgggacttgaagttctcctgggccacgggaccccgcatgacctcctccagggtggccagttgaacctctcctttcttggaagatttagaaccagacgcggaagcagacatttttggttctgaaaaaattgaagaaatccagcagttaggccccaaaccaaaccctaatgttcaaaaggggaatgggggtcccctaaccgctggaaagaggccccctccggacacttgcgaaatgagaaaaccccaagaggctttccttggcaagaatcgggtgcaagaatcccaaaggcagtgacattgcaaaagaaaaagaaagagaaaagggaaaagagggcaaagacgaaaagcaagatctaatctaagccctaaaggcgttattacgtaagatggggatgattcctcaaacgaaacgtaataacaaggagcaatctaaacacaacaaagaggaatttaatgcatcatacagaaatttagacaaactcattcctagaagtttgacatcc

SEQ ID NO: 212105 - DNA, 653 bp, Cannabis indica
ctaatcgcttaataattgactaattgtcgccggctaaaagcgaggtcaacaccctgtgtactgataaatcatagtaatacatttaatcacataatgttgattactttccattgtgttaacaatataataaataatataataaataagaatatcaatgttataaggatttggatgaatttataaattaaataaagaaataaatgatcacatgaaccaaataacacattaaataagttatgaaaataaatctgtttttttactgataaatgaatattgaagattacatttaaaataagttttatttatggcacaaagcccaacaccaagtgcctggtagcttcggcaagtgttggccaacctctgtacaacattccttgcaaaggtcaggcttccttgatcgaacaagccctttttttgtttgtcaatatccctttggccggccaagttatgctcaatccctagcttgccatacaagcttctcctggctggcctatgtactccccttggtgagctagacaacattgtgcagcttcttgacagatgtcttaactttttttgcttgttgcttgatggttatgcgatgccttgtaaggagaattttccctgctattgacaaggttgtagtccacgtgtcttcagtctttcgtgtacgt

SEQ ID NO: 212106 - DNA, 732 bp, Cannabis indica
ggaacgctttccaaacgaaatgtttaatttttggaggaatgttagaagaccagacagaggtccaccaacgtttaaaggtgaaaggattagaagggccaggagtgaagcagctggagttagataagtggtatgcagagttaacggtgaaacaaccagaggggtgatgtttccagatgaggctatccggattgtgaggatcaataggcaccgaaagaatggcagaacacatctcctcatcaaagtaagtccttagtttgtctaaatcccaatgtcgatcatcagtaaggaaaaaggaaactgtgtgagcaggagggaggatcccaggtttgaaaaaaactttatcatgagaaggaagccaattggattcagaaatattaatcgaggtgccatccccaattttccaactgaggcctttaagaaggagctcccgtccccatagaatactacgccaacagaaagaaggcgagtgaccaatggcagcgtggagaaaatcgtttcgcttaaagtacttggctttgaagagctgagcaaccaaggagtccggagaggtgaagatgcgccaagcttgcttagcaagcatagcttgattatggtggataatgttgcgaaagcccaggcccccgaaaaacttggaagagcagaggttgtcccattttttccagtgaatcttgttggaatggccaagggagccccaccagaatttagccattaatttactgaagtgcttgcaga

SEQ ID NO: 212107 - DNA, 509 bp, Cannabis indica
gtagtgtacatatatagatagataaaaatagatatacagtagagagtatatttttttgtagtgtagcgtaactagtattacaaatcaaactaataactcacggcatcttcgagttcaaacctactgctctctcccattctctcatccctctctcaccactaacctagctttagtggctttagtagaggtacacagtatatataaacagtgtatatatatagagtatgtaaacaattgttctatgaactacttgaaacccattgcctgaaattttaaattactgtttgtgaccgtaagagtctattaactacttgaaagccctaatcatttaataagcaagactcttgacatggcctatgtttcagcttaaacaaaagataattctggtaattaaaatacatgtgttgtaataaatcaatatacagtgtcataaacatgctatatggttccaatatcaacaatctaagtaatcaaattcagtatttactgtggtgtaaatttgtatgcga

SEQ ID NO: 212108 - DNA, 978 bp, Cannabis indica
gaattagttggtctccaagtcgttaaagataaatttatttttaaataaatttagttttatttttatcattttcaattttgtgtgttttttcattttatattagttttttgtggttgtaggtatttctttagtttaatacaactatcgacaaaggaatggtaattttaacgagctgggggtgctatttgtggatgttatagctttattgtctaaattttagggggcagttttgtcccatattgctcgcgataagaattttgcagctcatggtttgacaaagcatgcccttcggttaaacgatgaactatcctggttcgagaaggaacagctgtcaattgtggattgatgcatcgttaatcatgtgtgattttgatcaccacgtcaaaatatatatatatatatatttaaatatttaatgtagaaattttttatgaattaattaatttttattgtttcgattttaagactttaatttttactataaatattcaaaatacatctgattacacgtttaactcaaattttacacgattcaatttcaaaaaacaaatagatcttaaaaaaagaaataaatatactaatcgatattttgttgattttaatttgaaatacaaccttttttttttttgagaagattttcactattatattataaataaataatcatttacaataacaaagaaaattagagtggtaatttctcccatccaacaaatattttgatccaattctaaaacataattgcatgttttgttaaattatgagtagcttggttagcattcttttaacataagaaacaacaactctagaaaaaagataaaagacaacaaacatcttggattaaatttgtgaagcatgataaattcatagatgtagaattcaaagtggcagacacatcgatatcaatatgagtgattgaaagtttcatttgcaaaacccagttaaagctatggagaagagcttttttgcgacatattt

SEQ ID NO: 212109 - DNA, 929 bp, Cannabis indica
tgcagtgtctattgatataatcagttctagtgatcagtcttccatgtgttggtttgtaattagttttggtcaaattatcgttttatccttctaattacttctttatcctttagtatcattaattcactagtggaagtataatttagatatcatctaaatttgtgcacatcattccagttctagaattaacacttaaagggaaccagcattcgatccgttaggaaagtcaggattctataaatttaaatcattccagccatccacattattagatccccaaaacaaaagttggaagaatcatcttctatgagaaactttagcgagtgaactaataacatgaacatgagttcatgatactcaagatttaggccgatctattattgatcattattatgatatgaattagatctttataataaacgacatgttaatagagacagcttcattcatatttgtcattgtcatataaaatttctattgtatacaccttcactctgatgtcatattacatctgtaattagaaccaagattacttgtatcgaataacgaacattaatgaattgtactagcaaccatacattaaagattcaataactttaatatattgctaactattctattcatagctaagtagtcttagttctctgtataactataaatcacaacctcatatatgaataaggaatttttttgatatttaatattcaataataaatattaataacttaacattcacattatatcaaatgtttaattctttatttaataatcaaaaaatatctttacatatttttcagggcataaaccctaacagttctatctccatcatcacctcgtttaatatttggggataaaaaattgtcccaatttgctcctattccccatgtaggcaaggaatctccatcccgttaagggcggatacttgtggg

SEQ ID NO: 212110 - DNA, 882 bp, Cannabis indica
tgctcaaaatacctcttgggttcaagtgttcaacaccctttcctcaaacgctctgaagaattggcggccctacgtatcttcttctctcggtcacatgttggagctctataagccatctcttcgggagacatggggaccctattttaggctccgagtcatgtttgatgtggcgcaacctctcccccgtggcatacctatccacttctcgggtataaataaagtcgtttggctagagctgaaatatgaaaacctccccgacatttgttttttctgtggccgaatggggcatagttacaataaaggttgcatggattacatgaaggcttgtgatgaagctcctttccccccggagctcaggtatgacatcaaaaccatttctggcaaagttaaagtttccactaatgctttgttatgccctgaacaacttaacttcgccaatcctctggtcgcttcctttatgactactaatccggctagtgcagtctgtgttgcacccccggagagcatgccaccttttcccacctatggctcccaagaagtttgcccgactcaaggccaaacacaacaagtgggtctcttcaaatccggcccatccaccatcccacaaaactactctcaatggaatcaacccgatcccataacaaacacaccaactcctaacccatcacagaccctcccacccgagaccatcacaccaacatacacagcccttcttaacgccactatgagcaacactagtgtccaaaaagcctcaccaacttccacaccgaaccaagccatcacttcccaacattccagtggctccaattccactagctcaaaatattgtcatgtgcctttgcccgagaacatccctcttcttgacaccagcaagagactcga

SEQ ID NO: 212111 - DNA, 754 bp, Cannabis indica
aatcttactatatcagttgtttttttaattgtttgatatagatatagatgcaattatttattcatttacagttttttttgggctaaatttttttaattattgttttttttttgtgcatttaaccctttaagtttaaattttagcgataaaaactctttaaactactgaattaataataaatttaagtgttattcggttaactgtcactataagctgcttatgtgtatactcttaaacacatgacttatttatattggtacacctaatattattatttaaaaatttattttaaaattaaataaaactataaaaaataaaaataaaatattgttcatatattccaaatacaattactaattttacgtaacattttaataattaaataaatggtgattgaagtatgtaaaataataatagtagtaataataaatatagggagatgattttgtcccgtgatgtactttcagtgaatgtatttcgtagtacattagataggtctcagggtacattaaatgagtgtcagggtacgattttactttttaaccctaattacccctagatcaatctcagccgtcagatcaaataactttcttatctgacggttgtcgtacatcacgaattacaatccgtgaaagtaagacaaaatcatatcccaataaatataatatatacttgaattgtcttatttttattggttgaggacattgaaatatgtgaaaataagacataaagatgctatctcctctccttttac

SEQ ID NO: 212112 - DNA, 340 bp, Cannabis indica
ttttgccaagatgtcattgaaatcacccatgacaatctaagcctcgctcatcgccaattcttgtagatcaacccatagtttcttccttctctcttcatcattgaaagcatagatgaatgtaacataaaagtgagctttgttatccaccgttgaaacttcaaggtgaataagttggctagaacactttaaaatgttgacattatagcttgttggcttccaacttacgattattcgccctctcggatgccaagcattagaagtaaagcaccatccttgaaaaacatttgagtataaggttccaagcttggcaaccttaactctagtttcgagaagtccaacc

SEQ ID NO: 212113 - DNA, 633 bp, Cannabis indica
ttatgtcgttttgcctaagctatataaaaaaaggtttctcctctttttactcaattaactccttcatgttaacataaattaacattataatcaggtaatttttaattcaaagtttcacaagtacaatcataattaattggctgccttagtatataatgcacgcatatttatttatttattatttaaaaattaaacataggatcttgaactatagctgaccagtagtatgtcatgcccccatgcactgattttttttttttttttttttaaattgagatccaaaagatactgatgtactgtcgagtcaataaataggatatgtgggaagtgcaaacataaatgattttattagtacttatatggtccattctttttcctgcatttatgcctctaataatcttaaaaaacaaatatatatttatattgctctttattaattgaaaataaataatttgcatattagtgtgaaatttgctgactcttgtttactcttttccaagcacgttttaatgattatgctttttttaaaaaaaaaaaaatataaaaaaataataatctcttttatttacttacaaattaaatgcacattgaataatgatattatgatattactatgagcattgctattaggca

SEQ ID NO: 212114 - DNA, 831 bp, Cannabis indica
ggtgaccccctaagacccaacttaagaggggtgacaaccatcatctttgggtgacccccctgagacccaacttgaagggggtgacccctcgtccgttgtcagtagttatggtgcaatgtggatgtccccatacactcttgagaatgtcattgtatctacgataaaattcatgacttgtatcatgagggtgtagggggtgaaggtatacccctagaccatcctttgggaggtaaggggtagtagtatataccccctagactaacttagcatgtgggtgggtggtgattgttcattccgcttacgaaggtgttagtccatcatttttccttctcggagacgtccaccttactcaagctaggggtaagggtgactgtttgactttcattctaacggtcagaccacccttcatgattaacgatcatgactttacatatttcttattaacttagtctcgatatttttgtaccacgtgttgctactcttgacacgtcatcgtcattaaaatttgggtaaacaataaccttaataaactttccaatatcattgaaaatagcccatatatttatttaatatcttccattttcacgaaaaacatatttgttatttttagtatttttaataatacttaattggtacctcatatttttaaattgtacgtatttggtaggggtgttcataaaatagctgatccaatccaatttacacgatccaatctaatccaaccagtgaagtgcagatatgcgcacttgtgcagatttgattggattagaaaattcaaaatccgcacttccgcggattgaatgttgattgttatgtaaaagtaaactgatc

SEQ ID NO: 212115 - DNA, 515 bp, Cannabis indica
cgtgccctggaacagagattctctagccaatccaaggctcggcttctacaactcaaaagccagttttcaactctcagaaaaggtggactctctatttctgactacatcgacaaaatgcaatcgatctccgactctcttgccattgctggatcacccatatctgatcaagatcttattctccaacttctaaacggccttggccctgagtttgactcggttgtatcgggcatcactgcgcgtagtgactttcttacccctgaagaagtgcagtctcttctcctttctcatgaaagtcgtctggagcatcataactccattactgatcttaatatgaagctgcaggcaaatgtagctttttcgggatcaagaatgaacccttatcgacccccacaaggcttcaagaatggcactcgaggtggctttcgtggaaatgttcagaacaatagagtccaatgtcagttgtgcttacgatttggccatacagcccctgtatgccattatcgatttgataaaaa

SEQ ID NO: 212116 - DNA, 550 bp, Cannabis indica
caaaacaatagaacacacttcaggggaagaatcctccaactgaaacacacaaccaatagagaaacaagagtctcttgccaagcaatgagccagcttgtttttagatcgtttaacaaaacataactcaacaaaagataaagccaaaagtaaattcctaacatcttgaacaataagaccgaactgtgaggacataaaatttttactttgtactacttggacacacaccaaactatccatttctaacactacattgtcccagggatgagtcgcaatccaactcaaagcttctttgatgcctatgatctcaacaattttgggttggacatacccaacctttcccttcttgaaagtttctaccatggttccatgatgatctacacagcccactccaaaccgcccctcttgttcaaataaagccccatcaacattaactttaatcttgtttaacagaggtgcaatcaaacactcacatgtctgccctccatcatttaaaggagacaatgaaaggctcttcctttcctgagtaaatttgttttaattataaatattg

SEQ ID NO: 212117 - DNA, 932 bp, Cannabis indica
tcaattttcaaaaacattttcttgtctatcatattatattttatatttttgctcgcacactcagatcttagactcggaaccatactcgaacccaaacccggatgagttaatgtcatggtatggtgttaaaatattaatttttgaaaatcaagtggcatcctacaatattttaatccatttttactattaaaagaattttagtaaatttagtttattttatatatttatagatattgagaaatatgacttcttagtaatttttttattattattattatttgtgaaaattccacatggattaagaactacataattaatatacttctaaattataaacaaagtatcatacactaacttttgtgaaaaaatatatggacagaaaatatataaattattttaacaaaaaaaaaaaaacataataagagtttatgtgtcattttaaaattttttcttcctatttttcttattttctaacatattttcctatttttttaaaactgaatcacacaaacaaactaaaagtcccacattgtttcaaaactgtttaggttttatttatgtaggttataaataatattcttactacattattttcctttgtctaaaaaaatattatttttttatgggtgattgattaatatcttacccaagtttttattttgcccaattagttttaatttttttattttttttctaaagagaatgcaaaatatatttttgtacttttcaatatttgttaagtttaaaataatcataaaaaaaagccctttaattattttttcatataaaaagtattgtatttattttctatgtaggtgattggtgaatttaatcttgcctattgatttttttttaactgaatgtaggatacatttttgcattttttaatttttgttaagtttaaaataagggatattggctgctaaaccacc

SEQ ID NO: 212118 - DNA, 873 bp, Cannabis indica
tgatattattcatataaaaaattaaaattgtaagcagctaaaaaaaaaaaaagcgatttacaggctcacaaaaagaaagaaaagagaagaacagaaactgaagaagtagaagagcttttattggaacccaattgcttgcgacctcgacaatcggtggcggaacaaattgagccctaagaaccttattcggttaacgttttcgtatgatcctgaacccgaattgcccgaaaattcagttattagataagttgattggtggggaattcatcatcattggtgagaattcggaagaattctagggttattcattggtgaaaatgaaaggccatggagactatacaggatctgatcgacgaggccaagcttcgaacgatttggtggggtcgtctgtattttcgccgttttcgtattttctgtctcgtaagcatccgtctctctggaaacttcttcaaataatgcactacgctctcttttaatatgattctttgtgtagttgatttcaataactatttttttccttctaaattatttatggaacttgatgggggcaatgagaagagttgtttctttattagttgtagtcagtagagtttatcttttatgtttgagaactatgacctgatataaattgatttgagtggttggaagctttttcttccttgtttaattcaggtcttaacggtgagttggtgataattgtacaaattctaagtttcttccatcaagtagatatgttggccagagatttattgaaatttcgtaatcaatattgtattataaaaatgtcatatatttagaatttataatagcttagctgtacaatcatgaagtttttcttgtatgatattgttgccacagctagtccattttcat

SEQ ID NO: 212119 - DNA, 535 bp, Cannabis indica
tctgggttgaatgttgaacttctgggaaatgattttgcctgagtttgctgtacaatgcatagaatctctcttttttgcgccttggttgtttctttttactacgccttcttttgggaattgcctttttctgtcgtaataacgcctttagggcttagagtgattcgtgtttttctcagctttttcttctttcccctttcctctttctttttgcaatgtcactgcctttgggatttttgcacccgatgtttgccaaggaaagtcttttggggtttccttatttggcaagcatccggagggggcctctttccagcggttaggggacccccattccctttttaaacattagggtttggtttggggcctaactgctggattttcttaattttttcagaaccaatatgtctgcttctgcatccggttcaaagtcttccaagaagggggcagttccactggccaccttagaggaggtcatgaagggtcccgtggcccaggaaaaatatacttcccgtgcaaacggctgggaggcggacgagct

SEQ ID NO: 212120 - DNA, 732 bp, Cannabis indica
taaaataattagatttatttttttttcatgaatggacccattttgtaaaagtatataaattgtaaaattatagttttaaaaaaaaaagatgaaacagaaaaattattcattatactcacaatatttgtttaagaaagattaaagtaagtctcctataggaacttcaaggttaaggcttcttcttgattatttttgggatttttacaaaaaatactagattttaggttaaagtttacaattttactgttacacagatttttacaaaaatattgtctttttataaaacaacttaaaacacccgtaaaataacaaaactgaacaattaaaaacatcagtagaacaactaaaaaaacaaccgtaaaacaacagtgaaaatttaacacagtacacagtatgaaacttatacaatattttttaaaaaaattctacccacagtataaatgtaaaaaagttgaaaatttcagtatgtagtttgaaatctcttattttgtgctttgaaatctcaaaactctccttccatcaaaagttaaatggaaaagaagatgaaaagtattaaaaaaaatcacgattcacaattatgtcactaattttaatagtgacaaaatgaataaaagaattgtattattgatataacaaattaaataatctacacaaatacaatcaaattttcttaaaacacatttatgagatgtgtttattttggcatcttttgtttaggccatggtgcattct

SEQ ID NO: 212121 - DNA, 1012 bp, Cannabis indica
tttattgtaattgtaattccttggtaatcattagcctataaatacaaatccccagcctcatcatttgtgagctgagcttttctatttaccctattattaattttcttggtatttatttagatttaatagtgttatttttgagtctaattatcttaatttagtattcgaatctaacaatcatttgttattggagttctttagaacttgttttgaacgattttagtttgtcttttaataattttagtgtaatgagtctagtgtattgtcttagaatttgtaatatggcggctcataccttgctattaggggtgtttacggtgcgggtgatgtaatttttgatcattttttcaaactaatccgcacatgtaatttttctaattctcaaaccgtacccgcaccgcaaaattaaaaactgcaaaaaatgcattgcaaaaaacggtgcggtagactatcactaaataattaaactatatcacaaatataacaaagcttgagcaacagttgtcaaaaataccttaaggcttgaaaataaatatgaacaaaaaaattaagtttcaacattaatacaataattagtgggttttggattagacattcacatattgggcctaaataaatataaaaatttgtatttttctaatgtgcagtgaacaattcaaaactgcaaatcgcattgcactgtgcagtttaagaaaaaatcaaactgcgaccacaccgcaaagaatttcaaactgcatttttttacagtgcaagcggtttgaggagtttgatgaaaatccctacttgctatactttattgtctaaatattagcaagatttggtggccccactatcattcatgtatttaatctcttatattgcatgaaggaaataataaattaatacaaggttcttaggtcctcccccttctaagaggtcttctctttgatggtagtccaagactgtctcaaaaaaaaaaaaataaataaataaaaaaaaaaaacaaaaataagtaataatagaataagtttaa

SEQ ID NO: 212122 - DNA, 665 bp, Cannabis indica
atttatgttttttcatatattgctttgtttcttttatcctaaatacttgtctaattcagaacaagtgaagttgtattaggttaaagggattattattattcttctattttggtgataattttagaaaaaattgtggccttataaaactttttttgtgtgctttatattttgtagatgacttataattactgtagtcagtggtccatatcactaaggcttccatgtgtaagaaaatcttactttagactagtcactttacctagttccatcccatctatatgactattactttagaatgattgttatattttctcttagaatgaaatggtctattgaatcataaaattgattatgtgtttcagttaattagttgtattttcattcataatacataataataaatcttacacatactggttactttttctcttctgagggttaggaggtaggtagtcaatatcccatcatttatgggtgagaattgactctcaaaagctcattgacctctctatcacaagtccctttagaggtggctgccctatccaagtgaagcgaaagaaccaggaaggcagccgctaagaaggcttagtgataaaggatgcagatgaggagatgaagatagacgtacttcccagttgtgtttttttaagcttagtcccatttcc

SEQ ID NO: 212123 - DNA, 609 bp, Cannabis indica
aggctatgaacccaaatttgattactccctccaaaggttgccccaggtgtgatgagagcaattcatgtaccaataagctgatcagtggctgacccgtccacatgtaatttccagataagtttgtctttattttcttttggtaggtgttgtcgagtgaatttcacaacaccaattttacatgatattgttaataacagaaagaaatttatatgaagaacaagtgcgagtattcaacctagagtggcgagtactcaaactgggaatgagaaataattaacagaaaactggaaataataaggagacaaaggattatagtggttcagtcagatcacggtctgcttagtccactgtagcaagagtttcgtaggtgccatttcatggtggatcacccctttatatacaaagcagatgtccgatcagttatacaaggattgcattcattgttaatccgtttttacacattgaattacaataattaaactaaacaacgttaacattaataaatgaacgacagttactaagttcatcaacgtatgcgtctttcgaatctgcgagttgactgttcatatttcgatgttaaactcgcaggtttatcattatgtttaggat

SEQ ID NO: 212124 - DNA, 828 bp, Cannabis indica
tatattgagttggtgtattttatctgttttatgatggaagatacatagaaaattaactcctaatcgcatagacacataccataaatttagatatatatactaatttatttattttagtaatgaatacatatatattatagtgtaaacttaaatatatattataatgattgttttattttttgtaatatgagatgagtataaaatatatgtatattggtttgttttgtatgtaaatgaagatgaaaagagatgattgtgtagatggagatggaaagaaataattgttggagattgaaaaatactagttgtttttttttttttttttttttttttttttttaatgtttgttaaattttagttgtgttttttggttgcactatttggaattggacttaaactcttatgcaaatttgattgaatttaaaatataaaatttgtacttagtgcggattgaatttgaataaacaaccctaaatatctcaattggattccaagctaatattctaacaaagagcattgatataagacactcatggtacctagcaccacaataaaatatcgttttataattggttagcattttttttataatatttattaaagtaaaataagtaaaactcgatattaaattgtaccaataacgattttaaacctcacaagagtactagacatcatgagtatcttttagcatttctctttaggtggtgtttggttggaggtaatgaaatggaatggaatggaaatgaaataattttcattccattcatttgtttggttgcatttaaaatcattagaataccattctgatagaatggcctttctatcatt

SEQ ID NO: 212125 - DNA, 617 bp, Cannabis indica
ggattttcattctggatttcattagcgaccctgagaataggagcaatagaagcaagtgaagaaggaacaagctcactatcaacagcagcattgtcctcattccccaattccacataccgcgtgggcatcctagtcatccctctcgacagcgtcctaggcggggcgacatcattcttcgtcccgctggagctcgccattctcagcgaacactcctctcaaaaccaccacaaatcaaccacttcttcttcttcttcttcttcttggactgaaattcgttcttccttggatacaaaattgtagcagaaaacatcttttcagagattggagatcagagcttttatatttctcggagaaaaagtaaggaaaagagaaaggaagatactttgggcaagaattggggcaaagaagaaaagcaaagtgagattttttttgaatatttttttgctgaggttggaagaaaagaatgtgcactgagaatttttgtattgagtcgaaccgaagaatttgagtgcttttgctttatagttattttggtctttttttaaggaaatgttttaaagtatgaatctgattgttgtttgtccttttgttcttttctttttgggttgtttgagttt

SEQ ID NO: 212126 - DNA, 795 bp, Cannabis indica
aatccaaagtggttaactattacattttatagagggagttaaaagcagatccaacatttattcatgttcattaggtgaagacacactcggttttggttttcatagttacgaaaaggaacaacagtaagttttttttttcttttgatcaagaaagaaacttcattaatcaaactaaccaatttacaacataatccggggaacaacagtaagttaagaagaatagaaatagattaaatgtcagaagaatttttcatttttgcaggaaatgaataagaaacccatatagagtttgaagattatttcagaacagttttttttataattaaaaagtgtgaaatgtggtcttattatgttacttatgtaatgtcatctaatgtttaattgagtatgattttgtatactaattccttaatttcagaaataggccgggcaacaaatagtatatataatgaaaccaagcttgtgattcctttgtcttttttaaaagtatagctagtgagtttgataaaagcattgtattgtatttttatatttcaacactttggcttattgaaatttatgttaacatttactttggtagtaaatgtttgtttggatagttattgaaaagaagaaataataaacatttgcttggatagtgtattggtagggatgcttttcctcgtcaggttcgaatcccaccaagtcctcgatgaaactcgccccagccaatgctgtgtggcgacccagagctcattttggcagtcgtccatctctttgtcgctttgtgaaaggaaatccaggctgaagttgcct

SEQ ID NO: 212127 - DNA, 1070 bp, Cannabis indica
aaggcttgccacggtaacatccacaagtgcagggtgagtggaagtaacccaaggattggattcatttggaagccacgggtccttaaaactgaaatggaacgcccattaccaacgcaccaatggatccctgcacgaactaggtcttgagcttccacaatactctgccaaatgaagcttggattagacccaaattgagcattaagaaaaggaccatccgcataataccttgctttaaaaattcttgagaccaaagaggagggtctagtaagcaaccgccaaccctgctttctaaggagagcaagattaaagtcacgcaaatctcgaaatcccatgcctcctccccttttgttcttgcaaagtttatccctgacatccagtgaatgcccttgctgtcactcttcgtggaccgccaccaaaacttggtcatggcacgctcaatatcactactaatttccaaaggcggtaggaatacactcatagcatagctaggtaaagcttggattatcgatttgataaggatctcttttccggctctcgaaagaaacttgccttcccagctttgtaatctcttctaaactctatctttaagataccccaacacaaccgatttgttacggctcatattactcaaaagtcccaagtaaaaactaccctcagccgcctgatccatttgaaggagattgcaaagttgctgtttcaccgtagaatcagtattagcattgaaaaaaattgaggatttttccaaattgacttgttggcccgatgctagttcaaagcagtggagtaaattctgaatatggacagcctcagttgacgtagccttgcaatacaaataactgtcgtccgcgaacagcatgtgggagacacgaggcgccccattagccactttacaaccatgaatccatccattgctctcatatctccataggagagcagataaaccttctgcacaaagaataaaaaggtaaagcgaaagtggatcaccttgacgaattcctttggacggtaacaacggacccatctcatgattaccatgaataattgtatacttagccgaagaaacacacttc

SEQ ID NO: 212128 - DNA, 1289 bp, Cannabis indica
acactttctatgtcctccgtcagtatggtaaatacagtatagtttgctggattctcccgaggagcttgttcggtcttgctagtgcaatttccctttttcccattcccttgcctattagtgttgctagaacgtttaccatttgagattgaattgcttgggtaatgggggagctagacggatgtcccagttgaaggagcttttgacttgccacgtttttgttcaccttttgctcgctgaatagtctcttcaagtttgataaagccttcaggacggtcaagaaaatcactcatagagtctactggaccatttttccttatgtccttccaaagttcataaaggacttcaatgccccccagtatcgcggataactttccatcttcggttacccgtgaaaccttagtcgctaccgtcatgaatcgtttgatgtaggctcagagaggctctcttggtctttgctttacttcgactagatctcctaggtgcaacgaaagttggcgagaggaggaaaatggtccatggaactctgaggagaaagccttccatgagttgaactttccttgcaccaactggaaataccatttttgggcggcttccgaaagggttgcaggaaaaaccctacaacatacatctcctcgtactccttgcagatccattttcatctcaaaatacttaaggtgggacaaacgatcttcttttccagtgtacatcttccaggttggcatcttaaacttgtggggaaactccaggacattgatgtctgaggaaaaaggagttccacgggctcagtccaactcaagatcattcttcctctgaccggccatgccttggaacatactctttagttcgtccagctatgcctgcatggctggactaacctgttcggcattttggccgatctgagtcacatccgtatctttctaagtgggaatttgagtgcggattccaggctgcaccatcggcgtgtcaagctgatcgtccactcctctcttcctattcagatcgtttttgagatcatgagtcgtccccaacctatcaaatacgaaaacgcctggctgtctcagtgactggttggtttggctaatgtgctgaccggcaccattaacctggttggaattgttaggtatgacttctcctgatgaattcctagacaaggtctgcccaccatttatagtctgagagatattcatcactggatcttcatctgtttctcccaaagggatgacattcgtgggttgctgcccgacagtctgataggctttttgtataagcacagtggcttaccgactacg

SEQ ID NO: 212129 - DNA, 743 bp, Cannabis indica
agcctaccccgactcgagaaatagcaaagagcagactatgaacatagacatgaagcaccagcaaccaaagaagtggattcggccaccaactcgacacattagcgtcaactgtgatgctactatgactaacgacactgctggagtgggcacaggcttcatttggcgagactgggaaggcaatttgctgttagctggtatggtgtatcaccaaagctgctgctcggtggagatggctgaagcttgggccatattggaagctctcaagcaccaacctcacacagccaacatggccattgaaatccaatcggactgcaaaaagattgttgatgaaatccaacacagggacaacaaattaagtgcggttagcactatattacaccagattcaagataggatggatagttctaattgtacaaacattgttcatgttcatagaaacaataatgagtgtgcccatatgttagcaaggaaatgtcttgctactaaggaaactcacattttcactcattcttttcctaggtggttagctatattttgtaaagctgaccttccttgatttgttcctgttttgttaataaagttttaccttcaaaaaaaaaaaaaaactagaggcagcggaggaaagggaggcatgtggggtcattagcctccaatttttatttatataaatttttaggtattttatatttagaccttgtaaaaatattttttttttcattattgtccttacatatttttatatt

SEQ ID NO: 212130 - DNA, 523 bp, Cannabis indica
tttggatattcatgatatttcttaggatcattctcttgttcatgacgtgtttaatccccgagatgctcatttgatccttggaattcccttgagctctatccatattgaagattgttcgtcttcgaagggtgagaagtctggccatttttctgttagcagtgcatacaatattctgcaggtcagtaaatatgggcagcagaggcaaccgaatactggtttttggcacaagttttggcacctcaaaattccaccgaaagtcaagaattttatgtggcgtgctgtcaccaatactctccccacttgcctcgagttggtttctagaaatggttgcatttcttctctgtgtcccgtctgccataatgcagccgagactgctgctcatgtgttgttaaattgttcttttgcattcagctgttgggagaaatgtgagttcactttgcaatccgatgcttcttcaacaattgggcattggcttgagtccacttttgagaaacatagtaatgacatatcatgccgtgctatc

SEQ ID NO: 212131 - DNA, 817 bp, Cannabis indica
tattattatattataaaaaaaatatacttgaattttttgagaaatttccactattattataaattaaaagtcgtttacaagaatagaggaaataggatgtagaatttcttccatccaacaaacatcttcatccaactctagagcgtactttgctaagccgtgaacaacttgattagcatgcctacgaacatgagtgacaataactctaagaaaaaaagacaaaagacaacaaacattatcaattagatctgaaaaataagataagtctgtatgtgaagagatcaaagcagaagatactcttaaagtatcagtttcaacgtatgctatcaagatttgttgttaattagtccaattaagactatgaaaaagtacctttgcttccatttcatcacttctaaaataaccttggactggtttggataatgcagcaacaacttcccctttgtagttttgaatcactgctccaattctcaataccttatcgttagggttaacaaccgcatctacattcattttaagacaattgatgtccgacgacttccactcattggccttatattgtaaccagtagtagcatgttgtggtaagccttgttcaattgacacaggtgggtgaacttactgatccaacacttatcctaatgggtgatgctggtgtaatgttgcaagggctaccttaacttactagtgtggtgagccttgttcaattgacacagcatgtcgtgggtgatcttgctggtgcatcacatgtcgtgacgattgctgctagtgcaatgttgcaagtgctgcgtgtgcgttgctggtgtgacaaatgagga

SEQ ID NO: 212132 - DNA, 608 bp, Cannabis indica
cctttctctttgttcctcttcttctccaaccattacagccaaacacccttttgggatatctttattcccaatttcatgatcattatgattatggaaatgaatgtggggaatattgagatggaaaatattgttggtattttttaatttctcactagaaattgtcatttttgaaagaaaaaaataaccaaacaaaggattactagtagctagaggagtaggaattgggaataggaataggtttttgttcttgttttgtgtttggatgattaattagctaggtgttgtgttacaagaaaaatttgatagaaaaaggccaaggatcagaagaagaaattgctagcttgaatagagtaaaggaagaatcggtaagagatcttggaatgttgctcatgatataatattttctcaagaaacaaacatatgagagaaaataaggaaagaaaaataagatgagagaggttttgttatgtatgaaagttgttttaaatttggaacatcgatagtgtacaccaatttaatccaatatggaaggcttattatatatagattatagaatagcaaatgagcccttaagacaaaaaaaaacgcatcataggatgattttgttc

SEQ ID NO: 212133 - DNA, 1383 bp, Cannabis indica
tgtgtcgtcgttatcttgtttgatacctcctcgcttagacttttggtgttaggagggaaaagaaaattgacgaggtgtaggaggtcgagcgcggggagcgagcacgacacgggatgcgcgagcagcgcgggtgtgagggcgcatgggtgccgggtgagggctcgtgggcgcaaagcgtgggagcgttgagcgtgccagcacagggcgtgagcggtgcaggaagcacgggacgcggggcacgcgggcgtgggagcgtggatcgcgtaggtgcggggcgcgtgggtcacaggagcagagcgcaggcagcatggggcgagcagcacagggcgagcagtgcgcacaggcagcacagggcaagcggcgggtgcgtgcgcggggtgcgccggtggagacggacggtggacggtgggcgcgcaggtggcatgcaggcacgcgaagctccccttggcaaacttccaggcataacacttatgactccaaatattacacttagtaatctttaggggtgattcttttagactatttattatttatattatcttttactgcataaaaaaatcaataatattttttcatatttgtttttacaattagaagcaaattacttaaagattgtgatatatccatattagttttgttataatcttttttatttgaaagttatgtcaatttttttaattttttataagttgttggtatataaattttgttgtacattatatttctgttttgttgtatagtatactattattcttaaatgataattttttttattttactatgtaagtggcatataattttgtaagcataatacaaatactttaatatatgtatataatttatttgcatgctaaatatatttaattattatttttatattttaattgtatgatatattatttattttggataatatttaattagtttctattttattatatacatataattttgttgttcatggtatatatattttaattatggtatataatttagttagttatagtataaatatatattagtaattatattattattattattattattattattattattattattataattgttagtatatattattttgggtgaatgtatagatgttatttttgggtatacggtatataatttttcgtaaataatatttaagttctatttcctattgtacttttattgatatgatatataattttattaggatcctatatatttatttttatttgtggttattatatatatttgtatctgtagggatttaaaaataaaatgcgtctcattgtattttgtaaatataaagggggttcatgaccactaaaatatggtgtattataggagattaaaattgacttttaatatgggtctcactcatttaatgtt

SEQ ID NO: 212134 - DNA, 701 bp, Cannabis indica
cctaagtgaaagcctatataaggaaagtaatgagaagagagatctaatctaacctaattcaatgtcagacaactctattctcttctttcttttatatttcaaatcaaatgcactctctttctcaaaattttgttctaacggtgtggaagattgtgatgaacacaatcgaaagagaagaagatccaggttcagatattgattaaactctgctacaaacagaaattaagggttagcaatctgaacagaaggagacataatatttcgctgcatcaaatgtaagattttctataatcccttatgtgttttatttattgttttaggaaattccatatttagaatgtttgttagttataatccaacatgcatgagtagtaagaccgacaaagcactcacgtccctgtttcttcttaaaagattcaataatttcataagcaaaaaaaccattttttgcgatccatcgaaaaaggataaaagtcgattggtagagagaaataatcattaacaacaaacctcttaatctattcaccaacaacatggagataatgttgtagaaaaattacaaagactaatagggcagttttcattgaaaccttctgcacccaacttcttaggaatcaaaactataaatgtttgatttagggtcctgacaaattttcaagtctgtaaaaactggataaccgtatcaatcacatcttgaccca

SEQ ID NO: 212135 - DNA, 546 bp, Cannabis indica
ttttttgggcaaatcaatacattgataagaaattgtaatgtcaacaataacaattaactccttgatgcaaaaggcttaggtggcaattttttaaaacatgtgtaccatattatatacatcaaatctaaatataaactaatcaaaaattaaatggacattcctaacaagagtgtgtattgattcatttttatttattttggttatttatattgtagttatttaagatattttataaaaattttcaaaattttattaacacatagaaaatatgattcaaacagtctacttcacacatatataaaataaaaaaataaaccacgtatgcaataatctatttagaccctattttcgacatgttaaatttttttttaagaacgcatcaatataaacttctttttaataagtacatattagaagcacactaaactaaactaaattacattaaaagaaaaattaaattacataaagggtttgttctcaaatatataaatataaaacttgagtactaaataacattgattgtttattattattattactttgctt

SEQ ID NO: 212136 - DNA, 599 bp, Cannabis indica
agccgcgaagaaggcaaacaagagcttagcaatggaaaagccttaagcaataatttagggttattgagaaacctatttagttaatttcttgtcatccaaagggggtcttagtacgaacctcttagggggaaccttcatcttcggagtcattggtagttctccgaccaccccaagccacggtgactgcccaagggtttttgaaaaaaccctagatctagactaagagagacagagagaggagagagagagagagagtgatagagagagagctgagatgaacagacagaaaaagaaagaaaagaaagaaaggaaaaaaagaagaaaaaaaaaagaatttcttttaaaaaaaatttaaattaattttattttaattttttaattttttgaataatattttacgtggaccaataaaattgtggcacgtgtacactgtatctagtccaacatggcacttaacacctaaaatggacgaaaatgttaaattactaatagaacacgagtattgggggttttaccgcctaaatttaagttttgggggttaagtgaaaccaaaatgaaagttttgggattttgccaccatttacccaataccatatact

SEQ ID NO: 212137 - DNA, 560 bp, Cannabis indica
ttttttttacaaaaaaaaaaggttcgcaaacctccttttataaactgccttattcatctaaaaaatcaatatacattgtatttactttttttctttaagttcttagctatggtgaaagctcgttcttctctttctctatctgtgtcgtctaaggcaatgaatttgaagaaaaaaatgaaagaaacaatgtctgagggtagtgatagtagtccaatatttcgacgaaaaagaaagaagaataataattgatctaagaatggaaaatgtgcggattgacctttgaaaaagataaaacaagtggtagaagaagataaaattgagtatgatattgatgatttagagattgaagttctaggtcgtattatggtatctataatttttttagtttatttttgtttatgtgattgtttcgatggtatgatagtttacagtttgttattaatttaaatttttgttcatagtttatttaggatttagtatggattactaaagtttttatcggatttttaattaatgatattatgtatatgttgcaagtatttgttggtttgtgatttttt

SEQ ID NO: 212138 - DNA, 652 bp, Cannabis indica
tattcgcctaaaacttgattcacgattaattgcgagtcactgtaacttaccagattcttgacttttaacacttcagctattctcaaactagctatcaaggcttcatactcagcctcattaattgaagtgtaaaatttaaatcttaaggcatagtgaaacttaaagcctatgggcaaaattagtatcacccctgcaccgaagccgtgttcattggacgctctgtctacgtataacttccaagtgtccgcgtctcactgaacaagtggattttcatcgagagttatcccttctatcaggaaatctgccaaagcatggcccttgatggatgtttgcgagtgataagttatgtcgaactgccccagttcaattgagcattttatcaatcttccagaagcatctagttttgacgaaacttgtctcaggcgttgatcagttaatacctttatcggatgtgcctagaagtagggccttagtttgcgagatgcatgaattaggtatagtgcaagtttttcaagaggtgcatatctcgattctgcccacagtaaccttttactaacatagtaaaccggttactggtgcttccccttttctcgcactaatgttgcactaatcgcatctccaggatagccaaataaataagtaaagtctctcc

SEQ ID NO: 212139 - DNA, 754 bp, Cannabis indica
ttatcacccgaaaggctaaataatgcatgcttaacctcaatctcagtgaaaggttcgtcaagataagcaacctgctgaggggaaagcctgttagagatcccttgaagaagagagttgacctccatatcacacacaccttgagaagtaaaaagagaagtataaaagtcaagaaattgggagattatggtagtagaatcgtgggaatgatccatcaggaagatttggcgaatgagattgtctttttgcgagtagaagcacgttgatgaaaattttttgatttttgtcaccagcacgcaaccagtctactcgagaacgctgtttccaataaacttcctccttgaggagaaggccatccaactgcgattggagagaagcagcttgagaggtagactggagggtcggctgagaatcattcaacaggttgtgaagatccgcctaaatacgggatatttgaagcttaagaggatgttgagatttactccaagtcctaatatccgatatgcagttagattgcctgtccagaaaagattgcaagggggataaagaaaaggtccgagagttggcccaagaagaattgacaatggaaacaaaagaagggtccttgagccaatgattttcaaagtgagaacgagtggagttgaaattgttgaaatttgggtcctgcagcaaaatcttaagggcacgatgatcagagccatagaaacctaaatggaaaagagtagcttgcggatacaaatttgcccaaagctgattt

SEQ ID NO: 212140 - DNA, 503 bp, Cannabis indica
ttaacaaataaaaagcttgatatttgctgacatagaacaattattaaaaaaaaaaaaaattgggaattgattccttaacattatggcttaaataattttttcttttataattttgggacctgagtgtttggagaccgaagcgcacgtttgtttcgcctatctttagggtcggccctaacaagatcattaaacatatataatcaacttagttctagtcttgcgcttcccctatcgatgccacacaccacaagacctataaagatttaaggaagcaaagaaagagagagttagcttcaattgtaaacacaaatcaatactaaggaaagtgatttgaacacaatatctttatatattaaaagtgtctgtctaacggtaattcttagtttaacggcaattcttcgtttaacgattctttttttttaacgccaagagaacaattcttatttttttaaacgttttcttttaacaccgttaattttattcttataaaaaaatatataaaa

SEQ ID NO: 212141 - DNA, 565 bp, Cannabis indica
gaatgcagaaggttcacttttcagtattctttttaatacaatgtctatctatcaacttcaacgatcaacaaataatgtttgtggttattgtattatgtattataaatgtattgtgtatattttcagaaatggtcacttgactcgcatttctgacaatagaagttgaaatatatgtcttgtttaatttagtgcgagaaagttagatgagcttccccattacgtataaccttcttagctagatattatgtgattgttccttttaagtcctaattttacatttgattcttatgtgtttttttaatattaactcaacattcgagattttacatgacatcgatctacccaatttttggatcttatttatatattttaatctaactacctgtgatgcaaaaggaatacgcaagttcatgcattttacttttctttatttcattaaaaaaaaaataaacaaagaacaataaaagtcaagattgtgtttggaagaaatgagataatgaaggttctgaacatcttataattcttaaggtatttaatttttttttttttattttttctattcttc

SEQ ID NO: 212142 - DNA, 778 bp, Cannabis indica
tactaaggatggaaaaaaatcttatttattttcaaatctaactaaatatataattgaagtttatatttagatttatctaaattagtaattttaattaaataaatatatgaatattaaaaaaaatagattcaaatagatatcaaatgaaattacaattcattaaataatgagctttagtttaagaatattcgatcttcattgttggctctacatggttcttgttttaatgagattcatccctaatagatgttcattcattagcaattaaatatcgtagaatctcgaaagataattattattgtaaatcttttattctctgtaatgataacccaaatagtgactgctcagagtaggatttacaaagtataaaataatagtagaagctcataaaatgagaatgaccttaactctctcctaaataggacaacgtcagattcttattttgatcaaataaaaggttgctaaaatggtatctattttggatgatgtgaaaactctatttaactaatgatatatttgactctcgcctaaacaagacacttatatgatttagttgaaaaccttagaaattatttaagatgtgttaattttatattttcacatgtctttattacttgctaaatatttactaattttcaaatatgtgtatgaatttatattgaccctgtattgttttctattattgattatgtagtataaattttgaatctttattttagtctaacttggtttgttgttttaatgggacaatgcccaatagattgtcaatcattagaca

SEQ ID NO: 212143 - DNA, 513 bp, Cannabis indica
ttatatgtttctcaaatttagtagcttggtttacccttgaattctaaaactgtttactttgtattgtctattatcttcttgactttgtaccttatcaatggaattaatcaagaaaaaaaaatgcataaaggactaaagaacaactaaccaagtcgattacaataataaagtaaggccaattaggatttttgttttttgaattttgacaagtaccaaatcatgctctttgaattttaaggccgttaaaaattcaccttaaattattaaaattgttgaatttaaggacttttgtccaattttagtaaagaaagtctaatatgaattaaagttcagaagacatgatttggtgcatgtcaaagtttgagggacataatttggtacatgtcaaattttaaaggacgtgatttagtatatatcaaagtctgaggaacatatttagtgcatggacaatgactaaattagtaaaattgaataaaatctgatacaagtttttatatccaacaatctcaatag

SEQ ID NO: 212144 - DNA, 641 bp, Cannabis indica
ttttttgaaaatattattggaaatagcttcggttaacaaaatgtcaacttgggcactgagcccaacaccaagtgtcaacttgggcattgggtttagtttcaggccactgaatggttttgttggattcccggaaacactttttatcttaatctttaactaaaacaaagaatatgcttggaagaattatcgaaaaaattccttagaattggcctcagttggcaaaatgtcaacttgggtgctggaccagcaccaattgtcaacatgggtgctaggccctctttctggctcccaagtcagtctgtttcttccccaaaattacgtatttccttgtttttgatgaagatgaagaaaatcacaagatagctcttcaatttgatgattggaagtgccccaggttaacaaaatgtctacctaggtgttgggtgcttaaacacctggtgctccgggtgctcaaaaatgaaagtgctcctaatttgattttgatgccttaaatatgtttgtgacatgtctaattcatggcccagtataaagtttgacccattttcactaagacggtccttgaaacttaacctctagttgggttgtcaacttgggtgctgggtaaaaccctagacgccggggttgatttttgtggtgttgtt

SEQ ID NO: 212145 - DNA, 551 bp, Cannabis indica
ccaatgtttaatgcaattaaaaatttgtgtttagcaagtctactctttttaaaacactagcacaatttttataacttatgaaaagtaatacttattacaaagtaaattaaatcgtaactctatcttcaagttgtataatattatttatgtgatcatatgttaattttttttaaagaaaaaagtgtaaaaaaaaagtatcttaaaactacaaatatatagtagtattgatttttttttcttatgaaaattacattaaggaggtacatgaatgaaaaggtatcaaatgatgcgcattaagagtagatgttccatatactaaaatccatttttctaatgatcaagtgacttgtcaattatatccttatattcaattttataatttagttgttgataaaacatgagataataattttgttcagttgagaaagtgacaatttatttgtcactatatatattatcctattatatcatcaataaatatataaaaaaaaatatatgattttctatagtaaattttctaaatagtcgttttagtagattttttttatctg

SEQ ID NO: 212146 - DNA, 1201 bp, Cannabis indica
gatagagggagccagttgtgaagaagggacagcaaggcagtgattgggggagggatattacggaatttagggatgtgagtatttgtcggctctccttttctttctttctctctaaatatttagttatttatatcggtaccacgtgattctctttaataaattacccaaactacccttccatcttttaaatcaataaacctctccataactactactactatctagttttatggacaaatagtattttcccactcaattataacattgatgatgttttacacctcaaattcttttgtaattgaatagcaaaaatctcatggtaactccatctctaataagaaaattaaaaagtagggttgaacaaaaaatctaagaaactggctaaatcgaatacattaatcgtacgaacattgaaaaaccaatattggaaaaactaaaaatcgaaaaaattgaccgattaaaaattgcctttgcactgtcggttttagtgtcaatagtaaaataactgattaaaccgaaaaccgatcgaacatatatattgtacactatacatatataatataattacttttatatatatttaatatacaattttattaagttgttgcatgtatgatttgagtttgattttgatttttggggttggtttaaagttattttagctggttttggcttgaattgttgcttgttgttgtgtttggactgttcttccatggtaaaattagtttctgaagtttaaagttatttctattgcttgagttaagtttattatggcttgtataggtattctggaaggtttgaaataatttgaggtagaattgttttgttaatgaagttttttagggttcctgcaaagaaccggtcaaccaaatcaagcttgccctgtagaaccagtaaatcggttcccaggcagaaccttaagaactggtttttcgttttgggaattcagtttaccagttctagcagttttggaatcctagtttttcatgttttagcggtacttagggtattttcatgttatccaacaatagggaaacttttagttatgattttaagtccccaaaaagtaatttagcgtgtcacttatcactttatgtaatgttgtgacttaggagcctgtaaaccgtcgagcagttctactcaggttgaccagaaacacctgatttcaggattgaggtaaaaattagtataaatgatatgc

SEQ ID NO: 212147 - DNA, 677 bp, Cannabis indica
ttcttcgtatagatgagatagagcggctcttagttcttctttggtacatttggtatcgtctgggttcgtgaccaaaagcttttcgatatcgaaggcgtagtcgggctaggcctttttgtttgctcgaacctatcaagaagcttaagtgagaattggatgtgtgacttctggtcatgtttcagttgttagttcgactggtcggcccccggaggcaccgtgatctcctccaactgaagggtggttcaaacttaatattgatgttgggtagcgaccttctgactgttgtataggttttggagcaattattcggaactttataagacgttgtgtggtgtctgcaacgaccctagtggtgggtcttttagctctatctgtcgtcgaagctatggctatgctggttggattgcaattgtactctcgtcttagatatcataatattgaggtggagacggattgtcaaattgttacaaaactcgtaaataaaatagaggcttgtctggcggattatggtttggttttacaagatatttatttagtttgtgataagcttaatatttctatgtttttgttttgtaattgttatgcgaactcatagctcataaccttagcaaactttctcttgatgatgcaagagtttggtggtcgggtttatttgagtttatgtaagtctttagatt

SEQ ID NO: 212148 - DNA, 1038 bp, Cannabis indica
caggtagtcaaagttctagagtaaggggcatacaaattaggtatgtatgatgaaaaaatgccactcgttctggtaccaaggtattggaatggggaacatttaagaaaatactaccaatagaagtaccaggtcagacgaccatatcaagtacgaaacaaaagaacattttctcttaagagaatggccttctgggcggaccacacccaaaggtttggataaaatggtcaagtactcaggtcggatgaccaccattgaaagtacgattttttaaattctacaatttttttatttcatgttaagctaaagattagatcaaatcagcataataactttgatgtaagttactacggtaacagacatatgtccgatcaataaatgaataaacatgcttatttcaaaattcaaattgattcgaatccattagcatgctattaatttaccatctagtacgtacaaatggtttggtcgaacccaaaaccccgaacatataagagagtgtacttgtaaaaataaatgaaaagtgacgaagagtcataattctgctttgtcacttgggaggcacctatacgtgtacaaagaatttggtaaaaatataataaacagagcatttggtaaaagtgaccaagaatcacaattgcatgatgattataaacagagaatgaaattcattaaagataacaaaagcatgcaaactcaggattaaaggctgcccgatcagctagttgtccgaaaaatgaaaaataatttccaagtttaaagaccgcttggttgatcactttgtcttaaaaaaggccatatgcccgaacatatagaaaaagaaagcattcaaacaactggagtcccaggctctttgtacgggtcaactgggtcagctggagcaggaggatcgtttgtctgagcagggggcacttccacactttgatcagttggagaggtggaagtggtcacctcggattccccataggccgcctgagcagtgcagtatccgagagacatgtctttggaatcgcccaattattcaaaatttaccttgggatt

SEQ ID NO: 212149 - DNA, 639 bp, Cannabis indica
gccacgtgtacactgtgtacacgtggacattccaccatagcagttaacagccaaaaatggacggaaatggctaactgctaacagaacttgagtttacggagttttaccgcaaaaattttagaattgggggttagttgcaaaaacctccctactttagggggttttgccgcaaataaccctttaatatttccatttaattccaattcaaatttaaatcttcaaatatttttttaaaggatgagtcaagaatttaagtaacttccctgatatttttcttattttcaatcttccatttcatccttcatatttttcttagtctgatttccttagctcattttctctttcttcttctcatacttttgcaatggcctcaagagcctccaagaacaaatcaaatctactacggagaaaacttcacccttggttgaccccgatttcattcttgagtacgagtcagttttttggggatatctgctctcggtaccctattccaaatggagtaaccttctgtatatggacaatggatgaattgagtaagagtctgtaagatctcaaaaatgtaccaatggtgggtattctagtcagtggaaagcacatgggaaactttttgcgcatgcatgttcatcctctactgcctac

SEQ ID NO: 212150 - DNA, 549 bp, Cannabis indica
ctcgaaggggaggcctggctgattatggcaacccaatggtgatagataccaacgtgcaaactcctagaaatacgagaggaccattaaggataaaccccgagaaggttaatacaccacctccggtaggccacaaagtgacttcccttctagatgggatcacaccacgcgtacaaaaactggaaacgccagttcgacagctgatcattccactcccagcattgagattccgtcaacaactatatggttaatcatagaggcatatctccccaaatctctcagagttcgagagaaaagtaggagccagagaagaagcgagagcaagaatctgggaggtgcattgaccacttgcctgttgcaggcctggccccaaggcacctaggggcaactgatgcacaaggaaacaaggtcagtttcaaagcttctaacaatgaggctaaacatgaagctctgaatgctggccccaggctagcacacaaagcatgggctaaccacctaaacttgccccacgactcttagctagtcgtacgttatgtcctaggttaatataca

SEQ ID NO: 212151 - DNA, 677 bp, Cannabis indica
atttttcaacactttttggaagcaataagggagaacgaaattaaagagcagatgcaacctagaagactttccaacaacgttttttcgaagattccttctcttcttatgttcttattaaatttgtgtcaatcgtttacaataaataaataggagtagctagacttgtatttaggatattaatgaagattgtttgacatcttattatgatttcaatacaaaatctgaaaagtgagtattgattaggctatagtgaaatagggacaaatttcgacatagaacgagagtacctatgtggcttggataacatttagggtttctttacttaatgtctcttatatgtttaaatttatcatgagagtagaaaatttacatataagttgagatttatttatcctagtccgaatataagttactgcagtaagcccgtcattgcatagaaattggtatttaggaattaagttgttaagccatataagatagattcaattgaagttaataaccttaaactctaatcattgttaattttcattctaagttagttgtttttattttcactagattataatattcttcctttaatttttattaccaaataaaattaggaatttaattttttaatacttaactacaatcttcgaaggaacgatactttatttaatattatattacttgaaatc

SEQ ID NO: 212152 - DNA, 570 bp, Cannabis indica
gtcattatttaaatataactaatctgaagtcaaatatagcacgaacatatcaaaaaaacacaaccactcttgtcataatacttacaggtcaggttataattaaattttaatttgacaaaattaagctcaggatctattttgtaccattttgaaaaacacaggatctgaattatcatttaacaaaacatagagtccagtcaataatttttacaaagtacaggattcaaaatagtatttaccctaaaatataaaaaaaattaatatttttttatatactttcaataaatattaaataaacattaatagaaaaaatacataaacttttatgattttgcattgcaatataatgctaaatattgttctatatatcaaataataattttttttgtaacaaatataacacaatattatcattatagatgttcttagctatcatctttttactacctaggaaataataatagaccataataagaatacaacctttttaatccttctccatagtaaaatcatgaattaataaattttattgagttaattataagtttaggaaaattctagcatagacac

SEQ ID NO: 212153 - DNA, 858 bp, Cannabis indica
tgactaccacattcacaaattgactcttgttgattcactaaacgaagaagagttcgaagaatattattgtgattcctgcgaagaagaaaggaatccacaatttcgtgtgtacacgtgcactgactgcaaatatacagcgcacgtacattgcatgatgaatgaggtacgataattctacttaactataatattttcaatattatatgtacatatttcaataatttggttgtgatgataacctaattttcgttcttacttaaaaatttatgaaatattaatactcacataaaagagaaaagattttgcaactagtttttattttaacgacacacacataggtagacatatatacattgttaaatttgatggaattaatgataatagactgaacaatctatttataattgttggaagaaattattaatttataagtttttatattgcttctgcatggtattttttttttttttaaaaaaaaagaattaattatttttagaaaaaataaaaaaaaaattaaaaaaataatgagaaaatcaaaagagtaactaaccagaagggtaactagttaccataaaggggttatgagatacattatgctttttttttcatattttttaaattgttttctaaattttttccattaaataatttttttcaaaaaaaaaatcatatttttattaatttatactttaaaaactagaaaaataaaaaattctcccaaaaaacaatataccactggacaacaaaaagtaattattaataatttctacaagtttattgagtacatattctgaaatatagtagaattagaaagttttgcccactacaaaaaatcttacttttagtcataacaaaact

SEQ ID NO: 212154 - DNA, 552 bp, Cannabis indica
tttatttggaaccattttgatcataaataacaatttatattatacatgtaacaaaatatgtactaaaaataacaatattatatatatgtataatgtatatatatagtgtaagtctttggatgtaatatttagtgtatatattaatactcacataataacaattttatttggtaaccattttgatcaaaaacaacaattttagattggtgtgtatgttttcaatctattataatgatatatgtaacaaaatatgtactaaaaataatcaatatttttttttattagttgtaagtctttggattgtgatattttagtgcatattttaatctttattactaattagctttcttacttttcatttgtttaataaggtattgttttacctattcaaaattgcagtggttggttttgtctatcttactattgaggtagtggaggaataaaacgacattaaaagttatcatatttcatggtatttttcattaatccttttttaattttaatttttttggtaaatgtattatgttcataacatgagatcacaaataatag

SEQ ID NO: 212155 - DNA, 506 bp, Cannabis indica
taatggtgttgtgcacattccatccattgaactttatgagaaaatatacttcctatttctcatttagggcagcaccacccttaggtaaatataggtaaatgttttacagtatttgttaccaaaatacttattttccaaactgaattctattaaagacttttagaagtctaaccctcaaattggtatctcactaagtacttcacgactttgtaggatgggacatatagtacttatcacatttgttcacacattgatttgttcttacctattgaacctaacactagtaaagttactattattaagataggttaccctcaattgtgaactgatttagggagtttttgtcctatccctttagaagtcttttccactaaatctctcattagtggcttcgtaaacggatcctccaagttttcacttgatctcacatatgatattgagatgactcctctttgaatcaactcacttacatatccatgtcttcgactaatatgtttagacttcct

SEQ ID NO: 212156 - DNA, 784 bp, Cannabis indica
gtacaaaaatcttatgtatttttacgtttatgcacggtttgttttatagtttattttggagttacaaaattattttttgtagctacagaataactatttcaactttaattttattattttacatttaattaagatattaattaaataataaattaataatattaaaatacaaaatttcattttcagacacaactggtaaggtgaggttagtgtatacaaaattacctaaattaacggaaaaaaaagaacttaacaaaattaataataattaaggagttaaaaaatatatgggtgtcggctatgaaagctagaaagggatccttctccctgctaaattttatatttatattttatagcgttatattatattcctatataaataaaacaaaggagtaaagaaggttcttgtgagcttcccaatgtaggtctcattattaaatatgaacttagattcccttttctcactctcactctcactctcactctcactctcattctctcacgtctccacagtcacacaccgcagttgctgccatttttaactgctcaagagttctctctctctctctctctctcaaataataatctcctaaatggcaaatagtcaatcccatcgccagtcctgacgtcctctctattaccacgtgtgattttcaatccatataaaataatatatgatcaagtgtaaatatgtggactggtatatcaaaaaacgattcaaaaaactattaataatatatatattactcgtattaatactgtatgcatactcctatcgtttctg

SEQ ID NO: 212157 - DNA, 1054 bp, Cannabis indica
atagtgtgatagtttagaatgtaccatataacacatgatctccacccattattttctagacctactactcttaactatcataagtaactttctcactcatatcaaatatattttttttctatatatataaatttttcatgaaaatgaaataaaagaaaaacaaaataataataaaagaaatgttgaaaaattccaaaagtgatgagattgtgcaccccaataggttgggttgggttgggttttggaccacagccgcacccaaaaaaaaacccatatataagtggctcacagcttacatgcactgtatatgggtcttatttttcctaatatttatttttttataaattaattaagaaaataaaaagctcatggactgaattttttttgggacaaaataaagtatttattattcaattaaggttgataatgataactataattgtaaaaaacgtgtaaaaattatgttaatccaatcctaatcaatctcatacttttgagactgaaataatgtcatatttgtctatatattactattaatatcaagtaataatcttcattgaaataattaaaatatgtgtcaaaatgactggttatgttttttttcttttataataattattattattattaagaataatttatagcgtaaatacttaatttaatttttagtttgtaaataaatatttaaatttaatttttaacagtaatattatttaaattatatttttaaaattttcataagtacttgccattcatctatcattttttataagtatatttaaatttaattataaataaaaaataaaatttaataaactttcaaaaatataagttatgtattattagtataaaaatgaaacttaaatatttattaattatttttttaacatatgtaaaaaaacatttgatttggaagatatgtttttgtgtgtgccccaattaaattttttgaaagtgattcggattgtacgaacatgcaactaatgacctagcttttttttgcctatgtaaatgagccatctttatgtctgatcaaagttttgtaaattttaat

SEQ ID NO: 212158 - DNA, 619 bp, Cannabis indica
tctcaaaaccatatagagtcagatacatcccaacatcgattcccttttctcttgtattattatcatcacaccaatcagtagatctacttacactgtctatataattatgctccttcgaatacgtccatatacttgtgttagctctctcacttttattctatctctctctaaatccttccaaaaaaaactcaccaactatatggaatcaatctaattaacaatttcccaaatattgctcatttgtacatatatacattataaattatttataaattcacgagcagaatattattgcatcacgatttttaggtgctatcaacccatcttgtgtttcttgttcaagtgtgtataattaagttctggcttttcgtcaggactgttgtccctatattaatatatatattttctagttatgtagttgatgtaaattaatctgtggtagatttagttatatgtatatttatgtatagaggcagaaaagtataacttgtatatatatttccccctagaaaccttaacttttcctagggcataggtagtactacacaggagacaaggagattattctaggttgtttctcttcttccattttaaggtattttatagaactagttgttga

SEQ ID NO: 212159 - DNA, 828 bp, Cannabis indica
attttggccataacttcttcaatgcaacttggattaagacaatttaagatgtttcgaaaagctaagaacgagatctacaaattttctgttcatctccaatccaattatgtttgcaaggtcatcaaaatttgcaattaagtttcatcttgttaaaccggcttgccggcttccactattttttaccaaaatgtgctaacatccctccaaatgactctaaatgcatgattagcctttaaaataatacaacaaattataatcacactaatcaataatttatagtatcaatttaagaatattaatacatagattggctatatttataagataaaatatcgacttattaaattctcctacatttgactcttgctcgttctcgagtaagttaatgataaaatgaatgatactgaaacaaatcggtctttttgaaaaataattttagtttcaaaaattatacatcaacttataattcaaagaaaatccaaactctttaatcattaatatttcaattaaagataattacttttcaaactcaatctttgtgtgtgcgtgtgtgttcaatcaactcttcatattactaacattcatattaatttatacatgccaacaattaatttttatctcaaaataaatgtgtattttaacgaaaatccactctataggcttaattatcaaattattctccactaatataattacacacaatctaaagatcaagaggactttataagcttataatgtaaggctagaatgaaaggtagataagaaggttaatttaaggttatatcacgccatatcatacatatataatattctctcaaataattctca

SEQ ID NO: 212160 - DNA, 751 bp, Cannabis indica
atatttttatatctcaacatgtgtaattttttgacttggtacaaaatgatatgattacatctctatttatacgattatatggactaatcaagaaacattattaaatgactagcttctacatttttctacataattccactattaacaaaagtgaaagataattactaaaaaattcaagagtaaacaaacaagaaaactctagacaatttagtaaataagaatattctaaaaaactttattaacagctaaaaaaaaaaaattaaaaattaattatattaaatcaagtttaatattttaacaatgaataactaaagccgtccgattaaatgaccgtggactttcctaagcacttgtttaatatctatctcatgataaaattagaaaatatacttattaatatccaattctttgatacaaacccctcggtcaggcttccatagagcagccaaagtctgctacatcgatggaaaatcccaccctatcattgataaactagccaaccagagatcatcatgcataaaaaaataatctcctcactaattgtgttgccaatcataggaagctcatcatcctcatcttccaacgtgatatcaacaatattcttaattgaagaacatctcaacgccatgcccaccaataaaacaaagaaaaaccaaactcagacctataagaaaaaataaaacttttgataaaacaccgtaacgatgttaatttattaaagtactccttgattgaaatttatataaaaaaa

SEQ ID NO: 212161 - DNA, 644 bp, Cannabis indica
ttttttttaatttataatttaagttgcacctataattatttcgtatataagttgctatgttgatttcagttgtaatttaaattattatgttagttgttaagtgagtttctatataaattttcgtaagaatattaaaaaattatttaaaatataaaaataataaaaaaaaaaacttctttttatatccatttaatgtgtttgttatttatttccattttttttttcagtaatctccataaaaaaaaaatgagaagacctatagctgtaccaataaatgtttcatattaaaagtcaatgttatttaatagttgataagttcaaatatatttactttcttccttgaatattttggattaggttgagaaaagtggatgagaatgttttatttacaatccttactaattatagagtgtgttattattgaatattagtggcgcttagtattttttataaatagtacatcatgattggttagtaatattatttaaaagttatttttctaaattatataagacaatacttaattataacaataaacataaagaaaaatattaaacactaataatatcttttaacaattttcaattttaatctactcacctgccatgtcatgttaatggcatcaaattgatttgtttttatat

SEQ ID NO: 212162 - DNA, 822 bp, Cannabis indica
taataatgagggaaaaacaatagcaatgagaacaatgcgaaagaagagacacttgcaatatttgaaaagttatcatttttgtaagagttataacttaactttttaacagtttaattaaagtctctattaaaactaacagatttgacacaacaaattctgttagatacacatttatataataggtaagatatatatatatatatatttatataaattggagtaggtatataatctgaaatagagcataagaaagtgagtgaaaagcttggactcactcagacaacttgggatcatttctttttatgattaatatttaatattgcacattttgtactgagtgattttcttgttaacttatggttaatatgatttgtaacagcttgaattgcttaaatataataatttatcttgtttcctttcactttcatgatcatctgctttctaaaagagaataataagaataaataaaattgcatattcacttcaacaagtgaacttaatacttaaattttcctatttttccctcattggaagagacaatatactatagtacaattgctttatatgttaatactattataagtttaattaaatgacagtaatgttaagaatattatataaaaaaaaaaagagagtgtttacttataagtcctcctagctatttgacaatatggttttggaaattcttttgaaaacttaaaatatttataataatattaataatgtgtttaagagatttgattaattgttagtttggttggaggtataaatggaatagaaaagaacaaatttcattctattttttttttatttggttgtata

SEQ ID NO: 212163 - DNA, 681 bp, Cannabis indica
cgactggtgaatgaaatgttcgcgaattagattgggcgaaacatggaggtttatgtcaatgatatgttggtaaaattagtaaaaagttgaagtcataccacggacctcacagagtgcttcaaaatattaaggatgtacaatatgaagcttaacccaaaaaagtgttcctttggagtttcctcaagaaagtttctgggattcatagtcaacgcgaggggcattgaagcaaatcctaaaaaatcaaggctttgatagatatgccatcatcaacaaagcctaaggaagttcaagccctaacaggatggatgaccgcacttaacagattcatttcgaagtcaactgataagtgtttgccatttttcaatgtattgcgaggcaacaaaaaatttgaatggacagaagaatgcgaggaggcctttcaaagcattaaaaggcatttggcgacacctccaattttggcgaaaccagtaactagagaaacattactcctctatttagctgtctcggaagatgcaattagtgcaataatagtgcgagaagagggaaagctccagcaacctatttattatgtcattcaaaggttactgggggcaaaatcgaggtatccccctcttgaaaaacttgccttatgcctagttcatgcatctctcaagttacagcgttacttccaggcacacccaa

SEQ ID NO: 212164 - DNA, 965 bp, Cannabis indica
ataattatattaatttattaaaaagctaaaaagctttacttgttaattaaggataattacacaaaatattcatgtaatttttttttatttataattaaaaactttaaactaaaatttttaattttttattcactaaaattttactaaatacaaaactgaaattattttaatcacacaataatcataactaaaaccaaagtatactaacaattaaactcaaacaataatccaactattaaaaatatttaataagacaaataatatttatattatatatagaaatatatatatatgtatatataacacatttcacatttaataagataatatttcagatttataaaccaacaatattttacacatattaactacaatatttatatatatatataatatatttaagatttataataaatattaatcgaaatattaactacaatttatacagacataaaaacatactttacacaaatgaaaatttgtgatctctcttattcaaaccaaaaattttaaacctcttctacaaattctgaaaatataacacaaaaaaaattacattaaaacagaacaaaatatttctaaaatttctaacacttcaaaaattatattatagaaatatattggtatatataaacacattaaacacatacctttttaatgagggaccggaggcagcgacggagacgaaagcggaggcgaagccgtaggcggaggcggagaagcgtcactggcgatgggggaggcggacctctccttcagatttttcagagagaaagaaatgggaaaataaaaattggacaaaaaatgaaaaggaaaaaatgggaaaaccggagggtggagggtttaaataaatgaacaataccggcgagggtccgccgctaataaggggtcccgccggtaattgtgcaaataataatattttattagtattagcggcagattcccgctggtatagatccgccgct

SEQ ID NO: 212165 - DNA, 1075 bp, Cannabis indica
gattaatttattaatatttgcgtttgaatcttccactgccgactacgatactcgtactcagacttggatacgattacgatacgataagtagtggactaattacagctaaaaggattaataattaagattctttggatggaattattattgtgtgtacattacaaattaatttgagcctaagatatgaattaattgtatggctgaagaaagaaaaagtgaaaagacggagaaaattttaattattatttgccaagaaaaaaatgatgaaagaagaaatctctctcataataaatttattaagagtacggacaagtgtccaacatcataattaatgaaaatttattttaaaatataaaatgggtatctaacaatttcttatattgatgtaattaagtatcaaattttatataatttaaaataacttttaaaaaatatcatttatcggtatagaaagtataacaatactctgattttaaatataataacaaattaattgtaactaaaccaaaggtgttggataactatattttgtcaatatataggttgagtttattacaactctcacttttttaaaaagaaaatgcaaaaaatatattgaagggcgtattcaaataactatattttgttaataatttggctcctatggattcttgttaacatgtacttgaaggcaatgcttgtgatttttttttttttttctttttggctacgtgtggtggcttacagttctttttttttttttcttttgtaaatgtcaattatcaatacatctagaagagtgtatatcattttactgaattggtgtaaaataatcttcaactcaatttcagttcatgtgatataacaaattagtgtgcacctagtattattttaaatctacaaagaaattggtacacaattttttctttcattctagcattcttttaatttgttttaaaatatgatcattaattaatttttaagcatatgcataattatatcgtaggatctttaaagagaaatattttcattaatttcataattcttgtgatatttagcgacgttgaatcattgaaattattgttccaaaattaat

SEQ ID NO: 212166 - DNA, 894 bp, Cannabis indica
ataaaacataaaatggttgaactaaacaccacatatatgttacaataacaatactctaatagtcactcaaactaaaagtaagcaaatcttattcatatgtgtttatttggtggtaactgacttcttccattcttcagcaacaaacatacaaatcactcagaagcatttatacctgcaaaaacagactaattaatagattgaaaagaaacagaatgagcaattgtattttaaatatttcaataaaaacagaaaaattgatggtgtcaaataggctagaaagaatgttataaattgatttttattttttttatgcatgagctgagctcttggggaaaataatggtgttagttgctcacaaccatcaatttgaagctctgtcaatgatggaaaataatctcctgacaatgtcactttgagtctcttgcattgatggaaataaagattcttaagatgaggaaaaactccaccttcgataactgaccactcttcgagattagacaaatcatgtgtttatttggtggtaactactgtgttgttgacttgttgtattcttcaactcaatccaattagtcctcagcaacaaacatgcaaatcatttatggttggaccctgcaaaacaaacatagtaatttcactgaaaccaaaagcatgcacaatagtacaaaattaaagcttctctgaatgccaccaactaatgttattatcattataatttaatatttctcttcatcattcaataatttaatatacctatattttcttgtaatcgagaatgatatttgggatgtgagcaatactgggccagtcctccccggtctccctttggagtagagctgttagccatggacattcgaaaatgtctagttcagacagagaagtgggtagttcttttgg

SEQ ID NO: 212167 - DNA, 531 bp, Cannabis indica
tagacgtagaacaaagctgtctaggatcgatcctagacacaggaattttggggttttctcctacatttcagtttcatactaaatgaaacagtggaaaagaaacccacctacccttcctaatttccaattttctctctttcctcacaccaaccatattctaaaataaagtcttatccagaaaaaaaaacccaatccaaaagaaaaagtaaagccaagaaaaagagccactaaaattacaccaaaaattcaaaaactaattaaaaaagtaaaactaaaaaagccacttgtaattcaagaaatatagtaagcaaaaaagaacagcttgttcaaaagttatgacataataacacaatgaaaaacccttttacctgatcaaaagcaggaaatatataatctgcaaactgtatctcaacaacagctcgattaccctaaaaagatatcaaacattcaaactcaaaaaaactgtttagaaaccaaaaaactaaagtacccaaaaacaataaaacccaccattgcagctaaaccaatggc

SEQ ID NO: 212168 - DNA, 646 bp, Cannabis indica
atatgagttatgtaatctatttaatcagttacctcaatgtattagatttaatatctggttttttgggatttaggggtttttgttggacgatttgtttgtatttgttttaaaaaaacgcaaatttttgaaatattatttcagactagttaccaaaacttattattaaaggaaaaagattctctacataattaagatactagtcacaaagttacttttttttttttttgttttgagagagtagtcacaaagtactttaataacaggaaataatagttagtagtaattaaggatgcacattttcatggggatgggccgcggcaatttgagagttgtccattagaatgtttttgccatatatataaaatatatctctcttttttatttattaattaaaaatacttttatattatattttattaaaatgcagcagtttttagagtatatccaagaacacattaaaatttggtgatacactatcaccaaatttagtgtcaaaaaaatatttctactccacaacactaaaatttacaccaaaaaatatattttattattatattataaaatttaagatattttaatattcaacaatatatataaacaaaaattaactattaaatattaagaaatataaaaaaaaaagaatagc

SEQ ID NO: 212169 - DNA, 816 bp, Cannabis indica
ttccacctccgccaccacctcctcttagtcgtggccgttgggggcgtgacattagggagagaagtcggtcgccaataaggggtggcttgccgccaaaagagtaccgccgggatgtcttcgtggaacgaggtcgagatgatcggcgaggcatggctcgaaatcgcattgatggtgcatactgacatggttagggatgccttttttatatatagagagagagagagagagagagaatgggtacttgaagggcaaacggaggatgagtacagatttggggcccactgatgtttatttagttcctcagatactttgtttaacatttctggaagttttagctggttttaggtttatgcattttataatttgggtttggaaattattggttctttggatttggatgaaaagtttcgtccttcagtgctgtctatttcttccggagcaattcaacgtgtttatctgttaaacggagtgagtggtatttgctatgaaaatttggggtgcatatgcccatcttcattaatgcagtcattgcattggagtacaaatatggggtgtgattaccgaagtttcttttttctttttacccatattaaggttggtttctcaaaaatatatgtatatatgcagtatatattatattcattgatcaagattggaaataaaagaagcgtcatatttcttaaatttccatttttatcaaatttgagtaattacattggttctgctcttgttactacttactacttatacttttctggttttgtattttacttggaggtggaaccagcaaatggggttgaggttttgagattcaat

SEQ ID NO: 212170 - DNA, 603 bp, Cannabis indica
ttttttttctctactaggattaaaattgatgcaaatttcgaggttgaaaaaaaacagatacaaattcaactacattcatttaatcaatttatattatttcaaaaaactatatttattatatgataaatgctgaaagatacaaatgatgcttagtatttttctacatgttaatattgttattagtctaatcaagtatcaggtctcttataattaatataataatttttaaaaaatatcgctagccaagacgacatgtctagaagtgctaaatatcactgtgtctaataacaaagctaatacaattttaaaattgttctaaatatgaactgaaataatcaaagctaatacaatttttaagggtcaaatttcgtacattagactctatggtcatgtggccagataattgggttcattaattaggaccaaatccctagcaagtagccagtttgggttgttcaaacaaatccctagttatccagcaaaaagaaagaaaaaaaacacatccttagttttggagttctaaaaataccttatataaaattttaaatattgttttcactcctttaaattgtttttttcttcaatataatgatgtatattcca

SEQ ID NO: 212171 - DNA, 708 bp, Cannabis indica
acaaagcttttatccttgcagtttcatccaacaaagaaccgagatcttactttgaagccatacaaaccttggcttggttagaagcaatgcaatgcgaattaaaagcactttcagacaacaaaacctggtctatagttcctcttccagccaacaaaagagctataggatgtcgctggatttataagattaaataccatagtgatgggagcatagaaaggctaaaggctcgtcttgttgcgcaaggttacacgcaacaagaagggctagatttctttgatactttctctcccgttgcaaagatggtcacccttaaattgctccttgctatatctaccattaagaactggcacattttacaactcgatgttaataacgcctttcttaatggagatcttaacgaggaagtttacatgaaataccacaaggtctgaccctaccttcttctcttaatgcagaaacaaaaatggtatgcaaattacacaagtcgatctatggcctgaagcaatcttccagacaatggtacaaaaagctatccgatgctcttctccaagaaggattcaagcaatctcaagccgattatacattattcactaaaggatccgaagactctttcatagctcttctggtgtacgtagatgatatcatcattaccggtcccaatatatccaatctacaccagctacagcattctctacatcaaaaattcaa

SEQ ID NO: 212172 - DNA, 1427 bp, Cannabis indica
ttgaggattccgctatccatctacccggaatgaaagccgattggactggactgatcagagtttccatcaaagggcgcaatctattggaaagtatcttcgcaattaccttgtaaatgaaattgcaaaggctaatgggtctgaattgatccattctaatagagtgctccatctttgggatttaggcatatgaaactgtaattaagtttcggatttaaaacaccagtgtgaaagaaatccacaattgctgaattgacgccatctgaaactacatcccaatttcttctgaagaaacatccagagaatccatcgggcccaggagctttgagaggatgcaattcgaaaactgctttggaaatttcttctgctgatggaatttccgctatcatggcattagagctgtggtcgatcttcttatcaaaaaggctctctaaatcatctgaaatacttgggttctgcgatttgaagatgtctagaaaatagttgtttatgatcccagcaagatccctgaagtcttctttcttgacaccatttttgtctaaaaggcttgtaattctgtttcttcttcttctaatcgccgtggatgcatgaaagaaggcagagttcctgtcacctaatttaagccaaacttcccttgacttttgccgccagacactctccttccttgtccataaaattttcaggtccagttgaatcttctcctcttccttggaaagatcttcagttatcttgtgagattggatccatctcagcctattctcgagagcttttatcgaattgtcacaatctccgaaattttcctttttccacttcaccagggctctccggaccttatcaagtttgtatggaattcttccaggctcatccctggaatcagtttgccaacatgttttaattgtttctttgcaagaatggatatcgagccaagcttcaaagaaacgaaaaggtttgtaacccttgattttctccctgaacaaatccaaaatgatctttttgtttagttgtatttaaaattattggaatgacctttccattgttttagtagaatggctattccattttaaaatagaagtaaagaccattccaatgcaagatttgaaatttttaataactttttttatcaatatttttatgcattttaaattttattctatttcattcctattccaattctcattttcattcttattcttatattttcattcctcccaaccaaatgacacctaatagggttattgaaatgaatataacacctgctctttatagcagcaattcattaaagctaaaaccaaaaaaaaaaaaaatttactttagactccctgagttgtaacaatgaactagccagatgctactgcatcaaagtatctcaaacccacttcactacaaattccaccttggtctagatattgatgcagcagcaaagagaacac

SEQ ID NO: 212173 - DNA, 906 bp, Cannabis indica
ttgagtggataattagttattataagtcgattttttcaatggaaggccccaaaaaaagtctctaaactaatggaaggagtagggcagcttcagctggaatttctacaagtgctcaagaagagaggttatactctaaacttatggtggatgcagctgtattgagcaccacgagtatagttggattaggtgcggttgtattgtcagaagataatagagtccacgctgcgttaagcaaaccactcaaaggttagtcatagtgggtactttaaaatattatttgttgcgaattttattagtgtgataattccaaaagaaatgttgatagtccaggtatgggagaattataaagattttgtaatttctagatatcatataaaaattatttaggtttaggaaggaatagtaactctaagataattacgaagtaaaatacatgagttaagttactactagccaaagggtttccctttggctagttaaagtacttcatagggggacatagttaaataatttttggttttacccttttgctagttaaagtacttcatagggggacatagttaaataattttgggttttaagtgttttaatcagattggtaatgttctaattagaatttttgtggactgatgttgtttcaggtggaatttcagtgttagagaaaaaaataatatataattcatgatttagagaaaaaaaaaactataaaaacaccacatatatatcaaaaaaaattcagaaagattaaaaaaaattatgaaaaataatgattaaaattaaataataaataccgattaaatatgtataacataataattaatttacttgcattttatattttttccaatgcaaaaatagtaaagcgtgaaaaataatatcggtgtaacaatcaacttaaataaaata

SEQ ID NO: 212174 - DNA, 593 bp, Cannabis indica
atatatatatatatgttatatatcctaatttttgcttatttaacgtgacatgtttacgtggacaatattagcgccacgtggctttacagctcaccaacaagaaggccaattcatctactcaacacttcaaccaacaaggagtcccgatactcagcgacaaatgacgaaccaaccacctcaaggaggctgaccgatcacccttgaccggccctatggccagcatatgccggccagcttttagacagcacaaggctggccagcatgcatcctgcagatgcatggccggctagacattaagttggcaggactttggtgcacaacttcatacgtggtcatcaagctaaactgcgaattgggccttaatagtccaacaaaaatagagggaaaatatctatttttaagggacattttagtcattttgaattttactaatttaatatgtaaatatctacttatttatctagtcaaagggtttaagctgtcctatataaagagccttaaactaaaccctaaaacctaagtcattaagtgctaagttcaaaaacctaagccttaaaagtctaataactcatctcatatctctctctctctct

SEQ ID NO: 212175 - DNA, 863 bp, Cannabis indica
gtacgactcttttcggtttctgtgtggaatttgtacactccaatgtattcccctccggtgcttatcgacgaaatgtaagtgtcaccatattcgagaaagaagttacacatatcttcaatgtggatattgcttaggaatcgagcacttgtaatgtactttgttttgattcttcgagcgtgtacaacgattgccaagtctttttcactcatattcaacttacttataaaattcatcttttcatgaattgatcccaaatcatccttgatcttcaagttgaacgattgcttgacattgatcatcttcattactgaactctcgcccttgcaaattgtgtagataacttcttgtttgctgccgtcgaacttccctgttcccgtcactaccgtcgacaaacttttcccggtggtgctcgaatagccttgacaaagcatgactggcgtcgacatgatgaaaaaacaaaaccaagaaaatgtgtgttgccaaggtaaacttttttttttttttttttgaagattgttttgctctgatttttgatgagaaccatagtattacatgttatatatttataggctaaaaaaagtagagtaatatggtaactcttatcaccttatctattttatccttcaaaatataacattaacatataggttttttatttactgtttcaaattttaatatattttattcattttaaatatatgatattaatatttacatgtgtaattcatatataaaaagtaaaattgaaatcttaaataatgattcaaatatgtttagagcaattaataacacgaataataaatttaaaaaattaaatagagaaaaatttagaatacctaaatataatgtagttttaaatttaa

SEQ ID NO: 212176 - DNA, 843 bp, Cannabis indica
atttatgtgtatcataccttttacatatatgtgtcaaaattatagtattttggcatgtagtttatttacattaattagtttatacatttatatttgcttgctctcattaattttttttttttcgtcttttcttttcttgtttgtaaaatttattgcttcccatctttagatataattattataaaataaatacataaatatgaaattgcatgcatgtgatgaaagataataaaataaggttccaaattatttgaaccaataaatttaaagggaccatgacaagtctatagtgtgtgtgatacatgaaaactccacaactactaattaattaataataactcaaactcatgttaagagaaatgttaatcaagctgctcatggtttagctaagtatgctcttgagttggatgaaaatgtctgttggatgggtgaaatcccaaatcctattttctctgttgttgtaaacgatatgcagttttaataacagtgaaatttctacaaaaaaaaaacaaattgtcaagccaaatcttttaaaaaaaaatgaagcgaatatatttagtattatttaattgtggttcatttatatgcacgtgattttatattatttttaaaaggaatccattgaaaatattttagggaattattttatatattattttttaatttatggtatgagttatttggatagttttaatatgacttgaattttgattgcaatttaagttattatattggttgctatgtgaatctccgtaaaattacaaaaaaactattgtgaagtgtaaaaataaaaaaacaaatatttaaaaaaaatcatgttctataattttttttttactttta

SEQ ID NO: 212177 - DNA, 1067 bp, Cannabis indica
acatggaagtattgttagatggcattatggtggcatttgggatagattttacactcctaaacacaagttcataagttggttagccttgaagagccgtttgtctaccttggacagacttagtcgatttaatcatacaaactctttcttgtgtttgttgtatgaaagtggagtggagagtcattctcaattttttttaattgtacttacagcagtttggtgattcatcaagtgtggctttgaattggtattactagtcaaaaaaaaagagttccatgatgtcctaaaagtggattcggaaggcaaaaagttttcagaggtaaaagaaaggttcttttcagtgtcattacagcaacaatttatttcatttggcatgctagaaacaaggtgttgtgagagcaaaaacttcctactattaaaggttctttcagttgtattgctaatagtgtttgtactagagtgaactttttgaaagctaagaacttgagtaaaatagatagagagtggatggaagctaagctttgtaacattatcttgtaagtgtttgttgagctcaataaacttttctgaatttaaagaaaaaaaatctaacaaattcccccaaactaagcatttactcgtccttgagtaaaacactaaaacgaaaaacacacaatttaaataagtcaatccataaaacatgagtaattttcatgtagactcaataacatgattatgaaaaatttcacctatgcatgcataacaatccagaatttcaatttaattacacccttgacacacttcaatttttttcctcattcagctcatgaaaacatagaacacatttaaataacaattgaaacaatttatgcatgccaatttcaaccatcaatcaactaacccaaaatattccatatgcttgtcatacttactattatccactaatatatatcaacgcaaaatcaagaatcaaaaggtctttctaggcttgtaatgttaggcttaagtacggtagttgaaatggtcatttaggcttgcctataccataagcttatccaatcatgtcacccaggggcggagccaggttcaaa

SEQ ID NO: 212178 - DNA, 556 bp, Cannabis indica
aattacaattaaccgttaaatattagatgtttaattgtgatcggatcagattaaatgttatttttgaatattaaattagatcggatcagatgctagatgaggtgtccaaaaatccaatacatccaacgtctaattaaattacttaatattttcatttagtttgaataagtaatttgattttatattattttacgtaaaaaaaaaacaatgtgtatatgaaaataaacattaaaagtttaaatttctttttggattggatggatccaatccaatccaatacatactagatttaaaatattagatgatccgatctgatctaaaaaatactaaatgtaaaatatttaataaacctaaattactgcaatagatacacatgaaatacattcaatagacagaaccgatccaatccaatatttaatgaatgttggatcgatttagatggctggaatgaattaaattaaatcagaatataaaatttaacatctaatatataattagatcgaatctaaatagaacaataattattagatgtagtctgatacatacccataagtgt

SEQ ID NO: 212179 - DNA, 516 bp, Cannabis indica
atataactataattatatgtattttgactttcattatataagatggtcatgtgttgttggtgagttattataaataatctacaagttcaaattttttgatgaataaagctttgaaaattaaaattttaatatctcaaattaacattaatcatatatgttttatattattcaaaccatgcattattataatgtgaagacaaatttcttaataatgcaagcttaatttgatttttttatctctcaatttaattagaatattagtatagtagtcattaatatatatatgtataatttatatacatgaattaaagtgcacttaaatattatagtcttaatttaaataaatgtaattgatttattaaacggtataatttcatgatttctttagcggcataattaagtacacaatatttataaaattataattattacttttcagttttctgagtacatacattattgggacttgacaaaaacacaatagtattaattttcttttaataaattcaaaacaaa

SEQ ID NO: 212180 - DNA, 1486 bp, Cannabis indica
ttatacaaatacacacaaattaagcagaggtggagattgatacctagtaaataagggtcgtaaattggattggatgagcccgtagcgctaatagctgcggccaacgttcggctctgctcttcaagtaaatgcttcgccggtgctagtgacggtgatggctatggcgacggagaatggatagagaactggaggattgtggccgtgaaagtaaaaaaaaaaaagaccaccggtgagagagagagggcggggagaggagataggttttaggaccaaaaaaataaaaaattacattttattcccactttttatttttattttaattgttacttttattttattattattatttttttaagaaagcatcggttattataaattaaagagagtcgtttacaataacagaaaaaatagccgaggataattcctcaagccaaatacaattattatcctgcactaaagcatgtttcgctaaaccatgagtagcatgtttagcatatcgtctaacatgacgaacacaagctaaatggagattggataaatgataatgaacatccacaaccaaattatgaaaataagacataatgggtcttgaattgttaatcacatcagcaagaagtagaaaatttgttttaataaaattcaattgtaggttcagactcctagcaaaaagtagaccatgaaacatggccttaccttccatgaggcttatagcaaccgcgcactaattttgactttgcagccttgacacacccagaaaaatctcgaataattaggcctaaaccaattcttttttgggaagaatcaaaagctacatcaatgttcattttgaggcaatgcacaggaggaggttgccacttaattagggttgcaacaccaaccgaatgagaaactttcacactagtagaggaaaggtgtgcaccaatagcaatttgtatgtctacaacaccagcagaagtagaaatatctactacatcagtagaaagagatgatacactagtagcactatgacctgcatcagcagtttgagaacttgcagccgagttgattttagcagcaacattttggaagttgtgaagataagctaatcccttggaatggatttcaattaatgtttgaggtgatttaccatgaagaatattgttttgatcataccaaataaactaaataatgcaaaaaattatttccaactcagatttggtatgaacttgaaagaggtgaaacattcctctggtttcaaactagtagcagatcgcaaatcaaaagaaaacctagaatgaagccacactgatcttgcatgtttgtagctaaacgttgcatgccccactgattcccaagcattttggcataaacaacacacaacagaggtaagagatttctttctaaacaatgaagcagcaacagggaggcaattttaaatagccctccaaccaaagattttcactttcgaaggaagattcaaaccccaataagatttccaccattgttc

SEQ ID NO: 212181 - DNA, 632 bp, Cannabis indica
ttgacagaattaaataatttaagctttgaggaatttgtgttataaatacttaagtttactctcggttttgtaaataaatacctaagtttaacttttaatagtaataatacttaagttatgttttcagaactctgtagtgttgggtccgccccttaatttgttgggcttggaccaataagggctaaaagcccatttacaaataaaaggaatcaaaaagaaagaataatgagaaataaagctaatggtggtgcagtgtgaaatcagcagccaagagagaaagaaaaagagagggaaagaagagaaagaaagctagagagagaaaaaggtaaacagttttgtcataatacatttagattagattattattaaattttattttagaaaaaaaaaaaaaaaccaagttcaaagtcttatttgtaccattttaaaaatacagggtccattttgtcatttaacaaaacagatggtctaattggtaactttaacaaaatacagggtcctaaatagtatttatccttttatatattgtttaaatgctagcctctatgtcccctaggtcgaatatatgtccacttgggtgcccattaaggttctggagggtccaggtgcaatttcttctagactcatctcta

SEQ ID NO: 212182 - DNA, 817 bp, Cannabis indica
ttttatttaattttactaattcaatcatattctctcggaactttgacatgtaccaaatcacgtctcttaaattttcattcacgttagactttctttactaaaattggacaaaattcttgaaatttaataatctcagtagttgatgagaaatttttaacgactttaaaagtttaaaaattataatttaatagatattaaagatgaagaaacaaaaatctctactaacttttatacaatgatatatctattctaattaaatatacatagtaatagggccaatgagaatgatcaaattctttttatatatatatatatatatatatataaatataatacgatcaatataaagaaaaccatacgtaacttaaaagtaataagttatacaattgataactaactagctacaacgaaaacaaaatgaaacaatatctttaggtatttaatttaaataggtgtcattcttattttcattaggttgatgaaattataagagatgtattataaaattaataatatataaaggttatagtattattgatatttgatgaactagagaaataatgagaaagagaatgtcaaatgggtgagctgtgatgatagcctgtctttctaataatctcatcatcatcaccttcttaattataatttaagggcctaagttaataatctcatctcattatagtctctggttgccgcgtactactatatatgtatatacctctataactagctatagagatcgattgatatgttgttattgatttaattaattttaatatatatatagatatgatttgtccctaatgtattttcacgg

SEQ ID NO: 212183 - DNA, 601 bp, Cannabis indica
gttggttgttttgttgtggaagctaaaggcaagagtggtgggcttgtgttgttgtggtctgaaaaaataaattgctctattctttcgttttcctctttccatattgattctttcataaggaaagaggagaaccaagggtggcggtttacaggcttttatggagacccggatccgagtaaaagaggtgactcttggacacttctgaatagagttgccagaatgtatacggggccatggattattgggggagattttaatgagattcttaggcaaaaagagaaaaagggaggcaatccaaagccgagatatctcatgaacaactttagaaaagctctagacgattgctatcttcgagaagtggagtttgaaggaaatatgtttacttggtgcaacgggagacaagaaaatctgatctttgaaagactagacagagtttgcggcaattccgattggtttgacttgtttcctgctgcaaaagtggtgcatcttgagagattaaattcagaccactgcccattacttctcacttgtgatacacaacaacaagatgccatcaagggagttaaatggcattctcgcttccattttgaacacgcctggg

SEQ ID NO: 212184 - DNA, 863 bp, Cannabis indica
tgattttttaaaaattcaaaaccaaaccagatcaattatcaaactaaactaaaccaaaccactcaaaaacgaattggtttatatttctaatttttcttgtacaaaaattgttcattttttaatattttttttggttttttacttttaataagtttttaatacataaataataataaaaaaattagtatcaatattaatattctacctaaaattattcctatatatcaacattttatccatatatattaagtatatataaaataattatgtgaattggtttgatttgaacagctagcaagatttctaaaactgtgaccaacctagaaaattttaaacagtttggattgatcgagtaattcacaccaaatttatttgatttggtctcaaatagtttggtccagattagttagagtttagaatcacagattacggattacaacactcctattattaggtaccttaagatgtctaagagtgtactatactaatatgcatgttaagtgcttagtaatttctcaaatttatttattcaattaaatgtgtgagacacggtaataaatttgtaccaataacatatgttaatttattataaaattgtactgacaacgatatgttaactttttatggtaattgacactttaagttaataaaatttttggtctctctatttgtacctttcgttctctatcttctctacattggactatttttgtcttttacccaactcttccacctccaccctcttcttcaactctggtgacacatatttttaatacttaattttttatttaattttttgtttaattttttttgtgtgtgttacataattgttcccatattattattcaacaactaaaaattaa

SEQ ID NO: 212185 - DNA, 577 bp, Cannabis indica
tattttcaaaataaatatatcacaataattttaataaaaatatttatttaaaatttaatttgcatttccttaaataaaaacaattacattttctttattacttttattacttttatttctttgtttatctttttatgttattttttttataaaattaattgaatattatattattttcaaataaaaatatattacattactttcataaaaatattatataaaataactttatttttttttatttttacactaataaatatacatttttgactacataacaattccccactatgtagcttgttttaccgaatagttttaccgaatactacagttatttattttagcaaaagactttgcaagaaatctctgaaacccaatcgaattgtaggattgttccaaaacacgccgtaattagatttagtacgcacgatttaccacttattgtgacgattgacctacatccgccactatgcagcttgttttaccgaatactatagttatttattttaccaaaagactaaatcggaagtctccgaatcccgatcggaccgaaaaatgttccaaaacacgccgtaat

SEQ ID NO: 212186 - DNA, 630 bp, Cannabis indica
tacgctcacacgcctatttacatctgtgtggtatagacccgcgtattacgctcacacgtctaattacaataaggcctaattagaacagtttatcttggttcttccgagtctaatctaattatgcctgaaatgcataattctttactcaatatacgtagcattgcataatatttaaaatcattaatcactagggtaataaccaatgccttataaccgctcactttagggttataacactaatctcatttctcatttaatcaccattataatatcaaatatgagtgccaccgcgcgtaactctacatgctaactactatcttacctgatgtcccgtatacgtggagattccaaatcctcaagtgttcctaaccaagtgcaagtgctggtaatcctagtcacaatattcgggattaacaaatagggttaatccctaaaccgacttccaaataattacaaaattggtattcaaatttagataaacatatagcgctcaaaacaaactttccaacgatattcagaacacccaaaacggagtccgaattaagaagttatgaacaattgaatatggcattcgaatctgcccaaaaacacaagacgggtcgcagctctccccaagtgggtcgcggcacc

SEQ ID NO: 212187 - DNA, 578 bp, Cannabis indica
tcatctccctcttttaattgttgggtcttttctaatgttagtaggctttgtaactttgtggcccataatgtggctaagtgggccttcacccaccaactgtttggctctatttcgatttcctctttacctgggaatctattttgtaatgaccgagaggtctaactgctttatttagattaatgaatgttcacgcttattctacaaaaaaaaaaaactattattatacatatactcattataaacatattgagtcttatatatataaatatatattgatgaattttgtttgaaacaaccaaaaaaaatgaacaaattaacttttatgatagatataataaaaaaacttgaaaaacaattgacaacaataaagagcttcttctaaaaccttggtatataagagcatcactaatagaagaattcacaacattgtctgttaaaatggataagcctactcctacataaattctcacctagcttttttgccaaagaaggcaagatttgttgtcattgcttggcaatattgctggttaggttttttttccttaatcatatttaaatattagcgataggatctgaca

SEQ ID NO: 212188 - DNA, 803 bp, Cannabis indica
ttatcgaataaagttttttttaaaactattatgatttgtttatttgtctcatttatgacttgtgcaaatgaatgagaacttgtgcgaatggatgttttgtgaatggttgtcttggtatgtgaataatctttgtaaatggaatgtgtgtgttaaagtctaacttatttttttggtatactctgtttagagtaatatgtggttaaatatctaaatttaactttcagttgcaaataaatatctaagtttaagttataattttagaatttttatagatagtgtcaattaaatttaagtatttatactgtaaattattcttttattaaatatacaataatttattttttgcacaagttaaatagatattttatatagtaggtaagatatatatctattctatataaagtgtgcctatataactgaattcttggtttatgagaaattcatgagtgactttttatttatatttaataaaataataaaatattatttatatataataaaataataaaataaaaataaaacaaatctcattaatatttgaactgatatttgatgctaattattctacgccaccacacgaagccgttcctcagcctccaccgtcacctccatagcctacaacgagcaaggtaagattttaaatttgattttaggttttaggttcacttgttatgttattgagaatgaaattccagattttttttttttttctattttgtgtgattttggatgtgggatgtgattgttttattttgtgtgattttggatgtgcagtgattggattttctcttaggtgaagcagc

SEQ ID NO: 212189 - DNA, 1122 bp, Cannabis indica
tgttgttatggccttgcataagcgcaagtgcttcttgcagattttgaagttcagtgtcatctccagcaggcctttgagtgttattggtggacgggacctcaatgctaggagtggtttgatcggccgtcgtaacttgtgttcccagtcttctgtatgcttggagtgaatccagttagaggggaagtcactccgtggccaaccgttgatggttgcgtattagcttgttcagggtttgttcctggtgtcctcttatgtttccaagagtttacacgttcggatctgtcaccatgggatttccttgatcaataagacctccccttcgagtttttacaaccctgttaacctgtgaatactttaaaataaaagcttgtgtttttgctcttaatgaaagcactaaaatattgacatatcttctagccaatgacagtgagtcaagataaaagtgattaaataaaataaataatagaaagtaaaaataataaggtaaaaatgacaccaaattttctagaggttcagtcccgtatgaatggtaatagcctactcccctttttgttgcattgacttgagaaaaaaaatgaaattttattcctctctaaagctcttacaattgatctctgagttattctctctcttagatcacttttctctcttgagtgttcttttggattaatttttgtctctccacaatagtgagattatgccactatttataggagcttattacatgaagaatggttttccttaatctataataaataaaataggaaactatattaattctataattacaatgcaaagaataaaaaatcaaggtgaattatctttattctctaacttaatcccacggatatagggattatcttcgtgtcttagaagcgacaagactcatctctaaaattaccaactcacatatcctacttggtgcatagagttgatcacgagattgtactttggttggatgtcttttgattactcagttcagccatcctgttatgacaaacatttatatcaaccttcaagggctattaagagtacttccttccaccgagacaggaaaatgcaagacacatgtcatccagctcattgccatgttacattacaaaaaattggataacagtgtta

SEQ ID NO: 212190 - DNA, 776 bp, Cannabis indica
aactccattagggtatgtatgttggcttgtatatgttatttgatgctatgaattaatctatatgagctatatgaagtttgagtgatttggtaatgttcttaggtgtgtaaaattgacatttttgaatttttcaagcccattcgctgcgaccaaaagtatggtcgtcgtggcgaagcttgaaccaaaaacacaagaatgcccctggccaatctcgaagcggcaaccattgatcttgtcgcgacgaccccacatcgatagtgtaatttttcttgttttgtttcagacatgacttttggttctgaatcctgatttaaacgttatttaaatcattgaaaatctcattttaagccctattacatggtccagtgttggagccctaattttgaattattcataaatgttattttgagattaatgctattgtgtgaaacccaagaattgtgactagaaacaccagcacttggtaaagatcacctttcaattgagatttctccacatgcactaaaaattaggtaagatagcaaaactaagcacatagagtatagcacagtgtcgcagttatatattatttgattactattgtgaaatcatgaattaggattgttgttttaagtatgtgctatgataaataccgaataatatatccaataaggtcttaaatgtaaaagagacgtgtgagcgtaacacgtagatttattttatataaatattagatgaagttgcatcatatatatgaagtaatgtgatatctattgcggtggcacagttgtatacac

SEQ ID NO: 212191 - DNA, 986 bp, Cannabis indica
catttatcacctaaatttagaaaatacgtttcggccccccctaactttatattctgctccgcccctgaccacaagagcaaactcaaaactagtaaaatttaaaaaaaaaaaaaaatatattagtaattctgttttttttctaaaataaaaaacaatactaaaagttttaaaaatttaaggaaaataaatataaatttaaaaatatcaaaattgaacatactctcaatattaaaaataataataatgttacaaataatatattaatatttatatatatttaacttaatttaaaattagtataatttcaattaaccaaacacaaataatattaatatttatatatataaaataatttaaaataaatataattaatatttttatatatttaaaaaattaatcctactagcaatattaaatttaattaaatatttttatatttttaaaatattatgttaaataaacgaaaaccgttacattttttatatataaaaatatacggatatacttctctatgttttttcaatttttcaagacacaacttggttactggttactagttaggtgtagttttgtagtggtcaagagtgtaatgctctggccatagtaggaagcaagatggaggtgaattatcctaactatatattatgttaagaggagctctatttacaccatataaaacgataaatacaccccattattaaaaaaatataagcttaaaataatttttaaaaattattcttagtatattttttaaaaattttttcttcaaattattttatgttaaatttcaatacttattttaagttcattttcataatttgttctaactcatatatatatatatatatatatatatttatatattttattttttaaaaaaaaatctatatatttttatttattttttagtctataatattaaatataatttatttttatttgtatagtatatttttaagaatatgaattgaagaaaaaagttaaag

SEQ ID NO: 212192 - DNA, 704 bp, Cannabis indica
ataattaaaaaataaaaatagagtctattagaaggtagctagtgttggatttgcccttaccggctttaataataatatcttgtccctaaagaaaattgtcaaaataatattacagactttagaattattaaaaaaatattattgacgcctactacttctgatgtcatatttttattggtgtaacaaaaatatcgttaatcaatcataaagtgttagtattgcatttttttgtcgtaaccatagagatggattcaagtttagatgtcaaaaaaacataaaaagatataattataacaataatggtaagaaaaatgataagagtattttagtatatttcacaaaatatcacaagatatgatattatcttagtatatttcataataaaaaaaaaatcatagttataagatatatactacacaataagtatgttagcggcatcttaattatgttagcaatactcaccacaattagtagtaataaattagtaataatcttcctaacttctttttcaaagaattaataagaaagatccgaatgcatgcgttcttatcttatcaatgcctttggattggcttgggagctttgaggggaattgtatgtatcatttgaccctctccttctcttctctctcaaccatgtattttttggactcaaaacaacgacggtcgaatgggagacggatgattgattactatccgtatgta

SEQ ID NO: 212193 - DNA, 511 bp, Cannabis indica
agtctcttgcatcgcagcatatatactttctcagtttggtggtggtggagggttctcgctctcaccagcaaccccgagcccagctagctcacggttacctctaccagtccgccttgggtgcataatctatacacctgcggtcacattccaggtaataacaatactgataagtatttccatatatcataatccttcccacacatttccaatattaacacaattcatataatcaggaacctagataattaacaaattatcaattaattaaaagcttactgaacaatgagtcaaacgagtcttcgcagccgatgtacatatcaaaccagtcttcaggatctaaaaaccttggcgctctaaaaccatgttgtaacgccctatccaatagggacgccacatgtgtgtttttataaaattcttatttaaatactatataattataccaaaagtgtgtgtaattaaatttttgataattagagacaagcatatagaaacttctttatagtaaaagata

SEQ ID NO: 212194 - DNA, 556 bp, Cannabis indica
gcatatctcataaaccgcacacctacacccaatcttgacaacaagagcccatatgaaatcctttatgatgagttgcctaagtatgatcaactaagaaatttcggatgtctagcctttgccagcacgcttactgcccacagaaacaagttcactcctagagctagaacttgtgtttttattgggtatcctaaaggcataaaagggtacaaactatatgatataaataccgaagaattttttatttctagaaatgttctttttcatgaaaagatatatccttttcatcgcctcaataactctacaaataatatagatcatttttctaaaatggttttcccttctcctcatatatctgaaactgttgtacatgattttcctgatattgttaatagctctcctggtactaacattttacctcaggatatggatatagatcagcatatagatgctgataatggtgactatattgacgattatacacaacagcagcctactgacaatgaagccactccaattcagcaagaagagataccatctgtccctagacgcaccagca

SEQ ID NO: 212195 - DNA, 523 bp, Cannabis indica
gaagaacttgtacagtgatgacaagggatggtttcatcgtgtgaatagtggatattgaataacattttggagtgtccgaatcactccattgtttaaatgcacgaagagattctgagttgaattcatcatctgtggagaaggttgactctataatattttccttaagagacatcccaattgtttgttggatatgtgagataagcttgattggtttttcctttagggtattgttttgcataatgccccctttttgccacacacattgcgtcgatcaattttttttcacgaaactcacgcttccttggcaaaaattttattttacatcctttgtgctttgagaacttgaacgttttgaacttgtttttacgctttggatttttgcaagaacactaagattcagaagggcatttgatgagtaaatctcgtctgctacaaactttgcctagttttttggattgcttcataaattcctaaagaaattttttctgggagcacatttgttcaagggcctttaagacgacta

SEQ ID NO: 212196 - DNA, 1181 bp, Cannabis indica
gaaaaattgttatctaatctcggacaatatataagtcaaattatatttcaaatagttacaatcaatatgactaatgtaggaattaagacctaacgttacaatcaatataacgttatgagaaagtaatccttatatagttatattgtatagaaaattcttaatattactccaatctttataaacatccaaaatgcttctgtacgtatttgagaaaccaagacctactaactctttgccttgttgttcttgcttttgactaaggcacagaccaaaaatggtatgcaaatggctggacataaattgagttcatgcccttttgagatctcatcatttgaacccctttttgatactctaccatgctcttctgagccacttgaatttggaaagtacaaccgtcctcgtcctctctcacctggtctaatcccaattaaccggcctagtgacacactgtgatcttggaaaaatgaagctgttgactacaaattacgtttcataggattaaaagcaatgcatcacaagtaacaaataagttgagtgtgtttcaagtggaattagtaaataatattataaaagcctcatatgaagtgatattatggcaatgatatacactcttttgacaatgatcaaacatttttgtaatgaaaaaagaaagaaaaagaagagaatgaaaagggttgcgagacagcttttaagtacctctgtgtcaagattggaagaatgaaaatagaagagaaactagttgagggtgcatagtaaattagtgtagtgttccactgcagtagatgatgataagcttctctccacttggagcctcacattcataatctctagcccaagtggccagccactggggatatcctcctggtcctgccaagtcataattagattaaattttacattcttaaggcaatcacaatctccattaccatcacattgttttaatatgaagtcattaatacagatgaaaaaatgaaatgacaatatagaagcctttgcttgtgtaatctagacttataaacatttgtcataacctgtgttctaactaagttagaatagacatttttctaagatgtgtatgtaaaggaaccgtttagaaaacaaatttggccgtaactcgtgtggattagaaactctaaaactttaacatagacttagatctaccatttctacaacgaagtaag

SEQ ID NO: 212197 - DNA, 850 bp, Cannabis indica
cttctaaaaataataaactcaatttttgattgttttatagcttatttatagttgtattataattgtcattaagttgtttttttaattattttataatttatttatagttgtcgtgatattaatttcccgttgttttttaattgttttttttacttttgttgaaaaaaatgtatttttataattttaaaactacacaaacatacttttgtaaataattttttacatatacacattcacattttatatttttagttgtaattaagttacacgttagttggctcgcaacagatataactgttgcattacaatctcaacaacaacccacgatccatgctttattggattgaaaccttcatctgatgcaaccttaggtcaaccacccagcaacctttgtttgatgtaattttcggtcaaccacccagcaatttttgtctaattgaaaccttcgtttgatgcaaccttcggtcaaccacccatcaactttcgtctcattgtgtaagtgatagtgtaagacacgaaatgctttcttatacaggtcgaactcaggctttacttttttactattttttttaccattaacgagctaatcactaaattatatgtattttttttatataattttaattattttttaatttacacataattatataaaaaaaaattaattaaaataattttaaacgctctaatctataaggacgccaggcgtgtgattttataaactatttaatactaatcaaataattaattattaaaaacttgaataaaataaaatactataaacggacattataacgacataaaaagtgtgttgcatggatccctgatataaaaagttttgttaaagaaa

SEQ ID NO: 212198 - DNA, 749 bp, Cannabis indica
  modified_base (638)..(638): a, c, t, g, unknown or other
aattcagaaagcatgatttaatacatgtcaaaaaaaaaaaaaagtttattataaagtagaatgcaagcgaaggcgtggactgatgggccattgctagcaagcctatgaacatttaaattttggttcggcttttcgatagggttttcaaaaatcacaacaatattttagttcaataaattgttaaaaactcaactttctcaattttgttcctctcttttactttcaaaaatttccccacccttgtaaacactctctctcagattttcccggatttttatttgaatgtggtgccatttccatttttcaaacttcacacacaaactgagccaccatgaattcatcagatccatctctggcattactggccgcgagcggtggtgatactgtcaaacttttcgatgtgtctggtaagcctggcgatccatgtaccttaagctacactccatctcccggttgccaagtcaattctgtcaagtggaaccacaccagtgagtacctacttattgtgtttcgaatacacacacacatatatcattttctgcaattgtatttgatttttttttttctttctttacgaagatccgtctagttttagtgttccctctttttgatttttgtccacatcgtctctgtgaagnggtcgattttggttgctggaaaaaatgaagtatgattctcgttgaggtggtttctgggttttctttctttctattttttgtttttaattcattttcgaggattggggtggg

SEQ ID NO: 212199 - DNA, 1005 bp, Cannabis indica
ttgaaacttaaacaggctgtcacaaatactcagacacaggtttcgttttttcaaacgatgttagggttggatgacgttcaattgcctgatccagaagacatggttaattttgcgcgcaaatttccaagccatgcgtttattaaatcaacagttcttgcattcgaaacgaatggatatgaacatgttgttggtgttccacatggatttcatctcattgcgtcgaatcgaaatatattaataggaacgggaccacgagatctaggtctcgcgggagaattggccaaggtgtccaaattgatggacaaaataaatgaaataaaatccatctatgaattttatggtggatacactgaccctgacttgaacgagatcgcctttcatgcaaaagatgacatgaagtcactacagaaaatattctcaaattttcaaaccaatccaatccaagatctaacagccataccgcgaccacaacttacgtcactttcaaagggcatgccacaactccaacactcgacaagtttctcaccagttcttggtagaggagaaggaggtaataccgaacaatttcactcgtcaactgaggcagacgcgtatatcgagaataaaacgaggattaccagcattcaaatgcgaagcgatggtaatcgtatgaaaagtctcatcgtcgattacgaatcaacgatggtaggtaaacacacggacatttatgggaaagacgaaggaaggtcatgcggtaaacttgtgttggaacatgatcattttatcaaggaaatttcggcattatacgattctcatgagcttcatggtcttcgcatcactctagatgatgatagagttcttgacactcttggagatcgatcatcgaatgtgtttagaaaattttttgacaagctctttcaccctacacatttacaaggtttccactccccagtgtagttcactgtggatttagggttcacgattcagatgtgactccacacatccaactcatctagtgggggggtt

SEQ ID NO: 212200 - DNA, 594 bp, Cannabis indica
cctattcaggttacaatcatatcaagatgtacctgctgaccaagaagtaaaccacactctcctaatagaattcctagacaaaattgaagaaaaaagagatcaggtcaacttgaagttacaagcctactaagaaaaggtgtctagatacattaacaagcacgtcaaggacagaaagttctttgttggagatatgatacttcgaaaagtatatttaaataccaaagaccctgcaagaggagtacttggcctaaattagaaaggaccatatcaagttatagatatcacaagttcaggcgcatataaacttggtcggtataataagtaaatagaattgatcctattaacaagatattgaaatacagaacatctcaaaaaagattaccaataagcttacttataaaaaaaaatactactcttaagtagtggttcctggacggtatgtcatctagaggttcgataattatttataatacatcattcttaagtgtgacaaaatctctaaagcacgatcaaataaaaatcaaaatgagcccaacaataaaaaaaaggaagaagagaaatacaaaattgggaaatatgagagagagagagaga

SEQ ID NO: 212201 - DNA, 469 bp, Cannabis indica
ttttattatggggtgggtaaagttttttttaaaaaatactgtgtaagttttatattgtgtaactgtgttaagtttttacaaatatttcacggttgttttttagttgttccactattgttttaattattttattttgttattttacggctattttataaaaagacagtgtttttgtaaaaaatttcgtgtgacagtaaaattataaatttgtgcctaaaatccagtatttatgtaagaactcctaaaaattagaggtttaacataaatattgaatttgggggtaaatattacaaatatactgccacacgacaaaatttacaaaaatactgccttggcctattttttttttcttttatactgtatggacaaaaaattgaactaggacgcctccgccttccaatctaacgaataaaaccacaaaaaactcagaaacaaccataaatttcagcgatatgaacaaaaaaaagtg

SEQ ID NO: 212202 - DNA, 620 bp, Cannabis indica
aactacaagcatttacagacactaattggggagcttatttagacaccagaagatccataccaggatactgtgtattccttggtcagaccctcatctcgtggaaatccaagtaacagcccactgtttcacgatccttagctgaaactgagtacagggcaatggcaaacgcaacatgcgaactcacttggctccactccatcatcaaagatttccacatcaacattaagacactttcccttttattttgtgacagcatagcagcaattcacattactaaaattctagtcaaccatgaaagaacaaaacatgttcaaatcgattgtcacattattcgaaaaaaggtaaccaatggaagcatcaagatgaatcgtgtcccttcaaaaaccgacttggtagacatcctcaccaaacctcttttccccactcaatttcacgacattgtatccaagatgggtgtgaagaatttctacactctatcttgagggagcatgttaaaaccatttttattcagttagatttgttggtccaagttagttatttcagtttgttcttttctttccattgcctctataaggctcacctcttgtaacaaataattcattcagattaattaaatagac

SEQ ID NO: 212203 - DNA, 575 bp, Cannabis indica
aaaacttccccaaccggtagatcggtctccaactggaatttcggtactgcgaggtttctcgaggaccaaccggaattccagttcctacaggtccctctgaactgaaattccagtttagtgcaggattcactcaaaaattcataactcaaccaattcaaccccaaactctatgaaaccttccagacctgttatttatacctcaaagaacaatatcaaagctataaaacacttctacaagctcagaaacaaaaaattccattaaagagccaagcttgagttctaaaactcaaagcttgctcaaatatcaaaccagccatcacaacaagcctaaaacaacatatttaagcgtaatttatccactgaaaacaataacaaacactagcagcaactatagcaaccaaaatctcaaatcatgcaaactttcatttccttataaatcaagaaaccaaaaagaaagccataagaggcttaccttggcttggattcacttgaaactagttgaaagcactttgttgaagaaaaatcaaaccctagctggttctatggatttcaaaaatgagagagagtttgagagt

SEQ ID NO: 212204 - DNA, 672 bp, Cannabis indica
tggtaatacaatgagcataagttgtctctttctacctaagaaaatattgtaagagaattcaacccttaatctgaaggatttgttgggaatttatagtatttagagaattatacttagtttctattttccctctaatggggagtttatatcaaattacataatttgggttgttctcgtgaagtccagcccatgaaggagtcgatctcctagatagacagattggatacgattaaatttgtcaaaattgtgtcttataattgtgggcaattaatcacaaattaattgtttgatctctattttagatagttttcctttttagattgcaattgttatacccaaaattcggctacacttcagaagctaacccgtgtcctacaaatagaatatgaaccaactttaatgatataataaagtttatatcattaaatgtagaataaaataattcgttattattaaataaaagtttaattaaaaatattcaaaagtcgctcatatatagtcttaagcgagataaggataaaaactattgaactaatattgacgagacatacgtttgtctcagaatacatagtcaaaaagaagatatttattcgttcgagtagaataaatataatcacatacggcaacctcggattagatatagcgagatagtcatcttgcaatattaactca

SEQ ID NO: 212205 - DNA, 726 bp, Cannabis indica
ttattattattattaaaaaaagacttatcattatattgtacaatttgtctgttttttgtttttgttttttttaaaagccaattgaacttcttatttataaaaataaaaataaacaaacacatattctatatttatttgcgtttcttaaaaaaatatataaacatatattctataattgagaactttttctattttctaaagaaagtagaaatatatatgcataccagcagggccggccctgacttttagtgggccatagaaaaaaaattattttggacttttattttaaaaaaaatatggttatttttcaaaatcagtaaaaaaaaatagtataattttaaaaggtaaatattttttttttgagcccctgggataggtggaccctaggcacaggcctagcccgcctatgcccagggccgggcctgcataccagtgttaaaacaaataaaaactaataataaaagaaaaagaaaaagaaagatgcattctagcaaaattattatttctatattattaatagtgaccaaataaaaaataaaatcaaatcaaagtttattcttcttcataccgtttatttctctcataatttattcatttggtctagtttttggtatagtgctttgtagttcgtgcatttggcccagtcatatttatttgtatttttttaaaaaaactaagattgtgtcatgtgcgtacaataaaaatatggatcgtaacatgtagtgc

SEQ ID NO: 212206 - DNA, 543 bp, Cannabis indica
attaattggttttcaaaaatcttggaaaacaccttgcaagggcttcttgcatttggtgtgaaacttcttcttggtctgccaacctttcttggtatctaagaactcttcctttagccgtactactttaggatcttgctcatagtactcttcatactccttgtcaaaacctttgttgtagtcatccttaaggtcctcatcatgacctcctcgctctttgtcaatgggccatcattgacgtgttcttcgtggtgttattccttatgaggcagacgactacctatctttgacgtttccccatcccccactgtacctgcctgagcgtttgtcaggggagctggttcacatcgtcattggtagcattgtcaccaccatcacgagttgtaggcattgcattggtagttctggtaacgaccatggttgtagatgacaactatggtaaatctttctttaagctctcaacgaaaggaccaaaatatttactaaattttttataaaccaattaagaaataaattaagcttaaaaaagaataaataaaaagtaat

SEQ ID NO: 212207 - DNA, 543 bp, Cannabis indica
cttctctttttctttctcttgctctgaggtctttggatgtctggcaatcccctactcaagagtggctcaaactgaactgtgatgttaaagtggggttgaaaagcatgtgtatcgtagtggtagtaagaaaccatcttggtatggtagtgcgagtccagacaacctttttagagttttttgatgctttgtgtggggaagtggctgcctgctgcttggcgttggatgtagctaaggatattggatgcaagtttattctgatggagagggactctagggtagttatcaacacgcttaatgggaaggagactcattgagagcttgagaactatgtctctttttgtaatagactatctcctttgtttgttagttgtattcttttcagtattagtaaaaaatgtaattttatagcctataacgtggtaaaatggacatttgtccaccaacagtttggttgtatcatatttttttctatttcgacaaatttttcctataatatgtagtctattgattttgtatatgcacgctttttttaaaaaaaaaaaa

SEQ ID NO: 212208 - DNA, 570 bp, Cannabis indica
atttcctaaagacaaaaaattaaggtgagaaatttaattagcctttggatggcacaggggtttctcaagctaacaaatccaagtcaagatcaatatttggaagatgtgggttatgaatggtttatgactttgttggaaggatcattctttcaagatgttgaagtagataaatgtggaattataaagaaatgcaaaatgcatgatttgatgcatgatcttgctgttcaagtagctggagaagaatgtactacttttgacatttcaaatggtcaaggaaatatcaagaaaactactcttcatgtgtctttggtagacgatgcttacttaggaagtgaactttcagtttcgttggctcatgcaaaatatattcgaacatttcttagtatttccaagggtaaggaggagtcattttgcgatgtcataacatcaaactgtaaggttatacgctgtttgaatttgaaaaattcaagtatgaagatagtatcaaattctatcagcaagttgaaacacctgagatatttagacctttcacggaattcttttctcgagtcacttcccaattcaattacg

SEQ ID NO: 212209 - DNA, 238 bp, Cannabis indica
tatttttgattttagttgtaattattttaactttttaaaattcatagtgattgattctgctgttctcgacttggctaagtggcaccatgtgttcaccaaaatcttttcttattttttttatatataaaatcatattaaatataatatttacccaattatcaaaatattttaggctttaatataatgcttaccaaaatcttttttaaaaaaaatgaaaagagtacaaattgtatatata

SEQ ID NO: 212210 - DNA, 833 bp, Cannabis indica
cgatctcgggacatctgggctttccattttgtactatttggaatattttgtaaaaattttaaataacgggatcccgaaacttgtaaaaaaaaattttaaagcttataaagtttcatagttaatactaaaagtaataatttgatacgattttcgagaaaattctttgattagcaaagaaagcattttaattgaaaaatcattgtagtgtgccttagcatttaggcgttagatccttggtgttgaaagcttgcccacacatatcaaagcaatacttagcatagtgaggaagactatgatgaacacaattgaaggagccgaagattcaggttcatatcttgataatgctctgctatacacaagaatcaagggctagagatctgaatggaaggattcatattattccgttgccaccactgtaaagatttcttaatccctaatgtttttatttattgttcttaggaatttaatatatataatgttagataatagaattatattcaacatacatgttagtaaatctagatcctgataaaataagtttacgacagaaaattcatttagacttgtagcaaaaggtagaggaagctgagaaggaagctctcaaaatggttgaggaaccgcagttgaattgagctctaccaaacaaacccttgcttaggcttgtgaagaatccaagaaaaagcttcggagctggaaggccatatttagagaatggctcaggagaagcatgatcaagaggctaggaaatcataagcgttaaagcgggctttttagtgtattctctgtacaccatcgtaggaaactaaaacaactccgtgattggatttttttgg

SEQ ID NO: 212211 - DNA, 1277 bp, Cannabis indica
caaacaaaaagactagtattattcatatcatcatttgggtttatatatattatttataataaaatatatttttgatgagtttgcttattttattttgttgctaggaaaattatatgtaatgtgtaattagtttaggtaaagaaaaattttagtgtaagtttaatagttttggaaaaaaaattagacatagctcaggtaagtttaattttaaattttaatattacaaattttatttgatattagaataattaaaaactttaaattttttgtattgatgtgtttagaatatggtaggttttgaagagaccattcaacacattttctgtggttgtacaaacggttgtacaaacagtaataaaattttggaagatctcaagaaatggttgaattggaacacttcagcttttactgttcaagatcttttgaagtagatttgtaagagcaaaatgtcaaagtgtaaacgctaagtatatgcaacaatagtagttgctgcagcatatcatatttaaaaagtagaaatcaaattttttggaaccagtgtgtagtgttctcatgtaattgtcaagcaagttaagtatgaggttagaagtagaatacaacttcaatcgccaaatcaaagttctgctatagatagagaatgtactactcagctgtaaatatgcactactaaaaactcaaaattctcgatagttttatagtgtcgggtaaagaattctcgacagtttataaaactgtcgcctatacgagcgttacgaatattgggtagaataggcgacggtagaaagatgtcagtataaagaattcccaacagtttaaaactgtcagctatagtcgagactataggccatggtttaaaaccgtcgcctatagtataggccacggtttaaaacagtctcttatactataggcgacggttttaaaccctggcctatagtatagcctacggttttaaactgtcgctagagcggattttccaaaaaaaaaaaaatcatcgccttcatcctcctcgaaacaaagatgggagtttcgcttggcattaagatccccgaatagtcgatatctccgatgatttgtgaataaaaatatcaaaaatacataaatcccaaaaaaaaaaaaataataaagaagttatgagaaagagtggacgagagagagaagactaatcagtgctcatggtggcttgtggttgaacgtttatcttcggatgagagagagagagagagagagagagagagagagagagagagagagagagagagagagagagagagagagtg

SEQ ID NO: 212212 - DNA, 543 bp, Cannabis indica
ttctaaaaccttaaacacaaacaggagacattaatctacatccttacaccaacataatgacaagtgaaagatattaagcaaaacagccattgaagtaaacttcctttcttttttcttttgattcaatggagatttcaactcctctctctctctctctcacacacacacacacccaaccacttgagctagccccaagtggcatttaaagtaatcaacaaacaaaacttgagtaaaagaagcaaacaagtataccaatagggtttgcagcaatgagttgctctccaacagccttaattgcatcaaccaaagctccagcttgattagagtaaggcactctttgctgcgaaatcaccgaccggagaagctcagctgtcaattttgcggtggcctgtgaaccctcaattttactggcacaacaaaattatcccaacaggcacacacacacacatattacatacatatacatacataaatacataatacacacacaaagaaaattgaataaatgattcagcaactaaaacccaaccaaacccacttctg

SEQ ID NO: 212213 - DNA, 757 bp, Cannabis indica
tattaaaaaaaaaaagacttattctgatcgattgtcaaatttttctcgaacttctgttaatgctttcatttttgtgtaatttttgttttctttctaaaaatcgtgttcattcaatatgctatttcgagctcagttgagctttaagctctgttatgcccttaagcttgagcttccttctatttatgctcttagcaatcaaactctcgtttttaatttttgattttagtttgtatttttaagtgcaatccagttttaaattcagtgacataaatcttcatgttgaacatcttaagattgtaaggaatagaacaccataaacaagtaagattatgaagcaagttctttttttattataaagagccaaagacatgaaaaatgaaggtcacgccctaaggctcattgctttgtggcgccatgcagcataacctggctaagaacactcaagaattccaccaagattgaaactgcttcggtcccaaatcacactctcccttgctccacagatgaaaaacgaaaccaatcaatctaagaggagttcttcacaacccattcaaccagagtagaaatgccaaatcctgtggcggtgcgcttcttgtcattccagaccgggccggccatgtcaatgtgcatccactgtactttttcatccacaaactgcatacatagccatatggtttaaaagctttcagaatttagcgagatgaggtgaatggaactaaagttatgaggcggatttagttgtactcattgcagtgga

SEQ ID NO: 212214 - DNA, 660 bp, Cannabis indica
atcaccaatagtcaagggagttaaatatatttgaccttttgtttcataacaataattataccatacataaaaagaataggggttttttcatttttacactttaaaatagtttttttttttttttttgcatttttacggaattctacatagaaacccctattgcaactagcgctgcaacctaaattgcaataaaaaatcgtatagaaacccctattgcaactagcgctgcaaccactttagaaacccaaaccgtaaatttaaaaaaaaagttaaaaaaaagtatatggggtaattccccaaaaaaatatttatttttaaagcaataaattgatatcaattcaaagtgagctatatttttaaataatgaaaagaatatttaattgaataaatactattgtattgtgattaatttatatattaaaaaaaaaagaatatttaacaataaattatttaaataaaattaaactaaatgacaaaaaaaaaaagatatttcgacctcaaatgtttagcctcaacacatcacatacataaaaactccaccaccatttcaactcaatgagtcacactaaaagattaaatacattaaaagaaaaatagattatatatatatagataattatgtaattatagagcatatttgaacacttttattaagtctat

SEQ ID NO: 212215 - DNA, 719 bp, Cannabis indica
cctagctacgctatgagcgtttttcttcttaccaaggaaacttgttctcaacttgaaggtttaatggcaaagctctggtggaaatctcagtctaactctaggacaaaaggagtgagttggatgagttggagaaaactaagtcgtcataaagatgctgggggtcttggatttcaaaatctaagggactataacatggcttttttgggaaaacaaggatggaggctaattactaatgaaaactctcttgtggctaaggtgtataaagctagatacttcccaaaaggaaatttcttcaatgctgagttgggtccgaacccaagttttatttggcgtagtatttaggaggctaaaagcttggttagaatggggactaggagagctattggtgatggaaaatctactcttatcttagaagatccttggttaccaggtgtagagaataactttgttacttcttatcatccaaacctggttggaaggacagtggatagtttactgcaaatggagagtaaagcctgggatgtggagctgctgcaagatatgttcaatgatcaggatagagacaaaatcttgtcaatacagttacctgattcattatgctttgatccctggtattgggctgaggaaacctctggattttattcggttaagagcgcttacaaactgctgcaacaaagcagtggtgattggccgatctctggtgcggaatcacagtggca

SEQ ID NO: 212216 - DNA, 885 bp, Cannabis indica
ttcaagtaaatcgaggcaagtttaaacccaaacactacaaaaaagtttacttttagtcacaacaaaatttgtgactaaaagtaaaagttgtgactaattataaattatcattcctatattgtgactaaaaggtccgtgactaaaagtattagtcacaaaaattacaatttgttgtgactaaatgtgtttttcgtcacaataagtattgtgactaaaactaagttagtgacaacttgcagctaaatactatgttttagtcacaagtaagtttttgttgtgactaaaagtcacattgagtcacaaaaaatttgttgtgactaaaaagttgtcactaaaagtagcagtttttttgtagtgaaagctatttcttcatttgacacttccctcaacacttcatctcccaaactcagcaagatggcactatgtacttttatttcaatttctttaatcttcttcttatcatctccaaactctttcaattcttccttgtcaatggcttggtaaactccgtgatgaaccaaaaatcctttcattttaatccttcacaatcaaaagtcattgactccattgaacttgtctacttcaaatcgtgcatgtagaagccatgagtcactttcttgattctgttcttgctccaagaagcctggctctgataccagttgttgtgaaaacaacacctcaacaagaacatttaaaaacaagaataaacaatgaaactagttagagattatcaaggaatgacagcaatcaataacaatgacacaaacatgtataaaaaacaatattgaacacatgacattaacgaggttcaaataaggtaataatgcatcaccctgcctacatccccaaccagaaaacaaccacaacagggctgagagatatctt

SEQ ID NO: 212217 - DNA, 567 bp, Cannabis indica
ataattataatatatttctaggcattttcgagcctagttattgcatattcatatgccccaagtaattttaaagaaaaactttataattaattgaaatataaatatctttattaatatgaattacttttacatgaataaaatacaacagaacatgttactggtaataaggccttaagtactcactgctctaggtattttttatctgaaagccattaagccatgctaatttgtaaactcttgttcccacaacagcttctacaatgtaaaaaaccttcccagttagggttaaatacttttgctacagggtctcgtgtattatcaaacacacatcgtatcacctaatcccctactttaaagagtctctttcaaactcttttattgaagtgtcttgtgattcagtgttgataagcaacatttgtgatttgcgacttagtgcatttttcatcgagcagatccaaggacattttgagtagctcttgtttatgttcatagtcataaaattcatgactatgtgtcacaatgttaacttctactggcaacattacttccgagcgaatgccaatgaaa

SEQ ID NO: 212218 - DNA, 967 bp, Cannabis indica
caaaaataaatagtgcataaattaaaaacttaacacaagagaattatatgtggtttcagtgttctttcaaacaatcttagtctacggggtcatgctcagagaatgaaatcaattggtaaagtatcaaaattacaaaaacaattgacttaaataaatttaaactccctctagtaatttatcgctaccctttgtaatccacattgctaatataatctctgaaatacaccaagtattaaactcccttcatctattgacgtgtgcttacttcctctcaaagtaaagttttaaacaaatcttctcttgaagatatatgctcacttcctcccgaaatgagacttagaaaatccttctccagaagtttgttcaaacaagtttttcaaccaattctactaacagtataagaacaaaacaaacactaaaacctagattaacactccaggttttcacaaaagaaattgtctcttcacaaagatgaaaatatgaaaaataaagttagaagagataaatcgtttgctctctaggtcctattatagaacataacaaccttatagacaaccagaaacacgatttcccagctgcacaaaacattttaattttttttttatttgcagcatcagaatcagactctgctgcatcaaatcaggaccagaaaagaaaataatcaagagtataattttgtcttcaatacatgccaaataaagattatttgatctgctaaaagcgtgacaaaaccgaaattaacaattaaaaaaggaaatgtcaagtttctaaaaataggcaattttccataaagaaaatttattctcttgcaagaaaaatttcccaaacaaatacaaaagaactttccataaaagaaatgagcaattataggcacgaattaaacacgctaaaattaatataattgctaagaaaaatacaaattaattaataaatattttgtcaattaatttgccaagaaaaaaaactt

SEQ ID NO: 212219 - DNA, 633 bp, Cannabis indica
cttttgccagcaacttattgcaagggacagctgagtaagcatgattgcatacagggcacatagaagagacacttacccccttagagatgagctgaaggcaggtaggaagcacattaaaaactgcccgccacataaagttcctcactttaggaggtattttgagatgccacagtttacgccaaaagcctgaattgttttccccagaacgactgttcttctgattttgcagcaaattgtaggccgatttgacagagtaatggcctgatttctcaccaagcccaatgatcatcagtaacagagaaactgaggggaattcccagaataaggttcgcatccctgacattaaacatatctcgcacaagagagacatcccaacttctatcatccacacgaaaaatagagttgaccgtataatggttgagactcggagtagtggtggatacaaaagggttattattatcagggagccaaggatgagccagaatacttgctgcagtaccagtgccaatgatcctcctagtaccagatcgtaccaaatgttgggcattccaaatactacgccaaacaaaactggggttacttccgagttcagcattaagaaaattcgattgtgggtagtacttggctttaaag

SEQ ID NO: 212220 - DNA, 664 bp, Cannabis indica
gctcaaaaaaatgatcaagatagtgttggtctttgattcaggtttgttttcggtttctttttggtttcccccatttttaaaaccttttcgtattcgaccttttatgggtttttaaaacaccttgctatatgtgtttttttggaatatattttagtttgtttacagttattttgtagttttaaaatagttttgctacttgcatatgttatttcatatttgctttctttgtaaaatgcaggactgggttaacaaatacaattccaatgatttctacagattgaagtgtgtatgtacgagtaatttctctgtaattaaaaaaaataaaaaaacttgtctgtgaatttgttaactatgttctgagacacccagtttgggcattttattggatattcctgactttgtttttcaccctcaagttgttcataacctacttttgagggaggtttaccagcccaatcccaaagaattttgggctaaggttgctggccgttgtatacggttcagtgccgaggagtattacttgattactgttcttgattgctttggcgattgcaataaactgttgttttcccaagaattagacaagttaattgaggtttgtttccatggcataaaaaccattgatcattaggctatagaggatgctttcttgagtagtaggttg

SEQ ID NO: 212221 - DNA, 840 bp, Cannabis indica
  modified_base (747)..(747): a, c, t, g, unknown or other
ttgtaccaattataaatatttttaccattttaaggcctcatatttttttcccttttcttaataaatctctctcaattttttaactaaattttatcttttaaactattttttttaaatcttttttacattttttttaccattttttctcctatttatttgctcctttcttttaatattttttttatatttatttatttattagtaaataaataatagtattgaagactatacgagcatacatatgatattaattttcattacaacaaatctaacttttaggggcgataattttgaggagacaaaacgttgcctctaatagtaaagttttattattgttgcccctacagaaaccaatttttttttttaaatgtgggaactttaggggcgacatatgtcgctcttaatacgttttgaagcgacaaacaacttattaggggcgacatataataagttgaaataaatccgttattgttgggcgggaattttcccgctcacattattaggggcgacacatgtcgcccctaatgccctgccaccagacatagtgaaggcattgtcgccccaattgtagcctctaatattgtgcacacaaaaagtcgcacaactcatcttaccgatccatttctcttcctcttctctaatcttaaacccccccatttttcttctgaaaaaaaaaaccaatttctctgaaacaaaaaccccattttctcttctccttcctctctcagtccttgaattcagccttcnatagccatgaaactcaggctccgaaaaactcaggtacggctgtattatgaatcattaacgtttttattgtatttgtttcgtatttttgttttc

SEQ ID NO: 212222 - DNA, 612 bp, Cannabis indica
gagccttgtgcgaggaatatactcgaggcgaactcctaaagaatttcaagatgcctaaaatgactatgtatatgggtgaaatagatccaagtgatcacctatctagatccaacagaatcatgacagtcatgagggtcaacaatgacaccaaatgcctatgttttccactgacatagggaggggctgcagaagaatggttcaagaagttaaagcccagctctgtagattgttggaataaattacaaaataattttagaagacaatttgctacaaccatgaagataaaccttgaagtcagtgtcttgactaacatcaaacaactacctatgaaaaccttaaagaacttcatcaagaggttcaaagaggaggcttcaaagacaaagaaattagatgacgggcaacggttagctttattgcaagctggtatattcggacagaaattccctttgggaatgaattacaacatttgtgactaatccaaaagtattagtcacaatttattatgattaaaaaagaaataataataactttgtatttaaatattattttttaattacaaataattttttattagactaaagtaatatttattactctcaaaaaatagtaata

SEQ ID NO: 212223 - DNA, 590 bp, Cannabis indica
cgacgctttcgatcagcataactgttatgtctactctgagccgcaagcattcgcgctctaatcttgtcaactgcctcacttgttctctgaacagcttcgggacccaagacctttctttcacccacttcatcccagtgaatgggcgatctacactttcttccatataaaagttcataaggagccatcccaattgtttcttggtagctattgttataagggaactcgatcaagggaaggtactttacccatgatccctcaaagtcaagcacacatgcccgtaacatttcttctaaaatctgtatcgtcctctcggattgcccattcgtctgaggatgaaatgtcgtgcggagctttaactgagtacgcatagctcgatgcagactttcccagaatctcgatgtacacttcggatctctatctgaaacaatggactttcggataccttgaagacgaacaatttctctgacatataactcagcatactagtcaatggagaaattcatccgaacaggtaaaaactgagctgactttgaaaatctgtccactatgacccacaaagaatccaattgtcgcgtggttctaggcatacc

SEQ ID NO: 212224 - DNA, 664 bp, Cannabis indica
aaattatttaagtttatttttttcaataatagagtgtacttatcatattttaaggtacaaatagaaatctcttaaaaaatcagttcatttatatttgaataccatatcaccttccaaggaaaaaccttctaaatgggtacacaaaaataaatttcaagcatttattccatgatactgaaaaataaatgaacatataattacatcatatcaattccaaacaactagtataaatatttcactttctttccaaaaataataataactaaaatacttcattcaatggtataatttcttatcctacaaatataaaagaatgaaaatatttgaaatttcttttattttcatctatcaagtattcttctaaaaattcttagcatgatattggctagctaagattacatactaattaatagtcatatgtgtatattatatatgtataaaagcattatgaataatataaaataaataaagaagataataaagagataaagagaaacttaatgataattttttagtactttattttaatagaatgatcccttattttatacaaatatgtgagccatagactaaaaaattaaggagagaaataataattacaattaatattaactaatagaaaatatttaggtgatttaggatcagtttggcacagctgtgctgt

SEQ ID NO: 212225 - DNA, 808 bp, Cannabis indica
aaaatttacaattttggttgctcggtgatttctatgtggattactatgtagatttcagttgtaatttaaggtgctctattgattgctatgtaaatttttatgtggatttctgtaaatatttaaactaattaaagtgtaaaaataaaaaaactgaaaaaaaaaataaaaaactataagaataattagtaatattaactttatttataattatataaattttgaatatagtataagctaataacactagtgttttgactacctaaatatttcatactcttattaaattataataattatttttgtacgtgaatatattttttatactaaaatttttctatttcttttttcaacagtcaactaatttttactaatctagtcgaattcattttaaatcaattttattggttaattttttttactacatttgatgtaaatatatatatatacatttatatgcacatatcatttgtcttgatcttaactaacctatttcttaactaatattatttaatactttgtagatgataaatcataaacttaaaattgtatttttcccatcgatttttattgtaaatatattttgataaaacatttttaactgtgtttggatttttctttatttaaatatttttctttgatttaaaacatatttataaaagtttttaaggacttcaaaattttgattataatatgttcaattttttttttacatataaattacaccaaacataatatttatcaaattatcaaattaaataaccaacttctctatacacaatattttctctttcttttaaaaaaaaattac

SEQ ID NO: 212226 - DNA, 528 bp, Cannabis indica
gtcatgtagcaactattttaggtagaactcatattgatagaagtactcagaatgcacaaaagcagtacctaagtgagttgaattaaggcaaagcttgccacttggtacaatcacctgtccagcatccaaggatgatgaatttgcctatgacttttgtagaagacgacgccaggcacatgcgcttccttcataatgaccctttggaatagaggctcaaatagcaaacaaaagagtttctagaatcctcgtagataatggaagctctatgttatcctattttttgcaccttgatgtggcaatgagaatagatgacacgtgtcccatatttttgctacctgggtggagggaagtattcttagcagcccactaatagttaatcttaatattagtaaaactcagatattcgagcacgatagttaagaagacgtccgaccaagatgcaaacatacccatgccgaacaaagcatgtaagttagaaattctagagatcagtcttgttacttctaggatacgaagacaatccctata

SEQ ID NO: 212227 - DNA, 802 bp, Cannabis indica
ttctaatagattttatattggttcctgttatacctatattttcaagcagtatatgatgctaacacatgtaatacaactggaatacgaaccatctcaaattatgcatcaataaatgcattcagacgacttgccttgagaaatataattgataaaaatacttgaactcaccatagataatgacgagatacaagtaataactactaattgatgagactagcgagacggataaagaaagtccatctcgggataaacagaatacattacaaaattgtttggaaagggtagataatgagtttggaactcattgacccacatacacgtgagtataacttcagcatgattcatctcgcttccgtcacgttgtaataagtgtcttgcatatacctcactcaacattaatagaagaaagcaaggaatactacaacctacacttagacgttggcttgcgataaagtctctagaaaagtattgataaactgcgagaagtatgaagtgtagtcagcataattgtctatagataaaggcaaagagtggatatagcggttatttataattatctcaggtgcataaatatgaaatgtggggattattcacgtttcacgaacgattacaagtgataagattccaaggtaaaaactatcatcctagactcttataaatagggacagaatccagtaaacaagggaggaccattttgggaaaagaaagagaaatatatattattcattctataaaatattttattgtattctgtatataatttatcaacccagaataacatggactcgtggactatgaagaa

SEQ ID NO: 212228 - DNA, 984 bp, Cannabis indica
ccaatcacagaactgataacgcaaaaactgataacacaaaggaatttaatcttgcaaaattccataccaatgaagggatcatcaattaccattcatgtgttgatacttcataccaaaattcagttgtagaaaaaaaataccaatatattcttaattttgctagagtcttatttttttaatcttagtgcaacatatttgataaacagaacaccatttaaaattctctacaagaaaaccccttttgaaatattacacaataaaatgccatcttatgatcatctaagaagttttggttgtctttgttgggaattataccctaaaagtaattatttaatagataatatattatagaatatatgaaatataattataagataaatgaatacaataattatagaaatacaattaataaatatctaaaaattccttattcatatggagatagtataattttgtaaggttgtagaagagaattaagattatacaacatgaatagaataagtcggtagtgtattaaagtaagagatttttaatatgaaattaccaagtgcggtttactatatactatactctagtgtgtgtgattttgattcagatcacatatgtggatagacatgtagtaacgttgctgtgaataatttgattatacatggctggactgatatgtaataaaatctttcattaacatgttgtttaccgtgaaagagttattcatatcacaacgatgatcattagtagatcagtttgaatctcgattatacatagactcctatttgtgttcattaagttctttgattcactcgttaagtttcttagagaagttgattgttacaattccattttgggaacttaataatatgagtggctgggaacatgcatgttatacatattagaatccaagctttttcgaaaggtatctaaatattagttctcttattgtgttaatttttgggagtgctcacagttggaacaaaaatctataaa

SEQ ID NO: 212229 - DNA, 536 bp, Cannabis indica
ggccatggtgctaatttataaaataattctattacttttattaattattatttttcttttttttttggtattatatatgccccccctgtatatagatgacatacaatatgtgtatttattctttgtttagatatacatatttttgactttttctcgtagtttccatccaaactttcacaattaacactgtttctagtcttaattggattcagttataatatatggaaaatgtacggccacttatatgtttttatttagtaaataaaccaagcatttagtaatttacaaacaaggtctatcaatgttaataaagtataaatatattacagattacttgaacatatatacattatatattcatatatacagagagaatcataaaagaaaattaataagtttacgaggaaatcttcaaagatttacacacacttattttaaaagtatagaattattttataaattgcaccatggccggcaccaacctaataagtagacattttcaataccttaataatatgatggagttaatttattag

SEQ ID NO: 212230 - DNA, 894 bp, Cannabis indica
atttttaattttgtattagtatatttaatacaatactatgtttgttattgacttgtattaatagattgtgtaaagttataatatattttcaataaactcaaccccaataccaactatggattaggtctgggtctagggtcggatccgagtttgggtctgagttgcgggttcggttctcgagttcggctctgggtctctggttcaggttcaagtctcaggtctcatgtcccagctttgggttcacgtccgagtcccgagtctggactgagtctaggtctgggtctcaggtctcgggtcaaggtctaggtccgagcttgggtcctgggtccaggtctcaagtttgtgtcccaggtttgggtctcgagtccaggtttaggtctgggtctcaatccaggtctcgggtgctgggtctaggtctgggtccaaatttaggtctaggtctaggtcccaatttgggttcaagtctgggtctgggtcgaagtcaagcttcgggtgagatcagaagtgatccgtcaaatcggagctccaacccgatctaactaaatggatctttttgacaggcctattgacaccagacaaaagtacgaggttcaagaccactacctgcaacctgcaacctgcagaccatggatgtcaccatgtcccttgggaccactagtgtaccctaggctattaaagccaataaatacctatttctctaatgtgatagggggatggaaaatctttgtaacacttgacctagagaaacatacacttctatctttctccgtagttactctgcacttttctttacgttttcatatttttagatcttcatcttaatcctaggacttgcatctaagtttcgattttctagctataatataattcatgagttttcaccgtcaatactat

SEQ ID NO: 212231 - DNA, 545 bp, Cannabis indica
tgccagtgggagtttggacattaggatatgtcgccattggattccgtggctcagtggattgagatctccttgcatggaccatcgtcaaaggatcaaaattttatcaaggataagattgtttctctcaatgaaagcacaaaaaatattgaccttttttttatccaacgacactgagtcttttaaagcgattgaattaaatgattaattaatgataaaaaaaaaaacaataagaacacaagaaatttatatagatttggccctgtgataatggtaatagcctattctcattttaattgtattacttaaaaaattattaagatcacaaggtccgaccaggtgggtttcttaatattctcgtaaaagcttacaagtatttcagtagcgtaatagctctcaaaaagttagaaaaaagatccccttcacaatggaatgactccactatatataaggaaaatacaagatgtaatgtctcgaaaaatatgagaagggaaactgaataataaatcccataattctctcaataaaataaatcccataaaaatagg

SEQ ID NO: 212232 - DNA, 683 bp, Cannabis indica
atatatatatatggtgatagtaaacaagaaatgagtgcaagactgtggtcctagctataatcaaatggcaaaatccttaatgtccaaaagagcatcatgagaggaatccaaacccccattcatatatatatataatttagacaaaaaaactggtatttctgtctacgcatgcaaagcttcaaactcttgaaaatgttacaactacatatatacactatactatcctataaaagatttgtgaaaattataataatgataaaaaaaaatgtttgtaactgtaataatagggatattccctgtgttttgaccacttttcattcatttacttctttttcaccttttatatttttaatacttgtatttgataaatttgtaaatatttatatgttttgatatttgagagaattttttgatttaattattttgatggttgtttataaattttattgtcaccgtgttaaattttttgaatttttcaaaattttacagaaaatactaaataacttcaacgtagacgattataaaaaaattaaactaaatttttttcaaatactaaaacatatagatgtgcatcagtagatcatttttaggagtgcattaactgtaaaaaaaatttctaacacatatatactacaaaattatttttaatatttatttttctaggatagtatagtgtatatatg

SEQ ID NO: 212233 - DNA, 675 bp, Cannabis indica
tgaaagtgtcaaagaaatgactgttaataggaggaaatgcaatagttcatagactacccctattgctagtctaaattatcataggcatgttagagtttttttttaaaaataaaatcacttctcctataagtgttcccagtagttagatataattatataacaatgaatggttatgatgaaggcagagtaacatgatactcttattaggcgtgactgaatcagccccgtgttggtatatatgtatatgtatatatatatatatatatatatttgtgtgggtaagtatgtgtatatgtatatagtgtatgtatatatgtgtttatgtcattgtatttttttgtgtatatatatgtgtttatctttttaatttgatttttttttttgtgaattagttcatatattgctgtcttgttttgctgctgcccgctaaagtctttgtttttttcttgcattttaaaagtttgtaatttttttccatgttagtagtatataaaattgcattgtactattaatatgtttacgtataatataaaaatatttaaatatcttagatattcatcctgaaataggttttatgataaatatattgtaattagatgggtaaattattattttgtatatgcattgttcttggttgtttgtttattcagtgtgggtcatgtaataattttttct

SEQ ID NO: 212234 - DNA, 1096 bp, Cannabis indica
agaataataatagtaataataacaaatgtgatcagaaaaaaaaaaaatcagagactcatgaaagaagcgatgaatgaatcaaagatcaagatcgcacttggttctctggaatgctccaagtccaacggtggactttccatcagcagcactaagaggaaccttcaaatcacactcaattctgggcttgaaacgccaagtcttaatcacaccaaacttgaatctaaccctaagataaagcttcacatcaatggagtaagttcctgaacttttttcttggttaaactcagcaagttcctcagcgttaagcacaatcaaattttgactattgaaaacagggctaagaacagaggtgttcttatgtccctggtagaatttctcaagctgaatcgaactgaatctctgtccttcgtagaaagctcttgcctcaatacgatcgtagtaaacaccgattctcttgttagggttacggattgtgatgttgagggccagattgtagcggaggttgttggtggtactgtctgtgagattgaattgggtgagtttagcgtctgtgacgtggaatttgatttggttaggacggaaaatgagccagatgattaaggcggcaagtacccactgtgattataattgagaagattagtttgaagattaggctaaagatacagccacagcaacagaagtcactaacgccgcgtccgggcctgttgaatgattcttttgggcctgctcggtggtggaattgatgggccgtagtaggccccattcagatgagctttgtctgccatggagggaatgaaaaattcaaaaactcaagaactcaaagatgaacagagataataataataaacaaaaaaaaaaaaaaactcagagaggtagaagaatagttggtttagtgaatggaaggttggaaatgcaaagtgtggtatttataggggtttaatagattttaaggtagagaactaatgaatgactttttgtgtgactcagagcgtgttaatttttacttttaattttttgggtacaaattttacttttgtattattatgtacgtaagaataaacgcgtttatatgttttgatatggttagtattaattt

SEQ ID NO: 212235 - DNA, 535 bp, Cannabis indica
tacatcctcaacaccaggtgtaataatgattatatttgtaagtctaattttgaaaaatttgagtaaaaaaactactaaaataatataaaaatatatgtaaaataaatgaattagatataactacttagaaaaatataaaaaaaaaaaccaacacaccttaaaattcttttgctagtgagctcgttaaatgtatttataagagattcagaatcaaaaaaccacaaaaacaaccataaaagaagggagaagaaatgtatttataacctctattttccacatccactgacataacaccataacaacacgagaaaatctagaaaacaactattctgacgagatgaaacaagaatagtgaaatcgacgtcaaatatataaattatagcaaaacaacactaaaacaaataaaaaaaagacttaacaatacataaaataaaaataaaaaataatgttaaatggagagagaacctgaggaagagtacggtgaaaaaaaaaagataataaccataattttaaaacacaaaaaaatacccacaaa

SEQ ID NO: 212236 - DNA, 1323 bp, Cannabis indica
cattacatcacatcctaattaggcaagtcgatgctttaatatgaaaatcctatattgcattgcctaatcagacaagctcgtgccacagcctggcacccatatatcacatagctgcatcacctatatggcaaacttgagttttgaaacccttttggtggctaagccatgtattgagcaagcttgagttttttgaactcaaagcttgctcaacaatggcaaactttgacacatggttctattgatgcaattttcagttagaatttgtcatatatggtgtttttaggtgttctggagagttttacaaagtttggagtagttttgagttagaagttagatgtttggaaaatttgcagaaatggtctaccgtttttacaaaaatagtctacagtttttattgatagtaactcagaaaaatagtctgtcgtttttacagaaacgatctgctactttttggagtttttttttttttgaagtctcatttttggtgttttctcgatatttagggtattaccatgctatttatcgataaagaaacttttagttttgagtttaagtccccgaaagtgatatagcaagtcacttactaatttgtgtaaaattgtgacttaagtcctttaaaattgttgaacagcagtttctactcaggtttaccaccacacttgcattcaaaattaaagtaaaattagtataaatagatgcatatatgtatacatgtttagcgtgcatgttcatttaccatcagattagcatatccggatattggtgaagtgtacatagagttgcattgagatgcatagagttgtattgagatatcaacggatatatgctaggtaaaacagtagccatcagattagcatatcaagatattggtaaagtgtacatatagttgcattgagatatcaacagatatatgctctaggctttcagaaagtatgaactaattgctaccacatcagtacgactagagttcgtactgagtataggcttgttttgtcgttagttatactttagtcaagaacgttcctgacctagttttaaggtcgtgattaggtgtatgggtgcctgattacggtctggttatatgttatgtttatacttatattactgagtctgtcaactcacgcttattatttgcatgtgcaggcaagagccagaactaaaccagagtgagtctggagctggatgaagattgtacatatcaagacggttaagtctagagtgttcgggacaatttaggctcacattttgatagtcgttgggtgacaaattttgtataaaacatattttgtaaacggttgtaaaacttttaacgggatcccaaaa

SEQ ID NO: 212237 - DNA, 505 bp, Cannabis indica
tgttgaatgaaattgcaaatgctttaggtcaatttggttggaggtcatttcccatccaatttatgtagttcaaagttctttttacttttttctgatcctgcttgacccctatatgtaaagaattattcccaatattaattaatatctaataggtgatgtttatgtaggatatatttttgattagatgatgttaattgaagctatcaaatacatgctataatgttactgaaaatagatgaggccttcctagctagagtcagagttttgtttataactctggcattggattatataatttgccaaaccgtatgtcacatagcacagtcacacttcgttgaaaatgtctatatatatatataaaaacatacctatgtggtgattggtacataaaataaaataaaatataaagaaaaatatttgtccgaaaaaagggagtttggtttgcaattttatgacatctctcgtttacgaattgaaatttaaatagaattatcccacatcgtac

SEQ ID NO: 212238 - DNA, 552 bp, Cannabis indica
ttcttgttataataataattacagtttattcttaatttaataattcacatcattatcattgtatagtgtgctgatccacatttatacatctatttatttataggtagttttcgtccaggcgactgtttacatcggatgccttttgaaggtggtctcaagttgttttgtctaaattttcgagataacttggtcttatataagtcactttgtttgtagtgactcatattctgactttgtatatctttggctagacaattagcttgttgactggaagttcttctacatcgacgattatcatagtgtgatttaaatcactctctcaaaatatatatataatataaaaaatgtaataaatttaaagagacaatgatattttttccttttgttttcatttaccatattttgaaatttaaaagctgtaacagataaataagagatttgattacttttttttgttgtgaggaaatgaatgccttttgtaccagttacatggagaagaagaccgagaatggtgatatgcatagttggggagagattttgaataagattatg

SEQ ID NO: 212239 - DNA, 746 bp, Cannabis indica
aacctagcacctatatatcacatcgcctaatcaagtaagtcgatgcctaacctggcatccatatatgtctatcattatctaatcaaacaattgataagtaggaaacctaacaatagttcctatttatagtcatcacttttgatacttaatccttcggtatctaaatattgttgcctaataaaacaacccctctttttcattgccaaatcagacaatatttacatcatcgtttagtaagacaatcttttttatcattgtctaataacacaaccctttttacattacataacagtaattaccgtatcttaatctcaatattaattaattcacaatgaataataatcctatctcaacataacatgctacatagtacaaatatatttttcttacctttaatccagattcatacatgtcggccaacctaagtggagaaacattgaaaaatcatggccctataccataacaacggtaaactgataagtgtctattctaaaacacttccttatactcacataaaacaatctaagattttctattgaatctcgtggtaaaaacaccctataataaattatatattttggctctaatttatacttcacactttagagctctttcgaagcttcaaaacggtatataaaaagtctaaaatggacacctgagtgaaaagttatagccaaaatataaaaatcaccatttctcgattactgccaaatagaattccagttggtacagccttgtaccattca

SEQ ID NO: 212240 - DNA, 516 bp, Cannabis indica
ctcactatgtttcttaactcaaggccaacaaaaaaaaaatattgaaaaaatatgaataaaagcaaccacaaccaggggctaggaatctcagaaagccaagtgagaaagagtcaaagcttaaagtgacaatgatgttggattcgatattatttatgttggtacatttattcttgaattatagtttagtgttcagattgctttgaacaataccttctatgttcctacttttaagaggaattcaatttcgcttccgcttttggttaaataatgatattcttttccttttgccaatcataatgttgacattatgtttgactctagattagtgattttttttttatttctgatggtcttttaaattgtcattggctcccttaacttctcctcttattttaaggaaatattcttattagtatggcacaataatttgggtcatatttctaaagaaatagttgatcgattacttctagctaaaattttcttcatcctcttaatatttctagttgggatacttgt

SEQ ID NO: 212241 - DNA, 1431 bp, Cannabis indica
agaagaagagaaaaagaagcttggtgtcttagcttctaagttaactcaaaaatatagaaagttttttcttttttttttctttttaatttaatggtcagcccacaagactaaaagtcaaaatacctatataataaaatgactaatctaccgctcttataaaatttaaactttaaattaacctagggcatttcggtaattttactaatccaccaaatcgacattctaaaattctaaattagtccggaatatcctcaaaatccatccattaacgtcgtgacattactaaccacatcattaaatttccacaattgccggacccgaaaaaatattttatttcaaaaatagtatcctagatacccacatatcccaatataatctccgtaattaataaattacgctatatatatcattcaacaaattctcagtagttaccctaagtaagatcataatcttacttcgttaccaaaataattacatacttaataaaatacgtctatttaaatattatttattttttgagatattacattaaaacattaaaaaaaactttgtaaaagaaatcaatatataaaatatatatacatctacttattgacaacataccatagaattctaaaatctaaaagaaaaaatatcatcatacaatatgaaaatttgaaaaacgaaaaataaataaatgaatacaatcaaataaaaatttaaaactttataaactaaacataaaataacaaattatagagaacatactataaaattcatattgaatatttatttttcttaaaattcaaaacttcataaaaaaaaaaaacatagacactcaaacatataaaggaaatgagattctaaaaatttggagtcgtcaaccgaaaacaaaaaaaaaatcttccactaattttttatatattttataaatatatataaatcaataagtaatggtttaatttttttttaatgaatcttatatgtagattttattattattttgagaaaaaaaaatagctatagttttagtaacaattttaaaaatttttaactttttttttttctaaaaaaaataagctacggaattatgatattcgtgtgattaattaatataaaaatgatcaaattaagaaaaaaataatattaaaaaataagagattaaaaagtgaataaatagaattatttgaagaaattaaagagtaaatagtaaataaattgcacttcccatgcgtttatattttgtttagtgataattaaattataaaactaaataaattttagtattttcatataatattttctcaagtaactattttactacttttatatatatatgggtatattctaatgggtaaaattagaaaattttgattttttatacttaattttctatctaattaaaaaagtctgtcatttttatatcatatgagatgagattgttccatcaaa

SEQ ID NO: 212242 - DNA, 499 bp, Cannabis indica
taatagtattatttcccctcttagacatgttacgacacaaaacaaacctacaaatccacaaaagtttctgttctgtgaacggcttctggggcctaccatgatttcatcagattgttcggctcagatgcagacaaaagaggttgtgggtcccatagtttatcattgtaatccttattggtgggccccacagttctgaatcatggaacaatgaaattcaccattaatattgtagttaaagtggatgctcttccgaaaaatcatttatcaatggcatatttcactatagttggccaaaaaaaaaaaaaaaaaaaaagacatatttcattttatccttaaaccaagtggagaaaaaacttgggcatgttttgtgtaataagttgaggtggacttgacgcgtagtttgctaagaataaaaatagttcaaaaatggagaagtcaagtaagagaagaacgaaataatgggtatgatttagggtagtatgatgtgtatatagttcta

SEQ ID NO: 212243 - DNA, 794 bp, Cannabis indica
tcagatactttttatctactttagttacaaaaatagtgttgcttatacaaagggagagattgaacatatttacatgaaaattagaatgaacaaatttaaatctcaaataaaaaatgtaatatgctataaaaataaattaaatatatgtgcaatgcacttaactttaatctactacggatatctattctatataaaatgtggctatgtaacggaatttttagtttaacgatgttatttggttttctacgttaaccttaacagaatattctttattaattttataataatattattatatatatttaaaaataaaaattatataaatattttatataaaaaaatttaaatttaaaatattataaatttttaactatttttaattttattattatttattttatattttaaattgaaatggttataataaggaattaattgctttctgttttagttatggtaaactgattcacataccatatttttcgtaaagtttgggaataaaaaacctttatattaaatttacatacacacttaaatttagttatatgaattttaattaataatatagtaaattatagtatatgcattatcacagatattgataaccaattaaaaaaattttaaaaaataacatatatatatatatatataatcacattacaaatgacacactaatatagtaatagctaaaaaaaaaaatacttcaagatcaaaatctcaaaacttattttaaaaattaaaaaaaaaaaatacatacctaaataaaaaattaaacatagtattgcacttaacat

SEQ ID NO: 212244 - DNA, 444 bp, Cannabis indica
atttgaataatttgacaagtggtaatgggctggggtctttgggtcgggcagatgggctgcaaaaaggaattatttttagactactatgtgttgggaattttgggttggcccatgctagtgataatatggaccagaaaccaagtgagatctcattagataagctaagtattttaagaggttagtggaatcaattatctcgacctaaaaaacccacaagctctcctaatagaaaagtttgacgatgttaaagggaagaaatgagagggagatgggatgcgttatgtgatagagattaatgatcatggtgagaagaaaatcaatctgagttcttgaagagtgggagatgaggccggtgatggtgatcttccattgggtgaaggtgttggtgggtttcatatggttaacattggggtactccaagagaggaaaagactagcaagaaaa

SEQ ID NO: 212245 - DNA, 536 bp, Cannabis indica
gtggagctcaaggccgtggtaatggcacgagcaaatcgtgaagctgaaaatacttctctcaactcgaatatgttctcagtgcttggagaaaatttgagatcgacaactgtgctaatgatctctcgaatccctattttctttcgaatggtgataatccaagtgttgttcttgttcctaaaattctcaaaggtagtgagaattacaacacctggagaaggtcgatgctgattgcgttagttgctagctagaaacaaagttaagtttgtcaatgtaaaattgccacagcctaataaagatcacgatgattacgacagttggtgtagatgcaatagtaccgtgatttcatggatcttgcacgcgatttctgatgagattgctgacagtatcatgtatcatgataatgcagcagaaatttgggcatagctgcacgaacgcttcaatgagaagaatgctcctcgtatttttgaagcgaagaagacgatgcagagcctcactcaaggatccaacactgtcactacatattatactcgattgaa

SEQ ID NO: 212246 - DNA, 1420 bp, Cannabis indica
ctctaaacctctctatcttaatagaattcttcatgtccctaagataaccaaaaatctcatgtctgtctcaaaatttgctagtgataataatgcctattttgagttctttcctaaccaatgctttgtcaaagatcaggcttccaaggaagtccttctgcagggacatcttaatcaaggactttatgtcataaagccttctcaaatgcatctcactcatcaatctcattctgcctcaacatccagtccctctcatgcattatgttctactcataatactactgtacaaccaaatgcccctgttatttccaatttttctctttggcatagcagattgggtcacccatctgccaaagttgtaaaaagaataatgcaatattgtaacatttcagattccaataaaactgttcatgatttctgtgaagcttgttgcaaaggaaaaattcataaatttcctttcccacattctgacactgtttacactcacccattgcaactcattcacactgatatctggggtccttcccctaatctttcctctcaaggatacagatattacatacactttatagatgcattctctaggtacacatgggttttcttactcaaagctaagtctgaggctctatcaacctttattcagtttaaaacacaagttgaaaatgagtttaattgcacaatcaaatcagtgcaatctgactggggtggtgaataccagtcactagagccttatctcattaaaaatgggatttcccatcgtgtgtcatgtcctaccactcatgaacagaagggtgttgctgaacgcaaacacagacacttaattgaaacagctcttacattccttgctcatgcttctatgcctctttcatattgggatgaggctgtaagagctgcagcctttgtcatcaatagactacccactgttatccttcaaaatcaatgtcctcttcaggttctgtataataaaacaccagactactcttctttaagagtatttggttgtgcatgcttccctaatatcagaccttacaacaaaaacaaacttcaattcaggtctgtcaaatgcactttcctaggatacagtttaaaacataaaggctacaagtgtctagctcctactggccgaatctacatctctcgagatgttctttttaatgaaatttcttttccattcactcagttacactcatctacatccacttccagtccaccaaaactcactgtctctgcctcaattcctactgttgtcacccattcctctctcacacctgtcactaaccactcaaacaccaccaactccacttccacttcaccatctgctaatgaaataccagacaaccattccactccttctctctctgcttccaccactccaaacaccagcatcatccattccacacctcaacccaatactactgtccct

SEQ ID NO: 212247 - DNA, 947 bp, Cannabis indica
tcatcctcccgattatacatcaggcacaatccgctcacgtagacccttttagaccgcagacacaagagtagggagacaattggtaagaccccaccaaagaaaattcttcaccttaggaggtaatttcaagttctaaaacatcctccaaaaacccgatttgcttgagtattccaccactattgcttacttgtaaggcgcgataagcacttttgacagaataatccctatgcgtctccaacatccaaaacaaagcatcctcaaccgaagacggagacaacgaaatacaacagatcaaatcaatatccctctgaacaaataaattgtgaagaacttcctcatcccactcaagagaacccattttttgtggataaattaattttaagcatataataccaaatttctcattagtcaatctaatatgatttattttcatttcatgtaaattttttttacctctcgcttatattgagttatcgccttttcgtgtcaacttatcattttatatatattaactacttattccacactacatactgattgacaaaaaatgaacaaattaaataattaatttataacaatatatgtatatatataatacattaaataattttttttgatattaagtaatactatcaagtcttgaataagatatatgttcaaaaaaagtcttgaataagatatgttatatttttgtaactatcttttatttattttattttagatttatctttatgtttaatacatctaaaagaattaaaaatttagaaacaaagtaggttacaatatattatggaataaagttttttgaacgtagctagctagtctctcaccaaacaaattataaacgaatgtttttggaacaactctgtgactgtgagacaaaacaaaaggaaatccgaggatatatatatatatatatagtaggtctcacaataagtcacaactca

SEQ ID NO: 212248 - DNA, 642 bp, Cannabis indica
gctcttcctgttgcttctgcattatttcatagaaagagcattgattcggctgcctgtagtagatgttcgaatgtgtgggagtctgtggggtatgcactcttagttgtaaacatgctaaatctgtatggaaggcaaccgagttttggatcaattttcattctgctaattggttatatagaggagattatcttacccatttatcttccaatacttctaagtttgagtttgaacaaatgctctgtactatgtggtttatttggaatgatcgcaacaatattctccatggcaaggctgctcagaaactgactgaaatatgggcaaaagttgcagcttactgctgctatctcaacctgctggcagccccctcctctgcagcaaaataagatgaatattgatgcggcatataatgaatcgaaacataaaattggtgttggtgttattgtccgaaattctaatggccaagtgattgttgctctttccatgcccttttatagggatgtttcggcctcaagagatggaagctaaagccttattttctagtcttaagtgggtgcatcaatatagcatagcctttgatttcatccttaatcttggcgaactcactcaactgtccttcaccaactttatctcattttcatgatt

SEQ ID NO: 212249 - DNA, 609 bp, Cannabis indica
tgctggacaaaaccagcacatcacctcaggggaaatatccatctttttcttacataccagaaagcttttgttctcacccggtagatttagagcaatgttaggaagagtgtaatcatgtatcagaagttttaagcacgttttgtaaagcaacgactcacctgataaccctgccagggtaaccttccttttatgaggaagactaatgtgtatgctaaggactcgatatcatcccgtgccagcattgaatttagacatctcctccctctgatcatctggtactttctgttgtgcaagtaaatcttcgtccttcctctataattaacacaaacaaaatgttagattatggctggctgaatgaaattgaacttcaatttgtttttttttcttttcctaattatgtttagttcatgtatacaattcataaaaagtagatttttattgacaaattattgagtgattaagaagaaaaagaaaaatcttttctagccaaactggttatacctaataagatttatctgtgcacactcagccgatcaaaaaacacaggtggtgattaacacaaatacacccacaaaaaagaaaaaacaagcttccattagaatcagtgag

SEQ ID NO: 212250 - DNA, 533 bp, Cannabis indica
aaaaaaaaaaaaaagtttgggtgaaacacaagtcagataatgtggcagttaatgaggcaacatcattgattttcaagaaagtagtaaaaaagaaagagccgtacacatacaccaacaaataaaacataatttattgctttgatttatttatagatataagttttgagataaatatggattaattaaaaggaaaagaggcaaacaaacttgcataaatcaaggagtacactaattatatatactaatcttcttttgaagatctaataaccccacctaaagcaaacgtcaattataacatgattaatggcttaaacatctcccacctacaaattggatttattctcactcttaattcatcaattacaaatatatattacaacaatcttctatatggtgttcttttttaaaaaaaaaaaactgaaaaacaataaagagtttgggctttatataatttgtaatttgtagttttaaacccgaatgaatttgaactaaattatttaagatttcactaaattaatttggagtgaatagtt

SEQ ID NO: 212251 - DNA, 657 bp, Cannabis indica
gcatagactataaaattaagcaagaaaattttggcgatgttgccgaggaattgaaaaatattaatattacaataattagattaaattctacttaggtttttctttctgcttctggctaatcagtttccttgcaatatctcttactctatttcaggtattggtgatttatgcgacgtcaaggacaaagtataatagtgcatgttgatcctgaaattgagaagacttgcagaagaaacaaaagaaacaagaggctagaaaggagtgtagtggaggttgaacaagaagtagtcatgactgaaaatgccaatattggcaataatagcaataatggaggtgtcgtagaagaccaggctaagatcgcaatccaccataccgtagcctgagagattatgtgctacaaaatatgacaggggctagatcctatataaggccacctgccatcgaagccaataattttgagaccaagccagccatactgcagatagttcaatccacattccaattaggcggacttttatcaaaagatccaaacatacatcttgctaactttgagaagctgtgtcagatatttaagattatttatttatttattttgtatcttgtaaaattatttattgtgagttatatgtgtgggtatatatatgtatttgtatgaag

SEQ ID NO: 212252 - DNA, 608 bp, Cannabis indica
aataccaattctaaatccttcactagttgataattaatactaaaaattctcttagtggattcattcatcatgcaagctgtcatctcacccttttttccacttgtaaaatggtcactactatatagtatataaaatatggttgaccttaacaagctcaacaagagagaatattgggaaaaagaatcttagcattgtatttctaacaagctcacccaaatcacagctcttcagttttaacattgtttcggcataaataacaacactctgtctgcaacagaacacactgttatctccaccatatctctccaaaaaaatctcaaattatagggtaagaaaacaatttgacttagttaggtaatgaaaagaaatctctacgaaataaaactaaaattttacttgtcatacaaaaaaaccagttcttaaacagtacaatgcaactaagaatagacctcaatatcctcctcatattgaaataagatcaccataattttgcattggaacttgacaacccggagtaatttcttcatgttttgagtatagctttattatttaattttattttttgtacataatagtcctcataggactctagcatattgtaaaccaga

SEQ ID NO: 212253 - DNA, 1025 bp, Cannabis indica
gtgtcacattttgtgtcgcccacttagaaatattattgttcgattaaaactccttaaaaaaaacctaattattgtatagatagatagatagctttttgaagacgattctcatatgagacaggaaactcccatgctctctttggaagagcctaattagaggatctgctcggcaagcatggaccaaatggaggaattgctctcgtgcacccgcaaattgacggttaccgacgaagaaggatgggaaatcaacgaggaaggaattgcagacatcgacaaatcttgcctcattggcaggcttgtacaatgaagccgtttagccgttctttactcaagaacattctctgtagactctggaatttggaggacaccgactgggatttaaaaatcaagaaaaccacggctacagcagtgttcttggttctctcgttcaaatcgaacatttctttggaaaggacactgggcaaatcaccatgggtgcttaatgctggttttctcattttggaaaggatgcagggcataccgacgaattgggaaacgactttatgctcattcactatctcaggtcgaatactaaaccttccaattaaagctataactaaagcaaatatgctgtgattggcaggaatggcaggggaaatcatcgacattcaagaagcggatgttaatcgaattgcagtcaatggtttcttcaaattcaaagttcggaactccattcaatccaaactctttcaaggctatctattcccccatgaaggacggcgaatttggctccaatttcaatatgatagactgccatatatgtgttttaattgtggaagaattggccatgaaatgcgccaatgtcaggaacctagagctacgtgaattcacgaagagggagaagtgagaccaatctttggttcttggcttaaagttgattcagtggtaaggatggaatcgattcacagcaatgaaccaagccagaacaatcatagagagctccctggcaaccaaaagatccaatctctgaaagacgcagatcagag

SEQ ID NO: 212254 - DNA, 702 bp, Cannabis indica
tttaattgtacgttgttactcatattttcttttagtgttaaattaatgcagtgttattttttatttttgacaggcaaaaatgaaccagatttatccttgttattattcaagctcagctttgatgtcagtaatgggattaatacaatcagtagtttttgccttgtgcacagagagggatttgaaccaatggaagttaggttggaatatcaggcttctcactgtggtatactcggtaatatatatttatatttttaatccttaataaaactagtatattgatcagcatatttgtattgaaatttctaattatatatactatgtattaatatatagggtgttacagcttcaggattagtggtgatactgattgcgtggtgtgtgaaattgagaggtcctgtgtttgtctcagttttcaatcctctcatgcttgtccttgtagcaattgctggctcttttattctcgacgagaaattacacttgggctggtatgtctatctgtacttgaatatttttgttcatcaaactcattatatatcttataactttgaactttatatacgtgaagaacaattacatatagatgaacactttttaaaatcaaattatactttataatactaattaatctaaaacatgaatagttttaagtggagagcacatgtacaactaaaattatgtgttagagtatatatgagaaaatta

SEQ ID NO: 212255 - DNA, 1327 bp, Cannabis indica
acattaggtacttatgccgctaaaaataaacattgggtttatggcgcttacaaacttatcgaatttaaattgatttaacacaatattagaacaccaatttttaacaaaaaaaaaaaaaaatacttcattcattacgattacatttacataaatatagcatatatatggtaagttttttttaaagtgaaaaatctttattactattattattttaataaaacaaaacatatcatattattgtgttatatgtacatgcatattcacgtatctttattgaatacaagtatgactatatattacgtttcgttatgttgaaagttcggtcagattaataatatatattctttgtttcaatttgttgggtctaattaagttttacataatttaatggtattttcataatatgaacagagagtaatgtatatattaattgaatttgaaagtattaaatatatttcagttgaccaaaacccgtttcaatatttaatactttcaaaaaaataaattgttattattttgaccaaaaaaacaaatgctagaaatttacagtactatttataaaatttataaatactttatatgaaatctacttttgatctaccaacataattttcttgtgttctttaaatgaacaattaaaatatattaatatagactgacctaataactggttatcattattgactaaattaatttatatgaaatgatcgatactggaaacatgactgtataaacacatgctttaatattaatgtatgaaataagtttgggccccaatttattaataatcacgcatacaactttattttagaacaagatgaactttatttactgtaatcttacaagttagataatactcaaattgaactgtataaatcttataaatagattacttaaataaagactaatctcattgatagatcatattaacccatacataggtagaagctagctaaagagtctaatcaatttccccataacaacgaaacacatttaccacatattactaattaataaacaatggtattcaaaccgtttcaactgcaaaacaccaaggtgtacaaaaccaagaatgttttgagcaagaaaatgatttgaccaaactaaaatggaaagagtcacaattttttatgagggacaacagggtgcgaattattaaaataaaaaccaaacaacaataataaagctaaaacgaaagtaaatgcagacccacataaaggcgagaaaaggcaatcgtaagtccttgaaaaagataaggaaaaatgtatatgttttaattattataatatatattcttttgcccgcgtttctttcttttttttttttt

SEQ ID NO: 212256 - DNA, 882 bp, Cannabis indica
ttgtttctcttccttgaggccttcgagcccgagggggtagcaactccaggttgataagtaagattcatggcttcgagcctcttgcttgtgtcgagaagggggatgttctcgggaaaaggcacatggcaatgttttgagctagtggaattggagccgctagagtgttgggaggtgatggcttgattaggtgtggaagttggcgaggctttgtgaacacttgtgttgctcatggtggcattaaaaagggcagtgtaagttggtgtgatggtctcgggtgggatggattgtgatgggttgggagttggtgtgttggttaagggatcggcttgattccattgagggtagttttgaggaatagtggaagggccggatttgaagagacccacttgttgaatttggccttgtgtcgggcaaacctcttgggatccataggtaggaaaggatggcatgctttccgggggggcaacacagacagcactggccgggttagtagccataaaggtagcaaccgaggggctggcgaagttaagctgttcaggacataaaaaagtattagtggaaaccttaactttgcctgaaatggttttgatgtcatacctgagctccggggggaaaggagcttcgtcgcatgctttcatgtagtccatgcaacctttgttgtaactatgccccattcggccacagaaaaaacaaatgtccgggaggttttcatatttcagctcgagccaaatgactttgtttatacccgaaaagtgaataggtaagccacggggaagaggctgcgccacatcaaacattactcggagtctaaaatatggtccccatgtctcccggagagatggtttatatagttccaacatatggccaagagaagaagagact

SEQ ID NO: 212257 - DNA, 1163 bp, Cannabis indica
cccactcacaaaagtatgtagattttaataaaatataatatgataatatttttaattaattgatacaaaaaagagatattcctcaacttatcccctacacaaaagtctatttttacatagaattgagtcacaaaacttcacataatatttcacaatcagtcaaatagaacattctttcaaactcaaaaactcaaattcaaccgttcaagaccaagttcttcaaaaatttgactaacaaaacttatgattacattaaaactaacttgataatagaattctaaacacatgtcactgctcaaataccttgagaaacttaatttaaagtcaaccaacaccaattttcaaataaatatcaagaaaatacaaattaaaaaaaaaaaaaaaaacaaaaaaaagaagaagaagagggttctacaaaatgtcattttaccccaattttaaatttgataaatttctatagcttcagtcaagattacaaagcacaacataaacacaaacatagttatagtttcaatgaaataatcacaaaactcataaacactttttgggttatcatccataaagttctcaacccttataaaaaagtaaagtacagaaatttctcaactttttttctttacttaatcagttcttattgcttcaaattttttccttcccaacccaacaattagaaccgatatgtacatttattttttttcctgaggaagtttcttttttaataaacaatatccttttactaaatatgggtggctttgtcaaaaaaaaaaaaaaaaataagcatgggtggcaccgcacagccacgcttaacatcctaagggcccgtttggtacgcaggattggactggattggattgaaaaggattggactggactggacaagattggattatactgaaagtaatcctgtgtttggtttaagaatggactagactattttatttatttgcttttagaaaaaaaaaattaaaattaaataaaaatatataataataaattaaaattaaaataaataattcgtcgcaaaaaaaaaataaatatatcatatataattaagaatatatcataaatatataataaaatattttgtcatattttttatttaataaataataaaaatagtaaaataaaaatactcgaataatataaaattgcttatcttaaac

SEQ ID NO: 212258 - DNA, 1017 bp, Cannabis indica
gaattggcagctctgtctttgctgccccattcttgcatatttctaatggagaaaaataatatcaaatttaaaatacaaaatattatctttactaaaaactttaacccagatttgtttcaatattacgactgatcaaatattaatgagatttgttttatttttattttattattttattatatataaataatattttattattttattatatataaataaaaattcacccataaatttctcataaaccaagaattcagttatataaccacactttatatagaatagatattactgtttagagttcattatgtttctttcttgttaatttattctaattcatctatcctccattgattttctttgattttccttcttatttcaaattttgaaaattccctgttctctatcgtgtttttcagaatggagcaacagatcgttgcatctattgaaagcaaacgaaagtaatttcatcttattgtcttgaaaccatttttcaccgcattcttagaagacaatgtttcttgcatccttgtctaaagtgtgtcagatacattcagtttcagaattgtttagtaaaatagcaccctattttctcatctgtgatgaatattaactcaaagtaagcctgtgaatattttataatgtttccatgagatgtatagaaaagttgaactagtataggtgttcaatgcagatcttattgtctattgctttattgaaatttattagcctaaactgttaacctcatttaaagaattcccaagattattgtaattccattttattttcattctttcaagatagcgatataaaggtgatctgtgaaatcttttttccgtgcatttgtcaaacatgctagtatttttctaagtgctctaatgatgcaacatacaaacaatgtgttgatgtggttaattattttgttcattctgtatatctgtgccatgtttgataatacgtctacttcctttgtttaaatatatgtaaaataagataattagtaatttttttctccga

SEQ ID NO: 212259 - DNA, 965 bp, Cannabis indica
  modified_base (945)..(945): a, c, t, g, unknown or other
acttacactcgtttgtgttctcttgaaatttcacaacacatctcaaaaattgtgaaatttcacaaggaggaagccaagaccgttgctcttcacttttttattggtcacgttgaaaagaaatcttagttttacaagcactaacaattatttttgttaaaatagtgaaaatctcacatttctaatagtggtacccctttgtgaaatgtgacttggacccatctctaaatattttttcttactagtcacaatgaatccgtactactaagacatgaatatgaagatttgtttcacgttaaatttagttaaaatacccctagttcaaaaaattgaaaatgctcttctttttagggaaaatttaaacaagtcttttccttacgcttacacttcgttagtgttctcttaaaatctcaccctacatatttcgaaaaatcgtgaaattttacatgaagaaagccaagaccgatgttcatcactttcataagtcacgttgagagaaaacctagtctttaagcactaacaatcatttttatcgaaatagtgaaaatctctcattttttatagcggtaccctttgtgaaatgtggtccagacccatctcggaatatttttctccactagtgacaatgattttgcactactaagatgtaaacataaatatttgttttgcgttaaattttctaaaaaaagaccccctaattttaaaattaaaatagttctttttttcaagggttaaattttaactaagttttttccttacacttatactcgttaagtattctcttacgatcctcaccctacacactctcaaaaaatcgttaaattctacattgaagtaagcctagacagttgtccatcactttctattggactacatactagatacctatttttcaagcactaacaatcatttttgtcgtaaatagtgaagatctcacattttctagtntaaatggtacctcttttttg

SEQ ID NO: 212260 - DNA, 982 bp, Cannabis indica
taattaatcaggagaggtcatacctgatagttccaatcaggttgacggtgccattccacctgtcaaccaagcaaatcaatcgctaagacagccaggcgcttctgtattcgaaaggttggggacgactcatgacctaaggagtgatctgaacagaacgagaccagtagacgatcagattgtcacgacgatcttactgcccagagcccgtgctcaaattcccgcttaaaaggatacatatgtgattcaaatcgaccagatgccgagcaggttagcccaaccgtacaggcacaactagacgaactgaaaaatatgttccaaggcattgttggatagagaaacaatgatctcgagctatactgagcacgtgaaactcctttccctccaaaggtcaatcttctggtgttgccccacaagtttaaaatgcaaacatggaaaatgtacgcaggaagagaagatcctctttcccacctcaagcatttcgacatgcaaatggatttgcaagggatacaaggggacgtgtgttgcagaatctttcctgctaccctttcagaagccgctcagcaatggtatttcaagttggcccctggaaagttcaattcatggaaagccttttcttcggaattccatgcacaattctgtttctctcgccaactcccattgcatacatcagcatattcatgacggaagcgaccaaagtttcacgtgtaagtaaagatggaaaattatccgcgatactggggggcattgaagtcctcggtgaactttggaaggatataaggaagaacgggtcggtagactgaattagtgattttattgaccgtgccgaaggcttcatcaagctcgaagacgccattcaacgagcagaaggtaagcaaaagcctggcaagtcaaaagctccttctactggaacgtccacccaactccaccattacccaaataattcaaactcaagtggtaaacgttccaaaaaaaccacaggcaa

SEQ ID NO: 212261 - DNA, 654 bp, Cannabis indica
tcttccggaacacctgccagaaatatttgagactttgatttattagcctgtaaacccgaagcattgctgaaatcatctagggccttctttagatgcctaatagcttgcacggttcctttgcaaaacaaaattagatcatctgcgaaacataggttagtaatttgcaattgcttgcagagaggatgaaatctaaaagtgtcttccatggaggcaactttcaatcttcgagttaagtactccataaccaaaacaaacaagagaggggatattgggtcaccttgtctgagccccttagccccttgaaattttccttgcaacctaccattcatcatgacagtatatgaggcaccctttagacaaatcataatccagttcacaaatctactgggaaagcaataggctttgagaagctcttcaagaaaattccagtctacagtgtcataggctttacttaagtcaatctttatagcgcacctagctgagacattctttcttccataggccttaattaaatcttgaaaaatgagaatattatgcgctatggatctatttttaacaaaagctccctgattttggttgatcaagtaaggcaacacctcagaaagtctcagacatagcagtttggagataaacttatagattgtagaacaacaa

SEQ ID NO: 212262 - DNA, 685 bp, Cannabis indica
cttgaaccaggacacaagaaatgcttaattagtagagatgttgtgtttaaggaagaagagatggccatgaaagttaaagctatctctgaaactgttcaaactaccctgcagaatgagagacagtttgaggtggacaaatcacctgataactctactcaagaagaagactcagttgaagatgagagtaatcagagtgatctaagcagctaccaactggcaagagacagagaaagaagagaaagcaaacctcctaacaggtttggctatgctgacttcattgcctatgctctaactgtagcagaggaaatggatagctcagaacctactagctatcatgaagcagtaaatgggaaggatggcaaagcttggtcaaaagctatagatgaagagaaggcctccctagtgaagaacaagacctggataatggttagaaaaccagaagggtgcaaactggtaggctgcaagtggattttcaagcacaaagagggaattcctggtattaaagccactagattcaaagcaagattagtggcaaagggatttacacagaaggaaggtgtagatttcaatgaaatcttctcaccagtggtcaaacaagtttcaatcagagctataatggccaaagctgctaaattcaacctagaagttgaccaaattgatgcaagaactgctttcttacatgggg

SEQ ID NO: 212263 - DNA, 687 bp, Cannabis indica
tttttttatcttttttttaattctatttaaatactaaacctaactctagtatctccctataaatagaaagtataactcttattttcataaaatcctagtctcctttgtcagataaaatagaaaatagaaaagagccgctatctatttcgaatttctcttcttcttcctttgaatatttcgaagccatggtgaactaagagtattccgattcatgtcaaagtaatatctagcatagtgaggaagactgtgctgaatcaaattgatggagatgagatccaggtttaaatcattataatgctctgctacagacaggaatcaagggctagagatttgaatggaatgagtattattattctgttaccaccaatgtaaggatttcttaatctcttatgtgtttatttaattgttttagaaaattcatatttaggatgttagattatagtttataatcatacatacatgttagtaaatctagattctagtaaaaaaagttccaacaactggcctcagagccatagtaataatttattttcatgaaatatggatttaaaatgatatttgtatgatttagataagttcatattagtttatgtgtttaattgatgattaaatgtgaattatgaatttttcaacgaaaaataattttattttcgttctagaaataatttgtttggatttcttgtgaaa

SEQ ID NO: 212264 - DNA, 879 bp, Cannabis indica
gggcatgatttagtacatatcaaagtttgaggggcatgatttggtagatatcaaagtctagggagcatggtttagtacataaacaatcactgaaacagtaaaattgaatgaaattagacaaaagtccttaaatttaacaatctcaatagttcagggagaatttctaacggccaaaaaagttcaaggggcacgatttagtacatgtcaaagttcggggagaaaaattactaattagccttccagaaaagataaaagtcatgaaaataattccttaagcatcaaagtgagaggtctcatgtatgttctggtatgcattagaccagacacatgatgttgagacagatttttttttgctgaacatgttgagacagagttatgatgatgaaactgatatttttattttaagtatttatttttgaattgattctctataaataattttcgcttctttaattaatttttttcatctttactatcaagtatattttatagttagaaattattaaagttcaatttataatttactaaaaaataatattctttgatcttctgtatttatattaaattgtttctacatttaatactataagttataatattaaagcgtagtgaaaatttatcttagtaaaatagttgagattgatttctaactatacaagaatcaatatattaataaatcttattataattatatatggttagatcctataatttaattactgtacaaactataaattattagttttagtttgtgtttttatttatttaaacactttattgttactaaaatctaaaaatcaaaattataaaaactaagataagtttttcttgaacttcacccaattcctatgggtttgacctcattcttcacaatctcta

SEQ ID NO: 212265 - DNA, 526 bp, Cannabis indica
agagagagagagaaataactaaaatgagtgatctttattgaatgagaataatagttttcagtacaaacttaacagaaaatgaactaaggtatttatagaacataccttaggatccaaacattagactatacccgagattactacatatagttagttaacggtttgttaactaactgacaaggacaaaaatagaaagtgacacctaatgactaagacacaccatacaacaattctccaccttgtctttgtaattacaagtcacttaggtacacattttgctgtcaatgtttaaaagtttcaagcagtggtcgaatttagttgcagacaacgatttagtcaacatatctgcagcattatcatcagtagatactttgatcaacttaaccctgtcactagcaagaatgtctcggataaaatgtaaccttatgtcgatgtgtttggtcctctcatggaatacctggtttttgcttaagtgcaaggaactttggctatcacacataacatgtatactcctttgatcaattcc

SEQ ID NO: 212266 - DNA, 850 bp, Cannabis indica
aaatttgatgtgaatttatatttagtgttgttgatcaaatgatttatttatttatttatttttttggtgcaggtaaatgaagaatttcactttaggaacatcatatatataaagactcctattttaagtaaatatgtgtgtaatttaatttcaaggagatccaatcacctgtatatgtattatacacacacatattgatctttttctacttctttccactattttttttagtgaataaataaattgttaagagattcatgaagaaaattcatggtattatttggaatttaataaaaaaacatagacaaaatggactaatttcaatttctatatatatgttttgctgtgtcaaaattcttgttcaacaattttgattgattttgagggcctcaatttctacaccttgaactaaaaattaagtttgtacataaaatgtttgctttttttgttttggtattttttttagggtgaaaatgtttgtattctcattgtgtgaatataacaaaaataaaattgagaaataataattcgattggtcctatgaaatatgatgagtctttatataaatatatatatatatatatattaatggaaaatcataacttattaacaattaaattcaactaccaacaaaggtagcaaatcaactgggacaaaccccaagttgaaactgcaatcatgataaaataaagaagctctagcaaagttatgagccaccttattaactaatcgcctaacaaaaaagatagaaacatgttgaatttctttcaataaagccttacaatcattaaccacttgatcaaacatagaaatcatttcaattaaaatacgcaaggcttgaataaacact

SEQ ID NO: 212267 - DNA, 517 bp, Cannabis indica
tttttttgcttcaaatttcgcgctttgtgctgagatttcgaattaaggagaggaagagaggagcgttggtagtggtgggatcagttttctatgagcagctctgccatggtgccacgtggctttggactctacaagttacaagtttcaaactttccttttcctaactcattgtttcatcctcctattccttaaaaatcacatctttattaatttgggttggtttttttttctcaaaaaagatttttaattttcatatgcatggagtgagtgatttaatgaaattcacaaaattcatattattcttagtgtgacccttttcttatctttttttctgtaaagtgacatttttggcaaacaacttcaattttttttcttttgggtaccttttaaacatcatcttttggctcttttaaaactctattcactatttactactttttttttgtaaattagaagtcacattttttccttcagttttcaaattctttaatgtattcatttgtttgagaagtgatac

SEQ ID NO: 212268 - DNA, 537 bp, Cannabis indica
ttatgtttataacatcattcttgtaaatttttaaaagattttaaataatttaccgtgtcgaaaatagatttaatttttttttaaacacgcgtggtaaattagaatattaaaaactctatttttagtattctaaactaatcaaaaaaatttaccatttataggaatgatactataactataactataacaaataactatgaaataaaattaaaaaaaaatattccaacatataatttcggacatagagattaactaaaatattatgattaacattcctcttttcacaatttagaaagttctaaaaaaaaaacttcataatttagaaactaaaataaaataattttttttaattttatatcgtactaaatatcataataatactaataaaaattattaaatgttataggttgattctacaatgcactcccttaaaatggatgtattgatacaccttttacttgtttcgacattcagaaaaaaaatttaagtctatttttttttttctatattgatgtacgttatagctatttaagatat

SEQ ID NO: 212269 - DNA, 1127 bp, Cannabis indica
acatttctataatttgtcattagattgctatttttttatttagattgttgaactaagttagattaacgttatgttagtgttatatcaataaattattaaaaaaattagcagaatgtaactattttttttttctttcatatagttattgttgggaatattttagaataaataaaatttttgttccttgaactataatttttagagtttaattttttgatttttttttgttgcgaaaatttctctagctattttttcacagaacttacaaaagaaaaagaaagtaaaatcataatttatctacatgtaaagaagagaataattgcataggtaacacatacaaaatgtgcaaaaacattcttgaccatttttggggagtgataattagtgtgtggttttagttaggccacaatatgaatcccaaaccccacaaaggagctttggttctatttgattatacattagcctcttctctctctcacctatatgcctaattttattatgtggatcataaaatgcttacattttttttttattatttttttttttttaaaattattggttttggatagttgacaactaaataataccaagcaagaattgatctatactcaacatacatatgccacgtgaagtcgagtggttagtcacgtgaaataattatgtcagctgtttaatagagaaacaggatagagtgagtgcaccggaatactactttctctttctttgttaattttgactcaattttgacaagtagatttttatttgaaaaaattgcgataaaaatctttaaaaagaaaaagtttattttatacaaataagtttttaatcttaaaaaataacagtaatagttcttaagtttaatatttttataagtttataggtcctctttttaacagatccgttaattctttcttaaaatatcacatgttgatattaaggtacgacataagtttttaaaaaatttattttgatgcaaataagttttttaaaaacttactttgatgcacataagtcctaatcttgaaaagtatggttatatttcttaagctcggcattctcgttagtctataagtacctaatttaacaattctgattgtagttcttaaatttccatgtatcaaaaattt

SEQ ID NO: 212270 - DNA, 594 bp, Cannabis indica
agcgaatagtagtgatctggacacagtgagactcagtagattttgttgaaggaacagtggaattggtttggatggggttgtttttggttatacctgactcagaatctgacatggtgcaaataggacagaggtgattagggttaggggtgcgattacggtagagtacgaattttttttcttctttttctggcactgataccaagtcgatagatttagggaaaaaatgtttttttctgtattattttatttctgatataaagcagtatatataacatgtaccataatcctataacgagaaacatatctaataataaagatacaatgaatccctatactaattccctaaaaatatggtacggtaaaaatagaattattatatagctatattgtataattgtaataattaagaatgctgattttccaacagacgcgctgtgaagggtcactaaattattttagagtcactcaataagggtcacagaaactagtttttgtagtagtaaagatatcttgattgtatgcttgtatgtagatgacttaatcttaactggaagccactcaagtattttttaggagctaaagaaagatatagca

SEQ ID NO: 212271 - DNA, 454 bp, Cannabis indica
ttaattaaattaaaaatcaatttttaaaataaataattcaagtatcgttttttgaaatgactaaataaaaaatcaaatgagacataaattaaaaaagaaccgattttacaaaaaataaaaataaataaaaataaaaaaaaataaaaaacaaataacacgtcgttgacctcgcatttagccaacaacaatgagttaattaaagcgattagaaacaataaataataattataattaagcaataagaacatgaatttgttacagaagttcggccccgtgatagtggtaatagcatattcctcttttacttatattaacttgtaagaaaagaagtaaaaagttcttgatcttcctcaaaagcttttacagagattttaatagcgtaagtgttctattgaatgaatgatttcatatccctgaatagtgaaatggctcagtatttataaagaaaagttac

SEQ ID NO: 212272 - DNA, 539 bp, Cannabis indica
gctctatttctaaccaattcaagcttacgcaaaccttaaatcaaagttagaaatcgtgctcagaattcaattcaacctacagccctaaatttaaataaaaaccaaagaaagtttaacctaaaacccttagaaattaaagagaaatatgaggaacttacctcaacacttgaagaattcctagaacttgatagttcaactaggaaaagggtgaaattgctgaaaaaatacctttgttgctactggactctagggcttcgaaaaggaagaggtagaaggaaggttgtaggctcttttgattatctcctaatttcttttctctctattatcagaataatccttagataaatattataacctaataataattacaattcagccaacacttgcactaaaacaataaaagacaaattagggtaaaatgattattttaccccctcccaaaacttaaatttaagtataacccaggggattttggtcttttccaacttccccgaatgaactaacaactcgactttgtaaactagtccggtataattcca

SEQ ID NO: 212273 - DNA, 520 bp, Cannabis indica
tggtcgaataagcaggagtctcggatcctttctcgcatagaccatgtcttccataatgaggcttgagtggatgatttcctaatactatagccaacttcacttgggaaacttgttttgaccattgcttatgtttaatttgtttgatcactacagagattataggatgtaaacctttcaagttctataatttctggattgatcataaggattacaagcagttggttatggatagttggaataggcctattaggagccatggattgaaaggagtcttctataaaactatgagactcaaacacaaattgaaggctttcaacaagtcttctattggtgatattggaagctcctatgataaagcaaaggccgattataaggatgctcaatctgatctccaagcagcccccttagacagttctaagattgaaagagagaaattagcagctagtcagtttcagtaccaggaaaagttgtatctgagttttttaagccagaggagcaagattaaatggatacagcaggg

SEQ ID NO: 212274 - DNA, 710 bp, Cannabis indica
ccacatatacttagaaagcaaatttattaaaaatgatactaatgataagtataagtgagatacggtgataacatcaattttgaatataacgacaattataagtgagatacaattataacaacagttttgaaattatatgcaattaatcgctttttttttagatatctaattggtgtgagaatttttagatttctaatcttttatttattaaataaaaaattttataatgacttatttcaaattttttagagttctatagagatttatctattttgaaaaaaaaaatattatattctttaaaacctctaaaaatacttaaactaatatataatgtattattttttttatcgaaattttaaaaaaaaaataaaacaaataaataaggctttatgtatcgaatttaaaaagtaatagatttttttaccttttatttaattaaaaaagaacacattatttttcattaaatttttaacattttttattctaattttatttatataattatgacgaaacaaaatataaccccaacaaaacgcggcttcctactaaatatgaaatgttgtttaacatggccaaagaatagtttattgttgggcattttacaaaaatactggatttggggtaatacttttcaattttactgccacacggcagaattaccatttatactgtcctccccttttttttttcttttatactgtcaataccaa

SEQ ID NO: 212275 - DNA, 1267 bp, Cannabis indica
attattctagctttgtcacacagtagagcaagattacgtaggtcaagtattgtgatgaaaactctagttacttccatgtggctatgagaaaaagaaagcttgagaacagaataacaaccttttctcaaggtaatattattgaagatgattttgacaaggtgagacatcactttttagctcattttgaacactttatgggtagtaaaagttcagcgacttgccgaatcaatacagattgtcttcatcatggagctagcctcagtttgatccaacaagtgaatctcatcagaccttttagtaagagtgatgtgaagaatgccctctttagcattcactcctctaagagtcctagattggatggatttggctcgggtttttttaaaaatctctggaaggaaattggtgaagatacatccacagttgttctgggtttcttctatgatggaagactgccgaaaagtctaaatgaaacggtgatctctctaatccccaaggtagtgaatcctttatctgcaagtgattatagacccattgcctgctgcaatactatatataaatgcatctcgaagatgatttgctctagactctcggaggtgcttcctactcttgtccaaagtaaccaaggagcctttgtgaaaaataggcttcttgctcacaacatcatgattttccaagatctccttaagggttattcgaggaaaaacatttcagcaagatgcattatgaagattgacttgagcaaggcctatgacacagttgactggcagtttgtagaagatcttctgcaacacctttgtttccctgctagattcatcagttggattatgacttgtttaaagggaactagctataatcttcttatgaatggaaggatccagggtaaattcaaaggtgaaaaggggttgcggcaaggagatcctatgtcccctctcatctttgtgcttatcatggagtaccttacaagaatgctagcccattactctgggagaaaaggatttgggttccaccccttatgcaaacatctaaagctaactaacctgtgttttgcagatgatcttattatattttgcaaggggaatctcaactcggtcagttgcttaaatgaggcatttttgagattctaccaagctacgggtctctcagctaataagtccaaatcccacatttattttggtggggtaaaggatggtatcaaagctcagatcttggacctcgttaaaatagaaaagggttccttccctctgaaataccttggggtcaagcttcg

SEQ ID NO: 212276 - DNA, 835 bp, Cannabis indica
aaatatgattttgacattttttttggacataaagactaaaattacttatgaatttacgatgttaacatccgcaatcgatgactcttcgaacctagatagctcattatctaactaaaaagtatgatatgccaaaccataagttgagcgagctacatgcatgagacaaagttgtcatcgaaaatttagacaatacaactataacgacctcaaataatacaccaagggctcgattggaacgccgttttaggtcgtgttgtattgtattatattgaattggattagatatcatatttttatataatattatgttaaattttaatttatactaaattattatatatttaggtatccataaaagttaatactacatatagttttacataaaaatattggataaaatacaattcaatataatacaatacaatacgacttaatacgacattccaaacaagccccaaaagaattagagattcgtttgtaacactgcaaaattgtagttataagaaaatcaactagcacactaattgcaagagacatatccataaattatctacaaaataatataagataatgagagataaattagcaaactaataataatattaataaattgataaaaaaaaatattctcaatatttagaagaaaacaactctctaatatattaaaattaaaattaaatattgacaaagtcttagtattgataggtcttccacaaaactaatctacaaaataatattaaaaaattattttatcatgcatttaatggttaaataaataataaaataaaatatataaataatagtaaaataattaaattataatgaaacataaaaa

SEQ ID NO: 212277 - DNA, 701 bp, Cannabis indica
tattatatggatttcaaaaaatcgcgttaaatggaatgaggttaatattttttaggaaatatttggtacacaatattgtattatatagtattgtatttgtcaactctcaaaagtagccaacaaaaatgtcatctcataagcaaaagttgtaaacaaagagcataaattaacacaagtaattaatttataatagttcaccctgtagtttgttaatagagctacttctacttaaatttttattgattattcaacacacttagaatactgaggtctaagtgattaaagcaatattctttatagaaagcgtgacttgaagtgttcaatctgaagtcaagaaaaactctcaatattataattttgagagatttagttctccgaagacttgggaatgcaaaaaataaactgaatgaatctctcatttataggaaaggatggacgaatatttaaatttagaataataataaaatattcactgctacaaaaaggagtattcgcgacggttctaaaattactttttttggagaaccgtcactaaaaaaattaagtgagtgtttaaaattgtcgggaaaatagggtattcccgacagttttaaattgtcgggaggtataggcgacggtttttaaacgtgccttaaaaaatcttgtatatttgtataagggaattgggcacagtttaaaacagacggctaaagtatagccga

SEQ ID NO: 212278 - DNA, 550 bp, Cannabis indica
tctgtggatgcacaaggtaaaagtggaggggtggcactattgtggagagtggagggggatgttaatctgttggggtatggttcgaactatatagatgtgtcgatttcaggaggggagaaaggtcattggaggctcaccggcctttatggtgaacctaataggaatttgaggaagaacacttggaacctggtgcgaactttgaaagatcgagcttcacttccatggtgcattattggtgatcttaacaatgtcacctctcagtcagacaaaaggggaggcaacccgtaccccaattggcttattgagggattctgtgaaacgttggaagaatgtgggctggtagacttggagttgggaggctatccttatacgtgggagaagggacgggggactaatgcttggatagaggttcgtattgacagagcagtggtttctcaaacttggttagatttttcccctcttgctaaattaattaatcttgaagtttctacatcagaccattgtccacttcatttgattctggataatattgttcaaattggtggtagaa

SEQ ID NO: 212279 - DNA, 500 bp, Cannabis indica
ttttttaaaaaaaaatattacaagacatactattgtagtgatgttacaaaatacataattaggttaaaaatattttaagatacaatttatggaaactcaacaatacattttggataagctgatatgtatatttactagaaagattcctaactcatggttgtacaaatatttctatctattacctacaccacatagcacctgtgagtcacaaagacccagaaagaaaagcagtaatacaccatcgcaaaaatcattacacaagtatcaacaattatcctcagaaaatcaaaattagatgatcgcacattatttataaaattaaatccaaatcactatagatatcagtcacaaataaacgtcaatataaagatattcaataatacataattattgagttagtagtacaagttatatctattactttataaaataactattttcattgtttatttaatgaaataaccctgatgcctaacttggcatcttaatatccttgttgt

SEQ ID NO: 212280 - DNA, 1025 bp, Cannabis indica
aatttaaattttgtaattttttaatatattttgttcatttaatttattttatatatttattaatataaataatgtaaaagaaagaaaagaaagcaacaaaaaataataataataaaaaattagttaagatgtaaaacttacctaaatgtacagatgtactattcatgagctaaaatattcaggtattatagcttatttattagaagagttttttcaagagttttgagatatattttagctttgtagctattatacatgatctattgggagtgctttagtttcaagtagtaaactcttgagtttttttaacccaacaactagcctaatcctaattgacttcctagattggactgttcagaaaggtttctcttttgtggaataatagttttgggaaatttaaaaaattcatctgatgttttcccctttatttttcaaaaaaaaaaaaaaagttacacaagccaattattgccaacacagttgtattacagtataaactattacaatgattaaagcaaaaaattaaagttatattccataagtttgtgcaaggtaatttcctccctcaacttataattaatgtaacataaaaggaattatacttatcttttgtttcctcatacagacaaaactgttgaaaagaaaataagagataaagacagaacacagtgcattaatagtagcaaatgaataactactgtaatcatcttctttccaatacaatctttactatagtctataaagacatacatggaatgaggaatgggcttcaaaattaccaaaaaacaccaacaagagtggtattggtattggtattggtagtattagtgggagcctgggaagaaatgagaaaagcaaagatgatgtatatagtaatatagagaaggttaatcatggggtagcattgaaagtgtcaagattcttgtagaaagagagtcttgtcctgtattaatcattatatctactttctctttttacaaaaacataagtgggtttgaacaatgaagccatactataaaagtgaaaat

SEQ ID NO: 212281 - DNA, 1054 bp, Cannabis indica
caaattgggcaagtagatcaaaattttagtcattttgttaatgtcctttagtacaaatctaatggataaatgcagtttcactgtgtgaatcattttcgatttgagcctcttagcatacgttaccaaattacaagtgaaaaattccaaatacagggatgtcatcttcatttcttgcttgtttttttattgaagaaaagaggggttccaacatgttgactggtatcgctatgaataggcattacagctctgccggtctttacacgcacaaaaatccccccataaatgagttaaggaaggcaactgtcactcaatcatcttcattctcatcttgattgttggactgattgtgactttgagagttgtacatttcagcaacctaaaattcaggtaagactctattaagatggcataacgattcaactcttgaaaatcacagtttcaagccaacaattcaaaattgttctttctctttcatctccagttatttccataatattaatgatcagcaaattgcatgcctgctattatcaagctggacttgacaaattttaagagtaatgtaactctatgtttggaagttggattttagttggggggaaagaatgtatgaaaaatgtagggaaaagaaagtaaaaaaaatataataaaaaaaaaaaatctcatatttagtatagaaagaaattgtatgaaaaataacttcattcaacaaaaattttcataccaaacatgaaaaattaattattttttttttattttccacattttccttactttttttctttcctcaccaaaatttaacttccaaacatagcctaagagttaactaaattctctgtttaaggttaaaatctcatgagtctgactaagctaaacactgaatgaagttggaataattggtcagtcactttttaactcaataaataagtaaatcacgagataagtgactcttcacctgctcagatgatgaggcctcctctggcttcttgtcctctcgaatgcggataagtcgtgggaatcgaagtgaaatgccctttataacaattgaaaaaaaaaa

SEQ ID NO: 212282 - DNA, 525 bp, Cannabis indica
agacgccaatcaaaactcagacctgaattacgccacacagctctagtcatatcggcagtgaaaaagtgaatgtccaaccgattcccaagcttgcttacagaccgagcatgtagagtcagtaatcactttcctcttaaccagcaaagttgcaacaggaagagcatcatggacagccttccaagcaaagattttaattttaggtgggagttgcaaggaccaaaagaatttccaccaagaagagtgaacactagagctttgaactttgatcaattgcatcaagatcagcagcaagatgatagccagaactaaccgtgtacaaaccagtgctatggtgatgccatataagagtatcaaggctgctgacgaaactcaatgggatagttaaaattctttccacatccaaaggagtaaaaaactgatgtaggacgggaacattccactgccgctcctctgaaataaggttttgcaactacaccatttggtggtcctttgtaatgaaaaagcaagaaagtgctatgcccaggt

SEQ ID NO: 212283 - DNA, 643 bp, Cannabis indica
gtataatagtaattacagtagtaggagtactaataataagaatttggcgttaaagcttgattatcaggagattttgaaggcttggtctgataaaggctcactttatatccaaggagattcacctcagactgtacctgacttacaagataataataataatcatgtaagtaatttttaattatttagttaactaagttcattattctattaattaatcaatcattgaaagtactcatcaaaaggaatggaacttggattgtgaagaattgtttattatttaataatttgttttacttggttttgtttgtgaaagccgtttttctatattattattattttttattcattgatttgtttttcagaggtcccagttggggatttcagccaggctgtgtgtgtgggttcttaattctaattttggccccccaagcttaaattatttttaatatactttggaatattcttaaaaaatatccaaataaactatgtgattactataccttaacaataaaatattgtggttataataaaggtttatttcattaaagtcttttgcttattaattatgtgtgacatattataatgagtatttatacagtaaagtaaagcttaagtaaatggtaacaaactagtaaccaaaaag

SEQ ID NO: 212284 - DNA, 1684 bp, Cannabis indica
tgtgtactatagtgaaataagaatttatttttcttttttttttattacaaaataaataaaatacaccaaactcaatatattacttaaaaaaagatttaagaaattagaagttttgtgtacttttttttaattaatatatattacatattataattttttaaaaatatatataattaagtgcggattggattgaatcggttactttttgaggtcaaacaacatccaatccgcacaagtgcggatatccgcattttgcggattggattggagtggatcgtgcggattggattgaatcagatactttgtgaatacccctaattggaactctctcagtctctctttaattattataaattataaaaatactttcaacaaatattattaaaaaaaataattataagaataaaatagtagttttataaattagtaattatctattcttcctataccaaacaatataaaaccattattactcttctttctcttatattctttatccaccttactctccctctttcctatcaaacatagtcttaatatatacctttttttttttttttatgaggagccttaatatttattttactctctatttttctaattctattcttcatttttccaattttacttttaatactaaacaatacaaaagagaacaaccatcatcttcatcctttttattttctatcctttctaaattttctatccattctactctctttccctcctaggaagcatagcctgaatgtttaagtgaaagaagaaacaaagattacatcaagccaaacaaactcaaacttcttgaaattaaaaaaccttaaattatatataggacatatttcataaaatagattattcaatccttgactaaaccaaacaaggtacaataattaaaatcaacaaatcagcatgaaaggaagagatcgacaatactgaccaaatatgaaaatatcacttctttcttgacttggcttttattaataaacgtaatttactattttcctagtgtaagagatgatgtgacaatctgcatatctttatattataaaactagagaactaagccgcgcttcgcgcggtattgttcaacttttgtaaacattttataaatttttttacttatttaataatataatctaaaatataatatttttatgtgtacattataaataaagtaatactattgaaaaaaaaaattgttattttaataatacacgaaaagataacaaatttgtgataaatattaaatagtggaattaacaaagaaataacatgtatttttataataaaataaaagaaaaagaacacagtctttgaatttaataatttaggcttgtgactgatgatgtagttatttttgaattattgtttaaacgtttttcttaacatattatttataaaagttttaacattttattttgtggtgtcagcgaatgttttttctacaaaattaaatgtaggatgacaactgtaaaatgggctatcacaatattatatattttttaaaactaaaaaaatgaggattttatataaaaaatattagtgatagaatttttctttatatgaaatgtttagtaaagggggaattaattttaataaattatgtagatgtgaaatttctaccttaaattgtaatgatgaaaaaagaaaaatttatagtattactatgtgactaattatttcta

SEQ ID NO: 212285 - DNA, 528 bp, Cannabis indica
tcctggattggggagtctgctctatttgcgagggtggatttgggtaagtgtattattaattctggactaattgaagatttttgattgctatagtctggtttgttctaagttctgggtaatttggtttcacattatgcatttttggttcaattgacttgctttaggtggtttatggttgtgttggaggagctctatggtggtttgtttggggttgtgtttgttccactgagtggtgttgggttggctacggtgtggggttgggttggttacagtgtggtgtttggtttagttgtggcttagttcagttctggtgttgggagtcgattggaaccggggtgtgattacattttttttgggtgttcaggtgcgtcgagtatcgggttgggtgtagtcaggttgggcatggtcgggttcgggttctattgggctgagcccgaatgtttaatttataggctgaaatgaattataaaaacaaaaagggtgagacaaaatattattccattttggtttgtcaaagtagaccataaa

SEQ ID NO: 212286 - DNA, 585 bp, Cannabis indica
cacagtataattgtaagaaaatggaaaaatttaataatctacgtaaattttcctttttttttaaaaaaatactgtataagttttatactgtgtattatgttaagttttcactattgtttttagttattctgttttgtgttccattgttgttatataaaaacacagtgtttttgaaaaaatttccgtgtgacagtatttttgtaaaaattaactaaaagtccaatacttttataagtttcccttttattaaagatacataaaacaaaaaaaaaaaaaaaatccataaagacattctataatactaacaattcaattattcttataatttcattccataataaaaggttattttgcaaacaatgactaagaatattccaaacttcatagtttatgatgttctaaaaaatcaaaattttctaataagtttttgttaaaaaacaaataaaaagttagcaacaaattattgggtaagtttattgtgcacttaaatttgatagatcctctctttcaaaaaaaaaaaaaaaattgatagatcccctatttactttagcatacaagaaagctttttagtttttttttttcata

SEQ ID NO: 212287 - DNA, 1165 bp, Cannabis indica
gtgtttttttggttgttgagtcaaaggttttgacttgagttttgtgatgttagttttttttttttgtgaagtagtttagtagtggaaattacataaattatgtgtgtattaatctagttacattgttctaatttgatttttatttcttgtttaaacaaaaaaaaaatgtgctcgtaatgggttgttgtcgtgattatatagcaaatctaaggtcacctttggtttggaggtaattaaatgaaatggaatgaaaatgaaacaaatgaaataattttcattccaaaaaaaatcatttaaatgtaaattttaaaaaaataatatataatttttttatacattttttattttattttatttcatttttttttttttacaccaaatgccactaagtgtcatattggaatttttagcataggctaaggtttcatacgaattaattaaaattcaaccaaaccaatgaaacaattaaattaaattcaaaaatagattagtttagtttgaaattatagttatatttggtagttgttgtaaaatattttttacataactgttaattttttaattataatacataaataacataaaaaattattatgataacaatataaacatcttcatctacttattcaaaatatcaatattttgtaagaaaaaaatatatgtaaataattacacttgagatattcatgttaaattattaaatgggaaaaataatatacatttggtaataattacataagtggaaagagtaagaagagaaatctgaagattgttattaattatttattaaaattttgatgagaagattcaaaatggctggtttttaattaattaattgaatcaaattcagaaaattattattcactaattaaaaggagtttataagagttgcaatttctattctttctccttttccttaaaaaaacatacaaaattcctatctttagaaacctaactcatttaactgaaattaaattaacaatatatttatttaataatttttaaataaaaattaaaatatgagtgtgttattagtgtagattttatattattaatttaataattaatattaattgtgatttgatctgaaaaatattattaatgatcaataaaaagtcagtatagtctcaaaatataaaaaaaaaaattaagtaataaattaaag

SEQ ID NO: 212288 - DNA, 721 bp, Cannabis indica
ttgaccatttaaaattcagaccaaattgcttttggtcacttcactttgagtgaaaaaggcaaaacacaacccggtgaagataaaaaagagattaaaaataaatataatccatctatgttatttgtattaaaagaaaaaaaaaacagaaaaaagtaaacaataggatagagaatttataaaaagtgcaacttatacacattaagctcctcaaatatgagaagaaaaacttaatatagatatatatatatatatatatacatgatatgtgaatcttattctcaaggttgtgtggaagcaaaatttaggaaaaagcaaaggaactttttttttttcctttcattctctcctaattgtagctgtgtgtatagaggagttattctgatttgaggctgatgtgagtgagcatatgcatatcaattgggaagaaaagaaaaggctccttatccaagactaaaaagctattttgctaaacaaacaaaccaccgaacccataagcttttacattccacattttcatgtctcccatctctctctctcattcattcattcaaatgttgacagtctttcattcaatacactttcaaaccaccactttttcagacaccaccaaatcacaccacactacttctaattattataccagcaacagccaccccccacaagagagagagagagagagagagaagagagagagagagagagagagagagagtatatgtac

SEQ ID NO: 212289 - DNA, 790 bp, Cannabis indica
atagaaatctaataagaattgttgtaaaatattatattatatatagatgaccataataatagagaatcacaattagttatcccaaaaataaaaattatctataatatgtaattgtatagttttaatttcttgatttcgtcttatttcattgtataaatatacgttcattccattgaaataaacgaataagaattctcattcatgatttctttctctattcatattattattttctattttatattattgatgatagttttataacatagatcaatatattgatttggaaacgatttggttagcctatttttataaattctactctatgagtaatattttcatgtaatccaatttgctaattaataaaaaaaattcattattttttgaaaaaacaaaagaggatcaaatatatacaattattattattattattattattatttgaaacaaattattactattcttattcttcctattattgttgtggccacttactcacgcaaacccatagaatggggcgaacaacgtggggattggggttggggaatgttgtggccacttacaatttatactttttctttacttgacacacatgtacaatatttatttagtaaaggcaaacaatatatattttctgtgaatggacaattaattttattaacttttcaaacacgataccaaattagttgaaacagactctaaattgaacatataatcatgatataatataaataattttagtcaaaattatgaatcattacattaattgatcgttaattaaaagaaaaag

SEQ ID NO: 212290 - DNA, 594 bp, Cannabis indica
atgaagagctctacagtatgagagatagattagagcaaaaagatgtattttattttaggttgttttcaccatatgattcagtagaaaaccctaggatattttatgcgggttttagatggtgttttggaatagaccctttttgatttacttttgtcgtgatatacgacccaagattatcgagcatcgttccactgaggtcggctcgcacacttgagttctgaattgaggtaagaaaagtggtaagcaccgtgggtggctaaatatcaatggttgaatggttatggccttgattattatcaagactttgattagatatttgttgagcctaggttatgacctagggttggagacggttaataccgttatgagtaattactcctgaaactgcagataggtttattacttatcgattgcttcatcaggcaacgatagtgacatattcaactcgtggttaacaagtggtatgagggtactttataaagtaccaggattgtgtgtttatgatattgtgtaaatgtataagcatgttgatatgagataaaattgatgattattatcggttattgttttactcacttttcttgctgagtctct

SEQ ID NO: 212291 - DNA, 711 bp, Cannabis indica
taaaccctaaatcactacacacacggcagtcacagtattacttcaccaaaaattcaaactttttcaaatgtcttcttctctctaacggcactgcagtagcacaacaaaattctagggttagggttttcttcttcttctctcaagaacacagtagggttcctaggtttcaaaaattcttcaagcttcttctttttctcctttaatggcagctagggttcttctaatatttttcttttcttctttttcctatttcttgctacagccgaaaacaataattttgtaactgtttttcttttttattctaatggcagtaacgaaccgaaaaacaaaccgaaacacaagaacacaaacacacacaaatacaaatatcagaaaaataagagtgagatgaaagaataaaaccgtgatgaaagtaggatgaaagtaggagaagaacaccaactttgatctcggagttcacccaaaaaattcgatcttttacaactttgatctctcttttgtctttcttttacatgaataatttcttttacatgaactaatgagctatatatatatctgtctaggactaacggctaatttcttttggtgaaatctgtctttgaagttgctttgagataaaaagctgtaaattttggtaaaatcccaacattatatgtatcttgtttgcaacggctaaattctttttgctaattgcaacggctattttttttt

SEQ ID NO: 212292 - DNA, 1750 bp, Cannabis indica
attagccctaaaaaattcttttcataaataagcaaaaaactaattgatttaacatatatatacatatttaattaaaaagaaatttaaaaacaatttaagggaatgcaaaaaaaattaaaaacacgaattttgtttttcaaaggaatgatacgaagcaaaaaaaataataaaaaaatagtgtaaaatttatgaaaagagatattttctatttcttataaagtaaatagtcaatatttattataaaagaaattaaaataatgattatggtacatattatctattaaaaaaaacaaaattttaagaaataaaaaatataatttaatgaagtttttttattgtttgaaaaacaaataagcaagtaaatagaatgatacattttaattatcaataaaaataaaataattaattattaatttcaaaaaaacaagtaaatgagatgtctcattttaattatcattaataaaaattaaatgagggtataattgtaactatttttaaacataatttagaaagttacacatgtcactcaattaagaagagagtgtaaaaaagagtgcaaaagagagtttccttaaaaaattacaaaaaaaaaaaaaaaagtttattactaacttattcaaaatctaaaccaaccaggcctaaataaatatcttttttttttaaaagaaaaattaatcatctacaacaccttttacatataactatttccttttaaagtaataactgatttattaattgaaaaaaaaataaacaaatatgtattagaactttaaaagattacataaaaaagaaaaaatctgcatcatctcagctaaacaggttttgccttcacatccttcagtggtgtaaacatgaagtttccagaaaacatagcatctttatctgtccatttaaacattttataattttgtcaaaataaagttcataagtaaaaaatataacaaatgttcttttttttatatagggaatatgttataatatcatgagtaattcaggtcaatacttcattataaatttcacaaaccacataattaattaaaattgaaaccatgataatatcatgagtaatgacaccgtgatggaaatagtaagactacgtttggtgaggaggaataaaaatactgaaataacaatgagaataaattgaaatagaaataagaatataaataaaataaaattaaaatagtattaaaaaaattgataaaaaaatattattcattttttttttcaaaatgatgcaaaaatgttattccattagaataaagtgcaaatctttatcctattatatacctaaaaactaagaaataataaatgatcaaattgtgaaaagtgaaaagaaaacaaacctgttaaggacagacaactaacttctcgagaagcatacctggccattgcctgcagatatgaaaaggtcataaaacaagttaattatttacaatctatcctcattctccacgtaattaatatataaatatatatatatatatacatacatacatataattatacagtagtgaatagaaaaagaagaaagcaaagaaagaaagagttttggcaaaacagaagcaaaacacaaaatctgtttttgattccactgtttgctctatgcggtctaactggtttgatttaatgtacaattaactcagggcaactagcatgttaaggtatgatgagttcgttgaaaagcaaataaatcttgaccatgtctaaatcatcttcactactaatattgattttcagcaatatcaat

SEQ ID NO: 212293 - DNA, 759 bp, Cannabis indica
acaaaggtctgctcgaatccaaaagaccgaacagatgaaaaccatacttgtgaaatttaagtgactaagagtcaaaagtctactcggtcacttgaagggcaactatacccatacaaagaattggtaaaagtaaataacaagctaaaactaacataatagctgcatggataattatcaaaataagcgataacattcattgaaaaggacaaagaaagcacggtaaacccaggatcaaaaggctacccggtcagctagttatcttaaaatgaaaatataacccaagtctaaaaacctcttggctggtcattttaggctctaagaaaggctcatgggttgaacaaaaaaaatgaagaagaaaaaacgttaacacggcaggggtccccagctccttgtacggatcaacttggtctgtcggggtcgagcgcttaactttctgagcagtaggagttttggtgtttttttcggtcggaactgtagaagtggttgcctcggggtttgctttggccatctaacctgcatagtaatcaagatacatccctttggaatcataaaggtaataaaaaaaattttggggggtaagccttccaaaattcgtagaagacctcaagggtagccgtttctagtctttccacctccttctcaagctcttcctccctagtctgcttaatttggacatcccctccaactttgaaagaataatgcagagattctccctctcatctttaagctcattgacctccctagattaggcgttaccgt

SEQ ID NO: 212294 - DNA, 693 bp, Cannabis indica
aaggagtcatattattctgctgcacccaatgtaaggtttctaatactttatatgtgtttatttcataatcgttttagaagttcatatttagggtgttaatcaacatacttgtgagtagatctaagatcatggtaaaataatttccaacacactccccatgtcccgacagtaatggaactatgtctagttcgagttttaatttctcacgaaaattacaagagaattaactaaggcaagagcttcaatttctagtgagagatgctctgactttgtagggacttttttgaatgtgaaaaatgagctactggtccttttatagagaaggacgtccattaaaataataataaaatagtacaaaaaaatgagaatattattggaaaattccatctagagtgattttgaccattgattgtgaaccaatagttgagatgctcagataggacttcagatgttgattattaattttcggaggttggattgcggttattggatcatttttgggtaatttgtggaaaaaattgcccttgtcttggggaaaaaatttggaaatgaaatctttagaattacgatattattgtaagaaatgacttgaaatatcttgaaaagagctttcaatgcaagttgaatcgcatcaattggatcaatattgagtgaattatagttgttttactgaaggttgtttaacaactagcg

SEQ ID NO: 212295 - DNA, 627 bp, Cannabis indica
tggcatatcaaatgccataaaaaatcataaatgtgaaaaaatgctatagaagagcagtaaatttataaataccattgtatttttttttatatatataaaatttcatatttcatgttattttcacttgtttttgagtttttttttttattttactaaaacacagtaattttgtaattttaaaactctaaaatagtatttttgtaaactacactttagcttgttttcccacaaatttagcttgtttctctaaatttatatttttagcaaaacaaatgaaaataagcgcataaaatcgaaccaaatcaatactatagactttaaaagaaaattttgaaaaaatatgcttaaaataccctaatttttttttctaaatccataatactcaatatttcctatatatgaccacattaccatatttcctataatatctctcatttgaaatcccaaacccaaaccgctccctctctctttcccctcctctttttctttctttctctctctatctcgcataccctcaaccgcacgcacaccgaacacagacggagaccgcccacacccgtccacacaaaccgcccacacccgactgcccccaccgtccacgccatcggacccaacacaccaaaaaaa

SEQ ID NO: 212296 - DNA, 884 bp, Cannabis indica
tgaatggttagattaacttttttctagttttatttaaaattcatttcttgaacatattattgtaagtcatcactagtgtcatccaaattataacaggctagaaaaatcctcccatgatgataaggtactataattctatgtccatgaactttagtaatatatattactattggaacatatacaggatcaagaataagttctactagtttgttagtttgtataatataatatatctatgtctaatcaaaatatgtgtgttatagagattctgtggtattttaaatatattctagagttcaatgtaaataatctttgaactgcatatatcaataacttaacttctccatgagatcacaagatcttttattaaataaaatcataataattatttaagaaatgacaattattcataaacattgaatttaacttcaagtgtttatgtggtattatctctttgtagagattattataccatagatttttctatcaataataaatgtaaaacacataataacatgataaacaaataaatataatttggcattggcaaacaagtcatagaatataaagcttaatttcataaaagcaattcataataaaatccttttgaagagaaaaatttaaattaatactttaaaattatcacaatgaattgtctgcaataatatgaaatgggaaataaaatttccaaactaaattgaaaataaattgttcaaaaaataaaacaattaattcaaaatgataaaaactcgagtttcatcttcaagtttggacaatctccacccttttgtccaactatctgtctcaactcactaagatgataatccaagtctaagcagctggagttgtaataagaagaacacaaatatggttagtagatctag

SEQ ID NO: 212297 - DNA, 514 bp, Cannabis indica
aacaaatgtataatggtgattatttaatacatctttccaccttactttctcaaattaattttgagcttctcatatgtgtcatgtgggcgatatggtcaaataagaataaagtagttcatggtggtactgctacaaaggtaaacatactactacatttgctactaactatttggagaaatttcattccttttctaagtagccacaacacaaaaatttatctcatagtaacaacgttgctgcttcccaaaccagctcctacaccagcaaccataaaggaggaaatcaatggcagctaccatctgctggtcagttgaaaatgaacgtagacgccactctcaacttagctacaaaaactctgggtattggtgcagtaatttgagaccataatggttgtgtcattgctgctctttcaaagccagtacaaggttgttttagatcagatgagttggaagccaaagctctcttttacagtctcaattgggtgcttcaggaacaattacacattactcatatc

SEQ ID NO: 212298 - DNA, 836 bp, Cannabis indica
aatcttgtgttctttattgcttaatagtttttgctctatcttagttacatttcttatcgtttattaattgactcattatcgttgactaaaagcgaggtcaacaattatgtttttaaaatttagattcttaattaaaaaattaaaaagtaaaaataattttattaaacataattttagaaaatatattaacttttctaattttaataacaaaaaaaaataattaaaaaaatattatcaaaacacactcttaataaattatatttaattgcagtcaagatggaagtggagactggtcacttttgtacatctattttgaaaaagatcattatgcatttgcaattaagccattttaagtaaggtttgcaatgacgacttttacatgaacaaagaaagaaactggttcacatataattccataaaataaattaatgaagaaactcatgtatgttctacaagtacaattaagatattgcaataaaatacttttgcaattcttataaaaataaagaaaaaatatacagataaaaaagaacaacgaaaaaaaaaaaaaaaaccgtaagtggcaatcattgttgagaaagtacaaaatctttcctttcatcttgaacttgaccagctcaaagcctcaaccaagagagatttatggtttgtggggaatgaacttttctggtaaagcctcctgtgtttgtcttgtcattcccttctttccacatttttaatcttctctctggctgtaactcgctttgttaaacactcttctccgatgttaccttaaacactctggcttttgtcgagcaaaacctggctggaattcaccaaaaatggggtccaaacag

SEQ ID NO: 212299 - DNA, 1009 bp, Cannabis indica
aataacagacaaacaccacccaacagttgaaaaaggtaggcatataaggacaaggaaacactgaagaatgtcctcagctactacgcaatcaaaaacaacttccaatacaagtgtgaaagtcgtgctcttaagaatacagtttgaaatgtgtttatgaaagttgtaattggtctctacgagcatccaaaaatgggttgataaatacattcattattaagaggttctaaaaaatcaacacctatccaataaatattaggtatgaagaccaaaggcaagcgacgtcaaaattgataggagaatgcatcaaactgaagtttctgaacataaagacaaaagcaacaccgtttgatataaaagaagagttgaaatataggtttggcatcaagatgaactacatgaaagcttggagaagtaaggagcatgcagtaaatgacttaagaggaaacgctagtgactcatacaacctatacccaatttcttgcacatggtggaaaaaacaaacccacgatcagttgtcgatatgaaaacagcagaagacaacagcttgccctttatttttatggcttgcatcaataaaagggtgggaagcatgtagactcattgtggtggttgatggtacattcctcaaagcagcttatggaggaacattgttgtatgcatgcacacaagatgcagcaggtcatatttttccgctagcgttatgtgtcgccgattctaagaatgaccaatcttggaaatggtttttcaaaaaattaaaagaagtgtatggagtccgagaaaattagtgtctaatttcagataggaaagagagccatatcaaagcatcaagagaaatatatccagaaattacacacagatactgcgggtatcacttattgagcaacctcaaaacaaccttcaaacaacaggctgccaagtacaacctgccattctttggagcaataaagcctatatagaaaagcaattcgaattccacatagctgaactagatggattggacaaacgcata

SEQ ID NO: 212300 - DNA, 547 bp, Cannabis indica
gtgtccatgtctaggtccaaatcgcaatttagttcaggggcttgatttgggtccaggatcgagtcccgagttcgggtttaggttctagtctaagtcctattctgggtccgggaccgggtccaggactgggtccgaacacgagttccagggctgggttctggcctagttctgggtcacagtcaagatgtgggtcctggtcacgttcccggtcctgttccaaggtcctagtcatcttctcgttcatgtttaagttttgggtcccaggtcttggtctaggtccaggtcctgggccagcttcgggtcctaattcggttacagttttgggtctatgttcaggtcttgttcctaggtccctatctacttctagtttcggttccagtttcaagtcacggggtacgggttcgactcgagtttgggtccgagtctgggttaagacgttatttgggtctggagctaagttcaggtctgagtttcgatctcggttagggtccaagggtgggtccagtttttggttcgagttttgttccaggtcccggtcccgttccaa

SEQ ID NO: 212301 - DNA, 685 bp, Cannabis indica
taccgcacacagcacatttattttatttattaatatcttcaagtatatcttttgtatactgtgaaatttaaaattaacgatttcaaaaaggaaaaaaaaattaaattaaattaacatacatattgaaactgtagccaatgtttggatttttcaatgctaccaaaaagttcaactgatgtacacaaagccacaattaaaactcaacagtagcatctttcatttttaccctacaaattgacagttttctaattaatgaaactagctagcttctgcattgtttaccttttaccactttaagaacttactattagtgaaaaaagaaaagagagctttataaagaaaccctctactctcaatatagggctgaaagaaagaggaccactttatttagtttcaatgatatctcaaattttcacaaggaaaaatgctctacgactttgactagttctgcctttgttgataatttggagatggagtggtccttctatatatcatcaaaatataataaagaagtttaattaagaatgatgtggttatttgtaaggatctgaaatagttcatgtcattttttagtgtgattcaacaactctttgctaagcatcaaaatataaaaggaaatagtatccaattaaaatggacaaaagaagaaaactagttttaacattttttttattatatattaatt

SEQ ID NO: 212302 - DNA, 1061 bp, Cannabis indica
tttgattttgaaattggttggtttgtttggtttgtgtgttgtttttttatggtaaaattgtctattttaaattattaagaaaaattcttccaaaaaaaaaaattattaagaaaaaggaaaagaaaataaaaaaaaatatatttatatgatacttctaccatcctttaaaatagatttattgatgcgctttctaattgttttagtatctggaaaaaattttagtttaatttttttcattgtggtctatgttatacttatttataacatcatgcattcagaaaaatataatacgccgaaaataggattcaaacagtttgttgcaagtgagcttcttttattttattttatacgcatgtaaaataatttttcggaatttctcaaaattttacaagatatgctaaataattaaaacgtatgggattatgaaaaaaaaaaatagactaaagtatttttcgagatatcgaaacagataaagagtgcatatgtggaccctttttaaaggaatccattaatttttcaagcaagtttggatgcttttataatgcaaactcttaaaaaatgtgtactgatgtacttctatctgttttgtcatctaggataattttttagttttttatagtcatatacgttatttaatccaattacaactaattgattcaattacaaccgattatcaaacattagatgtcgaattgtgatcaaatcagattgaatgatatttctaatatctaattagattggttcaaatgttggatggggtgtctaaaatgcaataaatttaatattcaatcaaattaattagtattttatttactttcaatgagcaattaaattttatgttgctatacaagtatatgagaaaattaaaattaaaatttaactttttggtaaggatttgtatagatcaaatttaataaatactggatttagatattggatggatctaatctgattcaaaaaaaatataagtctaaaatattggataaattcgaaccaatctagtatatgtacatgaaatatatttaatagataggacgatcaaattcaacacctatgtatta

SEQ ID NO: 212303 - DNA, 657 bp, Cannabis indica
gcccctcacttttatgtgggtctcctgctcatgatcattataatagagctaaataaagacttttaataaagtaaattagattggaagagtgtgtatacttataattgcaagaaaatttgtgactatatttgaaataaaataaaaaaaaacaaataaacctaacaatgcgtacaatgctacaaatcaattcaccaaataataataataataaaaaatccacataaataaaagcaaaaaccatgcttataaaatgaaaaatcctaagaactaatgagttactcattcgttataactaatgaatcacatgcacatgttttgccatagctagctagctagtacattgaattaaggtgagtattaattacaatttttcagagcattaattaaaattattcagtcaacttttataatattatttttttttaaatagttttacagtaccgaaaatagagttttttaatattttagtttactatgcgattttaaaaattttcaaaaatttacagaaattataactataacgaacaccataaaaaaaacttgaaaaaaaatattctaatgtatattttcgaacataaagttaatcaaaagattgtaatagaaggttgagaataacacttctattaaactaattcttattattgtgggtatgtaatt

SEQ ID NO: 212304 - DNA, 571 bp, Cannabis indica
aaaaaaaaaatcaaaataaatacgacaaacctaacaacaaaataaatacttattatttataagttagagtatatataaaaaaaaaaaataagattgcgagagtaaattatcataaagataaagatcactgtcgaaatctaaaaaaagctaataattataaagagaaagagaaattgaagtcaaattcaaaaaagttataattataaagaagaagagaaacaaaaaaaaaaaaaactatagatagaattatcatatggatgaaattcgaattgtaagatctcatgattgtcaattgcgtgaaacaaaaccataatagagttacaaataaataaagttcagatggtaagactgttgggaatattttaccaggatctagatttacaaacaagtatgttgactaacatcctaagtatgaatatctctaaaacaataaaataaacacataagagtttagaaaaccttacattggttgcagcggaatataatgactcattttgcttaagatctctagcccttgaatcttttctatcgcagagcattatcaacatctgagcctgaatctttccctcat

SEQ ID NO: 212305 - DNA, 541 bp, Cannabis indica
gccaagaaagaagaagttgatctcggcacttccattgagtgaagacagagttaatatcgccattaataagtcgtggagttggagcttcattactgaataaaatctcatatagcaatcacagtaggaactacttgagatttctttgctagaaaatttattcgatcgagtttgatggtcaaagaataggaaagagaattggaaaaagaattccaagattgtttcgaaggtattgtgtgcgtggtagcccgaggcgatggatcgttgactcccaaaagagatgagttgtcgccgaaaaaagccatggacgtcagtcaatggtgctctaataccataaaagagattagagagaagaatcaaaacctcataacatgcttacaaaccttaaaaaaatcatttactagggaactctttatttatatgttagattttcactaaaaaaaaacaattttgttaaatagaattagttacaattaagaaaagcccaagtgaaaactaaactaagataaatgtttctaaccaagttaatatacaataagataag

SEQ ID NO: 212306 - DNA, 1287 bp, Cannabis indica
gtctcaattgatttttcttatttctcttccaataggtcaatttacatttttgtttatatattttatattattaccaattttgtagttatttcgagtagtctcaccgtccaagatgccatcttctcttaaactaatgccgtttatttctaatagtacaacctagtttgtatattagtcctattttttttttcatataacaaagttaggcattttgtaaatcacatctcgagtaatttgtttccataattgtcatttttgcattttgaagcttgagcacgaaaagcatgattttttttttttttttgaataaaagttatgcatacttcctttaaaaaaaaagtaaaaaagttatgcatactttattagatagaatcggctctaggacctctataaaagcatgatatttttaaataaatactaatttccttttcaaaataaataaatactaatttaaataaataaaatttggcattagtgatgcataatattactactcaagctcaacttaggacccattaccattggtggactcacatgaatcagcgaattaaattgtatcatacacaaatatattacgatgataccaaaacctctaacaaagtacaagaaatacctcaatttattgaatagacgttcccataacctccaaccaagagttcatagaaacaggacgacattaatctatatctttatatataataatgatatatatagaaccccacttttatcatttatttatatatgatgcattctaaaacaaatcctaatatgaattttaggccatcggcaatgtaaatttgtaaaatgacactattttacaaaaatttggcgaaatttgagttttttttttttttttttggcacgagctttggagtattgcataaaatagaagccttttaccagttttttttttttttgcaaagtaaccttaacaaaattgacatagtaaaaataacatatttgcatgttaaatactgcacctctgtattattgcatcatcaccgataaataacatatgcttgaatattcattattaagagtccaagaccaacgatctgatctggtgggcacaatataattaagccgtttgatatatatacatgccgagcattttttttttgacaatatatatactcattcatatacacctgtaaagtttgctttaaataatttttaatgagtagtattgaagtttgaaattaattgtatatggaaagtagatagtgaatttggacgattgtcattcaatgacttatataataagatgccattaaatagcaaaatgta

SEQ ID NO: 212307 - DNA, 557 bp, Cannabis indica
aaaataatttccaacagtaactagttctagaacggagtcccagtaaggatccccgcttgaagcagagcaagctactgtccgtcatcaactttcttggtttttgaggcttcttccttaaacctctttattaaattcttcaatgtttccgtaggtagctgcttgatgttagtcaaggcgctgacctccagattaactttccttgcggcgacaaactgtctccggaagctggtttgcagcttattccaacagtccacggatcctggatccagattcttgaaccattcttccgcagacccgcttaatgttagcgggatgcataaacacttggcgtcattgctgaccctcataaccgtcattacccggttgaaccgtgacatgtgatcgctagggtcttagttcccgatataagctgccatttcgggcatcttaaagtttttggggagctccgcctccaggatatgcctggcacatggctcccgatcttcacagtcagagtcgaagtcatcgcctttttgtctctgggagactcgagcaatgtctttccggattatggtaag

SEQ ID NO: 212308 - DNA, 565 bp, Cannabis indica
gacaattgatcgctcacctcaggaagtgaccgatcaaggtattactggagcatgtccttgactttcttggctttcgagctcagcaccacggcagtagaggatgccttggttagaccggatccatttgagctcccccttttagaactctttgacttagataccttttgggctagagggtccacaacaggcaccacctccttagagaggtcgatcactgtctcgaccaggcccttctccttggacggaaccttgtcgcctctgtatcgtttggcgggggagtctgggccaaactgtcactagtactcttcttaagagcttggagcaccttttgagacatggctgcatataaataagacaagaaagttaagggcaaatataatgtaaagcatgtcatggaacaaaaaactacaagttaaaataccctgcacatgagcaagagcattctcccgaacaagtaaggaaggagcctcatcgtctaaagagtcttcttgttctttctctgtcaggacgacctttccttttccttcaacttgggtggagctagaaaggtctatcaggttcccaa

SEQ ID NO: 212309 - DNA, 664 bp, Cannabis indica
acatacatataacttttcgaaaaagctcaaggttagttgccccgtgtaaatcctctactgaatttactttcgctttcatatctttttagaacatatttttactaagtgaatcatattttaatttttgaatttgtatatctgtttaagatgtttcaacaccaatgattattatattattgagaatatgatacaagtatattaagggtgtctaacaccatttattatattatattattattgaaataattaaatattagttgtcacataaacacattaataaatgaaaagagatcttggccaatttttttatttttcttttttcttttttttttttgcctggaaagatcttggctatttactaatctaataacatgctaagaacgtgttaagaaatttaaataggtacatcaagagattcctttgttgaattgtaattagtgcggtttaattaaaatattttgagatgtttttaatattaatttaaaaatatgaaggaaaaaaatttaaaaattaaatattattctttattcaaatttaatcttttataaaaataaaattctataatgcactcttaaaaggaatgtactaatatgtctttatttgttttagtattcgaaataatttttagggctttttctttcttacactttaaaatagtgttttt

SEQ ID NO: 212310 - DNA, 576 bp, Cannabis indica
ctgattctatggctgttgtgcacacctttaaggttggtgtgataccttttggctggagtacctttccttcgttttcttattgcttgaatctctgtaagtcgtttaagaaagttgttgtatttattcctcagtcggagaattctattgctgattctctagcgtgttgggctagagtggcaaatgtcaaaaattctgatttggaagtgacccgagaaagtgaacgacgcagggaactctcatttaaaccgagaaagtcttatgactatctcctcatgatggacgcgtcgtggaaggatggagttgttggtattgcagtgatcatgatccagcctgctactagtttgtgggcttcgaactctgctcatattaacgcggtttcagccttggacgcagagattcaagccatgttgtgcgctctcaattgggccaagaatgaaggctgggaaaatctagctgtgatttcagatgcgcttcttgctgtagaagcttttgatgtgagaaaatgtccttcggattggaaatgttatcattcatctttcttagttttggatgggcgtttatcttttcagtgttgta

SEQ ID NO: 212311 - DNA, 611 bp, Cannabis indica
ttgagaaacatttatgtaggctgatatatataagatgagtattgttattggacaccagtagtacccaccactttctatagaagtgcaccacgattaatatcgatattctctaaaattatttttttaatttatgtgaaatccgataattaattacacagatagcgataagacgacaccgaaaaaggtgctaggtaccaatagtaccttttagcatttctcacatagacatttgttaacttgagggtcagtggctgaaagaaatgcagggaggctgttgaaaaaccccatcacatccatagacagcagaatcaaaagagttttattccattaaatttgctataaataaaatgaagcctttactttcattttcttcattttatgctcctctttatctaagtaaaagaagactgggagtaataaaatgaacttataataaaaagagggactggttgtaaacaaatagttctattaataatatgatgatgaaacgttttgacatatgtaattattatgtatacattaattaggcttagaaccagtaaaaatgtagagtcaaaatgcttagcctaactatgtataaatgttattattattaattacaagtcgacaat

SEQ ID NO: 212312 - DNA, 640 bp, Cannabis indica
tcctgagtttcggaaactacgaaaatgccaccactttgggtagggctgtagagtagttgtggctttacggcccaataactggagtcctaatttttttttttttttttgaaattattttacaaatacgcaaaaataataataaaaattataaaaatacaattttcacgaaatttttaaatatttttacgatttttttgtattttatttatagaaaatacagtcttgttaatgctatactcttgtcaatttattgttgattttttgttatctatacattattttttattgttatattgatgttatttagatgttattttatgttacttttatgtagttttcttattgttttcgtgttgtttttatggaaaaatcgtaaaaaatataaaacaaattcattaaacgtaaaaatataaattttttacaaaaaatagtgtcttgtgtaattaaccctttttttaagtaaaaaaatatggaataagttgagcaatatttttttatatataaattaattgtatattaatctaagggatatgaggatatcataataaaagtatatcttaaagaatatagaaagaaaggtaaaaattaaaatatataaagtaaagtgggtttataatttaatttcctcaaaaaatactac

SEQ ID NO: 212313 - DNA, 890 bp, Cannabis indica
aagtttttttttttaaaaaaaaaatcaaaaaaaacaaaacatgatatagtaacgtcaagtgagtgtagctgttcaagaaaaattattaaaaaaaataaaaataaataaatatagtagtactctatccgtgtggttgttacctttagagtctacatcgaagggtcattaaatatttcttttcctgacactcacattagtaacatacagttagtgacggacccaaaatttttattttgaggaggcttatttatcattaaaaaatctttatacatacattataattacttttactagattaatttaattttatgggggcttttctactattttaatctataattatcaaattcaaaaaattacatttaattttttaaaagataatatttttgttagtggggctatagccccacatgaatgcaagtgggtccgtccctgcatacagtgaagggtctctaaatatttatagactccttcaatctgggtcacatgaaccttatttttgtagtagatgattttataattttaccaaaatgaattctaggtaaataattgttgaggaggtgttaattttttaacatgcttgtggagttcaattaacacaacacaaggtcacctattggagtcatacccaagtattactcattagttttattaatggataacatctatttaaaaaatagaattaataataataaatgtttcaattttgttgggttattgagaccaggtcaaccacaaggacatcggtctcatctatcaaaaataaaaaattacaaaatagaggtcttccctccccttctctctttccttaaaaaaatattttctttttagaagtggtttttaaaattttgtggatgttaacagaattatattatattatatagtttgcc

SEQ ID NO: 212314 - DNA, 670 bp, Cannabis indica
tattttgggaaaattagtaatgtggtcagatatgaccaattttaataactatagatttagggaaaaaaaaattagggtattgtaagtatggaatttcaaattttcctaagaaaactttaaccctaggggtattttggtcaacatcgaacaccccaaaataaattagtaattttaaaatcaacttatcttttaacttttaccaatcccgcaaataaatatcgttgtgacattctgaccccaaattgggtctctatggttgccggacctaagaatattttatttcataaatagcatgcatgttacctacatattctaataaaattttcaaaattaataaattacaccttttaaattattcatgacaaaattttttaattttcatgaaattagattagtaagatcataatcttacccattatacctttattaatctattttttataaaatatgccataattaatcataattatattttcgaaatattagagactataaactgctattgccaactttctaacactttaagacacaaaattatacaaaggtaaaattgttgtttttttactttcaaaaaacttcttctattatgagtccacaacagaaaaatagtatttttaaacacacaaattcaaagttgccccaataacaccttagaccaacccaacaacaa

SEQ ID NO: 212315 - DNA, 1121 bp, Cannabis indica
ctttattaattttccttcctttttaggtttccacttttattttggccctctcattccatttatataatttttataatagtagtactgtgtcatcaaaatagaatataatgcaccactaaaaaataaaaaaagattctttcaaaaaaaaaaatgtagaattttgacttaatatcctaagattttataaacccattttatttttctaaagaactttttttttttccatttataaataatgcacaaatcacataaactcatgtgaataataactattttgaaaagagatccaaaagtctattttgtaatatttttaattagaatttaatttttcctaaatatactcaattactgtgtacatgtctaccattgtggtctagagactagaccaaagctgtctaaatataggtgtatttcgtgcgagttgactcatattttagaacctcacaatcatattagctaagttgtgtcggtccataaaataatatatgaactatgttgtgtcaaccgttaaaaggatataaatcgtattgtgtcttactaatattttaaagggtaagagcaacatcaaggagacgccaaatatcatatgtggcgtgaatggaggatccaacgagactgcattgtttgtcagcattttgtaagttttgttctgcatatctttttcttcttatatataatttaaataatctttatatatatatatatatctatattattacaattataaaattagaattattttttgggaaattttataatgtatatttttaaaaatgatgtacgaatttattcctatttgtttagtcacccgtcagatttttttagtctatttttttatatagtcgtatatattatagttatttaagacattaaaaaaatttaacacgcagaaaacaatgcacttctttaaaagtggcacactgatatacttctatctgttttggcattcgagatatttatttagtctttttttttatggtcgtgcacattataattatttaagacatctttgcagaatatcgaaaattttaaaaaatttaaaacgccgaaaataaaattcaaactttctgtcccgtgactcttttatttagatggatgcattgtaaattaaccttataata

SEQ ID NO: 212316 - DNA, 681 bp, Cannabis indica
tctaacataataactaacataacgtctaactgattattattaatctaacttctaatatatattattactctttattattgctaatctaattttaacatattagtgtgaatggaaggtaatacctcctaatgcttctatacatatatataaataaatataaaaatatatttgttattatttactactatttcatttctaattgttatttcataaaatcaagagcatgatcaccattttttttgtctcttcttattcttactattcaataacgactttattttctctctaaacctccattacactattcacgaacggttatttttctccaacctctattttactattcatcaacggctatattttttttttctataaatactcactcaaaattttataaaattaactctttattcttcttcttagtgtacaaaaaaaaattctcatctaaaaaatgattaatcttgatctaattgttctattttatatctttattttagttcattttatgatatactgtgtagaagatgaagtttgttggtttttcaatttttttttccttatatttggtttttatcctctcttacttcttgcataccatgtatccactttgtaattttttttctcaaatattatgttgtgaacgtttgataattaaatctaagtttggtttttttttttttt

SEQ ID NO: 212317 - DNA, 1019 bp, Cannabis indica
cttgtacatacgtacatacgtaatgctatatagcattctgtcttggtcatatgaagttcctcagtactactaccccccccatgttatgtttatgtctctctgtgttcagtctcagttggtttggttttaatgtttattctcatctttgattttgtaactgtacaaaaactcaatctcattgatgttggttaagcttaactctcatttgtacatattaattgtacaactaccaaccattgcaatatagaatcgaacccatctatttctattttctactcatttttattactataacttaatgcgcactgacaaagataaaacaactccttgatttgtgggacctataaagcaataaattatctttgcttcgattccataatcattgtcctatgtttgaagggaaatgtttttgggcaatgtttaacattctattatgtgtattaagtatattatgtgttaatattattattggtttaattaagtatcgagtctcatataatttaatataataatttttaagtagtatcataacgccacatgtctataaggtgttaggcactactaatgcttaataacaatgctatgtttgaatgtgatgttgcgagtgatttgatttgatttgatttttctttttttatgtgatgctatcaaaaagaaaatatgaactaaaccggatacaaacacaatcaagattaatattgatgctactacgtttgctagtgaaaataaatatagttacggcatggtcgcaagaaacaactcaagcattcttattgacgccaaagctggctgtagtctcggcacttttacacctgaagttgcggaaattgttggtattaaagaagcattaagttggataaaaagtcataactggaacactgtcgagttagagttcgatagtctggtctctgtccaagccattcgaagcaagattcctctcagttcggtttttggggttcttgtccatgattgtcaatctcttttatcatctattctttttcttaaaattcattttgtaa

SEQ ID NO: 212318 - DNA, 1017 bp, Cannabis indica
gtgattgttaatgttatatatgactatttgaacactcttgattatattttttttgttttttttattgttataattttagaatataaaacataactatttgtacaaattgatttaattttctattagcatttttgttgttattttttttgtaagtttaattatttaaatgtttaagttggagataaaaatacgtatttttcttttttagctcattaaaggtaaatagaaaagtggttttctattgtttttttctttcttattttttttaaattttgtgagagtttcatatcaatatatatatataaaaattattttaaaaatattatttgtactattcaaattcttatattgctatttattcaagttaaaaataatttttcacaactaaaatatatatatatatatatatatttttttttgaatttttatttgttcaaaagttaaaattttatttgtaaaagtgattttcaatgtcatatatgaatttttgaacaatattgattatatatatttttattttttattatgttttttattgtttcaattttagagtattatataactatttatacaaattaatttttttatatgtagcatttttgttattttcttttgtatgtttagtttaaattacttaaatagacaagttggagataaaaataagcatttttcattctttaccttaataaaggaaaataaaaaaaaaattactatatttttttctttttatttttttaaattttattgtagagtttgtatagtaatgatcaatatcaatgtatatacatttatataaagaaaaatataaaaagaatcaatgtgatatcttatatgtgtttcgtatatttttttaattttctcatttttatttatttttcatatttttattaatgtaagagctattttcaaaaagtctgaattgatttagaactcgttatattgatgatatacttttatattatatatagatcattattttttactttcgtttgtcgtcctaaagttagtattatttat

SEQ ID NO: 212319 - DNA, 517 bp, Cannabis indica
atatgcatcgcatatgtagtatgactaaattatctatctatcttgttttttttttttttgaataaaaaatcataaaatctattaattaataaattcgttcaaaacaataaaacgcacttcagaggaacaatcctccaactaaagcatagacctgtagagaaacaagagtctcttgccaaacaatattgatatgaagcaaattaccatttttagttacaattttttttgaaataaaaagtaaattttcattaaagtgaaaattcatccattaatagcaaatgtttcaggagataaattatttttctaaaaatacgatttgaagaaaaacaagagttgcacgccagataatgagcaattttgtttgtaaatcgttcaacaaattgaataacaacattactcaagaaaaataaaaataacatgataatcattaactaagaggccataagacatatgtaaattactttggatagcttgaacacaaaccaaactgtcagtctccaagatcacattattagac

SEQ ID NO: 212320 - DNA, 514 bp, Cannabis indica
aaaaaaattagggattttatattataattttgttactttaatcattaaatatcaactcaaaaatgcatgacaacaaattattgaaccacgtactaaataagctgaagaaataggtcgtcacactaatttttttattaagattatatgtgtaacaattgtaaatgttaagcgaatttcgtcccaaatacttaagtttaactctcggttgcaaataaatacataagtttgatttttttacagtaataatacataaattatattttttgaaacttttgtaggtagttggctgtttagtgtcaagtaaatgaccacgtgacagtcttgattggtccaagtcataaaatttttatagggtgcttcaataatacattcaattaaattgggtgcactagtacattccctaactctttcaacatcaataagaatttttagtccaattttttacatggtcgtgtaagttataattatttaagacatacagcaaaaatgtaagaaattgagaataatttacaat

SEQ ID NO: 212321 - DNA, 722 bp, Cannabis indica
tttagccctttctctaatttctttcatttattccggtccttaaattcttgtttcattttattggacttgaaaaatttaaatgcataaaaatattaaattacataaaaattaaaatattacacattatttattatttaatatactaaattattatacaaaacataacttaaaaaattataaaaatgatattaatatactacaaaaatacaaacacataatataaaatataaaatattaatgaaaaggtagttaatatacaaacatttagattaatataaatgtgtatttatttaactattcaatttaatttttatttaaacttattatatataatttatacttaattttattatattaataataaaataatatatatatataaaaattatgctaaaatacaaaattgtaaagctgaaaaaaaaactaagaccctatggggtcggttttttcataataactgacaccatacaacgtcacttagaatagcgtcggtagcgaactttcccaaaactgacgctaaaagtccttaaaaaccacttctaaagcccaattttatagtagggaggactcctatactctagtgacttcataataaatgtaatcaaaatgtaataagggctcatggacttttatttatgtccatggttagggacagatccacatagaattgaagcaagacaattgttcctgaaaaaaatattagaaaaaatatatatgtattt

SEQ ID NO: 212322 - DNA, 665 bp, Cannabis indica
gtatccagtttatttttaaattattgacttataatgagactattaaattgtaatgtagactaaattttttattaattatattttctataataatcttttattattagttttatagtaataaatgttatattagagttacaacacatatctttaataataataataataataataacaaataaagaagaattatacagtaattttttttaagataattatacagtaattattaaccataaatattatgatttagatatttaacgttattataaaaaataaaataaaaaaaaacggatttttgatataaattcacaatggatagtaaatccataaaagtgttgttctttttttttttttttgaaacagcattaaagtgttgttctggtccctataatcgtgtatgtataattatttatttaggataactatttgtccccaaatttatgaaagtgtactgtattttaattaatgtagaagagatgtctccccgacaaaaaaaaaaaaaataataataaataaataaaaaagcaatttccgtttaccaattttataaccattgatgtagcccagtaacatactctctcacctgtacttaatgaagattctttttttttttttaaaaaaaaaaactagcgtcattagtcgattaataagataaaatagtt

SEQ ID NO: 212323 - DNA, 736 bp, Cannabis indica
tattcaaataaataattttggagattggaatgaacatagaacaatgtttaatgctatataaaaaataaactaaacactcaatttttaaaaaaatttaccaaatgactcctgttagtttttaaaaactattttcacttttaaaaactagaaaacaattttcaaactataaaaccaaacagcctctagatctcacgtgatcacgtggtgatgagagattcaccttgttattaaaaaaaaagtgttgcattaacaatataacctataataagatcaatgtaacactcagtgtaatggcaacaaggatcatatattcatattgttttttgtattgataattttatatgaagttgttcaaatcaaagaaataaaatcacctaattttctctaaaagagtcgctcattgttgatggaattaaatttgtttaacccaaaacagttaatcataatcaatatatagtaatacaccaccaataaaaataataaaatcaatcaagtgaataattcttatatcaggtggggtcattgggatcttgactataatcataatcagccatagattgatattgatctatttgttattaactcaattattatccaaatgtcttaatttaattaaaatttgtgatatgtaatctaaatggttgtgtagaagtcaaataacttaggctatttttgtcaaaatttcatcaaatcatcataaactcacttcaatatttaatacagattatatacctca

SEQ ID NO: 212324 - DNA, 662 bp, Cannabis indica
ttttttttttttcttatttatttatattttactaataaatatgtagcactattattaaaaaaatatatataaatcttttatacttttattcttataggttatataatatattatatttttttattaattgattatgctctaacaatctcacattattccaacaactaatctttattaatttggtattaattaactcaattttattagaaggggagttgttccaaacttgtaaattaaggaacaaaaattaaaccaaatttttaacttgacttgaattttgattcttatatataaaccaataaagtaaaatagtttttattaaaaaaaattgaaattaatgaaataaaagacatcagaacaaaaaaatccaggcattttttctaagaagttcttttaccagctgactgaaaagctttactaataaatagggggactggacaccgagaccgccaagattcaaaggcgattaggtgtggcttgcttgataagggaaacagaagaccgccaagattcaagttattttagtcacaataaaataacttgggattaaaaatttaactagttataaattattattcttttgtgaataaaaagttcgtggctaaaaatattagtcacaaaaaatcacaatttgttgtgactaaatgtatttttaatcacaa

SEQ ID NO: 212325 - DNA, 1037 bp, Cannabis indica
atatgaatttttattatcttgttaggtaaaatagtaagtattttatgaaaaataatattttttagtgactaatgtttaatatagaaagtttttagtaattacacagtgtaattacatttaattcttatgagggccaagagaattagagtgtaattggaactcttcaattacttctaattatacaattacagtgtaattacatggtaagacaaacataccaaattgtgtaattatctccaattacacacaaatccaattacattgtgactttccaaacgtaaaagtttttttaattaaaaaaattacaactgttacaaaaaaaaaaaatacaataaaatataagagaatttaaatttttaaaaaattgtagagtttgtttggtaatattttttaaattagttgtttattttttttaaaatgaagaattatttatttaaatgaaataattctattaagaaatactaaagtaaaaaagagtaagtacaaaagaatctcaaaaattaaataacggactagtttgacacagttgtgctgtgggaaaaagcagctgtatctggactctaggaaaaagtagttataggagaactgtaaacaaaagagcttatttttttttttttttgagaaaaagcgtttatatcatagaatcaaataagttagacctctcggtcgttacaaaatatattgtttggtaaggacgaaaccgggatagacccaaacacctcatgagcaaatgcccatctagccacattatgagcggcaaaattacatgttctacttatataagagaaattacaactaataaaggagggagaagacttagtacaaaatgagatatagttttcaagggcccaacgagagtccttcccattgatagctttgatagccaccctcgagtcattctccacaataacaaacttggatccgatatctaaggctaccgacacagccaagcagcaggccgcaacttctccacagagaacattcgagaaatcttcccgagccgcctgaactcttatcactctgccaaaatgattcct

SEQ ID NO: 212326 - DNA, 742 bp, Cannabis indica
ggcagtcatgaccacaatggcttctctaacatctttcgagtccctcctagaatggctccttcacagataggtgttatatcctggtgtggggcaatgagacccacttcccaaagattctccatggttaccaaactcttcacccacaactccttgggcgagaaggatttgtaaaaattgactctctcttcaagctccagattcaaggtggattgaggaaggtagtgtaacatacaaaaaatagtggtgaatcagaatacaatgagtacaaagaaaaaatagaactttgtgaaccaaaacaggaaacaagacttacttgcaagactgaagtctaaactgagggtgggaaccctcctcaatgggaagccaaaggtgaagaagtaatagtcctagaagtcttaagtgtactttgtatggctagttggacaaggtacacttgtacggtatctctacaattggtagaagctcaccttgtccttgtgacccctcatcaattgcgatttgatctagtaaaaatatagaatctctttcggagtttggcacaggtttgccttgtttaacacaaaaaacataccatcccaccagaagacaatataattaggggataaactggaaaggagctactctagctaatacacaaaatttagcaaagtagcacctcaggggcaagtgtgcccccatcttgacatggacccaactccttacgccgaagcctccttctacgcatcggttgggcctctctcca

SEQ ID NO: 212327 - DNA, 797 bp, Cannabis indica
atacaaaaacatgttgagtagttgatattatttggtttcttcaaaaaaaaaaatagttgatattatttgggaaacttacaaaaataatagaatttgggttaacttttacaaaaatactgtcacgtgattttttttttttctaaaaatagtgtattttatcaaacaacagtggaacacaaaacagaacaattaaaaataacagtggaacaactaaaaaacaaccgtagaacaacagtaaaaacttgacactatacactgtataaaacttacatattatttttgaaaaaaattccgccccacagtaaaaaagtaaaaaaattagaaatttcagtatgtggtataaataatcctattattttgtatattgcaattaggttattgtttcattattttccgttgctttatagttatttgtttgttattttatagttttttattatattgtttgttaaattgttttagggttatttttttattttattaaaaacataatatttttataattttcaaactttatcacagtgtttttaaaaatatagtacagtaaaaatgtaataatatatatatataacattaaaaatataaaaatgacaaaaaaaaaatgaatatttttgtaaaatcccctttattaagaaagaaaaaagtaatttattataacttgtcatggttttactgatttaagctcttataatataaattccttaccaaaattatgatgtattttagtattatggcttggcaatgatatttttcagcacaattgaatgttcgttatttctaaaacaagtttttaaata

SEQ ID NO: 212328 - DNA, 1201 bp, Cannabis indica
ggatagtgtattttatcttgacagcttttatctcaacaaatcttgtcttaacaatttttatcttttttctatttaattaatttaaaaattatttatttattacaaaataaataattactattttaccaattcaaaatagatttttctgaacgatattatactattctttatcccttccctagaaagtatttcaaggtggctattcagaaaccattgatctataattctaaggtctaataaactagtatatttattgagtcttatcaaccaaataatctttatttattaattccatgattactccactaaaaatataaaattgaactcttagtaattatagaattatattactgagttttactgcattttctattgatttaattaattctagtgagtagccctccatgtggttcgtaattaattttagtcaaattaccgttttacctttctaattacttatttatcatttaaaaccattaattaactagtggaagtataatttagatctcatctaaatttgtacacaactttctaattctagaattaacacttaaagagaaccaatattcgattggttagaaaagtcaaaattctataattgtagatcatattcctagtcatccacattattagattcataaaacaaaagttgtaagaattatcttctccaagaaactttaacgagtaaatcaaagaaactaataaaatgaactagagttcatgattacttaggatttaggtctatctactattgatcattgttatgatatgaattaggtcattatagtaaatgatatgttagataataaagacaacttcattcatatcggtccttgtcatatataatattttttatatacaacatcttcactttgatgtcatactatatccattatccaaaccaagattacttgcattgaagaacggacatcagtgaaccgtactagcaactattgattaaagattcttaaactctaatatgttgctgactgtattattcatggctaagttatcttaattctctgtacaattacaagtcacaacctctgaataagaaattttttaatatttatatatattattcaataataaatattaataatttaacattcacacatatattaaaatattcaactctttattaataattgaaaaatatctctataaacttttcaggacataaatcttaacaaaaggttcc

SEQ ID NO: 212329 - DNA, 614 bp, Cannabis indica
tccattttcaaatataattaccacttcatgcgttgatccatattctccttaacctgacacgtgtcctcctttgaaacgatggtcaaatttcgggtataacagcatgagttttgttatcctttggaaatgcaaattttagcaatttcaacaattcatcaaaaatataatttggtgttttcccccaaatttttcaagtacattaactttgctataaagttgagggaggatatccaattgcaatccgggtataactctgcctcgatctccttaaacatttcatcataatattgacccctctgaataccatcatcagtgtctctttcttcctcgtttataggagggaagaaattttcaattacatcaaccatcttatcgacatcaacattgttgctggcctcgactggttcatccgactcccatggtaaatccacctatgataactgctttcaaaaccctttgtgaagatatgtgtctgcacaatgttcaatggatgcagtctagtattcatacatctaacacaaggacagaaaattcttccgtcacaatctttgtgattagacgcaagtgccataaagacttggagactttcctagtaagctggatccttacgattt

SEQ ID NO: 212330 - DNA, 600 bp, Cannabis indica
gttgtttctagtttatttgagttgatataatgtgttaataccttatttttatttgttgtcttaattggtttgttcattgtgatttaattgtttaagttattactaaaaaaaatttaatatatatttagttttttatgagcacatctatatttcttgttttgatttttattacaaaggtagtgtattatatttttaattgattattattttagttatcctttaattgaagtctagataacttggtgctatttttatgaattctacaaattatatatatatataaatgattgtgtaatgattttttttttaatttttaaaatttagatttagttatttacacctctatacaaaaacacatcaataaataatagtaataatacacataaatagctatctaattagaaaaatttaaaaaaaaaatctcaaatatacataattttttgtattttataatataaaattgatttagcaaaagtttatcatactttttgcatgtgagattacctaaataaaatacttaattttttatatatattattattaatttagtcattttactcaaaatatctcacaactctttcttctttttgtttatataat

SEQ ID NO: 212331 - DNA, 811 bp, Cannabis indica
caaagggcaagggtccaatggttacaggctggtgatcagaataccaaatttttccacaagaaggcaaatgcacgaaggaagaataatataattcgaggtaatttttattgtaaattaaatatagagtaaagtatagtttggataagaattttaatataattgccattggatgtgatttacatgtgttttaattagggcaataaatagattgaatagtttaactagtgatctttcatgagtggcttagaataggttgaggaaaggtgtttcaaactcaaatcattaaggttaaggttatgtaataataattatgctaatatacttttaaatataggttatgttcttaaaggtgttatgaattaacttaaatagattaggtttgatggatacaagttacatcattgaggcaaagtatatatagaggaaatgacgtataaaggaatatgagttgttagcccataagtattttataaatcaaatgattaaggttattttggttgtacattttaggtttatttaatgaagattatatatggtgtacaagtaacgatgccataggtgatatcacaaaaaattactattctgcactctttacgtcgattatgcctacaaatcaaagcattgaggagttgttacaagctgtcgagcaagtggttacagatgacatgaatgaaacattgacgaagacctttacaatggaagaagttgaacgagcagtttttagtatgcatgcggataatagccctagtacagatggaatgagtgtcttgttttatcaagaatactgagatattgttggccctatagtttc

SEQ ID NO: 212332 - DNA, 539 bp, Cannabis indica
agatatttatgtcacagtattttttaattaaaattttatataattttactaagtaattattagtaattaaatacatatttattttatatataatttaaatatttatacatccactgcgaatcgcaagatgtttactagtttaatataaactacttcacaataaaactagatcatattgtacattttacaaaaaaattaaaaaaaaaaaagaaagaagaagaagaagaagaaaacaagataattaatgcaaattacaatttacaagagtggtgttagtacatttgaaacctttacctataatgattggaatacaactcaaattacatactttttataaataataatttataattaatctcaatatataactaaaagtgatttgatctacttaaaaatataaataactaatattttattatacattactgtgtgtaatttgagcatgtatttaacattactctattcaattctctatttagtttttttaaaaaaaaaaaaaaaaaatcattcaattctctcactaaaatgtgcaataataa

SEQ ID NO: 212333 - DNA, 671 bp, Cannabis indica
acatattactgtttatttatacatgtagtatgtaaccgtttaaattttatttttggcattgtaaattatttataatttttttatacatagtagcacctgtaaaagttgctagacacctgtaatagttactaaacctgtgatccgtaaggggaaatatcaagtaagttgtgcaatccacattgcttgggaaatatcaactgtgatgattctgagactgtataaatataaaattatgtagttaaagaataattaaatgaattaattagtactacctatatcaataaattacaccttattttttaatagcccatcaccacaaaagaacccttattacaagttttcttaaaaaaaaaagtatgagtgaggacaatattctatattaaattttaaaaaagaaaaacaattattcaaatataaaattatctttattttttattttattttttaataaaaaaaaaaaaaacaaaagcaaaactaaaagctaaatttcagttgactgtctctctctcactgtgtccagctagggtttttccttttagtattactctctctttctctctcctctcacacagtcacagcctgtactctctctctcctcgaaaccagagagagaaaaccaacaaaaatgcaggttacccaatactctccactatatcaaatctctctcacca

SEQ ID NO: 212334 - DNA, 602 bp, Cannabis indica
cttactaattaataaatatttaagatattaacactacttatttaaatttgaaaaaacatgcttaatgatacttcatttttcttccggtttgacattcactggttcgccatcgtccttcactggttcgccatcgtccttgctgtccttgacaatctctgcagtactgttgtcgtttttttctttattcacgatctccacaaccttttcaaaataacatttggttgaattgtgcattttctgtattgcattagatattttggtgagatcgtctaaactaactccaacagcatcgtttattttctctttcagttgtggaccggtactgatcttcgtcttcatttttttagtacatttgacagcatcactctcttccggtggtggaagattcaaacatgggattggagtacggttagtgtccttctccaacttcacttttttaagaggagacttggcttcctcttcagacgctacttgagactttgtaacttgttcgtgttcttcaaaagtatcgtctgatatggctattacagacatattggttgtgtatgtaaaaagaagatttgaagtttgtttaaactctacgtgaaatcagattgatatgg

SEQ ID NO: 212335 - DNA, 809 bp, Cannabis indica
gagctcgattatgccaagacttgaaatgctgtctccagtgaatctgcaaagattcaccatacaagcccttaatttggcttttttgagccccatcttccgtaaagtctccttgtaaaggatatttaccgagctcccattgtctcttaacactctcttgatccttttattggcgagttgaatggtaatcaccaatggatcgatgtgaggttacctcacatttttctcatcttcctccgtgaatataatgggaggttccttggttttcaccttcttggaagttctggggcaaatgtcgactgctcgttcaccaatagatcgacgtgaggatacctcacctttttctcatcttcctccgtgaatataatgggaggttccttggttatcaccttcttggaaggttctggggcaaattcctactactcgttctttttctctttcacatatcttttctgggcgttattgctttcccctacgatatgtggccctcccaaaataaccaggatgtcctctccttcaacaggaagaagttgtaacccctggttgtttcggttattgggcagactgggctggttgtatccatggccctatcttttcacgtactgtttaaatggcctcgagcgatgagactttctatctcatctttcaattagcgacattcgtcggtcgtatgcccaatatgttgggttttatgccctaaataaaactctttacaatctgattagttatcaatatacgaaattagaagtgattgatgtttgcatgaattttacatgctaatggtttaatatgcttaatatgtttattactat

SEQ ID NO: 212336 - DNA, 568 bp, Cannabis indica
atgccgacaattgaaagatgagacaaaaagtttgatctcgcgagggtactttaggcagtatgtgagaaattaaggaaatgagcctattcagcctaacaaccagaataacccgagattacaatctcccccgttgagggcgatgatatcttggtgatttatggagggccacatcttgcgagaaacagtaacagtgcccaaaagagatatataaatgaaatgaaaaatgaacaatcggcattcgctcctaaaccattgaagaaagcgaagtcgaatgaaccaccaatcatcttctctaaagaaaatataatacatgtgcgatacccacatgttgatcctttggtaaaactagttgccaacattgagctgcaaaaggacacgaaaccaaagcatgaaactcagtctcgtctgccaaattacacacgggtcatgtcttttgcgtaggaacatgtttcatatggagctgagataaggttatcaaacagtgagataaggctctccaaagcaagttgagaacctttgggagtacttttaatttccacaccttatccataagctatcacaatcgatt

SEQ ID NO: 212337 - DNA, 974 bp, Cannabis indica
cttccaacctagtacttctactcttatcttatccacactaccactcagatataatctatcttattttattagttttgttattatttctatatatatatatattgtttttggttcttttttattaaatacaaatttggactagcaaacttagtgctatacccttattggaatcttgttattaaattacaattttccgaatccaacaataatggttttatttaataatagcatattaaattgtataaatatatgaatatatatatatatatatatacatcttccatccgctaggtaataataaacgctataattaatatgatcatctcaataaaaaggacgatcataatggaattttccataaataggaaaaaagagtagaaaaaaatggtatgttctcaatataatatttaagtgtaattaatgtaactttacgatattatcatattaacatataattatcttcttatataattaagatacattgagaaagtaattagcactaattaattttagtttaaacatatcttcacaatatataatatcaaatagtatatgtctatataagattaacttagaaacgtaagattaagtatatcttttggcaatcaatagataacatatcaatccctagcctcactttttattatgcaatattgctttaaaatacgtcacattataatgcaatccaccaattatataaatgtgtgcatgtattgctagctaggtgtacttttaacctttattttcatattcacactagcgatcatcaccttatgtcagaataaataaattaattaattaaattatatatgtacatattaattgaaaatttagtatgattttgattcattattattctttataattaattaatattctccaccttatatttggataatatctatacgccccaataatttggtgaatgttactatgtttgcatgtaatgaatataataaattaataatccatat

SEQ ID NO: 212338 - DNA, 319 bp, Cannabis indica
tagactttacattaatgataggaagtcccactgaagagtgtgtgctctccttgatgacacttgaacacaaacatttatttatgtcaagtcaacgcaaatgaggccataaataactatgcaaactaccagcatcttactattgccttgcctgcccatttttcttggtcttttcctctctttgcttgcttattccttttgttttgggattagttataaggaccccgctcttgtccttgtgattctattgataccacaataattaggacacacataaagaaatgggatttcatgtttccagaatcattttgcgattattatt

SEQ ID NO: 212339 - DNA, 673 bp, Cannabis indica
ttttttatagtataattcattttataaagcatctcacaaataattaagaaattagtaaacataaacttcttctaatttatgttcttattaattttttcaaataaagaatatttgattagagtctaatcacaaattatatattaattattattatatatttatttatttattttagtgaaaggaattaaacaatttcttaatgtagattctttctttaatagatatataagaaaaaaaaaaaaaataggcgtccatatatattatacagttttcaaagggaccacaataatgaaaggtagagaaaagtttcatattataacaatggcatttagtgaatattttcactaaaacctaagaatatttaattgaaatatataattaatttatgtttatttgagtggccaaacatgatgtgggtcctaatattttttgaatttttctcttgtgtcatgataattttttttcattattagtggaagaattggacttcttggttgtcatgcatatatatatatatatataatatatgtatagtatatatatgtacatatatatactcaagctataccttacttatgataacaaaaaaaaagtaaactttagtttatagaaatagtcaatagtcattcatcattttgtttgttatctttaattatgtatgttaataaatata

SEQ ID NO: 212340 - DNA, 513 bp, Cannabis indica
atttaaattctttataaatttattagtgggaagtaaatataatatctaacattcatgaactattgtgtgcattttataattttaatatggtatgagagttaattgattttgagatagaatctataatattatttaacaaaatttaacatatatcaaagcgaaaaagaaaaaaaaaatctaatttgaataaaaaaaaaaaaaaaaacctgatccaaagaaaagtagagcaaaaaaaaagctaccaattccaaaaattatccaaaaagtagagccaaaagtaaaatatatatatatttgtgattaaaaaatagtaaggtaaaaatagccaccaaaagttcaaaaaatctatccaaaaagtaaagttaaaagaatcacctgtgattcagtgatatatgtagccaaaaagagctactaaaaatttaaaaaccgattcagaaattagagtcaaaagagccacttgtaattcaagaataatgagctaaaaaaaattacttgtaatcgagttgtctaaga

SEQ ID NO: 212341 - DNA, 1192 bp, Cannabis indica
aaatgttcattataggtgctttgcaaaattttgtaaggtttagcttagaattggatgagttatgggattttcaaactcagacagagaagtttcgggtcacccggtttaggcagttttaggatgtcatttattttgatttctattgagaattcgattgagattacttcatgaaaaatgttaattatgatatttttagataccttacaaaatttggttagatttggcttagaattgaatgagttatgtaagttttaaaattaggcagtggagtttagactgtccgatttaggtagaatgtagggcccgtttttaaagcggaccatcttttttgagacttttctcgggactccaattgagtgttttactcaatacttagggtatttccatgatatctttcgatagggaaactttagttttaaatttaagtcctgaaagtgttagggaaacacttattggtttttcttaaattttgacttaaggccttcgattaccagcaattatttctacttaggttgtacctgtatacctaaaatcaaaattgaggtaagactagtttggtcacacttgcatgtgtacatgtttatgtttatgtttgacctaaatgcatgacatatccgttagaacgatagttggtgtatatatgattgcatcttgatatcgtgaatatatgtgtttgacatttcagaaagtatgaaccaatgataccaacactattacgccaaagtactaaatgaatgtggtattatagttggttatactttcgaaagcatgaactagtgctaccaacactagtaggccagagtattgagtgcatgtggtattatggctagttgtgtttggcaattcagaaactatgaaacattggtgcatgtgatatcgtgaatatatttgtctggaaattcagaaagtatgaaccaattataccaaaactagtacgccaaagtactaagtgaatgtggtattatagttggttatactttcaaaagcatgaactagtgctaccaacactagtacgccagagtagtgagtgcatgtggtattatgcctagttgtacttattgtatggattgatgctaccaacactagtacgactagagtagtgagtacatgtggtattatggttgattgtactatggtcaagaatgtttgagactcaatgatatatgttggacatggtttatgacttgttgat

SEQ ID NO: 212342 - DNA, 1191 bp, Cannabis indica
ttacttttcttagaattaatttaactattatttaattaatattattttaaattttaaaagcttatgtatgataattcaaaattttacatttttactaaatttagtgaataaatttttaataattcttttatttaaattcttattaaatttaaaatatattaacaaaatcaacattaaaaaaaaataaaaaaaataaaaactcacctatatggaaaataaggaaaatttataattttatgtactttgtagtatttaattacactatatgtgcataaaaatttatttacaatttattatacattttatcaactatgaaaaatatatttttaattttatatacaaactatgtatgataaaaataaataataaatatatataaaaaaataaatattgaatttttttggaacaatctaaaatagcggtatgaaaggattaagaaatccataaaaaaaattcaaaaaatgtgtaaaaatgtacactctttattatttttgagtatttctgaattaattattaaaataattttagaaaaagaaaactactttactcatacgctactggaattggtttgtaagtgttttttttttttatataaagaaaaaggaagattaattaaatgttgatcccctttaatcttggcttccaaattttgattatttatttatttatttgtggctttgacttttcgtaataatttgtggaaattaaagtgtcaacagatgagacaattatatgtatctaagggaataaataaagaaataatgaagaatatgctataaaacatataaaattaatttgagtgcagtgaaggtcatggaagactgcacaaatatttgttcgaatatgcttttttggcataagtgaaaatttcattaaaataaacttcatatataatataccaaccaagaattaataatgcaaacagattaattaataataattaattgtaatataaaatgatattatatataattgtatttgtattgcatgtgatggtatataatgtgaagctctagccttggcccctacgacaagtagaaaataatacattattaatgtgacacaatattataattaatcaaattataatattgtatataagccaaactacttattatctataacttttttttattttaaaaaaaaaaaaacttttaaaaaaaaactaaaattaaatatactagtagtgta

SEQ ID NO: 212343 - DNA, 925 bp, Cannabis indica
tactctttagaagaaccagtcctttttgatgtcattgggttagggtttggagagtgaagtaaagtttggaaagtaggtgagaatgtctgaaaatataaaaaagaaactgtaataaatttcaaggattagaagcagaggcaaaatggtaatttcataagtaagaaatgtttaaatgggtattgagccattgactgtatcttggaagatttcaagttatgatagttgatcaattgtctaagatttcgttcacaaatttgggtccaaaattattttatttatttatatttttgctttaaaattaagagtaaaagtttgttgttttttcccaaaaataagtaaataaacatgctcgaatacaatgatgccaagttaggttggttggctaattaacttcaattaagtgtcttcacaataaaatcgttcatcaaaccttttgtcaatattggcatagttcaaaatatgctattagtgacatgattaagatcgcttatggttcgttttccggattttgtaaaagggtgttatgtctaaaatccatggtgaagaaaacttgtttaattgaaatgaattccattaccacaattcttctaataaaaagattcccattcccattgcttatgttatgtcattacatcataatcttatgacttccaaatctcaattcccacaataaaagatgacataaaatattacaactagctgcaattcttgaaacacttccaaatctcaattcttgtaaaaacaaaccaattctcgttgatttaaatatcaaaatgaagagatttcaatagacttaaaaaagtaaatgctctcagactagggccaggtttttccacttgagagaatgaaaaggaaggtcaaaaccatcttcaaacttaaagacaaaaaaagtacaaagaaaaatccaaaacaatagaaagtgttt

SEQ ID NO: 212344 - DNA, 572 bp, Cannabis indica
ggacttttgccgcaattatccatatttataataaaagaatttaaaagaatgattaattgtagtacatattatctattaaaaaaaataaaattttaataaaaaatatatataatttaattaagtgtttttattgtctgaaaaataaacaaataagtaaatagaatcacatattttaattatcagtaaaaataaatatattaatcaattattagttttttttaaaaaaaataagtaaatgagatgactcattttaattatcattaacaaaaactaaatgaggagatagttgtaactaattttaaacataatttagaagcttacacatgtcactcaattaggaagatagtgtaaaagagagtttccctaacactcctcttaaattacacacacttgttacacagaatggtatgtaattaatcttaatcatataattaaaattaatcatataattaaaagtaatatggtcccacttgaaaatataaatgactaatatttattacacattattgtgtgtaataaatgtgtacataacattactcatttgttcatatatgaaaatatttgaaaaaaaa

SEQ ID NO: 212345 - DNA, 608 bp, Cannabis indica
atacacgtgagtatgtcaaaagatttaagacaacaactttagcatgattcatctcacttttgtcacgctataataagtgtcttgcatatacctcactctacattaatataagaacgcgaggaatactacaacctatacatagatgctagcttacgataacgtgtctagaaaagtaataatcaactgtgagaagtatgaagcatagtcaacataaccctctatagataaagacaaagagaggttgtagcagctatttataattatctcatgttcataaatatgaaatgtggggattgtctacgtttcacgaacggttacaaacaatccgattctaaggaaataactgtcatcctagactcctatacataaggacaaaacttagagaacaaatgacgaccattttgggaaaagaaagaaaataatatctattattcgttctataaaacaatttattgtattctgtatacaatttataaacccaaaataagatggagtagtagactttgaagaattaacttcaaaaccacgtaaaaaatttcttaatcacttattgctgttattattagtaattattacttaattaattagcactactagaaaattgggtt

SEQ ID NO: 212346 - DNA, 544 bp, Cannabis indica
attgtctgggccacctttgcctttgcttttggtgggttcttttttggcagtagtatcgccggtgggcacagcttttgcaggagaagtagtagtagtggtgtggagatggggaccggattgggatgagggtgaggaagaagaggagtccataagggttaagattggggtgaattttaaaggtgagagaagtagtaaggtagtgtgtgtgtgggtgtgggaactgggaaaggattgagtgagaccgcgtgggcgcttcgttcagtgctgtttgattagtcgaaatacagcaactctagaggttgattttgaataacattgctgttaatggtgcaaatgggcggtgcctctctgataatatttgttttatttttttatttttctttctcactgagacaaatgaaagtagaaagcgagtgattgctgtgcagtcaagaaaactgactttgctcagtttgtgtatatattaagtcttaaattgtctatgggtttttggaatttgtaacatttcaaactttctattatatattcttcttcttcttcttct

SEQ ID NO: 212347 - DNA, 612 bp, Cannabis indica
gattatatgcataattatttatatggaataattacataaggcaccatgttttgtaaacaaattacatttttatgtttaaagaattttttttacacttttacggttttccttagaaataatacgaaaacaacaagagaactatataaaagtaacatgaaaataacatcaaaacaacaataaaaaataacatacaggtaacaaaaaatcaacaacaaattaacaagagtacaacataaaaagagtgtattttttgtaaataaaattaaaaaaaaattgtaaaatatttaaaattccgtgaaactgtatttttgtaattttttttttgttgtttttgtgtatttgtgaaataatccctatttatatcatcactctatttttatttgatttataacactttttacaaactattactcttatcttattttatagtttactagtaaaccaaaatttacaaaaatctttaataacaaattaattttattgagaaaaggaaaagataataagtggttgtacagttactctggtggtgaacaaagtatatggcccatagcctaagtcaactagtccattttcttctttcttgggcccaaacagttttatgatgattatgta

SEQ ID NO: 212348 - DNA, 548 bp, Cannabis indica
gaatttggaaagtatcctaatttatcaaaagaaattagtatataacaaacttaatttaaaccccttcagaaagaaaaatgaacctcaaatttataggtactgtttgagtaggcaaagaacctttacctgaagaactgagtgtccagtgacatcatctatatttagagcaccatcagatgctgcagcaagaatctctgcacatagctttgcgaaagtcgccaaaaggtgctctggtgccatttgtttgagcaaagaaacataaacgtgcattcttttagaccttgatctctcatcatttcctctgaaaagtagtaaaatgcagagacgagatgtagttatgtgttacattttgaaaagttgatttctattctagttcaatatagacaccaacctgatggaaaaaagtcgactttcagttcgggagccatgagaatcagtatgtccactgtgagcgtggcagtcattcagaacaaagatggcttctatgaaactattgtaagcaatgaggggtgccttgactgcagaaacatgcacataaggatcaaagc

SEQ ID NO: 212349 - DNA, 691 bp, Cannabis indica
ttaatattaaaaatataaaatatcaacataaaaaataagaaatttaaatattatttattttaaatattttattattttaatatataataaatacgtaaatatatttttagtacaattataggtttttaatcaaaataactttttcaaaaaagttggtttatactagctttagattttaattgtagcttctccataaattcttatataagttgtttttaaactatctaccaaaataatatttttttatcacaatttttttaaaaaaatagcttttagcttttccaaaagctgtgccaaataagctttaagattatatataaatttatttataggatatgatataaaaatttgagtatttataagtaaatattcaaattctaacagggccgaccctgaaaatatatgggcccaagacgaattaaattttgaggtcctcaaaaatatataaaaaaaaatatcaaaaaaagaatgttatgggatttgaacccatgaccttagacattatgccatccatctcaaccaactactgtgaatatttgttgcttataatatacttaaataaaagcctaataattttattttttttttattttgggcccccgacaagtgtgggccctaggcacgggcctagcccgcctatgcctagggccggccctgaattctaattatgttaataatttttttataatat

SEQ ID NO: 212350 - DNA, 621 bp, Cannabis indica
agggcacaaaacccaacagcctcgctatgcctcattgatgtcatccctatgattgtgtcttctgacacgaaatggtttctcatcaacacgcaaatcaatagtttgtacatctttgtctcacttaagactatacagtcagcgagttatagatatgttctactaactctgcatttaatgagttattcaatttagtatcttttaatataattgacatgatatttgttgattcatattccccaaggtttacacgcgtcataccctgaagtgccaaccaaattttgggtataataattgccccttaaaaaaagtcctttttagtaaaaagtgcttttagaatgattatcgagggtattttcataataatccattttgaaaaaacacatgtcctctgattttgccggtattgtacttttgaggcacatcatgagcacttaataaccatcttttcaacttccttttaatttttagccgttggattatttacctcttaatctaacagagctaaacccagtggtataaaataaaaaaagaaccaccttttcatcacttctgctatttcaaaaaaaaaaatcgagcttctctacaaaaaacctctcttagatttttcgaagctttgcatgc

SEQ ID NO: 212351 - DNA, 697 bp, Cannabis indica
cctcattttcatacataaattgggtaggagtatcaaaatttgctttataaaagatagggataggaatagacaacatctaatccaattgaattgaattaaactaatttaattcaatctaattacaaaacattaaatattcaattacaattagattggaggttaaaagttgcattttaattggatttgatcaattattagatattaattttaaaatctaattaaaaactgttctaatcttgttttaattattttaaacttttagttgcattattgtaacgatggtatatttatggagtattaaatttaaataaaagatgatatttagttcatacgtattttttttcttcatatttttaaattaatattaaaatttaagtatgtaattagatgtttaattaaaaactgatcaaattcaattaataattagattaaattggattttgagatctaattagattggatcggatgaagattttttgaatctaattactaattggattgaatcaaatgaggagagaaatattgaattggatggaatgaacactcttaaattaaaaagtatttttcttggtattatattgggtgaaggggtagggtacatgtgggtagcatgtgtatttttctgaagtctccatcttaattagtgttttctgatttgtctcctttatttaaacccttcttcttttttttttttttt

SEQ ID NO: 212352 - DNA, 647 bp, Cannabis indica
tctctctctactcacacacaaccatattcttatctgtccccaattctttcttcttcttcttcttcttccttcttcacatactcttttttttttttaaggtacctactacaaaaggtgagggtttagcttttatttgggtaatgttgtagacttggaaaataaaatgaagaagaagatgaaacatgggagaaagagctcaaaatacattgaaaaataaataatgtgtgtttattgattttttcaagaggaatatttatataaatatatacatataaacacatatatattatcttaggaagtaagacatcacgtggtgggttgttgctaaaatttaataaaaaaattaaaaagaacacataataatgtgtatgagaggtcaacatcaacttttatcatcatgtaaaaaaaagctgccacaattttcttgacgaggaggagatcatgtgatgggctctttacccaaatttttttttaaaaaaaaagtgaaaaaacataaataataatgtgtatgaaaggtcaacaccaactttaatcaacatttaaaaagaataataaaaaaaataaagaaaataaaataatggtgacaaaatagtataaaatggtaatgtacataatttgatactgtacacagtatacaacatataaaa

SEQ ID NO: 212353 - DNA, 914 bp, Cannabis indica
aattgataatatattgtgatgtaataataatggtattaattattaattaatattgatataatatcatatgagatattgtagggtagagtattttaatttctatatatatatattgtcgtttatgaatgatgatattttatgaaattaatgcaaatctttatttctatggtaatatatatctcactctattattgttttctaactaaatatatattatcctaaattataataaagaaaagaaacaaattcttttcttaccgtatttgtaatatttttcaaatctcacatattttggtccatttaaagaaaatataatgaagcgatcaataatatcatcaaatattgtaataataatataacaacttataataaaattaaacaacagatccaactaaataaaatactgtacttaaaaaatttaaatgtatattttttagtttgataattataaactaagtaaaaaaaaactattatgaaataaattaaatctagtatacctaattataatataagcataaatatatttttttattgataaataaacgactgtcacaaagtaaaaattttgaaagtgaattgagaataatacatatttaataaatgatagttctaacttttaagatgaaacgaaaaagtaaaaccatcaattaaaaattgaatttcatttgataattatctttgattgaaaagcaaagagaaagaaatagaagaaaagaagtgaaatcttattcaatgctcaaaatgaatacaagctaagactctgctatatatagcagcagaagttagttacattgatcaaactaactctcaactaactgataactaaccaaacagactctaacaacttgatactccccctcaagatggacaatatatatttttcaatcccatcttgtctttaatgtaattgaact

SEQ ID NO: 212354 - DNA, 960 bp, Cannabis indica
tatatatatacatatatattgatgtcatcatatgtaagattacacaattattgaagttttggtcgttactctttcccttggttcattatgatccaattaaagaaaattcctatatacttcctaaaattgttgtattattttgactgatcaaatcaaaattgtattatgtatatattaaagtgccttgatgataatgtgtcaccaaaacttgagatacccacaaatgattttttttttgtaagaacataataataaaatataatatgtttttgttttgttgataattaatatttgtggcctgatttttggtcctaacagcattaattaacatacctcttggatcagaatgtgacttctttttcccctctttaataaataagaatgggacttttaacccattacgttaaggcactgtccaagttaagaactagcaagtcagcaacttctaaaattaatgctatagtagtatgttaatgtcacattacaaaaaactgttacttttagtgataattttttagtcacaacataaattttttgtgactgaatatgacttttagtcacaacaaaatgttacttgtgactaaaacataatatttaattacaagttgtcattaatttagttttagttacaacaagtattgtgactaaaaatacatttagtcacaacaaattgtaatttttgtgactaatacttttattcacggacttttttagtcacaacatatgaatcataatttataattagtcacaatttttttgttttgagtcacaaattttattatggctaaaaataaaattttttgtagtatcaatttgctattttatgttatttttatttagtaaattaataatcctatttgttggtttataaattagttgattctatattcatcttaatttctttcctacttctaaataacagtttacaaattttcccattattaaaagtttttttttttt

SEQ ID NO: 212355 - DNA, 558 bp, Cannabis indica
tatatttaatacataaaaaaacataaacatgtgccctaattaatatatttaattaagatgattaaagaagattattacttttgacattgatgatctatgacgttttttaaactcagacttgatcaaatttagtcccttattaattgccatcttctcaatatatgtatatatgaataatttaattagtttatgaatatgtacgagtagtattagtaattagtgatgaaacttatttaattactcttttagtacttatatcttacgtaattttattatatgtatatatggatcgatcaaaaaaatgaaaatgaatgaatatgtactctttgtgtctttaaatactcaaatcataatactcctaatcctaatcctaatataattataatatataataacaatcttaaccctaattattattgtgaaaaaatataaatatttttacttagtcaaaggagtctcctccaatatttgattttttttaaaaaaaaaaggaaattatataacaataaataatgtgaatttgtaaaaaagaagatattattatataattatttaact

SEQ ID NO: 212356 - DNA, 1039 bp, Cannabis indica
ctgttgatcctggtcttcatcatctgacttcttttcatccacttgttgctcagcccttggcctcttatatttttttccactccttaaagaaattgcttgacattgctcttttgaattactctctgtagtgcttggcaagttaccttgattttggttggccatttgagtagccaactgtcccatgtgagtttgtaagaccttaatggaagatttaatctctatcatgaaatgaggtaacatatctgtctaaagatcagaccctccactagagtcttgttgttgttgattctgttgttgactctgttaacagaatccctgttgctgttggttgggaaactgttgttggaagttttgctgacaacccccttggatgaaaccataattattgttttgatagtttccagttgcttgtgcttgctccattggcaaactgttcacatccactggacaagtatcataagtatgaggtcccccacatagctcacaaataacttgagcttgctttgcttgagcaatcatcaacttagtcaagccctccacctgagctgtcaactttgttatagcatcaacttcatgcatacccacaaatatttgagattggcctctctctgttgaccattgttggttagtcatggccatctcttcaagtagttcaaaggcctcattcgcacttttcctcataaaagccccaccagctgcggcatctatgagtgtttgggtgttgctaaccaatccattgtacaagttgtgcacttgcagccacttttcaaaatcccatggttagggcattttctcaataagtccttgaacctctcccaggcttcataaagagattcgttgtcatgttgaatgaagttgttgatttcagctcttaatttggcaatctttgtcggatgaaagaacttaagaaggaattttagggtcaattcctctgaagtgttgatagaattgggtggcaaagataccaaccaactcttggctcgctcccttaatgagaacgggaacagcctgagcctgatggcatcgtcactaactccat

SEQ ID NO: 212357 - DNA, 1072 bp, Cannabis indica
ccacacctccaccattaacgtgacttggcattgggtcaacacctacatgcacagcatccccaccgatcgaaggtcttcccccattgatggtcggcaattccatcccctcgggttcggcaccaccaacctccggcggggggctccaccccctggttctgagccatcgagaaccaatattcttgtgagatcgttggggaagagccctcatgaactcaccatatggcgtcactatttgcttaattggctgatgaaacaacttatgacagaacctttctgagtgcctaattataccaaaaatgaaacagaaagtcgaggccctttcgtacttaaaattaatccagaaccagctcccatcatcctttgtgagcttcattcaccggcgtaatggtttatcaatattcaaagtgactctgatgcgaaggaaatctctccatactcctataaattttttctgatcagactctatatacttccccatagtattacccaccttagcaacagtaacctcagacatacattcaggctccataacatggagttaaacccagatgtcaagagtgttcaacggtaatgccttcggatccccaccaacctttagcctctctagaattaactgcatcctatcataggtccagggactcctattgattaccctttgaatatctacttcatgataaaactggaaaaggaacctattattatccaattgtttgacaaacatgcccatacctggctgccataaggaagccaaaatattttgcattttctcaaaatcaatcacctggttagacaaaaaaccgtccaaccaaacaccatctatcatcaattccatcatctcctccccctgtaatcactgcaacctcctcaagatcctcctcctcaatctgaaatcgcaatatttcttcctctgtatctccattgtgccaacttgtcgaagccataattatgatccaagagccaacacgcacaacccccacaatgcagaaaacaaagaaactcccacaagagccggtcaaccacaaaaaaatagccccccacaaccaagaaaataaagaaacctgtcaaccaagaa

SEQ ID NO: 212358 - DNA, 991 bp, Cannabis indica
ctttaattttatattttgtaatatttaaccacataaacttattttttgaatgtaaaacttattgaactcccatcccattttactatttatacttccgtctaaaaacttaagttaagtgctacaatgaattattcacatgtacacacgtagcaaatttttagtgattcacacataatattaattattaaaatattaaaaaaaaatagtttaaaaaattatttaaaaattattgtattttatttttctttctttttcttttttccatgaaaataattaatgatttattttaaataaatttagtatatttttaatttttaaatttttataatttttgaatcatttattataattgttttaataattaatattatgtgaaccactaaaaatttaccacggggttcacttgtataaacgtgagcaatccactgtggtacttaacttaaatttttaaatgaaattataaagagtaaaagaggatggggttcagtaatagttttgccgttaaaaaaataagtttatgcggttaagtgttacaaaacgtaaaatttagagtcgttttgccgctaatatccttaagttagtttaataaggcataaaaaataaatactaaataaaaatgtaaaaaattttgtaaaacttattaaactaagttataaacatattaatggatgtataagttaccaaaaaatttgaaaactctattatagggtaagatcaacttatttataaatgagttagtttaagttttaattttcaacacgattaataaataagttaggtttaaatttatatatgtgttgtgctcgaaattaatgctcactaacaccatacatatatacgaattgtcaccccacctaaccatacatttcaaaatgaagttataacggtatactaattttatttaaattattaaactcttgtttcataaaactatttttttttcttttttttgatttcaaaataacgaataaaaaaactaataataataata

SEQ ID NO: 212359 - DNA, 809 bp, Cannabis indica
atactacttatataaaaaaaatagtcatgcatttaataaaatatttaaatattatttttagtatgataaattattatctttttaaaaaaatttataaataattataaataaatacaatatacacaattatataaaaaaaaaaaacttacaacactctcctaaatactaaaaaaaaaaataagaagtacctatgtaaaagaaaaaaatgattatgcatgtaaataaaatatttgaatattatttttggaacgataaattattttaacttttttttaaaatttataaataattataaatgaaacaaaaacaaaaaaaatttaaacttacaacactttcttaaaatactaaaaacaaataaagaagtgtaaccaaaaaacttagaagtgtactaatgaaacaaaaacaaaaactaatgaactggtcaaattcaaatatatataattaatattataatatgttgactatatatgttatgaatgatcccatgatgatctctaattaatccaataataactatattatacaaaagaaattaattatatataatgaataatcattcaaattaaatcatcttggagagtattgggacacacgccatcatttctttctttcacttctttccatatatataattaatttgttaatattttctcagaaaattataaatcaaaataaatttaattgtttttttttatgggttgaaattttgacagaggcaaaataaaacgaaaattaatttagttattttgtgtaattattaacattaatttccattaaaaataatattaatttcaaaaataattgctaaa

SEQ ID NO: 212360 - DNA, 715 bp, Cannabis indica
atatatatatatatatacacactaggtgtggtagacatgccacacgcacgtacctctcgtcaaaacatgtaagttataattatatatcttattttcgttaattatatttacacaattagttaaaaaaaaattatagtttaaacaagaggattcatttataaaactaaggtcatcaattatcttatttatatgtaagcatatgtaaaatttgaaaaagaaaaataataattaacaaaaagtatagaaaaaagtaaaataataacaaaaaaagattaatcttatatgtatgctcatataattctctacgcaattatatatttactaataagttaataaaaagaaaaataaaaaaaaaaaaaaaattagaagaaaaaacaggagaaaaaatggtaaaaaaaatatacagaagattgactaaagtattaataattggtccaaatatgaccaaaaaaaaaaaaaaaaacacacgcacataagaaatccttacctatgcagtgcacaacaagtaagaaaagattgacaaagttatgtataattgaacacaaagttaaattctaatagatatgtatatattaataaggaaagtgaaatttgattttttatgtttacatatacttaaactttttttttctaaactcataatatttgatatttgtggaatatgacacattttctaatatccttaaaataccccccccctatttacatcaccccc

SEQ ID NO: 212361 - DNA, 606 bp, Cannabis indica
ggcggcaagttgtacaaacggtcgtattctaggcccttactcaggtgtctcaatcctacagaggctcattatgttcttaccaaattacatgaagataactgtggtaaccactcaggttcaagatgtctcagcaatagatcacttactaccggttactattagccaaccatgagagccgatttcctcaactttgtgctgaaatgtgataaatcccaacagttcgcccaagtttcgcatatgccactacaaaagcttcattcaactctagcaccttagcctttcatgaagtggggggtggacatagtagggaagatgccgactgctccaggacaacgagtctttatggtagcactaacagactattttaccaagtgggttgaggcagaagcattcacaaaggtagagatctcgaagttaagaattttgtttggaaaaacataattgcaggtttggagtgccaaaggatatagtcacaaacaatggcttgcaatttgtaagtttagagttccaaaacttttgcgaagaatggggaatccaactctcattctcgaccccaagatacccacaagccaacagtcaagcggaatcaacaaacaagattgttgt

SEQ ID NO: 212362 - DNA, 1220 bp, Cannabis indica
ttagttttgtgtttagtgttaaattgttaagtcattatttttgtttattgttgtttgtctttgtataaaaaataaataaataaattgtacctaacaagtgcttgatttaatcgctttggttttaattgtgtttagtagaaaaatattaatatggtttgcaaatgcaataatttatagtttgctatatttgtttgacttgggattgtggtaagattgttggaatatgatagaccttgtatctttgtttaccttttgagacaaaatctttgatgacacaaattttagaaaataattcagacaatttttattggaacaactgggcctttcaaacttaccaattttattttattcttagtttacccaatgtgtttctatttgttgtttaaccacactttgagccaaaagtgtaaattatttttccttgacgcttaaattatgtcatgagctaagaaacaagtttggaggaaaattttagttgggtgattttctttgtaaatgtgaataaataatgtattgataattgagagaactatataaaaatttgtatagtatcactaaccttttaaatgttcgttgtattagttgaaagttcttcaattttttcttaaaaaaaaaaaaaaaaaaataaaataaaataaaaaaaaaaaaaaaaaagaaagtcaataaagtgatgttgttattgtgagttctctcaattgaaattttgtgaattggggaggggattgttttataagtgagaagtttgattttcattttgatttgcttatggtgtaattgagcctaaatgactttacctacccatgacctaagccttaagttttaacttttaaagtctttttgattctaaacttgtgttgttgatattattggaaaaatatacaaatgcaagcttattgattatttagattgtggaatgatggtttgagtcgggcatttataatggagtccaataattgtggttatttgtaagttatattttgaatttttcaataagtttaattttgaagcaattaaactaaaattctgattacaaagtgcaattgaaaattttcaagtaatggcaaagcagtttagacaatagcagtggtttatttatgttgtttgtgttttctttagttgtaatgtttaggtctttactctaaggagaagtaaatgttaaaatttgggagaattttttaaaatctatttttatgtcgttttagagtctacttttaaaggta

SEQ ID NO: 212363 - DNA, 528 bp, Cannabis indica
acaccaactgaggagacattagtgggactgtaagttggtgcattttgtaacaattcttcattgatagcagcaactgaagtagtgcaaggagaatcggcagatgcagcagtagcaggtgcttgtgcagaatcatgagtgcaagagacagcagaggatgcattagtggtgtgattattaatagcagtagagaaggtagcagtaggcaaaataagaggctcagtaggagatacctgagaagagttgttgctgtgaagagcagggaaatgagactcattgaacaccacattgcgagccacaaaaattcgaccatcatggttttcacatagataacctttgtgcttgggagaatagccaagaaatagacactcttcagatctgtactccatcttatgatgattgtatggcctcaagtgagggaagcaagcacagccaaatggtttttgaatagtgtaatcgggctgttggtgaaacaagcactcatagggacttatattgccaattactggtgtgggcattctattaatagaa

SEQ ID NO: 212364 - DNA, 630 bp, Cannabis indica
atatttaaaaaaaaaacagaaatactgaaaatcgggaaattaaacctaggtttaatttaatttgccaaatataataatatagaaagaaatggaatatgtactttgattttattttatattattattattggagagattatttacaccaaccatttggttaggaataatattatcgattgtactcaataaataaaaaaaagaatatttatgtctatcaaaataaaagagaaggggaagaagaagaatatatgtagtaaaaatatttatcaatattttgttttaatatagaagtatttatttatgtatttttttttttatagacgtctttaattttgttgctatatatttaatatcaaatatttttttaataaaaaaactaaaatcgacccttattatttttttttttttgttgtaaaagaataatttaagttttatttgtaataatgaataagagaaagaatcctttttattcataattcttctccttttatcttgtcgagtgtctaatattaatttgttagaaaatataattgtttcttttgcttgattaatgttaattaatatagtgatcataaaagatatataaacaaacatagttacatctactggtgaaaatcggtcggttatggt

SEQ ID NO: 212365 - DNA, 813 bp, Cannabis indica
ttaggagctcggtttggagaaggtaaggaagaagaaaacaaacctgagagtacggattgaattccatcgaagaattgagaaattgagatcaaaatcatcatttgtccaacatatttaacaacttcttcttctccgctgtaacaatagccccagattcggcggcctaatatcaagacagcaccgactaaggtgccttctgcaacaaccatgcaaagtgcaacacataatgctaaacgagctatttgaggcctcccagcacccaattcatttgaaattcttgtgctgacattcaattcagtttattagtttctcaaattgaagtagtgattagtgaatttccctaaatcacaacaggacattatgaagaatagtattatacaaatgtttgctaaactcacctaataactccactgagtccaagaggtaccatatacaccaatgcacatgtgttaaggctgaaatgtattgatacaaatgttaggaacttcaacttataagttaccaaataacatagatttggatgaagtacaaacctgattgacaagactgacgtttcgagttttggattcggaagaaagccagataacaaaaccatcatttcaaaagaccagatttccaacctgtttaaggacatagatgatgagcttctcactctatagtctatacactaccaaatcaaagatagtaagttagtgagcgagtacacatacgttaacattacagctgacggaatggaaagtttaagaaacttggggattccatgaaaagcttccatagagaaaccagtccatgtatgtttacataaaggagaga

SEQ ID NO: 212366 - DNA, 539 bp, Cannabis indica
atttaacataaattcaacttcttttatctctcttcttttttttttttttcatttttctttcttaataaaataatcctaactcacataatataaaaatgatattttttttttaattaggtaaaaattaaacataaaattggtttgattgtttgtaaatagaagttgcaagtctaaaaaaattgctgctaggatgttaagatttgttttgtggaatacacacatctgattgaaaaaaaaaaatattaaacattataattcaaaattttctaaataatatataatcatgaataatattaaaagtatatatatagatcaaaattgttaaaacgtactattggtcatgctcagtactcttttcggtatcatatcgtcgttattggtataattaagtataaaaatctcatataatttttaaaaaaaatagttcttagaaaatatccctaaccaatcatgagccgtcacttataaaaaaatattaaaatactactgctacccaataacaataatatacttatatttcatatatgtatatatatata

SEQ ID NO: 212367 - DNA, 836 bp, Cannabis indica
ggggatcaccattctcggcatacgtaaatgccttacccttgcctaaatttaagatgctggtataaaagatgtataatgggcgagaagacccactgacgcacatcaaatactttgagatggagcttgatctctaaaagattattggtgatgtgcagtgttgtatattctcagccactttgtcgaaaatagcttagcaatggtactttaaacttgctctaggaagattaaattcttgggtcgagttttcctaagaattttacacacaattctcgtcctcaaggctcataccattgtagctagaagaccttgtcgaagtcaaacaacgacaagaagaacctttgaaggattacatggctgaggccaccaaggtcaaaggtcttacagaataaagtcagtatacagacatattagggggcatcctcccattgagtgacttctggaaagacatcaagaggacttaaactaataacatgaaggagttcctcactagagctgatggtatttatcaaacttaaaagaagttgtctgacaggcccagacagagaaagtcaataacaggcagtcacaagacatcctgcagtcccatgacttgccaagcgcacatgtaggtaccagcaacactgcccaaacctctagtggcaagaacactaggagcaaacacaataatgaaaactctagaagaaatagtgggaaaaaggggaagtttaacacttctcccattccataaaactagaaggacaaggaggagaagaacacatgcttcacccttctgacggagaaacttgagaccatctttatggccatccagggaaaagtcccatatagaaagccctttc

SEQ ID NO: 212368 - DNA, 589 bp, Cannabis indica
aaaaccgctccatccacattaatatttaactgcccagcagctggtttggaccagtgttctcttgtgtcagtgcgattggaagccaaggaacccgaatccagccacttagactgggcacacgtttattgtcgaagagtagtacgagctagccaaacaaaatcagcagcactacaacttttaccattccaaagcatatcattctgagccttctaaattgcccaaccaaccatgacaacttcttcaaccaaccccttattgcctaatgccaacacttccataaaccagtcaaagaaattggttgttgtagaatgaccaacacctaacgccgatcggagccaacaagaatgagcaaaggagcattgaaccaaaacatggaaaattgactcttccccatagtggcacaacacacagtgtaaaaccacaggaacatgtttactatgaagctgagtacgtgttggtagacaacctgaaagagttttccaagcaaaatgtaaaatcatcttcaattgatttttttatttattttttctttctattctatctctatttctcttttatatttttatttttcaactctctctctctctct

SEQ ID NO: 212369 - DNA, 938 bp, Cannabis indica
gttgtggttgtggttgttgatttagactctttagcaattatgtttgattttgctaagagatattcttttttttagtgatttatgatcattgttaaaaaatataataagtatattatttaaatttttaagagtttttttgatccatatacatcggtcggtcaatgtaactgtacataaattaattgtagatgctttttaaatagataaataaggtatttagctagatgattgtctattatttgattctttaaaatgtataattatttagtctatataacattatttaattatcaattatatttgtcattatttataaaagagaaacaattacaacaatttatgtgatgtttggtataaagtttttattatttaattaaaagctttttaattgggagtggaggggatgagattaattagagagaatctccaattcttttttttttttttttgatcgagagagaatctccaattcgcacctaagaaaaatttgacaaaatctaaaaagtaaactaaaaatgagacacataaatataaatcccactttaaacgttacacaccaaaatatgtgtttggtttcacataacaaacacacctctaataatttcgagcactattttttttccttttctcctttcttctcttatgaatttagccacgccctcataagagaacaaaaatatccatataccatttttattctttacttttttgttaattaaatttgagtttaagagtacttttttcctactatttataaaacacaaaattatgttaagagttttaaaccgtataaaagttatattgtattaaataataaagaatactatattcagataaaatttgtattgtattaaatattacaactataaattttaataaaatgtgaaatcgtattatttataaagtgtatgaatgattaatattatagcttgtattat

SEQ ID NO: 212370 - DNA, 602 bp, Cannabis indica
ttcacatgaatatgtatcacttcttcaattataaaaatagcataattttgcttagaaattaataattattagaatgaattcatgaatataaataatataatatatcgaattataaatatgtggtatacatataatataaatgtaatccaaaaatagatatatgataaatattggccacttattttgtgtgtgttcacatgttgagaagaggaacagtacggaccgacgacgacgaaaagaaagtctctggaaaaaaactctcaaccaaaactaacaactaataataataaaattaatttctactaaattatatgcaaccattaatttgttatattcctcattatcttttaataatttcctcagaacaaatcaattaaaagagagaataattaagattagttataattaccaacaacaaaagaacaagctttccatccacctcttttggatcttaaaattgggttcccttaagatcaacagtaccatcttctgtataatcatcaataccttcttcttcattagccatttaaaatatatgtattaagaaatgagagggtttttgtctattatttattataagagtttgagaatatgcttagttt

SEQ ID NO: 212371 - DNA, 735 bp, Cannabis indica
ctctagaattagagataggaaatggtagtttatggcttttacctaaatgacaggcatgagaaaaagacatctggcttggggtagtggaattacttatgctagacagaaccttttacaaaacaggtaaggaacagtgaccacgtttttgatgccatatgtcaaaatttaatttactgctagtatgaaatgtgatatgaatggagaaataagaaggagaattatctattttattgctgtcaacgatattacaatcatatttgagaattacatttgtgtaattttgtttattacagatcatagcagtaggaaaatgaaaatgagacttggactgagttgggggactcaatcttgaggcattggagaactatcctagcacgtataggccatctttaagggtacccttgagtagcaccctccttgttgctttgtcctttataaaacagcaggttttgtgaaattcaagatacacaggattgtcattagttaattgagaaatgctaacaagatttttggtaatagaggggacatgtaagatggaattcaacttaattggataagaattagaagaaggtagagtggctgaaccaatattagaaatttgtaatttcttaccattgcctacagcaagcccttcagcacccgtgtaggtggttgaggagtcaagattatctgtgccttaggacacgatggttggttgctcttgtatcagcaaaccaccctaaatcatcaccaaaa

SEQ ID NO: 212372 - DNA, 664 bp, Cannabis indica
ttgccagagttgaattgtttcttgtttacgtacactctttctctctcgcaaagattacatttatacattagataagtttcagggtacattagttagtcttatagtacattattattttttaacactaattactcctaaatcaactccaacccccagatcaaataaattccctatctaactgttgccgtattaacggaaaaaaaattgtgtccgtatatatatatctatgattatttatgatccaatattataacccataagtttggatagttgaccaagacctgttaacgctaaccgtgagcaaagaatgcgaatggagtggggggtcaccgcacatttgcttgtcgtcatgaacacgtgacacgttatattagtaatccgcattgttattatttgtgtgtgcaaaatgacattcaatcctgattttggcattataaatcacttgaacttttctgaaaatatgtatgaaaagtccattctaagtatattatcaattatccatttacaaatatatataaatatatatatatatatattataaattatcaagtaaaaagcacatctcaattacacatattgttacacttttatatttaattttaatcatatgtatttaaataattttaagtgtaagatcactattaattattttaattgtatagtt

SEQ ID NO: 212373 - DNA, 613 bp, Cannabis indica
ttttttttttaagcaaatataatttttgaaaattctataatgtacccctttaaaagagatacaccgatatatttagtatctgaaataattttttagtcaatttttttttcatggtcttgtaaattatacttatttaatacatcctacaaaatttaaagaaattcggaaaaatttaatacgccgaaaactacgttcaagcagtgtgttgcacgtgtgactattttattttatacgcgtgtaaaatagactatttgaacattgttttctatattgtaaattattttgaatttctcaaaattttgtaggataccttagatagctataacgtacatggatataaaattttcattccttttaaggaagtacactgtagaatcaccctataatttttattaatttgttaaatcaactaactaaaaagacaacacttaaattcaacaagaacatcaccgctttgaacacatagtttaataaaaaaataaaaaataaaaaataaaaagattgtttagagacaagggagacccacattgtagggagagggccaaatgtatatatgtattttaattagttacaatatgtatttataataaaagatagtatttataaatataat

SEQ ID NO: 212374 - DNA, 1035 bp, Cannabis indica
  modified_base (1008)..(1008): a, c, t, g, unknown or other
ctcaagtacatgtagagatatttcagaaaaatcgcacaataaaattttaatattaggaaaaaaaaaaccttaaaattaagagtttaattattaattaagttaaaatatattaaacttgtttaaatcaaggaggaattaattatgagagtaaaggcatataccatgtttattagagtattgcatgtactttgaataattgttatatacaaataataaattataataaatatttatttaaataataataattatgacaatctaatttttttcaccaccatcttatttatgttattttataataacttttttaataaagtaaattaaagttaatatatattaataatataaatttaaacttctttataaataaataaataaataaataatacaacattaaagaatttttttgatcatcctcataataataataattaatacggtaaataaacttaaaaaaatcttattttccagagttttaatatttagtaaataaaattattagtactaatattttattaatattatatattagaattatttttttatgttaccaatattttctttattataattctaaaaatggattaaaatatatcacctagataaataaaaatatgtaaaatctaatattaatataccaataaaagttatcatctctgtggtatttgtacttttagcattttcttgtatcaataaatgttttttttctctctagtgtgacatatcaataaatgttaaaaagtgaaatatatatcttatatgcattcgtattccttatgtaaggcatgacgtcatctatatcaattggataaaaagtgagtgcacatgatcaagtgggattttggatttttcgagttcgcgttcaggttcagattcaggttcaggtgtgtaaattttgtgtaccgatcctactcgttttagagtatgggttcgggtgtgggtgcagggtgggatggggccggttcgggtggactagctaattttgtttttttttttctttgtaaaatntctattttttcagtaagtgacctaatt

SEQ ID NO: 212375 - DNA, 972 bp, Cannabis indica
tacaattaaaaattattaaaaaaaattgataataatattaaattaattaaaaaatattaattttacttaaaaaacctaaattattcctacaaaatattttcaaaatttatcttatttataaacacgtatattaaaaaactaaactaaaattattgaaaattgaataaataatttaaacaaactaagattttttaaagaaaaaatcatttatttatatttataaactcatatacttaaaaaataaagaaaattaattaaacaataaagatataaaattattttgaaaaaaagttagatattaaactagaaaaaggatatgattacttaaacaaatttagatttatagagaaaaaatagactcaagcttgttcctgtaaaatttaatttttaatatattttttttatatcaaaatgattttttttttaaaaaaagataaataatttttaaatcgctcaattaatgttaaaaatttaatttctcttttaattttcttcatcattcaaaatgatttatttttttgaagatctaaattaattatctaagatttactaaaaaaaaaatgtttaatgttgacgatttgatagttgttaaattttaggggacaaattttttaattaacaaagatatgttagcatttaaactgaataatagaacggagcctaacagaaggacgaaatttttgtaaatgtaaaagttcaggaaaatttttaacaagctgtatattttaggaggaagaatcaacattgtcgaaagtttaggaaaaaaaaattactaattattctatttttaatgtcaataaaataaatcttatgtaacttaaagttattaaataagtcattgtactacaattataccatagattatagtcacataagcaaattgttaaaaaaaaaattataagaatgtaactcgatgggaatatttgcaatgatttgcatagtttggggggaggggtttgcaactgagaaaag

SEQ ID NO: 212376 - DNA, 572 bp, Cannabis indica
gaaccaccttatcaggtcgctagtttctctattgcgagggtcaagctccgcttggtgagatcagaggatgtactcttggtcatacatctatctcagaaatttgcgtctctgttgtgcaaatacatcgcaaccaataacgcgtggttctttagtttggctgacttgggagcgaccactctaagtctagctaactcaagatctactctcaagtctacatggggctcaccaattcttggccccgtctctacagcacaataccagggacgaggtccagttgtgattcctgggggctgctctacgtggatttttctttcagtgggaggtgccagtggagggtcttccctaggagggacaaattgttcaaatccatcggaatggttttgctgacctagccagctgtggtggccagattcgtcgtgcctgctgagatggcaggagtggccacatctgtggtatttgtggagattccagttgtagccggaacacgaacatcaagatctgcattcataggttcttaaggaagacccaatgaggcagatgttgtagctaaagttctcctcgtgttaacaatg

SEQ ID NO: 212377 - DNA, 733 bp, Cannabis indica
aaaaaaaatatatatgtttttctattaattaaataatgagataaatttaaaaaaaaaaagaaaaaaaaaaaaagaaaatttttacaccaaaaatataaaatgctaattttattatatatataccaccacaccgttaatttaacatttgtacacattttcttaaatttattacatttttactacatgcacacaatttaacttttttaacacatcagtaattgatgtattacatcaatccctctatatatcattttcctcctttttctcttctttttccttttattttccatttcttttcattttttttttttttaaaatagtaacttccatagctgaacacttccttctccatgatcccaactccattttccctcttctttttgttctttaaattttttttcaactcccattaatcgaatcccataaccgtttttcctttttttattttctcttaatccatatataaatatggttgtaactcgttcttcatcaactccttcccctgttcaataaaaaagttctaaaatggggttgaaatctttagctaatagaaacaagggtaaacgacctgttgttgaggaggatgactctgattttgctcctccattgtcgaaacgtgggcgagctcctctaaagaagaaatcaaaggtggctgcccatgaaaaaattcctcaagatgatgctcaaaaaaatgaacaagatggagctcttcttcggtataaagtttgatttt

SEQ ID NO: 212378 - DNA, 511 bp, Cannabis indica
tcagatcatggtggagagtatttatgaatttaaagactacttgctgaaagaagggatcttatcccaacttatagcacacctcaacagaacagtgttacataaagaagaaattggaccttgttagacatgatcagattgatgatatgttactcatcattgccattaaacttctagggatacacacttttagaggctacccacattttgaatacaatacccttaaagagcacaagtaatactccaatagaattatggaatgggacaaaacccagtctgaaacatttctgtatgtggggttatcttgctcatgttcttaaactgaagactggaaaacttattcctaaaactaaagtgtgtatgattgtaagatatttacagggaaattgaggaaattagagatgagatttttaaaccagtaattttagcaccattagttgaacgaccgatagcggttaccatagttcttgaaaaggaaatcccagtacattgtcatagtaggaggattgtgaga

SEQ ID NO: 212379 - DNA, 717 bp, Cannabis indica
aagaagcgatttgtaataagagatgaaagcagttgtgacctgttctggttcaaatactcgaattccatctttattctcgattgagtacacctggttttgtttgttcctatgtttgatgctcgtgtgaaacaaggaagtattgctgtccccgtctctaatccagctgattttcgctttttgctgcaggaaagagttgtagtgttgctgagccgttacaaatgtcgtcctagcagcaagctcctgttcatgtagtgttgtgttcagggggtcctcttgcagctttgattggacttcatccaatgttttcttggtttgtatcgatgtggcatgtaaatcagagaaacccaactgattaatctctcttagaaccggtttcagtgcctttagtttagacactacctgatacattagcgtaccatgaatcactttcctccatgtcatttcaacccgcttgtcatactcaggatgagatttccacattctgaagtacttaaacggctttttgccacaattccatttgggatatagtgataagatacatggtgtatgatcaaaagttccttcgttgagaaataacgcttttgcactaggatagttatcacaccattgttggttggctagaactctgtcaatctttgaatatattctatcatgaccctgctgcttatttgtccatgtgtaaaaactagccagtagactttactactccttaaacgt

SEQ ID NO: 212380 - DNA, 685 bp, Cannabis indica
acttaaatgccattaggaaagtaacataaattgttagagagtaataaataaagaacaataatgctttcctcaaagtaaatatggaaacagtgggctggcctcgtagagagagagagagagaggttgttagctgtcgtggagctcacccagccacacctccccacgacacatggtaacaactaaaggactgttgttgccctattttggtatgaaattatactattgagactagtgcctaatattagcacactcataataaatgagaaatttcaattttataggtgttcaatataagtttaatggtggggtgcttaccgttaactcaggtgcgtttggttggaggtaatgaaatggaatagaatggaaaggaaataatttttattatattcctttgtttggttgttttaaagtattggaatagcattccaatgaaatgactattccaatgtaacaagaaaaaaatttaatgatttttttatcaattttttttattgcattctaaattttattttcattccattcttattcctattctcattcttatattcccattcccattctcattcctccttaccaaacgccttagtgttacaatctcttagtcaatcttcacgctcgaaaatatatgttagaatattttttttcattttttttttcacggggtgttcgttattcttataacatc

SEQ ID NO: 212381 - DNA, 796 bp, Cannabis indica
gtccgccgctaatagtattaaaaggcggagcaatagcggcggtctgcccgccgctaatactattccaaaaaaaaaaaaattaggccactattagcggcggaccccactctccgccgctaatacccctgttattagcggcggagagtgcctgccgctaataaggccgccgctaatgtgtttaattgttgtagtgaatcgacttttcaattttaaaaaaagatgatataatatatactacgaatcatcattacaaaacctaaatgtcccataagccaagctgtagatggagtggttacgtacttaactgtactgtcagcttcttctaagagaacatcaattaaaggctgcatgttcaccgcctcagtaacgacacaccacagcgggtccagtcgatctcttattctaaggactcatctttatagatgtctcacaatttatttatcaacattttaatatcatctctctctctacatattctcctctttcaccttattcatggctttcaaccaatacaactaatatatgtgtaatattgaaatcaaagactaaagaccaaacttttgaaaggttcaaaaaggtatttaaaaaaaatattaaaggtcaaaattttattaattatcctgacacattttggcttcatataatgttgatcatctcccaaaaatataattagaagtttctttagaatatataataaaacataattaaccaacatatcatgtatatattatatatagttataagtgagatagagatagagagagagaataaataaaatttattagatgatattgat

SEQ ID NO: 212382 - DNA, 600 bp, Cannabis indica
taattctaaaattcttgcctattctttaaattgtttgagcgaattaattataatgtacacgattataaaaaaaattaaattaaaaacttctcatttatactacaaaaagatatacattgtataatcatccataattattaatataataaataaataaataaataaaaataacactctttcactttcacctcctcttctttaataaatgggttttgtgttttgggaactaccattttcttttttcttttacagtctttcaaccaattgtttcatgccacgtggcacgtgccttttcgaatggtgaagacgaaactgactctttctctctctaactttgactttgtgctgacgtggcatgatttggttggttctttatttctctgatgagcttttcattgtggcatcttcgttactatgttgcttaactaaacacgttggtttcatgagactatttgtcttcttctcattaatattcactagggctagggtttatcatcttcactcaaattttatttatttttttaaaaaaaaatattcatacttattttgggaaaatttgtagtatatacttctcgtgttttggtaaactttctatctgtt

SEQ ID NO: 212383 - DNA, 713 bp, Cannabis indica
aaataaagtgtatttttcacaaaagtaaaatcgatagaaacaagatatttgttaaaatcaagacaataacaatatcctttctgaagacgagaataaacaaggaagacacactttaaagacttatgtgagctaacatctcgagcaaaacaaacactaccaaatatcagataagcaattggaaacaatgacttaccaggaaaaaagttttaaatgggatcacattattaagaacagaggatggcatgcgattgataagaaaacatgctgtgaaaacggcatcagcccaaaacgatttaggaacttgattggcaacaagagtgcacgtgcagtttcaagaaggtgtatttttacagtctactacaccatttcgggatgcagtatcaacgcaagaagcttcatgaagcatgccattagaggtcatatatgattgaaattgagtagatgtatgtttcttggcattatcacttcgcaaagtacaagcaaacacattaaattgctttagaatctcaacacaaaaagcacaaaatttagaaaacaactcagaacgagtttttattaaatataaccaagttacacgggaacaatcatctgcaaaagtaacaaaatatttgaatccaagtttagacaaactaggagaaggaccccacatatcagaataaactaactcaaaaagaacactagcacgcctacagactcgaggactcaaactaaca

SEQ ID NO: 212384 - DNA, 777 bp, Cannabis indica
tatttagtttactttatacattgtacaaaattaaaataaaaactattcgaatgacccaaaataaaaaaaaaaaaaaatactgtaattattctcattagcttctatattctatcctttaaaatatatcactaaaatcttattttatctcaaatttttatattacatcatacaattttttttttattttttctctacattatttaaatattttttattattttataaaataaaatataatagtagtacactcagataatatatataaaaaagttaaacaaataataataattttttttaactcaatgagtagttttctctatatttaattaaccactatttgagaaagaaaaaaaaaagaacaaaagaaaaaattgtctgtgggaccctatctttgctcttttgtatgtaggactttgtttgcatgtttgagattctgatttggtggttcatggctgttatggctactgaagttgaagtggatgatttagtgaccttgacaaataaattggcggttgaaagtgaggaagactgggaagttaatgaggaggacgcagtgaaaattagtgaaaaaaaactcttattgggaaagtgatttctcgacggactgttaatgggaatttttttaaaactatatttggtcgaatatggaagacagtgggcacctagaaagtgaagattctggaggtgcacaaggatcatacttttgtcaaaatttcctttaaaaattgtgataatattcgtatggttctagataaacaaccttggttgtttgggaga

SEQ ID NO: 212385 - DNA, 698 bp, Cannabis indica
tcgttatacatgggcaaaaagtgcgagtaacgaaagtttgaaggaaagattagattgggcaatggtcaatgaggtgtgggaggaatcatttccacaaacaattttggctcatctcgattattatcattctgatcatagagcacttttgattaagatgatgggtaatttggaaatacaaaagttttccaagaagaggaaacgttttaggtttgagaatatttggtctacagatgaagaatgtaagactataattcggaataattggatgaatgacgattctactcccattctagaattacttcagaatatacaacgatgcgctgctaacctaactacttggcaccagagtaaatatggatctttatttaaagaaattaaagaggttcaatcaaaagttgtaagcttacataatttacaaagcgagggagcagcaaaagaagagtcattacaactagaaaggaaacttagtgatttgctcttgaaagaagaggtcttttggaagcaaagggcacgtgttcagtggctacaagcgggtgatcaaaatactaaatactttcatcaaaaagcaaatgcaagaaaaaagaataatacaataaaaggtacgttgagttgtatagtaaattggaaattgtagtttatgagtttaaatagtattgatatcataattttgaaatgttattttgattaaatggttagta

SEQ ID NO: 212386 - DNA, 1109 bp, Cannabis indica
atcgtgactaaaaatatatttggtcacaacaaattgtgattttggtggccaatacttttagcctacggtctttttagtcacaatgtaggactaataatttataattagttataacttttttactttcagtcacaagttttgttgtgactaaaagtaaaattttttgtagtggttgttttataaaaagtagtggtttttagtaaaaatttctgtatggtaagtaaaattataaatttttatccaatctaatattttttataaaaactccacaagaatattacacaaaaaaaaaacaaaaaacatggcataaacatttttatgagaaaaatagtcactatttctaataaaaaaaaaacataatctataaatattttatatttttttaggttaattaaaaaaaaagtaagcattaattgatgacgtgaaaagatgtgggcccaaagatgggccgtgaatggactgggcttactgaaacccaagtccactggtcagcactgcgtactggttggtattggtctgggcaaagttattatcactcgtatccaactgactttcatttatttatttgaaatcgactttcatttatttcacaccaccaaaatcaatagtatttccttttaaattaataataataataataataaagaaaagaaaaaaattgaaatgatacatattttaatcttgtgtttaggaaattagatagatctaaataattccttaaacctaattttagttaaactattattgtttttaggttttttttattgggattataacaaactacatatacgtatataagttttttaatagaaactagatttattatttttctcaccaatttcagtttcagtaataatcaaataaatcaaagtgggttaacatgaatatgatacgattttttatgggtcgagttaagattaagaaaattagacagaaatcaaaaataaattaatacacctaagacaaaatataaaaacaaatcacataaaatataatacaaactcgagacaataacacattttgtaacccttatatcttagagcaatgctcctctaatttatgtggtagtggtgccaatactaataaacacactatatgatgagtaacct

SEQ ID NO: 212387 - DNA, 606 bp, Cannabis indica
attcttcattatttaactttctgtgtataagtgtcattattttatttttgctagtgcgttcagtatatattatgaacatttgagattgaaaaacagagtatattaaaaaatatatgtataatattgtatgtacctttagccacatttttttctcacgctatgacaatttccaattataataagttcacacacatagttttcattactatttcatttttgatagataagtactaatgaatagatagttttcattcttttgttttcaaacaaaaataaaataaaataaagcataagaaaaactcaataaagagggagtactacttctaacctaaccaaacataaagaaagggatcaaaatataaattattaataagatttttttttgaaaaaaaaaaacaataaagattattttcagaataataaaagctaatcaaatacgtatttatgaataaatgtactataagagaattgagtggtcacaccactctttttgactatactatgagtacgtactactatatatattacaatacattattattatttattatattccgatatatatgtagatgtagtaaataagatataatataaataaatttatat

SEQ ID NO: 212388 - DNA, 638 bp, Cannabis indica
gttttatttattgttattttgtaagttagttttgtggaggacctacgattatagagactttaccgataagtttaattttgaatataatttgttggattttgattttcaactttttttttttgtattagtggggagttagtagtaagttgttacaagttaaagggaatgcctttgaattagtgggattatacttgtgactggttctctgtaggtttttattgagattttattttttctttttgttgttgagtttttgtttattttagttaggcgtttaaatttgaatttagcctatcaagtttaatttaaggattcttttaatacctgttattttttggtgttgtttattttttcaagtagtatttcagtattacaagccgaaattttggctcttttagtaggactcaatcgggctcatttgtgcgaaattctaattagagaggtttattcagattcgctttctctagtaacaactatcaacaaaggaagattatttcttaatgagttgggggtgctgtttgaggatgttataactttaatgtttaaatttttggggacagttttgtctcatgtggatcgcgattagaattctgcagcttatagtttggttagatgatgagctatcttgatttgcgaaa

SEQ ID NO: 212389 - DNA, 611 bp, Cannabis indica
aaagattagaagagtagcccacccgtcaaaggtgacaggaatcaaatgcgggctccagctccatcaagactagcttcacaagagtatttctgaagcctgatccctcactccgttgaaaagtcaaacgtgtctaagacaaagaaagatactctgaagatgcatgtgagaacagaatgtgaaagggcgtccgtagtcgctcagggtcatggaagtcgagccacatgacactcagtttacgtgatctcaagaaatcaagcggctcgtcctctgtgtcaaaccacataaagactcacaacagaaaggtaaacacatgcacctatctctctctatagtgtgtccatctacggataatggttaccaagacatggggcctcacctaaccagtccaatagtcaatatttaattatatttaccacataagtgggcttatttcatatgagaaaatcctaatagatacgggtcaaccagatccattagtcaaaaagcctataaataaggctctatatacccctccatgcaaagggttacaaaaatttagcaaggcaagcttgtataaaaaaactaataaatactccatagccaatagcttaataataatgactcatgactaa

SEQ ID NO: 212390 - DNA, 1325 bp, Cannabis indica
aattaaaggttcgttattatttatttatttattgaaaataatgaaaattaaagttccattcaaacacctttaaattgcttttttacacttaaaaataaaaaataaaaaataaaagaataatgccaaacaagcatgcacgtagtatcttaatagaaaaaaaaaagttagtacgaccattaattattaattacaaataaaataaaataaaataaaaatcatcatgacaacaaacaagcattgaaaaaccaaaattttattattttcttaataattctaacaagtggtagagccatagtattttcatataaataaacaaaaaatatattttaagcatttattattttttttttaaaaaaaaagctccatcgtttagttcttattattacttttaaaaaattatagtaattaaaattatacaattacaactacaatactattttttgaataatgataatccatattaaaaaatctttatatattgcacattacacacatacataatataatattagtaatatagtgaacattataatgtaggtggtattttattctagtttatttatttattttaattaaaacaatgataagtattaactaaaagagttaatgctatttaaaatctatttaaaatctgtgttttttaaaaaattatcgagtggaaatttttgttttgttaaataataaaataaaatatatattttttttataataatataaataggacctttattcaaattttaattatttttttttaatgcaaccaacttaaaaataattattagtataaacatatgcaaaaaaaaaaaatgtaaccaattttattatgacacctctaaatcaggttattattaagttttatttgacgaaaaatcagttcaggatactatttaaataaatacaatgtccgattaatttattatttaacaaaacaaataatctaaaatattttttataaaatacaaaatctaaaataataattacactcaactttttattataactactttacttaatactttttttaatagacatactaggagttatagaagctatatattataaattatttataataatgtaaatattgtgtgaagaaattcatgtgacaaaaaaggagagatatatagagtaaatactaataattaaataattggtcacttgttaggtaatggattcttttggagacaagataaattttcggatttttcttttgaagacaatgtcaatctctaattaaattaaaattttatttatttattttatatctaataataggaaatatacccccttaaaatagatatattgatgcacttttatctatttta

SEQ ID NO: 212391 - DNA, 541 bp, Cannabis indica
ataaatattttttaaaatatttagtaaaatgatcaaatattataaattagctaataaaaatataaaaaatacatttattatatatttttttttggaaaaaaaatataataataaattaagttatataaattgtttagtattatatattaatatattgtaataaaaataaataaatatatacaacaatatttgatatatcgtattactaaaaattaatatatcgtagtgataaaattatataccacaaaaaattataataatactaaattgatattcaaaatatatatatatatcacactaacaaaattatatatactattattaaattatgtatactataccaaaaaaaattatatataataaaatagaaattaaaaatcattttaaataaatgatatagtattcacaacaaaaatataccatacaacaaaatatatatacctacaataaaaaataaaataaaataatataatattatttaaaaaaattatatatacatcacctttatatataatagtgtaaattgcagcataaatatcta

SEQ ID NO: 212392 - DNA, 572 bp, Cannabis indica
gagtaaaattactcttaacaagttagattgagttgctcttagattcattctctttctagattagatgccatcttatatctttaatcacataattgtcgaaaaatagagtctaatttcttacataaagacaactctaatacttaccaaatcaacaaagtaaagacaatcaaagcaattaattaaaatcgattgtctgaaatgggagatacagatgtgctatttaataaaaaaaaaaataattaagtgagatggggcggaagaacaactatttcagttctctctgccatatgtcgcttttcatttttgtatatgagttcatgcttctatcgtcttaggggcttaatatttggatgcaccatgctctttagctcatcatctagaagatcaatgcctcttgtgattatgctaaagaaatagtgccacatcaatattaagtttgaggagaccaagataggccgtgcaatcaacattgttggagaccatcataatctcgttctaaatttcatgatctgattataatatctgaaatttaaggtggcatttggttaaagataatgaaatagaatggaata

SEQ ID NO: 212393 - DNA, 1084 bp, Cannabis indica
cagtgtttcgaaatgtaaatggacctgcaaggagcaagaggagatgtatgttgcagaatttttcctgacactctctcagaggctgcctagcaatggtatttcaagttggcgcctagaaagttcaactcatggaaggctttctcctcggagttccatgcacaattctcttcttctcaccaacttccattgcacttaggagatctggtcgaagtgaagcaaagaccaggagaaccttttcgagcttacatcgttagattcatgatggaggcaactaagtttgtacgggtgaccgaatacggaaagttgttcgcgatactggggggcattgaggttctttagaactggaaggacatcaggaagaacgggccagtagattctatgagtgacttccttgatcgcgaaaaaggtttcattaagcttgaagaagccattcaatgagtagaggtggagcaaaaacctaggcagccaaaagctccctctactgggatatcctcctatttcccccaatacccaagcaattcgagctcgggtggtaaatggtccaacaacagtaataggcaaggaaatgggaaaatgggaatgtttcctagtaaaaatgaacaaactcccagggagaattctactaagtttactgcattttctatcctgatagaagatatagaaagtgttacatggctacccagtcggtagctccttacaagaagcccacacccattaaaaaagatgtaagcaaaagagacatgactaagtttttttcgttttcatggggattacggccatgacaccaatgaatgcaacaatctgaagtgggaaattgaatttttgataagaaaaaacaattcgcatgtacaagagtatgtcaaggccgattaaaatcagaaggggcgataacaaccaagagttactaccaccacgagtagatggacatctgcaagctattattggaggtccgcacatagctgaagatttaggcaaagcccagcaaaaggtatccccgaacagtacagcatgagcaacaagaagtagttctggcagtcgaagaaaggaaactgaaaaatattacgggcaggggagcccactataa

SEQ ID NO: 212394 - DNA, 696 bp, Cannabis indica
atcaataacttttgtaaaacacaatatttgaaaggtttggattatataaacaaatattcttgttctatcatgctactacttcgcttacgactttggtagtaagaggtttgtatgataaaaacaaattttttggttctatgaagtcttccaaagaaaaagactcttttgtgtgaaagaatattttgtggggtaaagaattatttggcgaggggtcatctcgaaagtgggagataagaacgatattgctatttatgaagatgcttgaattctgttgtgtgcttgttctttggtgttgtcacctaacatcctcaaggtaggtagtgtggtggcgcagttgaggttcgccgttggggggtggtggggaattgattcatgggtagaggtggtaattcatgttcatgggtcgtgaagcaaatgctaatctgtttattaactatgtcaaaaattaaaactaaaacacaactcatttataaataggtatataaaaattatgcttaattttaataaacttattaacatgtttacaacaagattaacatgtttatatcctatttaactaaaaaaaattataatttacatgtaataaatataaaatttaacagtgtatattttacataaatttctattgtgtcactttcgagttaagtgtgtcaactcaaaaatgatccgtttaataaaagagttagtcgtgtcaac

SEQ ID NO: 212395 - DNA, 700 bp, Cannabis indica
atctgcaccacgaagcacctgtgtgtcacaaagactcggcacgaaagcaagtaaaacacaaacattatataaacgagatatcaaatagtgcataacatacaattttattattcacaataatcgcttatacaacacattcaagcattacataacaactatttgtctaataagacaaactattcttgatgcctcataaatcatccttaccactcgtcacccacgagctttatatgtcacgatcgttgcccgatacagcaaccgataagtaagaaacctatctactgtttcaagcgagtaattacgcattcacaatgaatggtaatgaccgtatctttatctcgatcattattgagccatacacgatagtaatcgttacctcgatcataatcgagtcacaaacaataataatctttcctcatttaacatgcttagcagtgcaattagctttcttacctcagtctactaatcaggtgtgcgcgccaaactgagtagaataaacttcgacgatcccgagtcctatgtcacgacaacaaaatctgataaaataacttaatcaaactccaaaacaaaccctaattccatatccgaacaaattctaactccccactggttcccaataacttaaacatcactaaaataccctaatctaagctctgaaaaacaccccgatccaaactaatttcaaagccaaaaactaggg

SEQ ID NO: 212396 - DNA, 621 bp, Cannabis indica
aaaaaaaagaagggaaatgatgtataaaaagattgatgtaatacatcaatcattacacgtgtcaaaaaagcatgttattgtgtgtgcatgtggtaaaaatagtaaaaaactaaaggaaaagtgtataaatgttcaggtaaccatgtagtggtattttggtaataaaattagcattttatatttttaatataaaaatttcttttaaatttgtacaaaataatattgtgaacaattttcgtaaaaatagtacatcatgataataataattagacatagaggttttatagcaaattgattattttttgttgcctctatctaggttagaaattgggttcaggttttatgacaaaatatggaggcgagattattatttgtactattttaaaaaataataaatttaatttgttatttaataaaataaaatatctaataaataatttttataaaatgtaaaatttcaaataatatttacctattattattattattattattattattattattattattaaaataaatatataaaaaccgacattgccgtaccatttttattatatacaatatattatattacaaggatgatatagctcttgaaaatacgactaaattatcatatag

SEQ ID NO: 212397 - DNA, 666 bp, Cannabis indica
tgttgactcggtcaactcagtccttctatataatttttctttatgggaaaaatttacataaataaatattttgggaacattttcctttttaaaacaaaatagaaattataaataaataaatagaagatgaatgaatcttgttgggcagttaaatgactacattgtatgattgctattgttagttcttttttttttttgatgaattaacgtatacttagtaaatctcctagaaattattattaagttatgaaattcataatcctactttatttaaatattcaaatttttaaacttattttgtagtaataatataaaaaaattaatttttgtatgtatattgtgtttttcttttaaaaaaatattttatgtagtttttctttttgcttataaattttaattttttttcaaataaacaaaagtttattttatataatttttctttaaatttagtgagaagttgttaaaagaaaattttaatgttaatgaaagaatttttatattaccgtaaacttgaataaaatatttatttataaataaattaatgaaaatattcttatacaatatatatgtaaaaaaaaattgatttggttggcagactgtttgggtgtacaacccgaaactcgatgaccataaaaaatcaactcgcaaattcgtccgaaagtatgc

SEQ ID NO: 212398 - DNA, 758 bp, Cannabis indica
atatacaattcgaatcactattttctacaatcccttataccattttttaattttttctttaaatttacggtttgggttgttctggtagtttatatatgagttgctatgtaaattttggttgctctgttagttgttatgtgggttgctatgttaatttttgtaaagatgtaaaaaaaaaaaaaaaataaagtgtaaaaataaaaaaatccctataaaaagaacataataatatatagtttacccgtaatacttataattttataatacttttcatttttttttagaaatatcacacttttactttttatttttacaaaataatagaaatatatttttttggcaaaaaaaatgataacaggaagatatattttagatatgtacaataggttaatattttttttaatagtgatcaaaatcacacatgattaacaatgcagtaatctacaatcgtcggcagcacctcctcgaatcagtatagctcatcctctaacaaaagggcatgctttgccaaaccatgcattgtaaaattcttatcgtgagctacatgagacaaaaactcccctaaaaaatttagacaataaaattataaaatcttcaaatagcactcccagctcgttaaaaaaaactaaaaattataaaaatcttcaaataacacttccagctcattaaaaaactacattttcctttgttgataattgttactagagaaccaaaagtttcgacttataatacagaaaatactacctgaaaaaacaaac

SEQ ID NO: 212399 - DNA, 725 bp, Cannabis indica
ttttttgaggtgattttagatccaaacaatcccataaagtgtgtcttcaattcaagtgttcgcgaagattaggctatcatcgctcgtaattactcatagaccttgtttctaagcaactctcatattggtagctttgtgtattgctcatgctttcttggtctgcataacgttgaggtctacttctctatcacatttgcctacctaatcgactgtttccttgagaccttaagtgtcctgaattagaacttgctgtgttctgtatcggccttctcctttggaagaggttagatacatgccctctatttagatacgtgtatacatcttccttttctgatcgagaatgacgatgagggtgtcctggaggtagcccacttgtcctgggttggtttcaagggtttttatcattttcacaagggattccttgatccctaggtcgaggctgtctcgcttcctcattcttgcgagaagcttctagtacgtcattttgttcgttaccttagttcataaatccttgggatccttgaggaacgtctcgtcgttgctcttgattatttgtttgattatacattggaacatccctcgtacacccaggctgttcttcttaggtgttttgaggatttccctagtttgtttcctctctcctggttctgaacctcgaggtctgcctcgtggtcttcttaccccaggatcaggttgattctaaggatttgttccttgtgttgccc
